United States Patent Application Publication US 2005/0228172 A9 - sequence listing, part 43

SEQ ID NO: 163905 - DNA, 567 bp, Homo sapiens
tctctacattctttcccacttttgatattgctactcttttattttagccactctaagaggtttatagtgatattgcattatacttttatgtgaatttctctaatgactgatgttgagcgtcttttcatatgtttatttgcattatatatttcttctttggtgaagtatcttttcatgtattttgctcattttataattggattttgttttaacgggtgagttttgagagttcttcactttttcctgatagctcagatatgtggtctacaagtgttttctcttattctgtagcttatattttcattctctttagagggtccttcacagaagaaagttttcaatttttataaactccaacataccaaatttttattttacggatcatgcttttagtgtcaaatctacaaactctttgyctacccctggatggcaaagattttctcctttttttttttctcaaaagctttgtggttgtatgttttacacataagtctgtggtccattccgtgttaatatttgtgtaaggtatgagaagccaaagttcagcttgttgcctatggatatatg

SEQ ID NO: 163906 - DNA, 620 bp, Homo sapiens
agtatccagtgatatggtttggctgtgtccccactcaaatccccaggtgttgtgggacaaaccatgtggagataattaaatcctgggggctgtccccctatcctgttctcatgatagtggttagttctcactaaatctgatggttttataaggggctttccccctttggcttggcacttcttcttgctgccgccatgtgaaggaggatgtgtttacttccccttccaccatgattataagtttcctgagggctccccagccatgctgaactgtgaatcaattaaacctctttcctttataaattactcagtcttgggtatgtctttataagcagcatgagaatggactaatacatccagggttttagttgtgctgagaaagaaaaayaagaagaagtaaatttatttcatctttccagaatttgaagtttctgaaaatgctcttttaagcagaatatgatggacattcaattggccaatcaactaccaaacataatattttggtttatggaatctaccatttttgaagtcttggtgggaggcagagccttaccttgcatttatagaagtgaaagctggtgtctgggcatatgacttagtcttgttcaatcagatgccacc

SEQ ID NO: 163907 - DNA, 620 bp, Homo sapiens
agtatccagtgatatggtttggctgtgtccccactcaaatccccaggtgttgtgggacaaaccatgtggagataattaaatcctgggggctgtccccctatcctgttctcatgatagtggttagttctcactaaatctgatggttttataaggggctttccccctttggcttggcacttcttcttgctgccgccatgtgaaggaggatgtgtttacttccccttccaccatgattataagtttcctgagggctccccagccatgctgaactgtgaatcaattaaacctctttcctttataaattactcagtcttgggtatgtctttataagcagcatgagaatggactaatacatccagggttttagttgtgctgagaaagaaaaacaagaagaagtaaatttatttcatctttccagaatttgaagtttctgaaaatgctmttttaagcagaatatgatggacattcaattggccaatcaactaccaaacataatattttggtttatggaatctaccatttttgaagtcttggtgggaggcagagccttaccttgcatttatagaagtgaaagctggtgtctgggcatatgacttagtcttgttcaatcagatgccacc

SEQ ID NO: 163908 - DNA, 607 bp, Homo sapiens
agatcttgcccaagatcgtcaaggcaatacatgtagaagtttgcaagaaccacagtgtagtgagcttggggtttcccctaaaacagatgcagcttagatcacaacacccaagtccttttgagtatctagaaagcctttcccagaaggatgagtacaaacaagcccagattgagaagactacaataaatacctaacycttcaaggtccagacactaaaggacatctacaagtatcaagaccatccagaaaacacgacctcaccaaaagcactaaataagaccccagagaccaatccaggggaaccagagatatgtgacctttcagacagaaaattcaaaataatgattttgaggaaaacaaaaaactgtaagataacacagataaggaattcagaattatatgagacaaatttaacaaagatattaaaataatttaaaagatcaagcagaaatgctggagctgaaaatgcaactggaatattgaagaatgcatcagagacttaatagcagatttaatcaagcagaagaaagaattagtgaacttgaagacaggctacttgaaaatatacacggtctaagaagacaaaagaaaaagaataaaaaacaat

SEQ ID NO: 163909 - DNA, 539 bp, Homo sapiens
agctccagttcaccattttgcctgccatctctgggagtctggaattccccacagcacagcacagcacagctgctgtgacagatcgtggccagactgcttctttaagtgggaccctgatccatccctcctcactgggtagttcctccctgtggtaatttcagcaactccgacttgggttttacggacagaacgctgatctctccctgagacagagccaccagggggatgggtggccaccatatcggcagatcagctggcagcctttcctgcctgctggctctggaaagtcctggaaatctggttgaggagggttcctgccagtgcagaacactcaygttggcaaggggcaggcagactgcttctttaagtgagtccctgatcctgtttctcctgactgggtgagacctcccaacaggggtctccagacacctcctacaggaacatttggactggcatcaggtcagtgctcacctggaacggaactcccaagtaaggagcaggctgttttgcagccttcactggtgagacctccaggtgtg

SEQ ID NO: 163910 - DNA, 587 bp, Homo sapiens
taactggtgtattacctactatatgaccttctagggacatatgattggtaagggaagaatgcctccagtgagcatgtgtacagctccagtaaacacattgtgcatgctcacctcccaagtgcgggtgggccactgtgcatgcagacagcccaccctaagggaaaaatcaggggagaagggatgcaagaccccagaaacatgccaacatataaaacccgaagtcaaaacgtcaaacggtgcactcgatctctcaagtcacctgctaggccctcttccaagtgtgtttatccttgctttcattcctgctttaaagctttttgataaactttcayttctggtctaaagtttgccttggtctcttattctgccttttgcccctcactggaattctttcttctgaggagggaagaattgaggttgctgcaaacctgtacagatttgctgccaatagaatatttggtgctgtgtctccaatatgttccactaacataggtgtcagaccttctgggtgttggcacacttctacccaatctttgcatctcagttaatatctccaatttccatatagttggttaggctaaaaactg

SEQ ID NO: 163911 - DNA, 560 bp, Homo sapiens
gttataatctaatttatcaatatcttcttagggtaggaaaacatttcatacctatacagtgaaagatataaagtttttatcaattacagaaatacagagaaagctctatagtttcagttctgaggttaaaaataaacagagcaatatataaaccttccagtccacatcctaaagatgtattcttttttccagcaggyacaaaattcttaattgatttgagctcacaattgatacagaggcaaacaaattatatcaaatcagattctctacctttatctaacagaaaataaatatcatcatttgacagagatcccaaatggtagcatcataaagccaaatactttatcaattttgctaccaatagagacaaacctgtagtccatctgcgaaccagaaaaaaaaaaaatactacaaatcggaaaaaagtaacaaatgaacttagagaaacagggtaagcaatgttaaagttgtattgctgcttacaatatattcggggagtcaggaagagatgtgcctgagattaaaaaaaccctgaggtagtcctttcaagtcattcagtt

SEQ ID NO: 163912 - DNA, 562 bp, Homo sapiens
gtgtaacatgttatctcattatggctttgatttgatttctctgatgattagtgatgataaacattttctcatgtgtttgctgactacttctatgtcttattctgagaataatctcttcatgtccttttttgactttttattgttttttatcttactgagttccttgtaaatttaacaaataatattagtcctttgttgaatgcatagcttgcaaatattttctcccattctaaatgttgtgcatttactctgttgattatttctttttatggtcaactagtttttgacaaagttgtcaagaaarcacaatggagacaggatagtctctttaattgtgttgggaaaactaaatatctacatccataaaaatgaaattggattcttatttcaaaccatatacaaaaatcaactcaaaatgaattaaaaacataaacataaaacctgatattatgaaactaggagaaaacatgggggaaatactctataacactggtcaggcaataatttttttggatatgagatcaaaagtacaggcaagaaaggcaaaaatagaaacatgtaa

SEQ ID NO: 163913 - DNA, 641 bp, Homo sapiens
aaacccattaaaagaataacatctctttttgaaagatgataggtgcatataaaccttaacattttcttagtgtgatataaatataaacttcaggcagcaaggtgtactagaaaaagtatggactttgaaacacacagattagaatccttccctagttttctctgaaaattagttttgtcattcacaatataggaatgataagcacttcttcatagcatgatcaggagcactctggacagactcgtaccagaaattaaattcttatttctgaaagtgacacacttctgctcatattttactaattctagcagtcatatgtccatgcttaacttaaaaggaaagggaaagtaaaatccacatgtggatctaaaaaatggagaatgagaggtattggtgagcaccctcatggataccatagtgatttaatttaatcagacatattggccaggygccatggctcacgcctgtaatcccagcactttgggaagctaaggaaggtggatcacttgaggccaggagtttgaaaccagcctggcatggtgaaaccccatctctagtaaaaatacaaaaattagctgtgtgtggtggcctgtgcctgtagtcccagctactcatgagaatcacttgaaccagggaggcgt

SEQ ID NO: 163914 - DNA, 584 bp, Homo sapiens
tggattaggcaatggttatcagtgcagatcttgttaagtagctattgggattgtgacaccatagcttgggctgttttacttcagaagatgtatatagagttctgaacaaaggtacattttagrcctacatctaaactgaaggaatttcctacaccaccgctctctcctaatcaatctacagatcttctaatgtagcaacagtggttttattgcacattggaaaattggaagaagaatgtactcaggtttttcctttgcctaggtagtcttagattcttccctaaagtgatgccggttaccattgttttctcctgcacaaggtagggaacccatgaataggcaagtgggcagggcacaattgagtttctcaggtacagtgagccaggctgccactattgttgataccatcgatgtctcaggcccatgctaggtttttgaatgaatcaaaacatagaaaggcagtaaagctacatgaaattaatataataaatttgtagtctttacatactttctttcaagtgtttacaacaatgcgtgtcaacctgaatgaaagttgattcccagatctcgtgacagaagagaaa

SEQ ID NO: 163915 - DNA, 523 bp, Homo sapiens
catttcaaattaacttgccaaaaaaatatgtttgttgtgtctagaagtttcattaggtgtcaattttggcagatatcttttggaaaattcttgtgacaatattaaagtgaatgcttggaagtcacgccctgtgacaagaaaataaaaattggttttctaatcaagtaggcatatataatttaggtagtaaatgaccaaatggtgtgcgttgctgttttttttaccaattacagaagtaatttgtaaagtagagaaataactgaatctttcacttgcaaagataaatctatttataaataaatctatttgtctgcctatagcatagtcatcttaagttatgaatatataatattctcccagagaagtgtgtgtgtgcacacgtgtcccctcctaagtttacttagaaattaaataacaaatgtcaatttatggccaaagatgtttgctacatcatgtttattacttggctgagaatactcaaatgctcacctaaartatgaaaaaaaaaaaaaaagcaatagat

SEQ ID NO: 163916 - DNA, 578 bp, Homo sapiens
tgacctctgtaactatttagtgaggaaagaaggttttggggtgataaatattgaacttctagaagatgcttgaggtgtcacatttctctmttccatatagaggtcttacttcacaacattaataaaatgtcccaaatgactatgaactatgtttgtattttctagatactcttacatgcaatgactgctaaaggaagaggcctggactgtaacagagattattctgtgtctttgttttgtgctactctatcagaataccacagattaggtaaactctaaagaatagaagtttttttttcacagttctggagactgaaaaccaataactctctggttccaagatggctccttgttgctgtatcctttagacagaaggaacactgtgtcctcccctgacagaagagagaaagagaggaagcccataagccctttttatagtgtcactgatacattcatgagggcagaactctcatgacctaatcgcctcctaaaatgtgactactctcaacactgttgcattagggattaagtttccaaaacataaattttgaaggggacaaaagcattcaaaccacagc

SEQ ID NO: 163917 - DNA, 502 bp, Homo sapiens
cctcatcctgtctgctgttagcaagctgcaaagcctgctggtccttcctcttcctcctcttgtgaggccctctggagaaatttccatctgaactgagcactgagaacagatccacctgccatgagcaatggcctgtgtcaattatttggatacagggcagtggaagggacagatttgttttccttgatggcagccagaaagctctttgtcaaatctccagttccccaccatggtgtaggtgttaatacctattccagctccaaggtatgatggtcctatggttgtgtttcctttctttgtctcagttttaatttttgcagtcttattttgtttagtacacccatgcagactgccataaacccttcctgaaakagggatgggtgtaaagagatgaatcaacaaaccacagaacttcaaaaggttccagaaaaaagccaccactggcacaataacgggttactcaatcccccaaggcttttgaggaagactagggaaggaaggg

SEQ ID NO: 163918 - DNA, 454 bp, Homo sapiens
ttggcttaattgggagattgctctgggcagatgacacagattgaaaaggtcatacatttttaataaagataacatccacacaatgtaaaataacaagagaccaagaaatgattttatgatgaaggggatctaagtgtctcgaggaagagctgccttttctattttccacaaaggcgctgtgtggattgctacaggcagcaccgagtgcctactccatgcaggctccatgcagactggagggggatcaggggctctgctgtaacagcagtggtttaaaattaagcatttaaggtgtacagtttagtggaattagttcattaacaatgttgtccaactgtcacctctgcctggcttcaaaacatttcatcagcccccaaaagaaaaccccatacacattacacagccactccccattcrtgctagcccctgataaccatcagtctgtcttctgcct

SEQ ID NO: 163919 - DNA, 579 bp, Homo sapiens
cgcaacaggtggtgggccggatttggcttgtgggctatcatttgccagtccctggtttaacagatgctcagcctaccaaatatagtattagtcttccaggaagagtcatctgattagacattttgtcctgtgtgacctcgtaagccaccaattcttattttacacacacacacacacacacacacwctctctctctctctatttataattggtctgtgtctctgaaattctcatcatgttctgaaacgtcaactgtttcctgatctttaatcccagtctccatgggccatgtcctctccctttcctcctcctttttaggaccaactccataatttgcagggctcactacagatgaaaatgcaaggccccttgttcaaaaaatattaagagtgtcaagacggtgaaagcaaagcataaaatctaacatggggctttctgagcatgagctcaggttacaaagtccaccaagcagaccctgctggtctggcttgtattaccatcagcaaacccagaaagttttctgcctaatttcttgacaagtccagaaacttgccacctgcgagctgcttgaagcgtttc

SEQ ID NO: 163920 - DNA, 439 bp, Homo sapiens
gaattctcctttccctgccttctcaccatcttttcactttggtcgctgcaaatatcaccggggactggctcttggcagcctcccasttcctctgaaaggtttctcactctatccatgccacacttggaggtgagctattaatttgcgctttgtggctcagctcgattctgatttagggcaacataaaccctcctcaaaattgcgaagaataaattagtttactaatttcgccattaagagtttatcaaagcaagcactatttcaatcgtctcttaatcaatcaccattttccgtgtttatctcctgttcaatttttaccagagggttctatacacatcaatttgtctgatgttcttcctacatatgttttaaattactttatcattgtataaatttcacagccattaaaaggctctaacaccagaatgactgacatggt

SEQ ID NO: 163921 - DNA, 439 bp, Homo sapiens
gaattctcctttccctgccttctcaccatcttttcactttggtcgctgcaaatatcaccggggactggctcttggcagcctcccagttcctctgaaaggtttctcactctatccatgccacacttggaggtgagctattaatttgcgctttgtggctcagctcgattctgatttagggcaacataaaccctcctcaaaattgcgaagaataaattagtttactaatttcgccattaagagtttatcaaagcaagcactatttcaatcgtctcttaatcaatcaccattttccgtgtttatctcctgttcaatttttaccagagggttctatacacatcaatttgtctgatgttcttcctacatatgttttaaattactttatcaytgtataaatttcacagccattaaaaggctctaacaccagaatgactgacatggt

SEQ ID NO: 163922 - DNA, 421 bp, Homo sapiens
tcagtttcctcttttgattcctgaatatataactagaatagacatacttgacaactggcaaaatcaccatgctggttctctgacacatggattgggagccaccatgacaacaagggctaagtggaagtccccggagctctgcttccctaccaaaatagaaaaccagaaacaatactgcatcctgggtgaatctgcaaaaaccatgccaccatsaaagagtagaaaatgcaggagaggtgatgcctatcacatccccacttaattcacctagaaaaagtagaaaagtaaagtggatctcggaaaatcttggaaaatttttatttcaaacatgttatcaattttaaaatgtttgtgtagcttgtttttaggttttccttttactttgggtttcttttactcttttctagcttctttgggtaga

SEQ ID NO: 163923 - DNA, 421 bp, Homo sapiens
tcagtttcctcttttgattcctgaatatataactagaatagacatacttgacaactggcaaaatcaccatgctggttctctgacacatggattgggagccaccatgacaacaagggctaagtggaagtccccggagctctgcttccctaccaaaatagaaaaccagaaacaatactgcatcctgggtgaatctgcaaaaaccatgccaccatgaaagagtagaaaatgcaggagaggtgatgcctatcacatccccacttaattcacctagaaaaagtagaaaagtaaartggatctcggaaaatcttggaaaatttttatttcaaacatgttatcaattttaaaatgtttgtgtagcttgtttttaggttttccttttactttgggtttcttttactcttttctagcttctttgggtaga

SEQ ID NO: 163924 - DNA, 535 bp, Homo sapiens
tgtactattcctgaaacaggataattatttgtaagtgggatttgaattagttgtaaatgtayattgcaaactctagggcaaccaccaaaaagtttttaaaaaagtataactgataattggtatgctaagagggaagaaaatggaattatttaaaatctcaaaatcacaaagacagaaaaagagtgaaagacaaaaacagtaacaaagaaaaagggcaccactttaaaaagttttaaaaaagtataattgataattgatatgtcaagagggaagaaaatggaattatataaaatctaaaaatcacaaagacagaaaaagagtgaaagacaaaaacagtaacaaagaaaaagggcaataaatagaaaataataacaaatatgacaactattaatccatgatattaaaaataatcattttaaacattaatggcccagatggatgaattaaaagaaaaaatatatcatgctaaccctaatgaaaaggaagtaggaggagttatattaatttgaaacagagcagacttcagagcaagttt

SEQ ID NO: 163925 - DNA, 615 bp, Homo sapiens
tgctagttggtttcactgttattctcctcatttaaaagtgaacaagaacccaaatatcctgaatctggcatgaatgccagacttacaaagctcagsgtgcagagtgcttatgaatcagtaaccaggaggcactcacctgcacactagccagttaaaattgctaatttttacacttctgaaatgctgtttgaaagcataaaataatacaacaatctaaaacaacaagcagtctcctgcctggtgatgggttaaagctatgtattttaccttaagaaataaaaatcagaagtatttctctgttctatcaagttactacttataatggcaaaacagaagtcaattctgtgcctataaaagctccaggacatcgctataaagatcaatctggctgtatttttgaaaagaaaccgctaacactgaaaaacactgcacaaaaccatatggtattcgaataaaacacacatttgctgaaaaagaataatttgtatattaattatacgtatataggatgtatgataccaatctgcaggtcttgttctgcaaaagacccatacatagaaaacaagtctttttttttggaaaggaacccaactggaaaagtagcatttacaaccc

SEQ ID NO: 163926 - DNA, 549 bp, Homo sapiens
aatgtggtgtattacattagttgatttttatatattgaactattcttacrttccaagataaatcctatttggccatagtgtataattcttttactattctgctgaattaagtttgttagtattttgttgactttttccatcaatgtaaataaggaatactggcctatacttttctttctttgcagtgtttttatgtgtcttttgtaccagagtaatgctggccttatagaatgagttaggaagtgtgccctcctatttttggaaaagtaggatttgaaggatcagtattgttctttaagtgtttggtagacttcaaagtgaagccatcatgtctaagattctttattgttgggagatttggattactaattcaatctcattactagttacaggtctactcaggttttctatttcttcatgctttagttttgctagattctgtgtttccaggaatttgtccattttgtctaggttatccaatcattgctgtataactgtccacagtatgctcttatagtcatttttatttatgtagaaatggtagtaatg

SEQ ID NO: 163927 - DNA, 549 bp, Homo sapiens
aatgtggtgtattacattagttgatttttatatattgaactattcttacattccaagataaatcctatttggccatagtgtataattcttttactattctgctgaattaagtttgttagtattttgttgactttttccatcaatgtaaataaggaatactggcctatacttttctttctttgcagtgtttttatgtgtcttttgtaccagagtaatgctggccttatagaatgagttaggaagtgtgccctcctatttttggaaaagtaggatttgaaggatcagtattgttctttaagtgtttggtagacttcaaagtgaagccatcatgtctaagattctttattgttgggagatttggattactaattcaatctcattactagttacaggtctactcaggttttctatttcttcatgctttagttttgctagattytgtgtttccaggaatttgtccattttgtctaggttatccaatcattgctgtataactgtccacagtatgctcttatagtcatttttatttatgtagaaatggtagtaatg

SEQ ID NO: 163928 - DNA, 598 bp, Homo sapiens
acttgtgtcttcgctagtgagtatttgcctctagtaacccatgtccctcaaaataaaagtcaggaagatattgagcactttggatagtcttataagactatcaccttttttctaacacttttgtttctttggatgacacatctcattagagtattaattgctaaacttcctccctattcaaaccaatttgctctaaagtcaacatcaagtttatgacttgtctgttttgtcagaattgattttttatttttattttttgtggctccgaattagaaacttcatagatatgctctttttcctttaataaatyacttaacattgacaaaggaaaaacaagaaagttgtacattttatttgtaagaaaaaaaatggagaagtaattttgatcactctactcaaagttgccgttttcattttctgggtgcatttcatttactatgtctgttttcatataatttaatacatagcgagaaaatcaaaggatgaaattacaatgcaggtgactggagttaacatctcataacatgaaagatgaacatacatctgtataattaaattttcccagggatttgttggaaaattattaaaacggaagctt

SEQ ID NO: 163929 - DNA, 611 bp, Homo sapiens
tcagatatcagaggtcaggggtagccaatgagaatgccaagatacacatgtgcgagacccagataaacccctggagtttgtggaacaacttgctggcactctttccaaggggagaactagatcggagtgctcatctgggcacatgagtgttccagttgctatgttagtctgtttaaaaacaaaaacaaaaacaaaaaacactacagttttctttaaaaaggaaaatggaaaactgttacttaaatggcagtatctgcttgggttcacttttgcttctttttgacttggagggttttgactagaagaagcacgagattaaaggaacaattgttggcagaaaatatagcgtgtagtcatgtattgctctcaggctgtactgtcaggttctaaagtaactaggttcagtgtaaaactcagatcacccagtyagattgtccataaagtactgttagcaccattctgaacagtaatactatccagagtaaacattgacaaactccctgtcatacagaaggacaaaaggcaaatcagcatgtcagttcctgattctccacaattttggtcctcaaagataaccattaaatgtcaagaagaagagaaatcagtgggat

SEQ ID NO: 163930 - DNA, 615 bp, Homo sapiens
tgtacgaggtgtgtgtcctaaacacactcccggcagctctgtctttggaaaaggttgtatacttcttgaccrtgtgggactaatgaatgcttcatagtggaaatatttgaaatatattgtaaaatacagaacagacttatttttattatgagaataaagactttttttctgcatttggaaaaaaaaaaaaagaaatgcttgaactaaagcttcccctatgctggagaagtatgaagaaagatatacctggagacattagaacagcgatgggaaccattgcaactcgggtccatctttgtaacatgctgaagacaagcagaagcacatgcacgagggacagaggagctactgtgcactgctgtgaaattgcccagagcataaaacctgtgtaccctccttcacatcaaccaagttcactaggacataccaagcacatgcgtgtgaatgaggatgcaaggcaagagaatggaactccagaattcacagatagaacaaatggatgagaaatatttcatgcaaaatataaagtgtcctgaggatctgggttccatttacgagaggaaatgaaagtgctaaaataaattttatcttccttttaaatgtcagcatgtcagc

SEQ ID NO: 163931 - DNA, 542 bp, Homo sapiens
tgcccaattacatttccgtagagtggcattatgtgtaattagtgtccatgagtcaatgaacgtatttgaattaatattcttttactgatttctcatagcaacaatacagaatcattcgtgtcaggctttggaacagagtcctgataactattatttaccgcagacatcagccactgctgaaatttgagtggaaacagctatatctayatctggtacttgcaccaggtggggatgaagtaacttgctgtagcaccgtgttaaaagattaatccattctaatggtttttagttgcagtagcatattcacctttgtttactgctgtgtggcagcagtcatgctttcttgaggtagcagatccaggaatatgtgtggtgaagagttattgtgaaaataaataacatccttacttttcccccagtgcaactttgttagttttattattattattattgattattactacttctattactactcattcattcatcaaatatttcccaaatggctattattttatggtaacatggagtattataaaaat

SEQ ID NO: 163932 - DNA, 583 bp, Homo sapiens
taccttcttttcaagggcctgtttcccttgcctccgtaacygttgtgggtattgatggccaggcttctaaacctcttaaaactccccaactctggtgccaacttagacaatactcttttaagcactcctttttagttatccccacctgcccagttcctttattaggctgagacactttaactaaattatctgcttccctgattattcctgggctacagccacacctcattgccgccttttcccccattcaaagcctccttcatatcctccccttgtatctccccatcttaacccacaagtataagacacctctactccctccttagcgaccgatcatgcaccccttaccatcccattaaaacctaattacgcttaccttgctcaatgccaatatcccatcccatagcacactttaaaaggattaaagtctgttatcactcacctgttacagtatggccttttaaagcctataaactctccttacaattcccccattttacccgtcctaaaaccagacaagacttacaggttagttcaggatctgcaccttatcaaccaaattgttttgcctatccaccccgtg

SEQ ID NO: 163933 - DNA, 478 bp, Homo sapiens
cataaacagtgtctcatggactatagaaacaaacaaacaaaaaaatcattttaaatccctcctctgacattcctagaccagccaccaggacaattccaaacaaggcaaagactagctacctatttccaaactcatttcctgtatctcccaggaaacagctaaatttcctttcccagcttcccttgctgcaggtgtggccatgtgactgagttctagctaattagatgtcccataaagccctccctggacatrctctgtgcttcctcttcttcctccagggagacacacattgtcaccaaaatctatagagaatgatggagccacagggtagaaggagcccgggtcttggcttctcactggctttgaaatccatgtgttaccacaaaggggtcccaatccagaccccaagagaaagttcttggatttcacacaggaaagaattcagggtaagttcactgagtaaagtgaaaacaagttt

SEQ ID NO: 163934 - DNA, 580 bp, Homo sapiens
gactgagttcaaaccctaactccagtgcttactacctgtttactacctgtgtggccagtgtctcaatgtcctcatttctaaggtgggataacaatatctacatcacaaaggttattttgagctttaaataagatacagattttaaagtgtttaacatagtacttgggatgtagtaagtgcgtaataaatgttaagtatatgtagatatttatttatatatctcctagagaaaattccctgccccaaaacatgtgtttctaatctaaataactaaataactaggtgataaattcctgagtrtaagattagaagtctgctgaaaggggaaggagattgtggagaggactctgttgagtgtcatcctctataatagtgtgaccaaagaaggctgtctaaactgtgcttcacatagaattttccagttctatctggacattccaaaaagaggggtcagaaatgaggccccaaaatagccttgtgtatgtgtttatgtttataaatggttgatttattacatagtaattggtaagtttatggaagtatgtaaaagatatacacaaaaggcaaatccactttattg

SEQ ID NO: 163935 - DNA, 580 bp, Homo sapiens
gactgagttcaaaccctaactccagtgcttactacctgtttactacctgtgtggccagtgtctcaatgtcctcatttctaaggtgggataacaatatctacatcacaaaggttattttgagctttaaataagatacagattttaaagtgtttaacatagtacttgggatgtagtaagtgcgtaataaatgttaagtatatgtagatatttatttatatatctcctagagaaaattccctgccccaaaacatgtgtttctaatctaaataactaaataactaggtgataaattcctgagtataagattagaagtctgctgaaaggggaaggagattgtggagaggactctgttgagtgtcatcctctataatagtgtgaccaaagaaggctgtctaaactgtgsttcacatagaattttccagttctatctggacattccaaaaagaggggtcagaaatgaggccccaaaatagccttgtgtatgtgtttatgtttataaatggttgatttattacatagtaattggtaagtttatggaagtatgtaaaagatatacacaaaaggcaaatccactttattg

SEQ ID NO: 163936 - DNA, 468 bp, Homo sapiens
ggaagaggttggaacagtttgaagggatcagaagaagacaggaagatgtgggaaactttggaacttcctagagactcgttgaatggttttgaccaaagtgctgacagtgatatggacgatgaagttcaggctgaggtggtctcagatggagatgaggaactcactgggaactggagcaaaggtcactcttgctatgctttagcaaagaaactggcagcattttgcctctgttcaagagatctatggaactttgaacttgagagagatgatttgagacttgaacttgtatttaaagggaagcagagcctaaaagttcagaatatttgcagcctgacaatgcaatagaaaaaaagaaaaagcgtcattttctgaggggaatttcmagccagctgcagagatttgcaaaagtaatgaggacccaaatgttaattgactagacaatggggaaaatgcctccagggaatgtca

SEQ ID NO: 163937 - DNA, 492 bp, Homo sapiens
ctctgctgcccggtggagttgtctcagttcctgcccagctgcatttgatagttattatggcttcagtgagccttctatatctggactctacccttttctaaacaagaggttaagttcagctatcttgggattactccccctttgggtattggctttgtattagaagaaagggcttagaaatagtttgtattttaggtttctgggtactggctatgattccactcaatatcattgtaaaatgctgggcactcttattaagcagttgcatagaacttwtgagtggttgctcgtggaggttggggtgcatattttataattggaagactgatataatgaatttgtggggtatccagagaagtggacaatggcagcaatagttataccccaatagcccttctcctggttaccttaatgctaataaattattcttaggatagcccttggccacacaaaataaaggctgaaattttctgagttccaaacttgtgatgg

SEQ ID NO: 163938 - DNA, 578 bp, Homo sapiens
catagtagtcgcttaatggatatttgttgaacaaatgagtcaaactttttgtttagttccctgctgccccatatggataaccttgattatctgaacatttaggggaaatctcatggaggcacccttttatagtacagaatttccctcatgccttctttgctacgaggtaaatttaaatcatgggtgcaaggagtcagacatgacagaggcagagattcttgattcaacaagtatgtatgtctattttctcttagaagctcaaacttttgtatgttcyacactttatatcacgcacaatgatggaattatgggaaagtgaaacatcgtagttttgattatagtggtgattaatttggcaccggtctcaaagccgaaaagagaaagggggagaagaatggggagagtccctgaacagctgatctatgctgccaaaagacgcagcttctcaaattacttggaggagccagagatcccttaaataaaaggagaggtgtctaggtttgtgcatttaaagagacatattcctttaaagcaaatttttcagcgctgactacacattagaatcactaggaaagatt

SEQ ID NO: 163939 - DNA, 391 bp, Homo sapiens
gtataatcctttgggtatatacccactaatggcatcaaatggtatggtagctgggtcaaatggtatttctagttctagatccttgaggaatcaccacactgtcttccacaatggttgaactaatttacagtcccaccaacagtgtaaaggcgttcctattaactcttaaattgaaataaaaaaagttaattctctgacaaactcatctttttttcccaaataaaagaataagcaaatctttcatttcaatctraaactaatctactacaatgtattggtttttccttttaataccttcaaagattgtgataaaataaaagctagaaatttgtatttaacttcttttcagctacctttttcttgccatttagtgaaactgctatcatacttc

SEQ ID NO: 163940 - DNA, 617 bp, Homo sapiens
aaactttttgacaaggaaattgatgtttatattagtgggcatataaaataattttctattataaacaattttcaaacagaaatatttccaaaaaacatacacacacattaaagcaaaattaaaaaaaatataaacacaataattttctttggtacatagtcacattcttaactatacctgatctagatataactgtctccaaataccaagtcactggaatttttttttccaattttcagttatgcttttgagattatacggtattgtccagaattgttgtcacagttgaatttaatgatttaaaataacattttacctgtaagacactaacattttttaactgagaaaacactctgtctagaaaaactcagtaatatgagaattttctcaagtatagtgttcacttcatattgraatgtcttaatatttcagcctaaatattttaatatttagtagttttcctgcctttaaatgtttttcaacaaatattttgaaaaacaaaactcatcattataaatcatctttatttatgttctttttattaaatgctgaaaaatgatagggtttttatttcactcattagctttttcacaaatattttgttgttcagttatact

SEQ ID NO: 163941 - DNA, 574 bp, Homo sapiens
aatccatgtcagctgtgagatagttagaaggctcttgatgaggtcataagttaactatttatgaaaaggacagagatatatgcataatttctgtgataggaatagctaaaattataaaaacaactcarttattcacacaaaaaatagaaatgtaaaatcagtaagttagtgtaatttatactaaagtagtggctttcacatcttttagatgtgaaaaggatccactgtaagaaatttattttacatcctgacccagtagacatgtaaataccacatgctccacaacattcacataaacacacacacacacacacacacacacccctcacaaagtaataataatactgttaacatgtgccttgtattctgattttttcaattctatttaattttattttactttttaaaatgctatcacagtctactctgttgaagtaatgactccctatgactccctacaggaatgtgagagaaaatagataaaacagaggcaatggtagtattgaagttaattatgttgaggaaaaatgaaaacctatgcatttatttaaaatataatgaggccaaaagcagt

SEQ ID NO: 163942 - DNA, 443 bp, Homo sapiens
tttctagtttccttatccccttaggaaataagagattaaaccttgtttaacttcattagtagccttatcaaaacctataacctaagaagtcaaaaaaagactatctcaccatctctcccctgaatatctcttgtttcttcactagtgagtaaaatacattgtttcagcaaatcgttttgccataactagacaccaaaatttaaaactgaraaaagaaaacgtgatagaaaagtaagatggcatatcttcacattacaagaaaataagtaaataaaaataaatctgccagagtgactccttgataatggataataggagaaacagtttcagccaggagactacgcccttccgttatgccatactttcctggctgaattaagagtatctctcatcccccagtgagaacctgtctgagctagcttaagatttttatcattcaagaa

SEQ ID NO: 163943 - DNA, 502 bp, Homo sapiens
tcagacatggagaagacctggcttctaccaaaaacatgatgattaatagcctaggggatggcagataaatgagagggaaggaatgaggatccctgaacaatgccatgagacagatctgctctgaccatccaggctgctcatgctggtggtgatgagagaaagaaataaactttgttctttaacccaaatgcactgtcaggtctctttgttcaaagagtttagccctcaccrtaatgaatatatcacataacactccaataagcacaaagccctccaaaaaagaatctgattttcaaagaaatcctctcctgctggagcactgtgtgagtgaggaagagtgagaaagctgatgagcattctagggggatgcagagcagtgtacaactttaacaaaaaggaaagggcagctctgagtccttcagaacatgaagttcatgcagatttgcagggaaacatttgtctaaaacaagaaagtattgattgaagatatacagacagccac

SEQ ID NO: 163944 - DNA, 502 bp, Homo sapiens
tcagacatggagaagacctggcttctaccaaaaacatgatgattaatagcctaggggatggcagataaatgagagggaaggaatgaggatccctgaacaatgccatgagacagatctgctctgaccatccaggctgctcatgctggtggtgatgagagaaagaaataaactttgttctttaacccaaatgcactgtcaggtctctttgttcaaagagtttagccctcaccgtaatgaatatatcacataacactccaataagcacaaagccctccaaaaaagaatctgattttcaaagaaatcctctcctgctggagcactgtgtgagtgaggaagagtgagaaagctgatgagcattctagggggatgcagagcagtgtacaactttaacaaaarggaaagggcagctctgagtccttcagaacatgaagttcatgcagatttgcagggaaacatttgtctaaaacaagaaagtattgattgaagatatacagacagccac

SEQ ID NO: 163945 - DNA, 502 bp, Homo sapiens
tcagacatggagaagacctggcttctaccaaaaacatgatgattaatagcctaggggatggcagataaatgagagggaaggaatgaggatccctgaacaatgccatgagacagatctgctctgaccatccaggctgctcatgctggtggtgatgagagaaagaaataaactttgttctttaacccaaatgcactgtcaggtctctttgttcaaagagtttagccctcaccgtaatgaatatatcacataacactccaataagcacaaagccctccaaaaaagaatctgattttcaaagaaatcctctcctgctggagcactgtgtgagtgaggaagagtgagaaagctgatgagcattctagggggatgcagagcagtgtacaactttaacaaaaaggaaagggcagctctgagtccttcagaacatgaagttcatgcagatttgcagggaaacrtttgtctaaaacaagaaagtattgattgaagatatacagacagccac

SEQ ID NO: 163946 - DNA, 619 bp, Homo sapiens
catttatgctgctataaaaaaaatcttaggttgggtggtttaggaacagaaatttagtgctcaacctttgagggtctgggaagttcaagattaaggcatgaacagattcagtgtctgatgttagctccttccctgcttcaaagatgatgccttcttattgtgtcctcatgtggtggaaagggcaaggcagctctgttatagcactgaccccattcattaggttgaaatccttatgacttaatcacttcctcaaaaggcgctacctcttaatactaccacattaggcattaggttccagcacatggtttttctgggggacatcaacatttagatcatagcaacaggatatatggagttttggcgagcatgttaggcagagggtagtgtgaatgayagtgactcattacatacagagaagtgcagtcctaaaagaaactagatgtacttagcatagatattaggaaagctttggaccattaattttacatattctgtgggatgagaagttcaaagaagttgaagttgacagcttaggtctgagaagaccccaactcaagccctgtaagacatgaagatttaattagaatatttacatgccaagttatctccaagaaatggc

SEQ ID NO: 163947 - DNA, 593 bp, Homo sapiens
ttctctggtgcctccttggatagcttaatagtcaatcttctgaattccttttctggcaattcacagatttcttcttggtttggacccattgctcgtgagctagtgtgatcttttttggggtgttaaagaacattgctttgtcatattaccagaattgyttttctttttccttctcatttgggtagactgtgtcagaggaaatatctggggctcaagggctgctgttcacattcttttgtctcacagggtgatcccttgatatggtgctctcttcattcacctagggatgaggcttcctgagagccagactgcagtgattgcttttgctcttctgggtgtagccacccattggagctactgggctctaggctagtactggggagtgtctgcaaagagtcctgtgatgtgatcagtcttcaggtatctcagctgtggctaccagcacctgctccagtggaagtaacagaggagtgaagtggactctgtaagggtccttggttgtagttttgttcagtgaactggttttctcaagtgctggttgtgctagtggtaaagttgtcatgtggacagactcaggacctctggttagccat

SEQ ID NO: 163948 - DNA, 561 bp, Homo sapiens
ggagtgaggaatggaaatgaggaactgcagagggccatgagaaaacttttcagctgatgcacatggtcactgtctttattatggtgatggtctcatgggtatatatatatatcaaaaacaactctctctctctctctctctccaatcccccaaccccatctcttacaacaagaaagtatgtccctagtatatctggaagccatcttttgaccaagagaaaagccagcatgaggaaactgttaacacagggacagaagaaaagaaaatgtctctgaagggaagagagccagaattgtgattrcattaaacctaaagattttcaacgatgtgacctgatgaaattccataatggttaagtcattttgagtcataattttacatcttttcaccttaggtgaaaagcatcctaaccaagataagtatatgctcagcattatattgataatttataatacgccattggaaaaaaactctcttcctggcatttaattatattacttatttcaaagaaaatgcagtaaaaaactgatctgtatatctactgatatgtctatcagtaaa

SEQ ID NO: 163949 - DNA, 575 bp, Homo sapiens
cagcacgatattcaattaaactgaagtcccacacaagaaaactgcactgtgatagattcttcagtttctaaaccatttagctttggctcctgggtgatcataaagtgtttcctttatttcagaacactctgtttttcacttctacctcttagaactcgggggtcaacatctacccatcatctctctcaatttttaaacctggataatcattttagaaatggaattttagtccttggcacaatagacatstctgtatttcttcccattcttgtatttatgcatttatctcttttttttctgatccaaaatgcctgaactgaattaatttttccttttgaattgttgcttcctctttacttttaaatttttatttgccttactgtcctctctgttatttaggtacaaaactgtaaagttgctttgattcctgttgtttccatgaccttcctctctaatttgtgaccaaattcattaagtattattaactaaacctctgaaggtcctgttacaactctctctgtctctaatcttattggctttgcccctagttggagttccatgacttttcatcaagc

SEQ ID NO: 163950 - DNA, 596 bp, Homo sapiens
ggagtaaagccaaggctgtaccagagtagttcctccctaactcaagacgttgcattcccatcacaatctacagctgttcctgagaactccaagcaagaaaagggagagaactaggtcactccaaggccacccagacaactgacctgcagcaccaaatgtctatacaatgttggtttcacttctctgtggtaccctttttccagggccttggcctagctgacttttttattccttgattataatttttcccaggagacttttaaaactgttcagtctctactttctgcttggcttctctgacacactcaggaaacacacagaggggaaagcacartagacaaggtcagcctatgctctctctgtagccttgacttttcaggtcctggttttctttctttgttcttcaatctaggctttcttgttgtctcagtgtgatagttgatttgataaaagctactatgatgtagcaagaaatggacgtcttaataatttatggttttagaagttattaatttttagttttattgcccaaacgttttccaagaaagttttaaaaattaataatgcttaagtacatgatacatgtaatgcgctct

SEQ ID NO: 163951 - DNA, 540 bp, Homo sapiens
ctctagccatttacaatatgtttcacacgtatatttgactaagactttgctagtaacctaaatgtagtataaaactggaccctagcatatattcaaagtcacctcattaggggataatattctgacacttttctagagagtgtgacatgaaagaccttcaagaattagagctcaagaggggaacatctcagagatgaatttatctatcaactttttaaatatttgcaataatatatccacattttaaagtttaaaakacaatattccatatttaaattaatatggatattgcatcagcagttgggattcccaattcctttccacttgctcctctggctcctgagaatgctcagctttcataaaagttctatcaaatccctagtgagacaccccaaagtggaattcaagatgcttccaatcttttcatgtttcaatctgggtttattatttttatcatccaatactttataaatgtttatccaaatgtttattttcacacaaaaattgagaggttttcctctttatatattaaagaatagc

SEQ ID NO: 163952 - DNA, 454 bp, Homo sapiens
tttattatttttatcatccaatactttataaatgtttatccaaatgtttattttcacacaaaaattgagaggttttcctctttatatattaaagaatagcacttctttaattgctattaaaggaggtctgccccatgatctaatcccctcccaccaggtccctcccttgacatgtggggattacaatttgagatgggatttgggtggagatacaaagtcaaacygtatcacagaccaaacccaatttaacacaaaatctctaagctgcatttggtattagctaggatagctggtgtaacagcagagcacggcaatagcttatgacaatagcagttagtttttctttatttaacaggacaatgcagacgttattagctggcagatggcttttccacatataatttcttctgtctgataacttcatcattcccttgggtttgtgacctctgaattc

SEQ ID NO: 163953 - DNA, 416 bp, Homo sapiens
atctggtaggattatgaattccttcattttgttatttaaattttgttgatcttccttaaaacagctattttgaattctctgtctgaaagttcacatatctttctcaggtgggattggtcattggttcctagtttagttcatctggtgaggtcgtatcttcctgtatggtattgatrcttgcagatgtttgtcaatatctaggtattaaacagttaggtttttattgtagtctttgctgtctggacttacttgtacccatccttcttggcaaggctttccaagtgtaaaaagggaattgagtgttgtgatttaaatctggtcactgcaattatatctgcattaggaggcaccccaaggccagtaacactgtgactcttgcagactcatacaggtaccaccttggtggtcttggctaa

SEQ ID NO: 163954 - DNA, 453 bp, Homo sapiens
tattttgcttaaattatttcaacctttgttaaagttatctggtaggattatgaattccttcattttgttatttaaattttgttgatcttccttaaaacagctattttgaattctctgtctgaaagttcacatatctttctcaggtgggattggtcattggttcctagtttagttcatctggtgaggtcgtatcttcctgtatggtattgatacttgcagatgtttgtcaatatctaggtattaaacagttmggtttttattgtagtctttgctgtctggacttacttgtacccatccttcttggcaaggctttccaagtgtaaaaagggaattgagtgttgtgatttaaatctggtcactgcaattatatctgcattaggaggcaccccaaggccagtaacactgtgactcttgcagactcatacaggtaccaccttggtggtcttggctaag

SEQ ID NO: 163955 - DNA, 447 bp, Homo sapiens
aactgtctcttgagcgaaattgaattaagacatatataacttcctatctctatgctgaaatagtttaaagcgcatttccagtgtcataacactcagaagtatttatctccaatccagacctttcctataaacttcagactcagcataartggcctactaaacataatcaatagcctcctgattggtttcctgttactgtccttagccccctacagtctgttaacaataccacaaagagtagttctggctccttctgatagaaatctagaaccgctcagagcaagggtcagatcttatcatcctgtgcatgaaaccctttagtgactcctcacctcacagaagtaagaatgaacatctgactgggtcttcaattcctctgatctttctgattctatctcctactgccctcatcctgctcacagcagggagtctcagtggctgccttaa

SEQ ID NO: 163956 - DNA, 588 bp, Homo sapiens
cacaatctgttctcaagggggtgatggtctaggcattatcacatattgatggtaggagtaaaattgctataactgcaatgggggggcaattggtactatttatcaaaagtaaaaattcacttacacttgtgagataacttggttaggcactgcagcattgttttaatagcagaagactggaaacctaaattccagcaatacaggccaagttaaaatatggaatattcattcaatggattattgtgaagcagtcaaaaaatgaggcaaatatttccagttctggcaatagaagagtaactttttgctaaccacagtcccactgagaataatagatatgctagacaaaatataaatgtgtgtgtgtgtgtgtgtgtgtgtgtgtgttgtgtgtttgaataaacggctaagatactggagagaaagaaagctcatggaagtaagccagacattytatgcagcttttctcctcaaatactgccaatttggaagtggcatagaaccaagaggctaaatacctagcagtaaacagcagctaagaagctgagttgaacttttgaaagtcttatggggttggggagataaaatttt

SEQ ID NO: 163957 - DNA, 629 bp, Homo sapiens
acgaaaatccttggggaaaaggaattctagtttctatggttagccttcggggagaatagactgaggggcaggagggcaagagaaggtcagggaaaaacttttgcttctgtggctgctgctgaggccttcatttgggggtattattttctgagctscagaggcaccaggatttctattgttattcccacattttcacaccgcacatcacacatacttagcattcaaattatattaaataaatatttgactgcccaccttcttcctattgtccttccttcccctggcctgccatactttctttctcttgatatcttttaattcaaaagttcaagaacaaaaggctgttcttggcatgcagcaaaaatattttaagaaaatttcttgatttaaatttaaatgagcagttcattacataacacgtatgaattaaacagaaatattgttgggaaatataattaaaaacaaagcctttttccaacccagaaatcctctccttaaaagtagtagtggaaaacaaaaacagaaagttttattattgacaagcactaagccagactgtgacgtacatcaccatcaatccactaagagattgcaaagacagaaatctcaacctttcatgtagacaagca

SEQ ID NO: 163958 - DNA, 629 bp, Homo sapiens
acgaaaatccttggggaaaaggaattctagtttctatggttagccttcggggagaatagactgaggggcaggagggcaagagaaggtcagggaaaaacttttgcttctgtggctgctgctgaggccttcatttgggggtattattttctgagctgcagaggcaccaggatttctattgttattcccacattttcacaccgcacatcacacatacttagcattcaaattatattaaataaatatttgactgyccaccttcttcctattgtccttccttcccctggcctgccatactttctttctcttgatatcttttaattcaaaagttcaagaacaaaaggctgttcttggcatgcagcaaaaatattttaagaaaatttcttgatttaaatttaaatgagcagttcattacataacacgtatgaattaaacagaaatattgttgggaaatataattaaaaacaaagcctttttccaacccagaaatcctctccttaaaagtagtagtggaaaacaaaaacagaaagttttattattgacaagcactaagccagactgtgacgtacatcaccatcaatccactaagagattgcaaagacagaaatctcaacctttcatgtagacaagca

SEQ ID NO: 163959 - DNA, 439 bp, Homo sapiens
attgttatgtattattccatttgttttaataatagacatcatgttagtccattttcacagtgctataaagacatacccgagactgagtaatttacaaagaaacaaggtttaattgactcacagttccgcatggctggggaggccttaggaaacttaacaatcatggtggaaggggaagcaggcacgtcttacatggcagcaggtgagagagagagtgtgtkagagcacaggaaaaactaccctttataaaaccatcagatctcctaggaactcactcactatcatgagaacagcaaggaggaaaccgcccccataatctaatcacttccctcccttcacacgtgaggattacaggtctctcccttcacatgtgggaattacaattccagatgagatgtgggtgaggacacagagtcaaaccatatcaataagcaatatg

SEQ ID NO: 163960 - DNA, 586 bp, Homo sapiens
aggatataagtctaatctagataaaatttattaatgtttcacaaattccacctaaacccaattatgttaatgcacgggtttatcattctgttcataaatagcctatagtaatgattgaggagttaaggcttggagatagactttcataaaaatcttaatgacaagcatgccactcattttcattttttttccgggtattaaattgtatcccagggtcccaaagaattaatataactcaaaaccatcactgatgtattcctttctggatccaattacatggtctataataaagccctgtagctcccrgaggtagaatgggggaataaaaagtaaatgcattctccacttaaaattcctacgtattccacagaccatcagaaaacttctgaagtcagcatctctgaactccaaatactgctgattcacagtgtctctttcacttatgaccctgacctatctatgcagaatttggggttcattttctttggaatgaccattcttagatgtaaaggtaaatttgactcccaaaaagagtaaggcaataactaacctcgaaccattctgagtgtgacttctatagatctca

SEQ ID NO: 163961 - DNA, 604 bp, Homo sapiens
tatataaattaagcattattcttgcctgcaaagtgtttaccctctggtacaaggaatatgttaagcacatatgttaattgttacacaaagctgactatgctcttagtatttttacctctagctactgatttaattttctagtagtctaaaagtttttagttgctgacatcctcttgccttaaacaggcttacacaggcaaacacaggctcagaccaaagtgtcagtatcctcagttagattctgttttcatttctctgtctagtactgctgtttcccactgagtgttggtgaacacctacaccttcttgtcttatttatgtttacttgtttatttcattttttgagatagggtcttgcgttgtcactcaggctggagtgcagtggcaccatctcagcttactgcaatctccacctcccgggctcaagggattctcctgcttcagcctccagaggmgctgggactataggagcataccaccacacctggctaatttttgtattttttgtagagacagggttttgccatgttgcccagactggtctcaaactcctgaattgaggtgatcttccagccttggcctcccaaagtgctggaattacagg

SEQ ID NO: 163962 - DNA, 547 bp, Homo sapiens
agctttgaactagaaatagaagacaattcattaagattaatcagctttccagttaaggaaaatatagtagtttgacacctgaatcactgtttctaaaataatttttaatttatctagttgtgcctttgtttctagcataggtactagcaactttatttctctataggtaagtttggccagaatgctttcagtcattgtaaggacaattataaataaaatataggaggcttaatttccctgttgaaaagaagagatttccttcscctctttttcttagtgcatttattttagaaattataagtagtttctcctcttataaaaactgtatatgaatacttttgaaaactagataggttgtcagttttatgacccagagatgtctttttcaaggacttgggaattatatcctgtgaacataaacacctaaaaagatagcactcctgtattctattttcaggaggatacaagcctaactttagctgatgcctggctccaagttataaaactacctaatttcataaagatatgagaaaattatttttctttt

SEQ ID NO: 163963 - DNA, 457 bp, Homo sapiens
ttctagtttatgcacataaaggtgttcatagtagccttgaataatattttgtatttctgtggtatcagtagtaatagctcccattttgtttctaattgaacttatttggagcttctctcttcttttcttggttaatctcattaatggtctatcaattttatctatcttttcaaagaaccaactttttgtttcatttatattttgtattttttttggtttcaatttcacttagttctgctctgatcattatttcttttcttctgctaggtttgggtttggaatgttcttgtttctccagttccccraggtgtgtccttagattgtctatttgtgctctttcagactttttaatgtcggcatttaatgctgtgaactttcctcttagcttttgctgtatcccagaagttttgataggttgcatcactattatctttcagttcaaagaatttttttgaat

SEQ ID NO: 163964 - DNA, 528 bp, Homo sapiens
gcttcaggtactcatgaatggagtagccaaggaagaatgggatgcataagatttttagggggaaaaaaaaaaccaagagttctgctttgatcatgtaaatattgagatgtctattagaagtcaggtggagatgtcagattggtaggtgactatgtgcctttgagctgatgatacaagttggggagtaacataatattatgaataggatttaaacccaagggaagggggtcacttatagaaaaggtatagttaacagtttgagccaatatttgatgttttaatagaagacaagtcatccaaggcttctgggaaggaaaggccagtagggaggagggatacctgtagggtgtgatgttacagaagacagggagggagtggttaactctgctggacattgcccatggttcactgagatgaagacagagtagtgaccactctggcaacatggaartaattggtgaccttgacaaaagtggtggcaccgaagtggtggggaccatactatggatagaggctcagttacttgat

SEQ ID NO: 163965 - DNA, 460 bp, Homo sapiens
ttttatcttaaactttgaacataaagtttcaagactattttgtaaataaagggttgaaacaatttttctgatccagaattttatgagatatgctttgtgatagtaaagctagaactttggctaggaagaaaaacttcccaattttttttaaggcaatttctcargcagatacaattcttgcaccaaatctttagaagggagcttataaaatataactgcaaactaaatatatttacaaataaatattcaaaattccaaaatttaaagataacaactaggaatcaaattatttttattttattattatttttaaaacacaaaactttttattatggaaatttgcaaacatatataaaagtagagagaatagaataatgaaccctaagttacacatgacccagcttcaacaattgtcaaaatatggccaattttgttccttctgtactccctcatttcctct

SEQ ID NO: 163966 - DNA, 495 bp, Homo sapiens
gggtttggcagaagaagccagggatccagagagaaacacttatgactttgacaaattaaacaaattttctgactctcacatatgcaaaaatgtggtgacaagacttgcctacagagttattgtaagaattaaataagatgcaggaaaactctgacacatagctgaaagcccatagaggacagtctcatccccctttcctttgcacaaggtctaacttgggagaaagcagcagtttagggatgcaaagcttgtacctcttcctctggtgcaaagtccagggccaccctaggaagcgtctagtcacaaggccagccttcagsgcaacagtgcttgatttaatgctctactgtccctatattgaaatctttcatacgtttgaacaaggaatccctcattttcatttttcactggactccgcaaattatgtagctggtcctgcttctccagtgctggaagataagtggctactgcttcctctcctggttgggcagtccc

SEQ ID NO: 163967 - DNA, 601 bp, Homo sapiens
agctggtcctgcttctccagtgctggaagataagtggctactgcttcctctcctggttgggcagtccccaggccccacacactgctttggagagggaccttgagctgagagctcaaaaatcaactagaatttaccagtcttttcctggtaaaacagacattattatctgaaaatgttcactggtgtgaaactttaaggaagtaagtaataaaggcagtaaatgaagagttagatctttccagaaacatgactctgaaatcttcagaagattggtgaatacactcctctacttaattttttaaatcttggtctgaagggttgagataagttagagacaaataacttttagtagaacaccggtttttcaggggctgaagaataaataccctatagcaattactgtaccatatgcttaaaatttactaagaaagtagatcttatgttaagtgttcttaccttcaaaaataagaatataaataaaggggctgggaggaaactttggaagatgatgaatatgtttacggctttgatggtggtgatggttwcacaggcatgtacttatcaaattgtatacattaaataggtacagctttttatatgt

SEQ ID NO: 163968 - DNA, 598 bp, Homo sapiens
attttcaatataaattgttttttagtaagtggcaataaaacagaactggagatcaataacagaaaggtaaagagaagatccccacatatttgcaatttaagctatcaatttttaaaaatgtaaacaaccaataaaaaatgaacagagcacttgaaaattacctttacaaaagagcatctccaaatagtaatcacatgaacaaagtgctcaacggcattacttatcagaaaaatacacattaaaacccccacatgcactagaattactaaaattaaagactgacaattccaagtgttgtcaaggttatggacctctgctgcattgctggtagcagtataagatagtaaaayagctatggaaaactggtagtatttataagagtaattttactcctaaataagcacccaagagaaggtcatgtatttgcttataaaaagacatataccagaatgtacctagaagctttacttaaataacctaaatttgaagcagtgcaagtattcacaaataacagaatgtataaataaatttcagtgtatataaatgttctattatgcaattttaagaagaaaataaaataaggcaacatgcagataga

SEQ ID NO: 163969 - DNA, 587 bp, Homo sapiens
gactgtgatcccagaaagactcttcttggctatctctttccctggttctctttgttaaacttcttattgctctgcaattttactttttgctgtttacatcatggagttatatgtatactctcttagttgctttccacaaaaatctccatcgttttttcactttatcctttgcaatggaagtttataccctctctgctaaatcaagtcagttccttcaggtggagataaggagctcttttcaaggtttgcytctctctcctgtctttccttatgggtaggatctctgcaccactgcataggaactggaaggacttctcccagagtgccacttctgctttaaaagacggtgctaggtgaccccttagtctttttgacttgcctctcctattgtgaaactctgctcacagagccagctttggtggttaattagggcctagtattctcagcctgccagcctagaatagggattttgccctagaagttggttttgggtaaaggaaggtaaccacagacatctccaccgtgcctgcctggcatagtagatctgtatcttggggctggaggcaatgacaaacacttgtgacctg

SEQ ID NO: 163970 - DNA, 616 bp, Homo sapiens
cagttagaagtcaggtaaagagaaatttaaatgaattcaaatacaagacatctaattataagcctgaattaaatatgccaataacaagtattaactgccctcataaggctgggactgtgagtataggtaaggaggatactgaagagtagttctacattcatttcagttaagaataaaatttctaaaaacctctctcttaaattataattgcctgacctttagttagatgtcaaacataaagtctgaagttttacactggcatattattatctaatattttatagtggcatctttttaaaaggataagggtataaatggatggagtatatattttgagaagacaggaatccractgattgttacatgcggtgaagtgtttatatggtctaactttggaaagtgattttaatgttaaaggcagaaaaattaaacacatttcctgaaatgcctcaattttaactagaaacttcattgacaaattctaagaagcagcttcacagttaagcaaaactttctaatttctgtgtacctgtgctttgcaataatatatatgtaatagtctggagaaagttgtatgcagttttgggcttctgtttatggtcatgtgaccatttgg

SEQ ID NO: 163971 - DNA, 599 bp, Homo sapiens
tgcctgacctttagttagatgtcaaacataaagtctgaagttttacactggcatattattatctaatattttatagtggcatctttttaaaaggataagggtataaatggatggagtatatattttgagaagacaggaatccgactgattgttacatgcggtgaagtgtttatatggtctaactttggaaagtgattttaatgttaaaggcagaaaaattaaacacatttcctgaaatgcctcaattttaactagaaacttcattgacaaattctaagaagcagcttcacagttaagcaaaactttctaatttctgtgtacctgtgctttgcaataatatatatgtaatagtctggagaaagttgtatgcagttttgggcttctgtttatggtcatgtgaccatttggaatcttaggtgagtttgtaatattaattagaaatatgtrtgattgttattactttgaatgaagaaagagcaacttctagattattttaaaagtttcaaaatatttcttactttaacagaataatcatagatatttttataagatttatttagttaaagtaaaagtagaggacaatgaattagaaagaattg

SEQ ID NO: 163972 - DNA, 599 bp, Homo sapiens
tgcctgacctttagttagatgtcaaacataaagtctgaagttttacactggcatattattatctaatattttatagtggcatctttttaaaaggataagggtataaatggatggagtatatattttgagaagacaggaatccgactgattgttacatgcggtgaagtgtttatatggtctaactttggaaagtgattttaatgttaaaggcagaaaaattaaacacatttcctgaaatgcctcaattttaactagaaacttcattgacaaattctaagaagcagcttcacagttaagcaaaactttctaatttctgtgtacctgtgctttgcaataatatatatgtaatagtctggagaaagttgtatgcagttttgggcttctgtttatggtcatgtgaccatttggaatcttaggtgagtttgtaatattaattagaaatatgtgtgattgttattactttgaatgaagaaagagcaacttctagattattttaaaagtttcaaaatatttcttactttmacagaataatcatagatatttttataagatttatttagttaaagtaaaagtagaggacaatgaattagaaagaattg

SEQ ID NO: 163973 - DNA, 465 bp, Homo sapiens
tatgtagcaccatgcttttgcaacacactttaagctggggaaatgccttcacagttttctttgggtcctttgctccctagaataagccagtgaaaatgctgatcacagcctttgtgttgggatgatgattttttttcttcactcaaggctgagaccccctagattggcagacaggacagggggtgatatgtgtaaatgtcagtatgtgctccctcttccccatatcaacataagccagtaatatatcacattaacaaccagcttagagataaatgagaggaagttttgagatcaaatcatcaatcttaacccattggtgggggtcctagatgtgaaacagacttggaaactcctgttgtggcagtgattataactacaaagacaatattayattgttccttccctaataataacagggagcttctgcctcctaaatcagagcttattttcctcccccaaaaacag

SEQ ID NO: 163974 - DNA, 616 bp, Homo sapiens
ttcactttaattttggaagaagttctaatgtgggtaaaatgctatcaaacaacactgcatgctacagagaagtctttcatgaaatcaatgcaacaaactttactgtttgccttatttaaggaattgccagtcatcccaaccttcagcaaacattaccctgatcagtcagcagccattcacattgaggcaagagcctccatcagcaaaaacattcccattcatggaatgctcwgatgattgttagcattttttagcaataaagtgttttagatgaaagtatgtacacttttctagacataatgctattgcacaattaatagactacagtgtaaacataatttttgtatgtactgagaaaccaaaacattattttgactcactttattgtaatatttgctttgttgcagtggtcaggaacaaaacaggcagtgtctccaaggtatacctgtattttggatataaagaccttttcaagatgatttactgttttgtatatcttctatccttttaatatgactgaaaatttagaatttattaggaagttgaaatacagagtttattaggaagttgaaatacaggagatacatgttgagtatctcctgtatttgcttttccc

SEQ ID NO: 163975 - DNA, 616 bp, Homo sapiens
ttcactttaattttggaagaagttctaatgtgggtaaaatgctatcaaacaacactgcatgctacagagaagtctttcatgaaatcaatgcaacaaactttactgtttgccttatttaaggaattgccagtcatcccaaccttcagcaaacattaccctgatcagtcagcagccattcacattgaggcaagagcctccatcagcaaaaacattcccattcatggaatgctctgatgattgttagmattttttagcaataaagtgttttagatgaaagtatgtacacttttctagacataatgctattgcacaattaatagactacagtgtaaacataatttttgtatgtactgagaaaccaaaacattattttgactcactttattgtaatatttgctttgttgcagtggtcaggaacaaaacaggcagtgtctccaaggtatacctgtattttggatataaagaccttttcaagatgatttactgttttgtatatcttctatccttttaatatgactgaaaatttagaatttattaggaagttgaaatacagagtttattaggaagttgaaatacaggagatacatgttgagtatctcctgtatttgcttttccc

SEQ ID NO: 163976 - DNA, 361 bp, Homo sapiens
ggcaaacaaccctctcaagtttcataggcatttacagggtgagttcaaattaggcaggtttcttgacagtttattactctttactcaatatgatattgaggtgtaaaacaaatttatcctaaacttccttcagaaattgagagacacatgcaaagggccaattctaataaattctaccagcttagtaaactcagactaaggataaattcccctyaagcttctcttaagaaatcttacaatacttgttttctaaaaaaataagggcaaactctcttgagaaatacttccctttgttatctggatggatactgctttgcgtatcatacttctttttttagggaaagttactcagatgatttag

SEQ ID NO: 163977 - DNA, 519 bp, Homo sapiens
tttgaatgaaaaacatttaaacttgaaatgaacaagaatagcacggaatgactaaaattcttttttctgtgatcagataggatggggcttacygttcatttgttcaacatatttattgaccaattgctatgagccagccactgttctggatacttgagacatactgaggacagaaggctgtgacctcatgaatcttgtattctggcagggcgacacaggaaagagagtgggaaagttgcagtattacatatgagggtcaaaatcggcctcattttggaggtaagattaagcagactcttcatagaggtgaggtggttagctaatctgggatttggagaaagagcattccaggtgagagggaacaggtggagtcaaagccctagggcaaaagcacactaggcacatttaagggaaagaagactaggggattagtagtagtagaagaggacacagaggtaatgggggcacatctttgtggcttgcagctcatttgacggaatttggctgttattttgggta

SEQ ID NO: 163978 - DNA, 503 bp, Homo sapiens
agccactgttctggatacttgagacatactgaggacagaaggctgtgacctcatgaatcttgtattctggcagggcgacacaggaaagagagtgggaaagttgcagtattacatatgagggtcaaaatcggcctcattttggaggtaagattaagcagactcttcatagaggtgaggtggttagctaatctgggatttggagaaagagcattccaggtgagagggaacaggtggagtcaaagccctagggcaaaagcacactaggcacatttaagggaaagaagactaggggattagtagtagtagaagaggacacagaggtaatgggggcrcatctttgtggcttgcagctcatttgacggaatttggctgttattttgggtagaacataactccatctgagtgttaataaagggagaatgatctgttttgcctttgtaaaggatcattctgtctgctgccatgaatgtaatagaccaaggggacaaaatggttacaatgag

SEQ ID NO: 163979 - DNA, 503 bp, Homo sapiens
agccactgttctggatacttgagacatactgaggacagaaggctgtgacctcatgaatcttgtattctggcagggcgacacaggaaagagagtgggaaagttgcagtattacatatgagggtcaaaatcggcctcattttggaggtaagattaagcagactcttcatagaggtgaggtggttagctaatctgggatttggagaaagagcattccaggtgagagggaacaggtggagtcaaagccctagggcaaaagcacactaggcacatttaagggaaagaagactaggggattagtagtagtagaagaggacacagaggtaatgggggcacatctttgtggcttgcagctcatttgacggaatttggctgttattttgggtagaacataactscatctgagtgttaataaagggagaatgatctgttttgcctttgtaaaggatcattctgtctgctgccatgaatgtaatagaccaaggggacaaaatggttacaatgag

SEQ ID NO: 163980 - DNA, 504 bp, Homo sapiens
tacttatgcaaatttctgcagccagcttaaatttctyctcagaaaatgcttttttttttctgtcatatcatcaggctgcaaattttccaaacttctatgttctgcttcctcttgaatgtttgctgattaaaaatttctcctgccagataccccaaattatctctctcaaattcaaagttccatatatctctaaggcaggggcaaaatgccaccagtctttgctaaagcacagcaagagtcacctttgctccagttcccaacaagtccatatcactatcagcatttttgtcaaagccattcaacaagtctttaggaagttccaaactttcccacatcttcctgtcttctgagctcgtctagtctccaggaagttccaaactttcccacatttttctgtcttcttctgagccctccaaactgttccaacttctgcctgctacccagttctaaagtcgcttccataaaacaaagtcacatcttgcatggcagtaggcaagaaagcat

SEQ ID NO: 163981 - DNA, 505 bp, Homo sapiens
tttcccctctatattgcacaaagtcctttgcttcctagcctttactatttacaacttggtcatttttcaatgtaatatttgaaaagtatgtctattgaaaattatgtaaaattttatgattttggagagtagtaactgatttgttcttttgtgattttaatttgtgaacattctttaaacagtgaataggatctatttcaaaaactatttttttagttttaaaaagctcagaatgcatttttctgataatatttttattatatgaagtagtttattctggttagttcataaaattgtataaagtagctaaattgtattactgattatctgggaagtttcaggtcttcagatttttatttctatggtgaaacttattctaatttccaacccaagattstggaacacatctcccattatgaagtgggcctcaggatgggagcggaaacagagcctcttgttcacactccacaccctcattttccagcagtgagggtagactattaag

SEQ ID NO: 163982 - DNA, 598 bp, Homo sapiens
ttccattgtgtatatgtgccacattttcttgatctatttgtccactgatgaacacataggttgtttccacagcttggctattgtgagtagtgctgtaataaacatgggagtgcagatacctctttgatatgttgatttcttttctttaagctttatacccagcactcacatatattttaaggtatgtacaggaaaagtccatttccgatgcattctgtacctacaagattgttcagtgataactggtgtacgtaagtaatgatgacacttgggacaggaaaagaattctgaagaaaattctgaatcattcaaagytaaattattttcagcatagatttaataagtactctttgtaaatctttgaacattggcaaaccatataatttttgtgtgaaaaaatgttaaccagagcagcaattatgggggtgagaacctatggttgtgtccttaagtggagagacacctttttaagacctattgaagtagtttttgttttcttttcattgttgctcttctgggtcattattataactgtctccattcacaattttctacctatctaaaattgtaaagctaatgtttttagatatgcattggt

SEQ ID NO: 163983 - DNA, 598 bp, Homo sapiens
ttccattgtgtatatgtgccacattttcttgatctatttgtccactgatgaacacataggttgtttccacagcttggctattgtgagtagtgctgtaataaacatgggagtgcagatacctctttgatatgttgatttcttttctttaagctttatacccagcactcacatatattttaaggtatgtacaggaaaagtccatttccgatgcattctgtacctacaagattgttcagtgataactggtgtacgtaagtaatgatgacacttgggacaggaaaagaattctgaagaaaattctgaatcattcaaagctaaattattttcagcatagatttaataagtactctttgtaaatctttgaacattggcaaaccatataatttttgtgtgaaaaaatgttaaccagagcagcaattatgggggtgagaacytatggttgtgtccttaagtggagagacacctttttaagacctattgaagtagtttttgttttcttttcattgttgctcttctgggtcattattataactgtctccattcacaattttctacctatctaaaattgtaaagctaatgtttttagatatgcattggt

SEQ ID NO: 163984 - DNA, 441 bp, Homo sapiens
tgttatttcagggagatgggcctcgctgctcggcctctgagtccctgattttttttattgttttaggtatatatacccaaaagtgaaattcttgtatcatattttaattctatgtttaattttttgaggaactgccatgctgttcacatttcttcttgtatccccctgtactccaaaatgtctccttaggtcrgtgtgaacattttaatataaacaatgagggcaactgtattcattatttatggctgtgtgtcaaattaccctcaaaatgtggcagcttaaaacaataaacatttattatctcagtttctctgggtcaggtctggtttcagcttagccgggtgccattgactcaaggtatcttgcaatcaaggtattagcagagacaataatcaacccaaggctcaactggggaagaatctacttccaaactcattcata

SEQ ID NO: 163985 - DNA, 441 bp, Homo sapiens
tgttatttcagggagatgggcctcgctgctcggcctctgagtccctgattttttttattgttttaggtatatatacccaaaagtgaaattcttgtatcatattttaattctatgtttaattttttgaggaactgccatgctgttcacatttcttcttgtatccccctgtactccaaaatgtctccttaggtcggtgtgaacattttaatataaacaatgagggcaactgtattcattatttatggctgtgtgtcaaattaccctcaaaatgtggcagcttaaaacaataaacatttattatctcagtttctctgggtcaggtctggtttcagcttagccgrgtgccattgactcaaggtatcttgcaatcaaggtattagcagagacaataatcaacccaaggctcaactggggaagaatctacttccaaactcattcata

SEQ ID NO: 163986 - DNA, 625 bp, Homo sapiens
aattattgacttagtaagattgacacaagcaacaatatttttccttcttcactctcttgttttccacggctctgattgaataactaaccccagttatatcactgtaattaatgcattaaagcttatatttgaaccagagaattgatcatttgaagcctggaagaagcagtcttgtgaccatcacggcaaaagtaacttgttcttcccagttacagtggaacaactaccttgctatacccctgttgtagtcaatctcaatagatatcaaaggtatagatttatcaccctaaataaaaacagagagagggctaaactatatttattttggggatagagcattgcagtgaaaatatgtatgccatagtgaactatgtgtatactcagggataaaaggtttttttttattttttaatgagaaggattacataactgttttgaaataattattcttggctacacagattaataattaagtctcagattggacagacagttgctaggcagaagttyttgcagaagcattttttgtgtaagattgtgatggcctttgtgcaaggttgtggttattgtatagtctttttcgctgtgaggcatagaaacgtgagaacccccttttcctggcttt

SEQ ID NO: 163987 - DNA, 593 bp, Homo sapiens
agccctatttttaatcttctacaggacctccaaaagagaagaagaagatgaagacaaagacaaaaaaaaataagtagagggaagagaggggaggaggaagaaaaggagaaggagaagaaacctgagattagtttgttggcctacagtgtaaactgttttacaatgccacagagttaaccagtaggaaatgtgagattagaaactggcttccagatcttatccagtactttcattcaaacaattcactctaatagaaaattgaarctcagagctaaataataatctacccaaaaaggttagatttgcatcgtgcacaagtgaaccaagtcagcaatcaaatttttactttatttaaaaataagattgatatcatacttcttgggtatgaacttccaaaggccagagttgcttcaatcagggggacagatctcctaggggcattgataagcctatgattaatatcttctgcatctttcttattcaaatctttaacactgggcccaatgccctgcttccaaccagctatgggtttgtttttgtccagaaatattttcttgatggaaaaagaagctgctaaggaggcctgcaagata

SEQ ID NO: 163988 - DNA, 588 bp, Homo sapiens
caggatccttcagaatgaagactgaagggaacactgtctagttttacacttagatttggtaaagagtgaacagtgtgtggaaatgtgattggacacaaagggaatgctctaacagttacagaattagtggagaagcctggtgaggcctgtctggattcttggcttctctgtgyggtcttccttcatcgtaggtataaggcagaaccccttctggaatgagggtcttatgatctactttcacacaaggtaggtcagaaaatttttttaggggaagcacttacacagaaaggtggggttagagttatatccctagcttttatggctggctctatgccataaaatgtgacccacctcagggaagaggaatcctagtttctaaggcctagcttgggggagaaaggtaaacaggagaaagaagggtcagaaaagaggctttgcttctaaggcccttccagcgtcctacagttcaaagttctcagcataccaaaccaccatactttaaagtattatcttttgagccccaacaaataggaatatgaatgcatggatgattattttatgtaatccagtagccagtaggaaactagt

SEQ ID NO: 163989 - DNA, 588 bp, Homo sapiens
caggatccttcagaatgaagactgaagggaacactgtctagttttacacttagatttggtaaagagtgaacagtgtgtggaaatgtgattggacacaaagggaatgctctaacagttacagaattagtggagaagcctggtgaggcctgtctggattcttggcttctctgtgcggtcttccttcatcgtaggtataaggcagaaccccttctggaatgagggtcttatgatctactttcacacaaggtaggtcagaaaatttttttaggggaagcacttacacagaaaggtggggttagagttatatccctagcttttatggctggctctatgccataaaatgtgacccacctcagggaagaggaatcctagtttctaaggcctagcttgggggagaaaggtaaacaggagaaagaagggtcagaaaagaggctttgcttctaaggcccttccagsgtcctacagttcaaagttctcagcataccaaaccaccatactttaaagtattatcttttgagccccaacaaataggaatatgaatgcatggatgattattttatgtaatccagtagccagtaggaaactagt

SEQ ID NO: 163990 - DNA, 603 bp, Homo sapiens
tgagggggagtattccatttgctttgctttggctctggcttaggaaaattgcccaggcaattgctttttgtagcatgtaatgctgttagttcctatcacactgctaacagcctcccaccctcaagtagaccacaaagcagagagaagaaagaaaacttcttcttctactaaccatattggctcagtatcaatagaaaacaggagcttttcaatsctacctcctcagactctttgcggatttgggggcgccagagtggaattacttactctatcatgtaccaggtattacctggcattgtgcaaatattcttttcctaatatatgttttagaaagaaataaaatcttcagaaaagtccaaaaaaaaaaaaaaaaaaaaggagagggagggtctgaatgcatattcatgcatatcttgtaacatttagtatgttaaatgtgtgaatatgtttttatgtttttatggattgatacaaaacaatattatgctagtagattcaagctagcaaaatgaggagtggacatcaaaatgtcagcttcttggcggcatatgtagcgctgaaaataacctcttttcacttttggaatcatagtcactgcatcta

SEQ ID NO: 163991 - DNA, 563 bp, Homo sapiens
tttcttattctagtttctattctcattattgtaacatgaaatccaatatgaatttaacgattgttaaatggtgccatttgattacttccttgctctaatgacaagaaatcaacttcacagtgagttcttatcacagtggtggtttattgtatgaattctratgataaaaacttgatgttgggtatccaaaattactctttaaagtaaagacttttgttatatatatagagagcggaagcaaaacaaacaccaattgaatacaatgttaatgttgtcaccaaaatataaagtgatttctcattttaactgctgattgagtaagaaatatttggtatttaaaattacaaatgtttgtgttgtagtgtgggataattagctttttacctttaaattaagtatgcactgtaaatttccttataaatacagttgaattttatattagtcattgtaaagtgaatatgaaaataactttatcttgattagaataacattttcttctttattaacactaatgagaacatcaaagaatgtgattaaattaaaatgcattttcaaggtatagt

SEQ ID NO: 163992 - DNA, 508 bp, Homo sapiens
ggatttaattaattcaagacacataattatataaagtgagcatctgcagtacccgtagtattcatcctgaaaatagtttccaaaactcaatgcattcagaacttcaaaaaaattaatgtagcaaaatctgcattaactctaaaattcagctttaatgcaggtatcaaaaacttcaaaaaaacaaattccctatgtggaatcaaaaagatctttcaggttcattcgatgatttttyactttgctttgtttctgtttccatttagccctattttaatgcttattttactaaactcaaacatagggagtactttattttctaacatgtttgtctccgtatgtttttttcaataatttaacgtccatttctaacttgcctatcagtcccaggtctttttagatctttctcaattatggttgttattttcataatatctaaatcatatcatatgtaattgttctattaaaatgtattctgtctttacatttcaatgagctaaacatgctttat

SEQ ID NO: 163993 - DNA, 569 bp, Homo sapiens
gattctgttgttaggtagagtattttgtgtatatttaatagagcattttgtgtatatgtcttagatttagttgctttattgagttgtcgaagtcttccgttgccttacttmtttctttctggttgttgtattcatcattgagagtgtagggtattgaaatctccaactattattgtaaaatggtcattgctttctgcagttctttcaatttttgcctcatatattttgatggtcttgttattaggtatgtaagtgtttattattgttatatcttgctgtattaacttttattaataatatctttttttggtgttttctggccttttcatttaaagtctattttgtctgatattaatatagccaccccttttctcttttggttactatggcagtaccccctttagctgcagttttgcttttcatggtttgagttacccccaatcaaccacagcctaaatatagatgagtatagtaaaataagatattttgagagagagaccatatgcatcacaataacttgtatcacaatatattgttataagttttctattttattattgttgttaatt

SEQ ID NO: 163994 - DNA, 569 bp, Homo sapiens
gattctgttgttaggtagagtattttgtgtatatttaatagagcattttgtgtatatgtcttagatttagttgctttattgagttgtcgaagtcttccgttgccttacttctttctttctggttgttgtattcatcattgagagtgtagggtattgaaatctccaactattattgtaaaatggtcattgctttctgcagttctttcaatttttgcctcatatattttgatggtcttgttattaggtatgtaagtgtttattattgttatatcttgctgtattaacttttattaataatatctttttttggtgttttctggccttttcatttaaagtctattttgtctgatattaatatagccaccccttttctcttttggttactatggcagtaccccctttagctgcagttttgcttttcatggtttgagttacccccaatcaaccacagcctaaatatagatgagtatagtaaaataagatattttgagagagagaccayatgcatcacaataacttgtatcacaatatattgttataagttttctattttattattgttgttaatt

SEQ ID NO: 163995 - DNA, 569 bp, Homo sapiens
gattctgttgttaggtagagtattttgtgtatatttaatagagcattttgtgtatatgtcttagatttagttgctttattgagttgtcgaagtcttccgttgccttacttctttctttctggttgttgtattcatcattgagagtgtagggtattgaaatctccaactattattgtaaaatggtcattgctttctgcagttctttcaatttttgcctcatatattttgatggtcttgttattaggtatgtaagtgtttattattgttatatcttgctgtattaacttttattaataatatctttttttggtgttttctggccttttcatttaaagtctattttgtctgatattaatatagccaccccttttctcttttggttactatggcagtaccccctttagctgcagttttgcttttcatggtttgagttacccccaatcaaccacagcctaaatatagatgagtatagtaaaataagatattttgagagagagaccatatgcatcacaataacttktatcacaatatattgttataagttttctattttattattgttgttaatt

SEQ ID NO: 163996 - DNA, 645 bp, Homo sapiens
taaacaaacatttatagaatgctcattttgtgccaggaatagaaaataaatagtcacgagttgcttratgatggagattaattctgagaaatgcattactaggccatttcgtcattgttggagcattccagggtacacttacatcaacctatatggtactacgcacctaggctatgtggtatagcctgttgttcctaggctataaacccatacagcatgttactgtactgaatactgcaaacaattgtaacacaatgatgtttgtgtgtctaaacatagaaaagctaaggtatatgttctaaacatagaaaaactaatgtactgttgtatgacattacaatggctgtgtcatcactagacgataggaatttttcagctgtattataatcttatgggaccaccatcatatatgcagtccattgttgatctaagcattgttatgtagggcatgactgtattgaatgtcagaggaaaattatgcttctgaaaagctgaggcgttggttcaacagtcatttccatgttctagaagttgaaataggcatttgttttacttaccaggcaaaatcttaacccaggttaaatccaattccccacttattacatgccagcacaagcacaaccaaacatgtttggaaaaaaacat

SEQ ID NO: 163997 - DNA, 645 bp, Homo sapiens
taaacaaacatttatagaatgctcattttgtgccaggaatagaaaataaatagtcacgagttgcttaatgatggagattaattctgagaaatgcattactaggccatttcgtcattgttggagcattccagggtacacttacatcaacctatatggtactacgcacctaggctatgtggtatagcctgttgttcctaggctataaacccatacagcatgttactgtactgaatactgcaaacaattgtaacacaatgatgtttgtgtgtctaaacatagaaaagctaaggtatatgttctaaacatagaaaaactaatgtactgttgtatgacattacaatggctgtgtcatcactagacgataggaawttttcagctgtattataatcttatgggaccaccatcatatatgcagtccattgttgatctaagcattgttatgtagggcatgactgtattgaatgtcagaggaaaattatgcttctgaaaagctgaggcgttggttcaacagtcatttccatgttctagaagttgaaataggcatttgttttacttaccaggcaaaatcttaacccaggttaaatccaattccccacttattacatgccagcacaagcacaaccaaacatgtttggaaaaaaacat

SEQ ID NO: 163998 - DNA, 457 bp, Homo sapiens
aactctacttgacaaacttttatgtatttgaaatactccacaactcatagttggagaacatgtcttgatatatagtttgtatctctcttgcagaattaaagcaatatccttcttactaagccctcaacaggagtttttgttccttaktttttggtttggttgtttagttttcataaaaggactgcagctgcctctgtttgtgagtagttccactaccttcattcatccacttaggatatttcttcattaccaattttctgttatagattgtcctctagaaaagtggtcctcctatatgaatataaaatgtcaatatattatatatataatacatgttatatatagcatgtgtgtaataaatacacatgagatggaaactgaaaaagatggggtaaaattcaatttccatactttaaataattgctacttatcaatagttgatataattttgctctct

SEQ ID NO: 163999 - DNA, 619 bp, Homo sapiens
aaataagaactttctgctgggtacggtggctcacatctgtaatcacagcactttgggaggccaaggcgggtggatcttttgaggtcaggagttcgagaccagcctgaccaacatggtgaaaccctgtctgtactaaaaatacaaaatcagccaggtgtggttgtgcgcgcctgtaatctcaactactcrggagactgaggcaggagaatcgcttgaacccagggggcggaggttgcagtgagctgggatcctaccattgcactctagcctgggcaacaagagcaaaactctatctcaaaaaaaaaaagaactttttcactagaagtaaactgtggctctcctcaccccttctcacagtgaaggatcaattttaaacaacagatattttttgaacggtcaaattgaattcaaagaaagcacaactccgattaactacaatattccagaaatgactaattctgccaagccaaaattaaacaggtcaattaaaccaaataaattatttccaaaatgatattgtttaaaaaaatctctctaaaatcccttcttgtggttttgttccttagtaaatatcaccatctatgatgattgagtaccttgtatagtatgaattaaagct

SEQ ID NO: 164000 - DNA, 623 bp, Homo sapiens
ttcatagttctttaaaagcccttttgctcacattatctcattagataatgaggtgacgaaagagtctcatagatgttaaattattttcccaaggttacacagttaacaagtgattgaaccagaactatatcctcctagaattttctctttctttttaaatgctatagtgcttggtagataaaagttagcttcaaagaagatattaaattttgtttggaatcaattacattgttttcacctcttagtgtatagaaattaatatgtgcrtgaaaatatttttgtattacatatacaaatgaatactgtggcacatcattagaatatttatagcactctatttaataggcaaataaacaggcaatttaagacttatagttaaaattgtaaatttccccattctaggtacctctttttctctttgattcatatcaccttttttgaactggtgtttcccccatctactcctgggtctccagtactttactttagaatctagagaagaggggatgtgtctgccacagaattttacaaatgttggttattcattgtcaatgatgagttgcatagggaactcctgcctcccgagataaactttcaaaacagaaaagagatctgttttgctc

SEQ ID NO: 164001 - DNA, 577 bp, Homo sapiens
ccaatatttccttcactctagagaccgtctcaatatttacaacattcccctgggtttaaactgaggccaggcctcactgaggcaagggtcctgaaggcaagactgttcatcctacaatgtctcatgctgggttggaaggacggacaagagatagatgatggaatagaatgaacaaccctggcaatgcaagccactgtcctgggaggctgtctgacccaggaaccaggctgccactgtgccaggcygatcttacacagacttctgttccaagagcctcagttaccccaaaatctccactcctggaggtgcaggtgccatgagaaatttgcctgttctgagctttaagatgactgtacagtttgaaggcaaggccaaattttctttgtttgatccaaagaaaacccaaggatttttagaatgctttcctgggatagctgtttcaaacatggtcccaaaagcctctgcaccccacccctacccaactctatattcctatcaccctttcatactctcaggctatacccagatagtactatcttttgttaatcaggtcctgggagccccacagtggcctcta

SEQ ID NO: 164002 - DNA, 577 bp, Homo sapiens
ccaatatttccttcactctagagaccgtctcaatatttacaacattcccctgggtttaaactgaggccaggcctcactgaggcaagggtcctgaaggcaagactgttcatcctacaatgtctcatgctgggttggaaggacggacaagagatagatgatggaatagaatgaacaaccctggcaatgcaagccactgtcctgggaggctgtctgacccaggaaccaggctgccactgtgccaggctgatcttacacagacttctgttccaagagcctcagttaccccaaaatctccactcctggaggtgcaggtgccatgagaaatttgcctgttctgagctttaagatgactgtacagtttgaaggcaaggccaaattttctttgtttgatccaaagaaaacccaaggatttttagaatgctttcctgggatagctgtttcaaacatggtcccaaaagcctctgcaccccacccctacccaactctmtattcctatcaccctttcatactctcaggctatacccagatagtactatcttttgttaatcaggtcctgggagccccacagtggcctcta

SEQ ID NO: 164003 - DNA, 622 bp, Homo sapiens
caccatcaaacatattgtgatttgattattgcttagctgtttcaattttcttatgatatatatggtcttaagtaaatcataagttcctcaaaggaaatctgtcagtatacactgccttgtaatccccagaatgcacaataactgaaatcctaaatgaagatccttaaaaggaatggcttcaaaagatggcttaataattatttaaattttctcccccagagaagtgagactctacagcatttaaaagtatatggtaatggtgaatgatttttttttttccgcctgctctttcctttttctaggggagtgaggatttgaaagagtgtgagtgtgagtgtgtgtgtgggggaagggtgtacgtacaagtgttttcatcgtttgcatcaccatggctcttaattacagtaatcatttttgcaaataggctttgttttctactctgaatccctggcttttggcaggctgcattgggcaaacacctgttgtctggtaaaacagagaarcacctgtcagtgaagccactaagtactaacttaggagctgtcatgggggtctagggaatctttgcaattgtcagaagaaaggaaggagcacctgcttagggcccaggagggtcaaatga

SEQ ID NO: 164004 - DNA, 574 bp, Homo sapiens
cggtagttatacgtcgacttctgttggtgctagcctgaggtctcattgtctagccctcctggctgccatcagcacaggcagggtggcctgctgctttgaggaaccgtccactcaaacagatgcaggttctggcagttgaccctgggctgcaacacacagagggggaagcccctatgatagggctgaggcactgacagtctcgtctccagggccagagccagttccagttgagatcaggaccaggactgagaaaccagggtggctgctaacaggccagtgaccccagctccartgctgcctccctgacatctccacatcttcctaatagtctcagctatgcaggtgtgcccctctgtctagatttctggatgccagtgagaacaggtcagcagcttgtatgctgactgccagggcctggggagagaggaaggctcattgacctgatttccacagcaggaggcagagcactgaatgccacctgtatttgggaaggaagcagtcagggaataaccctgaccaatattcatcacaaccatcactttgacatctcaattttcatgcacacccgtacaat

SEQ ID NO: 164005 - DNA, 534 bp, Homo sapiens
ttgggtaaatatggccattccaaatgggagaaattgaccaaaacaaaggggctacagaccccatgcaagtctgaaatccagcagggcagtcaaatcttaaagctccaaaatgatctcctttgactccatgtctcacatccaggtcatgcttaatgcccatggtcttgggcagctctgcccctgtggctttgcagggtacagtcccctctcctggctgctttgatgggctggcattgagtgtcagtggcttttccaggcacatgatgcaagctgtcagtgggactaccattctggggtctggaggacrgtggccgtcttctcacagctccactatgcagtgccccagtgtggactctgtgtagggacttcaaccccacatctcccttccatgctgccctagcagaggttctccatgagggctccacccttgcagcacgcctctgcctggacatccaggttttccatacatcctctgaaatctaggtgaaggttcccaaacctcaattcttgacttctgtgcacctgtaggttcaa

SEQ ID NO: 164006 - DNA, 562 bp, Homo sapiens
tgcaggatctggccagccactttgggcaccagtaggagcaggctccatgcaggctctgtggtggcacccatgtgggggtggcttygacccctgaaacccaagaaggagtattacaatgctgtcttagctccaccacctgtggacagtggtgtgttatgagctcagtggccccttgcctcatagtgtggaatggctgccctccgccagcaagagcaaagagctggtgtgacagctttttttgggtacccacatttgataggtcccaggctcttgtccagcatccaagaagaatgaggttgcatggacacctgaaggaaggtgaaggtggagcaatttatttagtgatggagaaggctgtcagtggagaggggagctggagaggggatgggatcagcaggtaatctttcctaaagtctggctgtctctggctggctcttttttgaagttaagtcatctctcctctgaagtccagctgtccctctgaagttatgttgcctctctccagtcaagctggttatctttctctactgactgagtctgaggtctttataggcacaggatg

SEQ ID NO: 164007 - DNA, 549 bp, Homo sapiens
tctctgacagttgtttcagttcctgttggaaatgggctaaagaagttatgtttaatcaaatcagaggtttcttggtttaggaagaactcattggtgggaaaatgctgtccatacatcatttcaaagggactcaaacctagctttgaaggggtgaatctaacatgcagtatgactattggaagaagggtagtccagggaagatgagtctcctgagacagtttcctgaagtgccttttgataatatcatttgtcttttctacctttcccaaggattgtggtttccaagcacaataaagatggcattgtatgcctagtgcatttgagaacccctrggtgacagccatcttgaacgaggcaccattatcactctggagatacttagggagttcaaagtgagggattatctcattaattagtacttttttcaccttagaggtttctctgacatggaaatgcttctacacagttagtgaaggtatccacccatactaggaggtactgggtaccccactgtctttggcatatgggtgaaattcatttgcctgtctt

SEQ ID NO: 164008 - DNA, 570 bp, Homo sapiens
actacttactgtgacataaagatattatattagtttcctattgttggtgtagcatattaccacaaactcagtagctttaaataacaataatttagggttttacatttccagagttcagaagtccaaaatcagtttcactgggctaaagtcaaggtgttggcagggctggtttcttctagaggctctagaaaagaatccgtttccttgcctttttttaacttctggaggctgcctgcattccttggttcatggcccctttcttgaatcattccaagctcttgcttctgtgtcccatctcctactttcataatgaaatctccctcttcctcctttttataaggacacttgtgattacacttagkgctcatccagataatttaaaataaactctccatctcaagattcttaacctaatcctatctgcaaaaaaattattttgctttatagggataaaatcaagaggttccagggattaggacatggataccattgattgacatattattcaacctaccacaaatagtaagttagaaattattaagtgcaaggaaaaaaaaaaaaaaaaaagga

SEQ ID NO: 164009 - DNA, 498 bp, Homo sapiens
ctcagtactggataagtgaggcacttatgtatcttgaatatctctgcttgctcgacgccagggcctcaatattttgataaagcgatgacaggaaaaacacagagaacaaaaagcaaaggcaaagaaaatactataagtacatggaaaaactatgaactgctggaatttattttgtgtgttagagaaggaatatagttccctaatgcaattttcaaaatgtagattttagaggccagattggttttccttcctttttcaaggaaactgaagcagagttgggctcagaaaattcaaattcaagggccaatttctaaaagccactttgaatggttttgctccagaatgtgccaaaaaagtacaccaaaaagaactttgaaaaccttctctgtctgtagcagcactgtcaaatagaaatacarcacaaaccagattttctaatagccacatcataaaagtaaaaagaaacaggtgaaattaatattaatatttttattcaac

SEQ ID NO: 164010 - DNA, 580 bp, Homo sapiens
gttaatcaattctttcagataatttctactgttaatataactaatagtttcctaatttaagtgaagctttgttaaatgatatcagactctctctacctctttgctcttgctaaattctaacgattgtataatatcaacccagagatactgctttgccctacacattagctcatacagagaaatgtattcattcagaagtcttcycagacatacctcctccagtcacttagtcttcaaactaaataagtggactagaactttctagcaactgtctcagaatacttctgacccacatagtttcaaatcagttactttaagtacattaaagcttaatttaaactatttttattactgggagcaaggtaaattcatgctcccagagtgacgtttctaacaaaaccaactcaaactttgcttcactaaaatatagccacccaggggaaaaacatcataaagatagtaattatggtgagataatcaaaggcctccacactgaaaaaaaaaattgtcctaaaaatgtcacttgtgggttttgaggctttggagccttgcaaggggcttattttaaacagaaatccag

SEQ ID NO: 164011 - DNA, 474 bp, Homo sapiens
caacaattcatgcctttaaattttctactgctttagggagaagcctctagcttaagacaaatggatctcatttcttctgtgcaccagccctgacagacatcactaatcgattacagcactgccttgcactgagtcccctgggacctcataatctttcccaacatagggttaaggcagccaccaattaatcagagctgtctcccaaaatgaaatctatttgctgtagtgatccaggtggcaatctatttattttaagccaaactaaaatgttacatattaaaaaccttattattaagctggggacacaakattatagatgtaaggagacagatttgccctactctctgttcatgccttttcaactgtttgggattctgacacataccatagaaaagcaccttggatcaaacaacacaaaaaatcagagaggtagagattctagtacatataatatactggtagaattaaagctgt

SEQ ID NO: 164012 - DNA, 584 bp, Homo sapiens
gtgatttgtttccagatatatttatctgtttatagatgtttcaaattttatgcaagagattatatgctacacactgttctgtaccttatttttttctcttaagagtcattcttggtgatctttttgcagcatttcttaaagtggtgcatccctagctcaataaatacatctttaattccagctctgttagtcagtcacacctgcagtatcattggctcttctgctgggttcttagatgtgagataaacagatcgcatgtctccagtctccaccatccctatttcttcagctcttgacccctacctgcatgccagtaggaccctgaccctcagtctccctagtctttccagttatatgaggaggccccagggattatgacataagtgcacagccacttttcctttggtctctatttctcgtgcccaaagtcctttgaaattgctgcctactactgccccaaggctgatgtcctcctcttatgcccagggcactgtctgccagggtgggccagtgggtctaatcagtgtattcagaaccacrgtggatttgcgtacatgtgtgtacacaaatgtatccatgggtgt

SEQ ID NO: 164013 - DNA, 566 bp, Homo sapiens
gcatgtctccagtctccaccatccctatttcttcagctcttgacccctacctgcatgccagtaggaccctgaccctcagtctccctagtctttccagttatatgaggaggccccagggattatgacataagtgcacagccacttttcctttggtctctatttctcgtgcccaaagtcctttgaaattgctgcctactactgccccaaggctgatgtcctcctcttatgcccagggcactgtctgccagggtgggccagtgggtctaatcagtgtattcagaaccacggtggatttgcgtacatgtgtgtacacaaatgtatccatgggtgtattcaaagtaataacatacactgtttccaagagtcagtcctctcagctgctggcttcttccayataaccagtatcattctgacatataaccatccatattcttacttatgtgtatttttgtgtgaacatttgtctggaagggaggaagcctttgttttgactggagatgattatgccttctgaattgctgtgttttccaaggagtggcaattaattttcacagtggcagctggat

SEQ ID NO: 164014 - DNA, 442 bp, Homo sapiens
aatgtagcaaattggaagcacagttaaaaaaggtaagtgaagtctaaraaaaagaatcatgcttatttaaaaatgaatttataaaatggaacaggaagagacgtttttaaaaagaaacaaaccccttatctgttgctgtctgctgataaaagaattaattaaatactcttaactttattgctaagaagtctatcaaatctgtctgtaaacctgaaaaattatctcagatttcctgtttaagaaaaacttgaaaaatagatcaaaatagtagcagaagttaaaaatattataaaaaccagccattactctctgggcaaatctcaactatcagcaaagaaaaatagaaatgttttcaacaaatcacagaatccggaagccacattagatattaataaacttttgctactttcagatgtaggtcatttttttgtaccagaacttt

SEQ ID NO: 164015 - DNA, 442 bp, Homo sapiens
tggaagcacagttaaaaaaggtaagtgaagtctaagaaaaaraatcatgcttatttaaaaatgaatttataaaatggaacaggaagagacgtttttaaaaagaaacaaaccccttatctgttgctgtctgctgataaaagaattaattaaatactcttaactttattgctaagaagtctatcaaatctgtctgtaaacctgaaaaattatctcagatttcctgtttaagaaaaacttgaaaaatagatcaaaatagtagcagaagttaaaaatattataaaaaccagccattactctctgggcaaatctcaactatcagcaaagaaaaatagaaatgttttcaacaaatcacagaatccggaagccacattagatattaataaacttttgctactttcagatgtaggtcatttttttgtaccagaactttgcaaaaagcttt

SEQ ID NO: 164016 - DNA, 448 bp, Homo sapiens
tggaagcacagttaaaaaaggtaagtgaagtctaagaaaaagaatcatgcttatttaaaaatgaatttataaaatggaacaggaagagacgtttttaaaaagaaacaaaccccttatctgttgctgtctgctgataaaagaattaattaaatactcttaactttattgctaagaagtctatcaaatctgtctgtaaacctgaaaaattatctcagatttcctgtttaagaaaaacttgaaaaatagatsaaaatagtagcagaagttaaaaatattataaaaaccagccattactctctgggcaaatctcaactatcagcaaagaaaaatagaaatgttttcaacaaatcacagaatccggaagccacattagatattaataaacttttgctactttcagatgtaggtcatttttttgtaccagaactttgcaaaaagcttttctgac

SEQ ID NO: 164017 - DNA, 568 bp, Homo sapiens
ggggagtaaatttaccctatgtgattagaaatcaattgagaagcaatggcaattcaaaatatgatttatgctctttagtaatttttcaattaatattatacctgaggagggagtttctttaaaccatgataacattgtcatttacttcattcaagttgaaggaaaaagtaatagaggctcttaaaaagtgtgtcttagcttaaagcaaagtaacagtttctacaatatttcaccytgtacaccttgacattgagccccagataaatagtgcaggtatttagaaaatataagttgagagtgcagtttaaaataatattcagcacatttaaacccacaaaaatttaaatcttcaacacaaaatagacaagaaaacattatagattctaaagcacttggaacataataggatatctttgaaaattatgttttctattaatccggagacaacagtagaagttggtaataggcaatggataatacagtattttggtcctgctgatttaaatttttcttcttttcccatttaagttaatccaataaagtctgactgatattttgctattgctaa

SEQ ID NO: 164018 - DNA, 661 bp, Homo sapiens
ctttattctggaaactattctctgatttcacttacctatatttaaaatgttttaattttgcttttggyatcaagttaagccctttatccatctttagttcatttttattcatgttgagaggtgaggttctaattatatttttctaaattatcaactaattatccagcatgatttatcaaacaattctctctttatccactgatcttgatactattttattgaatatgaagttctcatttgggtgagtgtcttagtttctaagcatctgttcagttttattgatgtctctaatttgttgggtcaaaattttaattattgtatctttattatatttttaaatatctagtaaaacaaattacaccttaattatttctgcttttcattttgtcttaagtctttagcctttaattttctatcattccaagtaaattttaggatcactttgtcaattaaaacacaaaattgttgattttaattttaaatatatttaatctataaaataattttagaactatttatatgttcccaatattatttctttccattcataaacctgatccaacttgtatttattccagtggctttttacagtgaagtttaatattttcccatgatatttcttcttaaagatagtcttaagcatatctatatatatttaatt

SEQ ID NO: 164019 - DNA, 661 bp, Homo sapiens
ctttattctggaaactattctctgatttcacttacctatatttaaaatgttttaattttgcttttggtatcaagytaagccctttatccatctttagttcatttttattcatgttgagaggtgaggttctaattatatttttctaaattatcaactaattatccagcatgatttatcaaacaattctctctttatccactgatcttgatactattttattgaatatgaagttctcatttgggtgagtgtcttagtttctaagcatctgttcagttttattgatgtctctaatttgttgggtcaaaattttaattattgtatctttattatatttttaaatatctagtaaaacaaattacaccttaattatttctgcttttcattttgtcttaagtctttagcctttaattttctatcattccaagtaaattttaggatcactttgtcaattaaaacacaaaattgttgattttaattttaaatatatttaatctataaaataattttagaactatttatatgttcccaatattatttctttccattcataaacctgatccaacttgtatttattccagtggctttttacagtgaagtttaatattttcccatgatatttcttcttaaagatagtcttaagcatatctatatatatttaatt

SEQ ID NO: 164020 - DNA, 489 bp, Homo sapiens
aatgaccttcctgagattgggcctgtagtcagaaagatgtgaaactgtaatatgggtttcctgattcctagtccactgctctgagaagyggtgagctatgtggaggatgccctagataataatattaaaaattatagtagttttatttgtaatactagggtatgtatattgtatgtatattctatgctcactgtgtgccaggtactctgggaagcacttgacgtgcaatactgtgtaccttttagtctcacccacaatacagaaactgtcattattctcattttacagatgagaaactatgatttatacagattaagtaacttcctccaggttgcagagctcataagaatctaatcaggattcaaactcagggctgacagatgagccattgagaacaatcccttccgctaatgggccagaagaaagaagctagtacagcagcactaaacagtcaagcagccagcatacagccttcctgagcaggcattg

SEQ ID NO: 164021 - DNA, 264 bp, Homo sapiens
ttagtctcacccacaatacagaaactgtcattattctcattttacagatgagaaactatgatttatacagattaagtaacttcctccaggttgcagagctcataagaatctaatcaggattcaaactcagggctgacagatgagccattgagaacaatcccttcygctaatgggccagaagaaagaagctagtacagcagcactaaacagtcaagcagccagcatacagccttcctgagcaggcattgctgctgggctgcaaga

SEQ ID NO: 164022 - DNA, 264 bp, Homo sapiens
ttagtctcacccacaatacagaaactgtcattattctcattttacagatgagaaactatgatttatacagattaagtaacttcctccaggttgcagagctcataagaatctaatcaggattcaaactcagggctgacagatgagccattgagaacaatcccttccgctaatgggccagaagaaagaagctagtacagcagcactaaacagtcaagcagccagcatayagccttcctgagcaggcattgctgctgggctgcaaga

SEQ ID NO: 164023 - DNA, 520 bp, Homo sapiens
cattgttgttacgtataacaaatgctttcgacattttttttgtggaggattttgatgattttaatatttgctgctctctcattttactctagattcagagtaatattaagctaaatagatgtgaaaaataaaacagaacccagaaatcagctgattttactttgggtacaactattttattggggatagacaaaaagcttttttttttttttttctaatttacacttcgtgcaaacatagtgggttctatagaattatttttgcataagaactttagttttagaaattgtagactgtgtttggggatgggaataaattttcccttgaagagcctctatggttccttaaaaaaaaaaaaaaaagaaaaaaaaagaagaagagatrgggtctcgctctgtttcccagactggagtacagtggtgtgattgcagcttgctgcacccttgaactactgggcccagtgatgctccctcctcagcctctcaagtagctagaactacaggcctaccaccatgcacag

SEQ ID NO: 164024 - DNA, 579 bp, Homo sapiens
atagaaccaaagattttaaaaataatctaattttgaagcatcttgcctttcagattcagtcttttataaaatctatgccgtcgtcgcatatttcatacacactttttaatttgatccaccctatcgttgaaatgctcatatccatagtgtcctgagtaagtctcaggatggacatttgtcaggatattagtaatttccatatttgtctctactttaccaagtatataaaccctatgctgtttaacattatttcagcactttttaaagcaaaaataaaatatagtgattttaaaattmatataattatacgatcattgctgtaccaacaaagattatgacgcttatgttggcttacagaagacgtttccatagaacagacagaaacggtcattttagctaattaaaaaaaaagtctgcagtacaacaaagggctgttatggaggtatgtagcatataaaatcaaactcacgagaaccaagaatcacttatattaatttataatacaccttggtttcagaaagaaatggctgtgtttttaatattttaggcctcttgataaaattctgtcacatgacagct

SEQ ID NO: 164025 - DNA, 365 bp, Homo sapiens
agttactttcattgaccgaagcttggtcttatggccatttctagctacaatgtaatctggaaatgtaatgtatatctaggagtaagaggaatcaggttttgttgaaggtatagcagagacttactccctcagggtttactgtcttaaaaaataaaaaggtgggggcagggtgatctatgagcatctgttttgtctcactcttcctccgaatatcttccttcttaacaakaaattggtgccagtcagggaataaattggtaaaactaccttacagagaaatttggcaatatgtaataaagttaaagatgtgtgaaaattatggcccaaggtgctagattagaaaaacataaccacgagttttttca

SEQ ID NO: 164026 - DNA, 408 bp, Homo sapiens
ctcttgatggctgcagtggaccgtctggagtggctgctgcaaagatactggctgcagtggggaggcacagctggggttgcatgctctgtgggtccagcgggatccaagaacaggctggagccctgccccttactgagttggcacagcagaagctccatgctcctgggcacagctgcagcttcccagctgtggctctgggcccatgcatccctgcgctctcaggggccgggaagcccccagtgcccacaggctcagaagtgcctgttcctgctccctgtcctcttcccactcctggtgsctgctcctgtgtggagcaaagttgtggccaagcctgggcgctgctgcaacctggccaggtgcgcgcatgctcagggcagcactgacactccagcttcctgttgcctcggc

SEQ ID NO: 164027 - DNA, 543 bp, Homo sapiens
ctccttcactaaaacactgcctttatgacagagaaagaatatttcttctataaaactctattagtaattttgaatcaagtcataatctactcctagccatactcattgagcctgtggtaatgtatgtataacatctctgtactacgggaccttggacatgtaaaacaaataggcaagatcattgaggcatattcctttgaacagcccttctctgcctttttcttctaaattgcacaagaattggcagctaattagcagctgattagcaacattgataaaccatgtgacaaaaacaaatgctgtgctaacagaagggacagagcttttcaatgaatatgaaataggatatagagataaaaccaatttgccgaaactakcttcctatgcttctcactgtattttatattttcttagttcattcatccattcaaatatttataactactatgttcaagacaatgtggtagttttgaggatgaaaaaatgactcaaacacaatcccttccttcaaggagctcaggatatatatagcaagatgattaa

SEQ ID NO: 164028 - DNA, 528 bp, Homo sapiens
aactaacatgtattaggggcctactagatcaatcactctactaattttatataatgcacaacaggcctatgaagraattatggttattcaaaaaaaaaacagtgacgttgaaaaccctaaagtttaaatggagataaagtcctatttgtaaaatgtaaagaaatatatttggtatgaattataattgaggtcctggaaaatttctatgacagcattaaatggaaactttatgtaaaagtgtcatttagtcatttaacaaatattcattgagtgacatctgtgtgcctggcactgaacttagttctggtgatagagcaaggtcttgacaagcaatctcactgatgttatgtcccacaaaagaatttccacgtcgatagcattttcaaaaaaggaaaaaaaggaaaaccacccagaactggggtatgaagttcataaacttgaggaaagaataatattgagccacatactagtcggttttgtaaatcctgctgaagtgcagtcagtgggaatccatcagcaatctgtttt

SEQ ID NO: 164029 - DNA, 386 bp, Homo sapiens
acaggtatttcagggtacaaacctatggctgggctcagctttaaaagatcttatctgagattccttgtcaaacagagttccatcaaagccaatctaaaaggcctatgtagaaagaattattcttgctgcactttaagcaaataatcaggccaaatataagactaaagtctattttgtacagaacacagccctatcatgatttgtttttgacataaattaggactacagagagagaaattaggtttcaaaacttatcatcattagattctagwctcattagttgtttttaagtttttgtctacgttttagactaaccttgctttttcctgtgaaccaaacagcaatctccagctgcggctaagagaaaacaaaagttgatgggtaat

SEQ ID NO: 164030 - DNA, 572 bp, Homo sapiens
agccccatgcacccaaatcttagcaagcataactataggcaccagttatctgggcatgtcacaagatattcttttctctcccttgttgaaggaggactcaattctacagcttcaccttagcattcagcttatgataaggggtccatgcaacaccccaaccctgcctgcccggcaagacacatttttgtcacaaactcaattccaagctcatgtcaaacrcctaggaaagaaaactggatctgagggatgcagaggcagatgataatgaaagttaaaaggcacagcatatttgagcattactaattcctgccaattaacccaagcttcccatttcatggataaaggtcatgctagtatccatggcataaatgaggcctaggaaattcaaaggctactgacagcaggggagatagggggtatgtgggtaagagtggatattcccaccccctatgcccccctgttaacatgggtgaaagctgctttgatatgcatgtgtggcaccctatcatggttgcagggactcagggatacaaggatggaggaaagaaagaggaatgcctcactttcctccc

SEQ ID NO: 164031 - DNA, 572 bp, Homo sapiens
agccccatgcacccaaatcttagcaagcataactataggcaccagttatctgggcatgtcacaagatattcttttctctcccttgttgaaggaggactcaattctacagcttcaccttagcattcagcttatgataaggggtccatgcaacaccccaaccctgcctgcccggcaagacacatttttgtcacaaactcaattccaagctcatgtcaaacgcctaggaaagaaaactggatctgagggatgcagaggcagatgataatgaaagttaaaaggcacagcatatttgagcattactaattcctgccaattaacycaagcttcccatttcatggataaaggtcatgctagtatccatggcataaatgaggcctaggaaattcaaaggctactgacagcaggggagatagggggtatgtgggtaagagtggatattcccaccccctatgcccccctgttaacatgggtgaaagctgctttgatatgcatgtgtggcaccctatcatggttgcagggactcagggatacaaggatggaggaaagaaagaggaatgcctcactttcctccc

SEQ ID NO: 164032 - DNA, 457 bp, Homo sapiens
gatttgttatagtttgaaaaagaaaagaaaaactaattacacatgaacattttttttcaacctgtaaacaaaagtagacaagtgacaagtagctgttagaaactgtgcagataaggttcacaagttcttcagaataattatttgcctctttcaagttgaaaacaagggaaatctgtttcccaagtgtttcacccccttcccccatcccccatctctaacaatgccttatttacttgttttctaatgacttcttgctgcgtttttcatcaagtygtctcgtctggaacagaacatatgtactgcaggccctaattaaggctaactaaagtacctcttgctttcgatttaatccaatctgccagcaatcaagaaaaaccctgcaatggcaggctggcctccacttaagctgctttgcagaaatgggacaaagtgcccacgtcaagtgggagtccgaaat

SEQ ID NO: 164033 - DNA, 553 bp, Homo sapiens
accaactacctcatttggaaaatgagattggctcttaaatttattactgatatcatacatttagtaagagaggaaggacctttttcctctgcttgactgttagagttatttataggacttctggttttaaatggcaattagcacacactttggttatcagtagcagcatcttagtaaccataagaaaacataatattaccaaaacaagaaaagaataaaatcctagcaagactaaaggagaaaaagacacaaaaaacctatatttaaaaacttttagagttaactaygcaaatgaaacctaattataattacagaatgaattacaaacattctattattatacatttttaaatgagctagagggaagagaaagaataaaaaagagggtaaatgttgacttgtaaaaattgaatcatcaaaaactatattgctataatactaatcattaaactaatagaaaactaaacaatgagaatattttatattccatttgttggtattgttttaaaggtcgtgtttcatgtgcacatatttcccctttaaattaaaagat

SEQ ID NO: 164034 - DNA, 553 bp, Homo sapiens
accaactacctcatttggaaaatgagattggctcttaaatttattactgatatcatacatttagtaagagaggaaggacctttttcctctgcttgactgttagagttatttataggacttctggttttaaatggcaattagcacacactttggttatcagtagcagcatcttagtaaccataagaaaacataatattaccaaaacaagaaaagaataaaatcctagcaagactaaaggagaaaaagacacaaaaaacctatatttaaaaacttttagagttaactatgcaaatgaaacctaattataattacagaatgaattacaaacattctattattatacatttttaaatgagctagagggaagagaaagaataaaaaagagggtaaatgttgacttgtaaaaattgaatcatcaaaaactatattgctataatactaatcattaaactaatagaaaactaaacaatgagaatattttatattcyatttgttggtattgttttaaaggtcgtgtttcatgtgcacatatttcccctttaaattaaaagat

SEQ ID NO: 164035 - DNA, 591 bp, Homo sapiens
ggacatcttcagtgacatggtttattcttttgaggccacgtcacttggatttagggaggggaaagtcttttacgaggaagtgtgcattttgaaaaagatctacaacctcctcttctatcctatctcccatcacagttcatttctcacaatttagaagaggaaatggcagtgttttgtaatagaactagttctgtccttgcatcttgcaaaaagctggaattggtgaatggccccgattacaagtgattttttgactctgtaatatggaatgtcctttgacttcgcctctgggcctgagagaacaagaaaaawccttctctacatctggcaacaacaaaagatcagtgcagcagctatcatagtattcaaatgaagagatgatgaggctgagttaagacactaggtattattaataggatgaaggttatggaagaaagtcaagtggttatttacgagaccatgtgaataattaaaatgcaagagaaagacagtaaatgagaaagagaaaaaagggtcaagatcatctctaacatttttgacttcagtagcttcatgaatcacaaactgagaagacagtacaggaggacagat

SEQ ID NO: 164036 - DNA, 566 bp, Homo sapiens
gattagctatgttgaggatcttttcatgtacttcttggccattcctatgtcttctttggagaaatgcttattcaattttttagctcatattttaattgggttaatagttttttgctattgaattgtaggagttccttatacattttggatattaacccttcatatgatatatgttttgcaaataytgtctttcattttataggctgactttcactttactgattttttttttttttttttttgagacggaatctcactctgctgcccaggctggagtgcagtggcatgatcttggctcactgcaaactttgccacccgggttcaagtgattctcctgcctcagcctcccagtaactggaattacaggcacatgctaccacacccagctaatttttgtacttttagtagggatggagttttgccatgttggccaggctggtcttgatctcctgacctcaggcgatccacccatctcggccttccaaagggctgggattacaggcgtgagctaccgcactcagcttctactgattgtttcttttgctgtgcagaaggtttttcgcttg

SEQ ID NO: 164037 - DNA, 566 bp, Homo sapiens
gattagctatgttgaggatcttttcatgtacttcttggccattcctatgtcttctttggagaaatgcttattcaattttttagctcatattttaattgggttaatagttttttgctattgaattgtaggagttccttatacattttggatattaacccttcatatgatatatgttttgcaaatattgtctttcattttataggctgactttcactttactgattttttttttttttttttttgagacggaatctcactctgctgcccaggctggagtgcagtggcatgatcttggctcactgcaaactytgccacccgggttcaagtgattctcctgcctcagcctcccagtaactggaattacaggcacatgctaccacacccagctaatttttgtacttttagtagggatggagttttgccatgttggccaggctggtcttgatctcctgacctcaggcgatccacccatctcggccttccaaagggctgggattacaggcgtgagctaccgcactcagcttctactgattgtttcttttgctgtgcagaaggtttttcgcttg

SEQ ID NO: 164038 - DNA, 554 bp, Homo sapiens
gatcactgcatgttagcatatgtgtacttacaattaatatttttaattataatattctgacaatattgaaaattgagtattgttagaatgatggagtactgcatgtctgaggaccatatctgtgctttactctttctgaaatagatctgctttgttcaaattcatttataacttaagactataaataaatcatgtttatagttaggatacagcatcttattttttttttctacaatgatttagtggtaatcgggcagtcattgctgtcagacaaacctaaactctaaactttgctagctgtcaaacttgaaaagataacttgaactttctgtatatcagtttcctcatctgaaaatgataagatattcttactttgaagaactgtgaatacaatttgagataatttatgcaaactgcatagyacaatgcttggtacctagcacatagataaaattcaataaatatagttaatgtgataatgaagatgatgatgacagtagtggtgatgactatgatgataactacaataaattttgtttgctttcattcccatc

SEQ ID NO: 164039 - DNA, 560 bp, Homo sapiens
aaacctcctttctttgtaaattacccagtctcatatgtttctttatagtagcgtgaaaacagactaacacaagctttgaccccaaaaccattctatacmctagccctattgagttaatatatagaattctctacatttatttgttatacactgaattctgtctccccaaaattcgtatgttgaaatcctaatgctcagtacctcagaaagtgacttactagtagatagggtctatacagatgtaattaagtaaaaatgaattcattagggtgggccctaatccaacatgactggtatacaattgaatatagacacagggagaatatcatgtgaggatgaagacagagatggtggtggtgcttgaacaagccaagaaatgccaaagattgacagcaaaccaacagaagcctggggagagatatggaagagattcttcccagcagccctccaaaagaaccagccctgagaacaatttgatctcagacctgtagcctccagaactgtcagaaaataaattactgttgttctaagtcacctagtttgtggtattttgttatggc

SEQ ID NO: 164040 - DNA, 403 bp, Homo sapiens
gaattccttggaatccctttcctgggacagaggggtagctatcttgatggtgggggttctgtgaagcttagcaaaaagtccaagtaatagatatgacatttgttctcaggaagcttactagttagcagctgtttttccggtggatacctgatgactatctttgacccagaaatgggggtgaagaaacagaaaaagaagtcttttcataaagaatgaatccaaatttgacaccaaatcctggartggcatatccacattgaacaacttgatgacaaagtggttttgaaacagctggccctagatgtggagaggaccgaggaccctgttatctaaactggttactccgtgaggctcagctcattcagtcctgctttagtagtgtcctgttcttagtgctgtacta

SEQ ID NO: 164041 - DNA, 466 bp, Homo sapiens
ggcaaaagatctgaatagacatttctcaaaaaaatacatacaaacagcaaacaggtacatgaaaaggtgctcaacatcattgatcatcagagaaatgcaaatcaaaactacaattaggtattattccattccagttaaaatggcttttatccaaaaggcaataacaaatgctggtgaggatgtggagaaaagggaccyctcgtatactctcagtgggaatgtaaattagtgcaaccactatggagaacagtttggaggctcctcaaaaaactaaaaatagacatatcttaccattcagcaatgtgactcctgagtacattcccaaaagaatatcagtataccaaagagatatctgcactcgcagatttattgtagcactattcataacagccaagatttggaagcaacctcagggtccatcaacagatgaatgaataaagaaaatatggtacatacacacaatgaa

SEQ ID NO: 164042 - DNA, 600 bp, Homo sapiens
ttcaaatttgtaccttctcttytcttacaaaaactcaattacagctaccattttcattagcatattaatcacactctacaatttgtttttccagcctcagtcttctcagagtataaaaaagcttaaatattttcttaaaaatttgtactctcctcagctactatgtaggatccagtcatttgagctggtttgaggtggtgtagtgtatactctaaggagaatataaacttttatccctttatagccctattttaggttgtttcattggtcaggagccccttgtattttttctctctccaagagcttttgtggaagagaaagttcaatgtgagggctgaggctgttaagtgcccaattggcatttttttaaaaaatctattctgaaaagaatgggacattaaacagcaggactgacagcagtaacttaagtcagaatagagcatatatacttggcagtagcaggaaatccttttgcccaaagtagaaaaagtgatatgattacctgctaggagcattatacatacgtttttagacatgaattaacaggctagaatcagtcatggttaaaggcacctacatttttaaatggatggtagattt

SEQ ID NO: 164043 - DNA, 631 bp, Homo sapiens
tatgcattcattcttatctgcaataagaaggacaggaagatttacattaatttatctttaccttaaaaagaagttgggcagctgacttagtaatgaatttctctgtatgtggaataatcttgctaatcttgcttggggaaaacgtaggtgtgggaattgaaattcttacgcctgaagtctaaaaaagtccaaagagtgcaaagtattagaaatgacattaaactggtactctggaaactgggattttaatcttatttctgctacttatatctgagttttcacttatcacttcaccgtttcacctctgagtcttcaattttcagaactgatgcctaactctgaaggcaatgacctctgcagtaagctgtactttatacctagaagcaggtgattggtagaaggaccatcattctcttctattccttgattctgtctctgttggcctgacatccaggggatatttcttccagcacaatcttagtataaagagcatttttaaatatcaaaatccatcatttactttgttcgctcttcaacacttcacaccttcctgtacctgtcaaataaccgacyattccacaagggggtgcactccttgaggataaaaaccacatctaatgcatattcgtct

SEQ ID NO: 164044 - DNA, 567 bp, Homo sapiens
tcatttaacaaatatttagtgagcatcttctatatgccagacactgtcctagaccctggtaattttaaaacagtaagtaaggcaaagactctgtcttcatggcacttctgttctagtagaaaaaatgaaaaacaaataaagaataatatgatacccagggtgataagcactaagagggaaaaaaatgaaacagagtaagggggttagaaagtgatgaggctgtacttcaaatgaaattgtcaaaaaaggcttttcagggaaggtgacatttgacaagagatttaaatgaagtgagaaattaagctatgcccaatgcctagaagaatgtcccagagctctgaagaaacagcaatgtaaaggcactgaagcaagaatgtgcttggttgctcaaggagcaacatactggccactatggatagagtagagttagctcgaggaaagacagcagatgaggtgagaaatccaagtctaatataacttgagagaagcatcagctgcattggctgcaaatttgtgycctacatacctccttcacctcaccctggtccccaccctgcagccagggag

SEQ ID NO: 164045 - DNA, 571 bp, Homo sapiens
aggtgagaaatccaagtctaatataacttgagagaagcatcagctgcattggctgcaaatttgtgccctacatacctccttcacctcaccctggtccccaccctgcagccagggaggccaggtcatgttgaactttctaaaccattgtaagacttgtgagtttctacgaagtcctgaggggtttgagcagggaagtgatatgatctatcttacatttcaaagaattaatataggccaggtgcagtggctcacgcctgtaatcctaacactttgggaggacaaggcgggtggatcacttgagtccaggagttggacaccatactgagcaacacagtgaaaccctatctcaacaaaaaartaccaaaaattatctgggcatgctggtgtagcacctgtagtcccaggcatttgggaggctaaggtgggaggataacctaagcccaggaggtagaggctgcagtaaactgagatcatgccattgcacgccagcctgggcaacagagcaagatgatttctcaaaaaaaaaaaaaaaaaagattaatgtggtaggctgaatatggcctccaaagat

SEQ ID NO: 164046 - DNA, 578 bp, Homo sapiens
ttccattttgtcaaagcaagtcatatgctcaaaccatgttcaaaattagaaaggtagactctgtcttttggagggaagggaaacatttaatagaatttttttggtaacctatataaaaatttccattcaaggatttactttatatatttactttcctaaaagtgttttttgttttttgttttttgttttctgaaaacactttttaataggaacttctaggcaaggtaatttgtaaagaggtagctaagtaatagyatcaagctgtgctgtagaatttgtaacggtttcagcttaaaaaaagagaagactagctggattgagtaagttttcagaaaatttttgcaaactggagataaacctattttaggcatattagaaactttttccattcttatgttaattaaggttctttttatttcagataagataatcccagttcaattagattaaccaaaaaggggaatttattaaagggatattggagtgactcatggatcccagggagagtgttatgttgctgttgggtgacttacaggcttctgtcttctctaattctcatctggtaaatttttttttta

SEQ ID NO: 164047 - DNA, 654 bp, Homo sapiens
ctctagttctcataacaaagcagaaattatcatatacattttgcagaaaaatatatttagaacttgtgaaaagrcttgtttaaagttcctccaccttggcagtattaaaattttgtagtgtataattctacgttgtggagggctgtcctgtacatgataggatgttgagcagcatctgcagactttacccactggatgccagtaacatccccaccccggagctatgacaactgaaagtgtccccagatttgccaaatgtcccttgagtggtaaaatcgctctcaattgagagccaataggtttcctattgctctagagatttattgttaacatgtggtttatgaagaccaggatacttgatgttctttgttgaaactcaatcaagtaaccaatttaatatttgagaaatggtttcattttggatgatggtagaagtgaaaatcagcaatgagaagtcttacttggcttttccaaatcctagtatagtctcctaaacatttattattctttttatgaacaaatacatacagaatatataaattaatgaagataagcccgacacagtacatgtaccagatggtgccaggtaaaactactaaacaatcatatatcgtagcagtgattaaatgctattaccagataagaaatgatgaa

SEQ ID NO: 164048 - DNA, 589 bp, Homo sapiens
gtgccatcataaaattcagaagtattgaaaaatttttttcctcaccttaattttttaggataaaagtcaaatttttaatcccaaggagaaaagatggatgttttattgtaaagcaaacatttagtatttttttcctactactgttataactattttgatgtactttttgtcaaaccattttgagtggcgtttagaaattaagctatgggaacttaaatgtgagcttgatggtacctgggacttcaggcaggaaacaggaaatggtgaagtaaattgcartgccttgcaaatcacatctccactagatgtcaggctaggtctcctctgagtctcaggctactgctctatctgcctatatcagagattagtcctgttattagttccatgttaccaatccttcagacaactgaagatgctggtcctccagcatctttcacagaactgatctctggtcttccttccaacatatactgtgaactagatttacttgtctgataggacgattaaactttttgataactttaactctacactcaaaagctgtcagggtcctactctcctttaaaacttacattacaatctattttcc

SEQ ID NO: 164049 - DNA, 268 bp, Homo sapiens
ctttggttttaagagtgtaagaaggtacaagatagtagaatcatgatgatgtggaaatgggaaaaagatgacttaaggaaggtttggtaaacttgattggrtaggatttaaagatgttagataaggaatagttcacgggaggtgtgtgtttatgtgtgtgtctgtgtatttccatgtgaacatggatagggttgggatggagagaagggtcatgggaatggacataactatcttcaaatgtttgaaaaactggtacctgaatgaggga

SEQ ID NO: 164050 - DNA, 472 bp, Homo sapiens
tacgtgacacttccgataaagaattcaaagtagctctgttgaggaaactcaaagaaattgaagataacccagagaaggaattcagaattctatcaaataaatgtgtgaaagagattgaaataattaaaaagaattaagtagaaattctgtrgttgaaaaatgcaattgacatagtaaagaatgcatcagtcttttaatagcagaatgaatatgcaaaagaaagaattagtgactctgatgacagactattttaaaacacacagaggagacaaaagaaaaaaaaaagcacgcctagaatctagaatctagaaaatattctcaaagggtaaaactttttattattatacttctagggtacatgtgcacaacgtgcaggtttgaaacataggtatacatgtgccatgttggtttgctgcacccatcaacacatcatttacattaggtatttctcctaatgatatccctcccccag

SEQ ID NO: 164051 - DNA, 472 bp, Homo sapiens
tacgtgacacttccgataaagaattcaaagtagctctgttgaggaaactcaaagaaattgaagataacccagagaaggaattcagaattctatcaaataaatgtgtgaaagagattgaaataattaaaaagaattaagtagaaattctgtggttgaaaaatgcaattgacatagtaaagaatgcatcagtcttttaatagcagaatgaatatgcaaaagaaagaattagtgactctgatgacagactattttaaaacacacagaggagacaaaagaaaaaaaaaagcacgcctagaatctagaatctagaaaatattctcaaagggtaaawctttttattattatacttctagggtacatgtgcacaacgtgcaggtttgaaacataggtatacatgtgccatgttggtttgctgcacccatcaacacatcatttacattaggtatttctcctaatgatatccctcccccag

SEQ ID NO: 164052 - DNA, 569 bp, Homo sapiens
tggacaaccctataaatttggcaaaagggatctaatacaatcagattgaaattctgggcaattaaatttctatccaaactaactgcagttttcagacaatgaaaaacttgaaagctttcagcagtttttccttttattgattgttgtggatgtcaggacattgtcatgaaccaccatcatatatcatattcagcaagaatccataagtaccaataaatggctcattggaaatggtacttatatgcaatatattaacattcagtagtcttttttatgtattatttttgagagagagagacagatggggtctcactatgttgcccaggctggtctcaamctcctcacctcaagcaatcctccatcttggcctcccaaagtgctgggattataggaatgagccactgcacctggccaacattcaatagtcttgattttattgtttacttataaagttatggccaattaatttatatctaaattattattatataagattataatgaagaagagttaaaaattctgttataatttccaatatgacactaaggtgcaacagatggagtttaaaa

SEQ ID NO: 164053 - DNA, 569 bp, Homo sapiens
tggacaaccctataaatttggcaaaagggatctaatacaatcagattgaaattctgggcaattaaatttctatccaaactaactgcagttttcagacaatgaaaaacttgaaagctttcagcagtttttccttttattgattgttgtggatgtcaggacattgtcatgaaccaccatcatatatcatattcagcaagaatccataagtaccaataaatggctcattggaaatggtacttatatgcaatatattaacattcagtagtcttttttatgtattatttttgagagagagagacagatggggtctcactatgttgcccaggctggtctcaacctcctcacctcaagcaatcctccatcttggcctcccaaagtgctgggattataggaatgagccactgcacctggccaacattcaatagtcttgattttattgtttacttataaarttatggccaattaatttatatctaaattattattatataagattataatgaagaagagttaaaaattctgttataatttccaatatgacactaaggtgcaacagatggagtttaaaa

SEQ ID NO: 164054 - DNA, 661 bp, Homo sapiens
atgatataactacagaatctatattttgtattgtgaagatcaacaattctttgccaggaccaagataaactcatagattccaaatccataaataaaataagataggatagttaatatatctgtgatggaataaagagtagtaaattgaaataacagagtaaaacaaatgcaagcagattttggaggcagtgcaaggtagccaaatagaagcctcaagcaatcttacttcctacaagaacaccaattgaacaactatccacccaaaatatgttatcatccataagtaaggacttcrtcttgccagtttgttatttgctttctggttgatttgtggtcttctcttccttctttctttccttccttcctgtctctttttagtgaaggtgatcttctctggtggtatgttttaattcatttttttgcatctgttgcatgttttttgatttgagcttatcatgagggttgcaaataatatactataactcattattttatattcaatgataacatggaaagtaaatggaccaaactcaccaaccaaaagacatactgtggctgaacggattaaaagatacacacttcacctataaagacacacagagactgaaaataaagagatggaaaaagatatgccatgccattaaaaaccaaaacgaagcag

SEQ ID NO: 164055 - DNA, 607 bp, Homo sapiens
aagaggtagtcacagcagtagtacaaagggaggtaggtgatggtgatttatagctttaaaaaatcttattagaaaatgacaaagattaaaaacaagccggctacacattcaatttacaaaattaggaatagagaattgaacaaacccaaataagcaggcaagaaataaataattaagggcatagatctgtgaaatataatacaaaataataggtacatgtaactaaactccagacatattcttgagatgattgatcacataatgagatctctgacaagactgacaaacagaaaaaaagaaaaacaacatgtaaataggcaaaacagaatgaaaaaagaaaaaatatcattcacaacagattaataatagactattaagatattatactttagttaatttaaaatttaatatgaaacatatgcctacttgaaaaaacataaaagaccacaaaattaaaagatataaaatattaattatactaatatttgtgtaaattatttgttatcatattcaaaggctccctttctgaaacttctgggccaaarttctagcaaatcttgaagaaactgttattccaaacataaaacttcttctagaacatgaaaaa

SEQ ID NO: 164056 - DNA, 369 bp, Homo sapiens
aattatgtatgcataaagacacagaaatagaggggtgttggaaatgattaaatagtcattattggagaaataacaacaaatccaaattttcctgcaaaggagcaaccaagaacattatagcaattaataaaggaaaaatcccacaagtggataaaactatgatgcatagtaatgcttttctaacttgaatcatctggggatcatgctaaatgtgcagattctgattcagtaartttgaggaggaaccaaagattctgcatttctaatgagctcccaggtcatgccaatgttgtaaggtactgaagaattacccctctacaccaagcaatgcagctaaggatgagataaattgccaatttttttccaaat

SEQ ID NO: 164057 - DNA, 390 bp, Homo sapiens
gaattcagttatgtgttcccagtgatttaagaaagggaatatttaaacattaaaaaagtcaacatttaaaaattgagatctttcaaattaacatttgtgtttgtagtttgtcttgacaaggtgtaacacctggcagaacttgaccttcatccccatgtgacagtgactagcagagctgagtagcctctgacctcttcagacagggcatgaatgctcctcatttatgytatctggcttgtatcagggttgggatttaccaacctcaatgctaaatgctttacatatattaactaatttaattctcactcacaacccaacactgataacagtgttgtccttattttatacatgagcaaaatgacactcaaagatgttaaatgcctcaactaa

SEQ ID NO: 164058 - DNA, 636 bp, Homo sapiens
aatgaaactacctcttgtacagtggctgcaaytgaagtcaccacttggttaagcttatgataatccactgccattctccaagatccatctgtcttctgcacaggccaaatgggagagttgaatggggatggaaactgtctggtggagttgggcaccccttctcaaggcaggagacaggcaatagggtcaggaattatagtgttttccttgacaatctaagagcaggggtaaatctgaatgtttttattttaatatttgctgagaaaggcgagagcttggctgtattcaaaagcaattaaatcccaggtacctgctcaggttaaggttcagctatgtgtattttgaaatcatacgggcttcaataatttttataggtattatgaccacaagctcaaactatatgagtatgttatttagctatgaaagttcactgatgcactgttgttaattggtaaatttaagtagttataatatatgaataaaaagaaacaggaatactgagatttcattttgtttttcttaatgcaaaaattagtttatacactggaaaaatcagaaagcattattgcacactaaagttggaatcataagaaatgtttcattcataccttatgatgtatcagaaaaataggaaaa

SEQ ID NO: 164059 - DNA, 584 bp, Homo sapiens
gtttttaaaattgtattccaatctggaaatgttgatatttattaagaaggcagattaatatagaatagtgacagaaagaaagggaattagaaaaaaaaaagccaaagttggtagagtgttagagaattgtagttggaaattcagcatatggagttggatgatgtggtataagagattaagtaatgggaacaggtttcaataagtgttgcttgtgggcccttgtgctggatcctctttgatgccattagagagattcagttaaagtgctgaatagcttttaaatattttgtgaaagcagactggttttttgaaagaaatctttaaaggatataattgccatggctaagcctcatgggactcatttttttaaattacaaatgtacttttctactgtggatttttaataagaatattataattattgatatacatgaattcttatttgtttttatacctactacatttaccaccatgtgctgtacacagtaaatkctcaataaatatttattacatgactgaatgacacataattactttttactctccattttctcccacttttcctctttttattttctttaact

SEQ ID NO: 164060 - DNA, 585 bp, Homo sapiens
ctcgctccgttgcccaggctggagtgcagtggcgcgatctggactcactgcaagctccgcctcctgggttcacgccattctcctgcctcagcctcccaagtagctgggactacaggcgaccgccactacacctggttaattttttgtatttttagtagagacgggtttcaccctgttagccaggatggtctcgatctcctgacctcgtgatccacctgccttggcctcccaaagtgctgggattacaagcgtgagccaccacgctgggcctcaatagaagttaatgtcctagtaaatgatgtagacaacatctaataaaggagtcacartaggaaatcttatttattctttctggggtaagttgcctatcctcaaagtagctcactttttctcgtctgtaagaaaataataccagctttttctacttcgtggtaattttttagaagaatataatcagagaaaacttgtggaaagcctttaattacaaatccatagttgaatgtaaatgtgtaaacattacacatctggttttgctctattctctggctctgcttcatccatttccgaatgtcactggttcatgta

SEQ ID NO: 164061 - DNA, 585 bp, Homo sapiens
ctcgctccgttgcccaggctggagtgcagtggcgcgatctggactcactgcaagctccgcctcctgggttcacgccattctcctgcctcagcctcccaagtagctgggactacaggcgaccgccactacacctggttaattttttgtatttttagtagagacgggtttcaccctgttagccaggatggtctcgatctcctgacctcgtgatccacctgccttggcctcccaaagtgctgggattacaagcgtgagccaccacgctgggcctcaatagaagttaatgtcctagtaaatgatgtagacaacatctaataaaggagtcacagtaggaaatcttatttattctttctggggtaagttgcctatcctcaaagtagctcactttttctcgtctgtaagaaaataataccagctttttctacttcgtggtaattttttasaagaatataatcagagaaaacttgtggaaagcctttaattacaaatccatagttgaatgtaaatgtgtaaacattacacatctggttttgctctattctctggctctgcttcatccatttccgaatgtcactggttcatgta

SEQ ID NO: 164062 - DNA, 628 bp, Homo sapiens
ttcccctttccttcttcctaatttccttttttttttttttttttttttgagatggagtcttgctctgtctcccaggctggagtgcagtggcacgatctcagctcactgcaacctctgcctcccgggttcaagcaactctcctacctcagcctccygagtagctgggattacaggcgtgcgccactatacccggctaatttttgtatttttattagagatggggtttcgccatgttggccaggctggtctcgaactcctcacctccggtgatccgcccacctcggcctcctacagtgctgggattacaggtgtgagccactgcacccagttccctcttcttaatttcaaacttgattctatcctctgccattcataagctatgttaaaattggacagtatgtagaacatgtcctattttctacatttctttatgtcttgcatttgagggtggattatctcttcaaaaactgttttgactaaggggatccaatttactggaagcagaattgatgccgtctacatttcaagcatttcaatgggaaaagttagaaaattatattcatttatgagctcaacgaaattagtgtacaaaataaacttacattttacattattatttgtttaattc

SEQ ID NO: 164063 - DNA, 628 bp, Homo sapiens
ttcccctttccttcttcctaatttccttttttttttttttttttttttgagatggagtcttgctctgtctcccaggctggagtgcagtggcacgatctcagctcactgcaacctctgcctcccgggttcaagcaactctcctacctcagcctcccgagtagctgggattacaggcgtgcgccactatacccggctaatttttgtatttttattagagatggggtttcgccatgttggccaggctggtctcgaactcctcacctccggtgatccgcccacctcggcctcctacagtgctgggattacaggtgtgagccactgcacccagtyccctcttcttaatttcaaacttgattctatcctctgccattcataagctatgttaaaattggacagtatgtagaacatgtcctattttctacatttctttatgtcttgcatttgagggtggattatctcttcaaaaactgttttgactaaggggatccaatttactggaagcagaattgatgccgtctacatttcaagcatttcaatgggaaaagttagaaaattatattcatttatgagctcaacgaaattagtgtacaaaataaacttacattttacattattatttgtttaattc

SEQ ID NO: 164064 - DNA, 577 bp, Homo sapiens
aaaacaacagttattatctcagcaatgaacaatattggaagtraaaagataggaaagtcttggagcaggcttatgaatgagcctctgggagaaagcataaaagtgtgcaggtttcacattaatgcccaccagaaagcatccactgcagaagggaaaaatcagcaaccaaaatgtcaccagcctgtcttttgtaccctctggtgcttgcactatgggattatgaatgtagtggccacagtggtcactgaaaggctttgctcctctcaaaagtctgatgtaacttctgcctcagctgagtgcctgatctgccaatagcagagcccaacccggacaccttcaatgtggtaccatttctcaaggatactaactaacctttgatagcaagttcataatctcagactccttcacacatggagagggcagaaattcatccttgtctgaactgatacatggggctgccttcgtgggtttgccacctgcaaagctgcacagaccccagacatagatgagtcacatgcttagttttaatgctctgatgtaatccattgtgaaattcttaatcgtttttgaacaaagg

SEQ ID NO: 164065 - DNA, 555 bp, Homo sapiens
ccttcaacatagcattgtataattataaatgcttattattatattagctataaaatagaccacatgctgtatataatttcttttatagcagaattattactyataaaatagtgctctcactctgtctctattacacacacatactactataatccatcaggggttgccagatccatctaaataggaactagctttagctttcttggaagtttgaaaggaataccataataattttattgacagtaattttacaaagattaagaggtttgttttggcttctttgcttattgaattatcattcaatcagacagaccagggacaacatttgccttagtataataatatatgttatccttccatactcttgtgtttaataatatgttatccttccatacttgtgtttaattctatatcaaaccattaactctatctttaagcttatattctaaaaaaaatgcaaatttaaattttcaggaattgtatcatccattcatttccctcattcaattacctgaaattaagttcgtttgttttctgttaatacatggtattttg

SEQ ID NO: 164066 - DNA, 555 bp, Homo sapiens
ccttcaacatagcattgtataattataaatgcttattattatattagctataaaatagaccacatgctgtatataatttcttttatagcagaattattactcataaaatagtgctctcactctgtctctattacacacacatactactataatccatcaggggttgccagatccatctaaataggaactagctttagctttyttggaagtttgaaaggaataccataataattttattgacagtaattttacaaagattaagaggtttgttttggcttctttgcttattgaattatcattcaatcagacagaccagggacaacatttgccttagtataataatatatgttatccttccatactcttgtgtttaataatatgttatccttccatacttgtgtttaattctatatcaaaccattaactctatctttaagcttatattctaaaaaaaatgcaaatttaaattttcaggaattgtatcatccattcatttccctcattcaattacctgaaattaagttcgtttgttttctgttaatacatggtattttg

SEQ ID NO: 164067 - DNA, 615 bp, Homo sapiens
tgaataataggtaggactgactcttgctttcacagtaattaccctattgtaactttttttctcccytctaagttgatattggtatttgatgcgatttgatttcccatgtatgaaaattgtgtgaaataccctacagtgacttatgatcacgttgaagtaagttctgacaccaaccttgaatcctatctatgcatcaaaagtacttttgctggaagactatatggactcttcatgtttctttccttttttttcttctaccctattaggaaaatattttgtcattaatatcagagaatgagttgtgttgaaggccaacatctccatgtatcctcaggtttcattttctactgctttcactgagatattgctctatccatcacaaatattttctcatgaacattcaatattgcttatgtgattttatcctatgcagtttatatatgcccaagtctctccatttttaatacaaaaaataattcttaactctcttgcagttattatttaaattttctcattttctggaaagaggttgctataatcactagctctaaattctcacctcttatacatttctcaaatcagccacaaactgcttctacacttatagatctataa

SEQ ID NO: 164068 - DNA, 599 bp, Homo sapiens
tataaaaataatcagtcttgtttatgaataataggtaggactgactcttgctttcacagtaattaccctattgtaactttttttctcccttctaagttgatattggtatttgatgcgatttgatttcccatgtatgaaaattgtgtgaaataccctayagtgacttatgatcacgttgaagtaagttctgacaccaaccttgaatcctatctatgcatcaaaagtacttttgctggaagactatatggactcttcatgtttctttccttttttttcttctaccctattaggaaaatattttgtcattaatatcagagaatgagttgtgttgaaggccaacatctccatgtatcctcaggtttcattttctactgctttcactgagatattgctctatccatcacaaatattttctcatgaacattcaatattgcttatgtgattttatcctatgcagtttatatatgcccaagtctctccatttttaatacaaaaaataattcttaactctcttgcagttattatttaaattttctcattttctggaaagaggttgctataatcactagctctaaattctcacctcttatacatttctc

SEQ ID NO: 164069 - DNA, 615 bp, Homo sapiens
tgaataataggtaggactgactcttgctttcacagtaattaccctattgtaactttttttctcccttctaagttgatattggtatttgatgcgatttgatttcccatgtatgaaaattgtgtgaaataccctacagtgacttatgatcacgttgaagtaagttctgacaccaaccttgaatcctatctatgcatcaaaagtacttttgctggaagactatatggactcttcatgtttctttccttttttttcttctaccctattaggaaaatattttgtcattaatatcagagaatgagttgtgttgaargccaacatctccatgtatcctcaggtttcattttctactgctttcactgagatattgctctatccatcacaaatattttctcatgaacattcaatattgcttatgtgattttatcctatgcagtttatatatgcccaagtctctccatttttaatacaaaaaataattcttaactctcttgcagttattatttaaattttctcattttctggaaagaggttgctataatcactagctctaaattctcacctcttatacatttctcaaatcagccacaaactgcttctacacttatagatctataa

SEQ ID NO: 164070 - DNA, 615 bp, Homo sapiens
tgaataataggtaggactgactcttgctttcacagtaattaccctattgtaactttttttctcccttctaagttgatattggtatttgatgcgatttgatttcccatgtatgaaaattgtgtgaaataccctacagtgacttatgatcacgttgaagtaagttctgacaccaaccttgaatcctatctatgcatcaaaagtacttttgctggaagactatatggactcttcatgtttctttccttttttttcttctaccctattaggaaaatattttgtcattaatatcagagaatgagttgtgttgaaggccaacatctccatgtatcctcaggtttcattttctactgctttcactgagatattgctctatccatcacaaatattttctcatgaacattcaatattgcttatgtgattttatcctaygcagtttatatatgcccaagtctctccatttttaatacaaaaaataattcttaactctcttgcagttattatttaaattttctcattttctggaaagaggttgctataatcactagctctaaattctcacctcttatacatttctcaaatcagccacaaactgcttctacacttatagatctataa

SEQ ID NO: 164071 - DNA, 615 bp, Homo sapiens
tgaataataggtaggactgactcttgctttcacagtaattaccctattgtaactttttttctcccttctaagttgatattggtatttgatgcgatttgatttcccatgtatgaaaattgtgtgaaataccctacagtgacttatgatcacgttgaagtaagttctgacaccaaccttgaatcctatctatgcatcaaaagtacttttgctggaagactatatggactcttcatgtttctttccttttttttcttctaccctattaggaaaatattttgtcattaatatcagagaatgagttgtgttgaaggccaacatctccatgtatcctcaggtttcattttctactgctttcactgagatattgctctatccatcacaaatattttctcatgaacattcaatattgcttatgtgattttatcctatgcagtttatatatgcccaagtctctccatttttaatacraaaaataattcttaactctcttgcagttattatttaaattttctcattttctggaaagaggttgctataatcactagctctaaattctcacctcttatacatttctcaaatcagccacaaactgcttctacacttatagatctataa

SEQ ID NO: 164072 - DNA, 617 bp, Homo sapiens
  misc_feature (1)...(617): n = A,T,C or G
agtagtttcaaaacacacaatatgctagttccagcattcagattttaattgatagatccaggcttcagacttagctttatctgatttcaaagtttttatcatagacatatcataatgcagccacccaaagtaaataataccatttattaggtactgacctaatatatacttcactgtgacaaatattactgcaaaatgtctaatgtaatttactatgtacctgagatggataggtagataaacagaatataagakatatatatatatatatatatttatacatataaaattttatgtacgattaatatgacacatacaaatatatttaaatctttatggataatcacttctccacacaagatgtgcacaaatattcccacatgaccacagtactgttctctggaaagccttgaatcagcttcaacattcttnnnnnggcncgtcgaagcagatgccaccanccccgcccccgccncnnagagnaaanaanggggaacccaaannaaagggcaaaagtgtgcccccccttgtgttttgtattcaccttcatctttatctcttttttccaacactatactccagctagaatggccttatttctcacctttaggccagaa

SEQ ID NO: 164073 - DNA, 622 bp, Homo sapiens
agttgaaacacgataccacctaacacctgggtccaggcagttttctccattacgtggtcatgcgcaatacagaagggaactcacctcacagagccatctctgcctcatggaattatcagatgttaactawgaaatcaatttgaatacacttaggtctagcaaaaatcccactacagagatgggttttaggtttagaatgctggaggggtcacaggtatctaagttttcttttggcagtttagtgattgaggtcactgagatttatagtgtacatcatatgtgtttgtgcgtatgtgacagcaagtatatagctgtggtgacagaaagtcaaaaatacaaaaatcgtgcagagaccaggacccacaacagaaaaacacagttctagcttcttgcaacctccatcaggatgctgagactaaatacaaaaatatatgttctaaccatcacaattgtatagtatgatactaagcacaatattgccccaaaatgtggaagacacccatgcaaacttccctcacatgatcttttggggaaacagaagaccagagtaatcttgatttaaaattttctaacaggataaaaaaattaaatttacttatgaaacatcttgcaataaaatgag

SEQ ID NO: 164074 - DNA, 596 bp, Homo sapiens
actaaagggacatgggataaagtgcacgcaaaaagtgaggttttggaagaagaagtggctatgacagttatatggtgcgcagaaaagataaatcataacaggcttaagatttctatccttaataggcttgcttgcaagatttgttcttggccgaaatgtggtttttctgatttggggaatgattctcaccattcccagaactacttagagtagctcattatgattatactctttgtacacataatgcattttatgttgaacacttgatttcctttggtagtctgaaattttggtatgtgctaggaagcaagtacctatgtgactagcccccagttcaaaccctgcaaactgaatatctattgagctccctggtagacatattctacttgctgtcacaaatcatgtgagaggaattaagcmgttcccatgtgactctgctggcaaagtgctcttggaagcttgtgcctggtttcccctgctcttcacttattttgcctttctctttgtttatttatctttgtatccttttgttctaataaatcatatcataaatatgactctaagcaagtcctaaacttctcctagtaaatcaatga

SEQ ID NO: 164075 - DNA, 620 bp, Homo sapiens
gtagtataagaatgtctgttttataaaactataggaagtctctctttctatgattcagaagatattcatgttgcctgttgagtttcattctttgccagagttgagattgcacataatttatggtggttcctcttttctttgactaaagcatgtacattttttctttttcttttcttacttggttatggttaaaggagttacattcgtatgtatgtgcaggtgtcttttttattatttaggttttgtatgtgcaggtatcttgatttaagcatttaaaacatttcagcctctgaagcatgattgctgaggtgtagattcacttctattcttctttatatttgataatactgaagtttttttttttcaacatcttcagaatatgaaaaaatcttcgaaatgcttgaaggagtgcaaggacctactgcagtcaggaarcgattttttgaatccatcatcaaggaagcagcaaggtgggtagaaataggaactgtccaatttctttaagcacttgggctcaatagagcactgggggtgagcgttggggaacagcccctgccttgcgtttctcaaaccctggtcctcactcacagttacggctgtctccacagttacttaggcta

SEQ ID NO: 164076 - DNA, 434 bp, Homo sapiens
tatctcagtgccaatgtccatcctcttcccagttgctgcaatctgaaacatcggaaacttctgtgacttctttctctccctaaccccctcatggaaatcagtcaccaaactgtgctgctctggcctggcttcccttcactgccatgtcttccaagccagctctctgcccctattctcactactcttgcccagagattgggattttctattgacctctagtctctcttacataccacccttctcagtcccaccwacaggagcctccagggccactgtggggtacacagtactcagtccatcctcctcaactcccagaatttagccgtgcaaagctccttacttcatctggcaaaaaaatggctatactaaaaaccagtgtgaaaatttcctgccctacttagttaatagtaaccctcccttattatagctgagca

SEQ ID NO: 164077 - DNA, 434 bp, Homo sapiens
tatctcagtgccaatgtccatcctcttcccagttgctgcaatctgaaacatcggaaacttctgtgacttctttctctccctaaccccctcatggaaatcagtcaccaaactgtgctgctctggcctggcttcccttcactgccatgtcttccaagccagctctctgcccctattctcactactcttgcccagagattgggattttctattgacctctagtctctcttacataccacccttctcagtcccaccaacaggagcctccagggccactgtggggtacacagtactcagtccatcctcctcaactcccagaatttagccgtgcaaagctcyttacttcatctggcaaaaaaatggctatactaaaaaccagtgtgaaaatttcctgccctacttagttaatagtaaccctcccttattatagctgagca

SEQ ID NO: 164078 - DNA, 434 bp, Homo sapiens
tatctcagtgccaatgtccatcctcttcccagttgctgcaatctgaaacatcggaaacttctgtgacttctttctctccctaaccccctcatggaaatcagtcaccaaactgtgctgctctggcctggcttcccttcactgccatgtcttccaagccagctctctgcccctattctcactactcttgcccagagattgggattttctattgacctctagtctctcttacataccacccttctcagtcccaccaacaggagcctccagggccactgtggggtacacagtactcagtccatcctcctcaactcccagaatttagccgtgcaaagctccttacttcatctggcaaaaaaatggctatactaaaaaccagtgtgaaaatttcctgccctacttagytaatagtaaccctcccttattatagctgagca

SEQ ID NO: 164079 - DNA, 514 bp, Homo sapiens
ataaccacatgactcaaatggacacaataatccctcattttattctgctatagctaaaaaaaggaagagaaagataactcattgcttcatggctgtgaagtttgttatgaagcttcaaaaaaatttaaattcttattttagtatttgctagaaaatctaaaagaaaaycgtctttaaaattccagcaacttttcctctgtgaaaaatttagttcggattattcattacattcccatcccactttacaaagcacctgatagcaaaatgcatttcagaaaaatgcagctaatacttttgagaacagccgtttttctgaaaaataatatttttgtttatacaaattgcacctaagttaaactttcatggaggatatgatatactccaatagcatagtgtttatatcatattaaggtctaccatttgctgagaagtggacttggtgccctgggaacaataaagaattaaaagattgagaaatacagtattttcatgtgtgaataattagtcagagatc

SEQ ID NO: 164080 - DNA, 514 bp, Homo sapiens
ataaccacatgactcaaatggacacaataatccctcattttattctgctatagctaaaaaaaggaagagaaagataactcattgcttcatggctgtgaagtttgttatgaagcttcaaaaaaatttaaattcttattttagtatttgctagaaaatctaaaagaaaatcrtctttaaaattccagcaacttttcctctgtgaaaaatttagttcggattattcattacattcccatcccactttacaaagcacctgatagcaaaatgcatttcagaaaaatgcagctaatacttttgagaacagccgtttttctgaaaaataatatttttgtttatacaaattgcacctaagttaaactttcatggaggatatgatatactccaatagcatagtgtttatatcatattaaggtctaccatttgctgagaagtggacttggtgccctgggaacaataaagaattaaaagattgagaaatacagtattttcatgtgtgaataattagtcagagatc

SEQ ID NO: 164081 - DNA, 495 bp, Homo sapiens
tcaaatggacacaataatccctcattttattctgctatagctaaaaaaaggaagagaaagataactcattgcttcatggctgtgaagtttgttatgaagcttcaaaaaaatttaaattcttattttagtatttgctagaaaatctaaaagaaaatcgtctttaaaattccagcaacttttcctctgtgaaaaatttagttcggattattcattacattsccatcccactttacaaagcacctgatagcaaaatgcatttcagaaaaatgcagctaatacttttgagaacagccgtttttctgaaaaataatatttttgtttatacaaattgcacctaagttaaactttcatggaggatatgatatactccaatagcatagtgtttatatcatattaaggtctaccatttgctgagaagtggacttggtgccctgggaacaataaagaattaaaagattgagaaatacagtattttcatgtgtgaataattagtca

SEQ ID NO: 164082 - DNA, 528 bp, Homo sapiens
tatttaggtcactggatttctggaaaacttaaasatgaggtagggcagtgaaaaatgtttataatctctaaaagaataaacaaccattcattcttttataaatttttgagttatcctggggagaagtacattcaagtaacttaagcaggagggaaattggttccaactgaggtgtctgtggaaggctatcaggatgcagtgttctctgagcaaggtataactgggataactggactttgtctgcaaccactggagaatctgtcaaagaagctagaagaacaatgtactggcagcagggtggacgatggcttgaagcttagagactggaagcaaagagagagatcagaggttgagagaaaatgtgggcttaataaatccagaaggttggtggtaaaggaaaggagagataatgctgaaagaaatacagatgaaagaaatgttgaagatgaagaacattagaatttggcaacttggatatgtggtggttgaggggacagggtgagggacacacatgagtagacaatgtag

SEQ ID NO: 164083 - DNA, 528 bp, Homo sapiens
tatttaggtcactggatttctggaaaacttaaagaygaggtagggcagtgaaaaatgtttataatctctaaaagaataaacaaccattcattcttttataaatttttgagttatcctggggagaagtacattcaagtaacttaagcaggagggaaattggttccaactgaggtgtctgtggaaggctatcaggatgcagtgttctctgagcaaggtataactgggataactggactttgtctgcaaccactggagaatctgtcaaagaagctagaagaacaatgtactggcagcagggtggacgatggcttgaagcttagagactggaagcaaagagagagatcagaggttgagagaaaatgtgggcttaataaatccagaaggttggtggtaaaggaaaggagagataatgctgaaagaaatacagatgaaagaaatgttgaagatgaagaacattagaatttggcaacttggatatgtggtggttgaggggacagggtgagggacacacatgagtagacaatgtag

SEQ ID NO: 164084 - DNA, 538 bp, Homo sapiens
taactgttccaccataaacacattcaatctctctctctgtttctctttctctttttcacacacacacacatgcacaaacacacacacttatactttctaaggtcctccacctgcatcgttatacctttgtgtaggatataaacttagaaaggtatgttaccaaagagaatatatagaagttgtgcaacatggacattaacataagaaagtagaacttgcatgacatacaactgtccctttcaataccagcatttttaacttagtgcctacacaatgaatggtatttcacatcagtttgaaaggacaggacaaaatttgaacaagcaaccagtttcctaggagaagcaggwggcttaaatcactttcaacaatcaattctgccatttgaatgcagcctgacacttgtcgagttcagtcgatgacatgaaatcacagtagaaaggccaaaccctaagggaaattcacaagcttctacatctgcaagtaaaaccacctgaacttgtgcccataaccttcccaacaccatgcccttaacttt

SEQ ID NO: 164085 - DNA, 420 bp, Homo sapiens
aattctgagcaaagggttctttgtgggaaggtctgtcaaacagcatagttaccatggcaaccctggctggataacccatttgggaaaatacttgtaggacctaacactctatcatctgtcattcaataatttcatgttcrtaataactaggaaatcaatggcgatcctctgagacagtttgtggaaagggcaagcatgctattggcagctcacagcttacatttgcgtctatttgttgtgattctcgtgccagcttaggagtgtgagaaaaaacttgtttgtttggactggcacaaagattaaaggcaggttcagttttgcaatctaattacaactgcagtgtttacatgtacaaaagagaaaaaaaaaaaacaaatggcatattaatcaagcatttgctagactgttaagaagtaaggt

SEQ ID NO: 164086 - DNA, 565 bp, Homo sapiens
gttggaagggggcaggatatatgagaccagttttgtgctgttcggttaagagatgacactaattgcagcctagttggatacaataaaaaatgtagacatatgggtggaattgaaatatatttaggaggaaaagtcratggaaatttattatatatatgaaataatatatattacaaatatatgtgtaatatataatatatgtaataaatgttatatatatataacaaagatatacatatcattgtaatattcagttactggttcagaatttactttttcctcctagagtatagcagtatatactacccatatataaataaaaattgaatgaacaaacatcttggcctatgaataggaaaatattgaccctgtcaaatttctaaaagctaacaatctttgttgtaaagcatccaacattttggtgaaattcagactttggggaagtattgtagttaagtatagaaatgtttttcttccgtatctaaaggaagaaattggttaccttatggtagataaaacataattatttggaaatgagaaattgtgtccagaaggcatgctttgc

SEQ ID NO: 164087 - DNA, 574 bp, Homo sapiens
gaacttctacatttggtcattttagccaatttaaatttcagttgccacatgtggctagactattgtattggacagtgcagggtctagaaattrttaaggaatcatatgcagttatatagaaatgatgtcttaaaaccttgaagtctacagttcaatttatattctatcctaacatttaaaaattctctctatggattttttagggggatgaattttgtttaaatgtgtagtgcttttttaagaactgaaatgaaatataaattataaaagcaagtataaaatatgaatcccatggaatagcctacaaagaggaggcttagaaactagaatactaaaataactcccttagatagcagcatttagtaaataatcttgacactaaaatctcatgaaaaagatagtcttatcattttacatttgcaaatcttgacagcctgaaatctaggtcattgtattagcagtgggaataaagaatgaattaatttaattcaaatacaaagagttgcacttccagaactcaaaaaaattgtcatcaagtggggcgttctgagaaaatcagttcccctttcaacta

SEQ ID NO: 164088 - DNA, 574 bp, Homo sapiens
gaacttctacatttggtcattttagccaatttaaatttcagttgccacatgtggctagactattgtattggacagtgcagggtctagaaattattaaggaatcatatgcagttmtatagaaatgatgtcttaaaaccttgaagtctacagttcaatttatattctatcctaacatttaaaaattctctctatggattttttagggggatgaattttgtttaaatgtgtagtgcttttttaagaactgaaatgaaatataaattataaaagcaagtataaaatatgaatcccatggaatagcctacaaagaggaggcttagaaactagaatactaaaataactcccttagatagcagcatttagtaaataatcttgacactaaaatctcatgaaaaagatagtcttatcattttacatttgcaaatcttgacagcctgaaatctaggtcattgtattagcagtgggaataaagaatgaattaatttaattcaaatacaaagagttgcacttccagaactcaaaaaaattgtcatcaagtggggcgttctgagaaaatcagttcccctttcaacta

SEQ ID NO: 164089 - DNA, 574 bp, Homo sapiens
gaacttctacatttggtcattttagccaatttaaatttcagttgccacatgtggctagactattgtattggacagtgcagggtctagaaattattaaggaatcatatgcagttatatagaaatgatgtcttaaaaccttgaagtctacagttcaatttatattctatcctaacatttaaaaattctctctatggattttttagggggatgaattttgtttaaatgtgtagtgcttttttaagaactgaaatgaaatataaattataaaagcaagtataaaatatgaatcccatggaatagcctacaaagaggaggcttagaaactagaatactaaaataactcccttagatagcagcatttagtaaataatcttgacactaaaatctcatgaaaaagatagycttatcattttacatttgcaaatcttgacagcctgaaatctaggtcattgtattagcagtgggaataaagaatgaattaatttaattcaaatacaaagagttgcacttccagaactcaaaaaaattgtcatcaagtggggcgttctgagaaaatcagttcccctttcaacta

SEQ ID NO: 164090 - DNA, 574 bp, Homo sapiens
gaacttctacatttggtcattttagccaatttaaatttcagttgccacatgtggctagactattgtattggacagtgcagggtctagaaattattaaggaatcatatgcagttatatagaaatgatgtcttaaaaccttgaagtctacagttcaatttatattctatcctaacatttaaaaattctctctatggattttttagggggatgaattttgtttaaatgtgtagtgcttttttaagaactgaaatgaaatataaattataaaagcaagtataaaatatgaatcccatggaatagcctacaaagaggaggcttagaaactagaatactaaaataactcccttagatagcagcatttagtaaataatcttgacactaaaatctcatgaaaaagatagtcttatcattttacatttgcaaatcttgacagcctgaaatctaggtcattgtattrgcagtgggaataaagaatgaattaatttaattcaaatacaaagagttgcacttccagaactcaaaaaaattgtcatcaagtggggcgttctgagaaaatcagttcccctttcaacta

SEQ ID NO: 164091 - DNA, 515 bp, Homo sapiens
acatgttcttaaccaggtgttcaggagggcacatagcttcccccataagagaggatactatttacaaaagtgacttgtgattggaagcctatttctagctgtatattaaaataaactttctggcacatacactaacacctgattgcccaaatcatatttatttaaagaattgtaattctcagatcatttgcctttttgtttcttttgttactattccttatgagctaaggcaaaataaagtttaccaggagatrtgaaaatttaagattagcagcgatcacgaaacatatgatcaacaggaaaaatgtttaattctttataatagaatcattatgatattgaacttttccacgttttctttctagatttagtgacctgataatacaggacacatagaatgcagtttctggtttataactgcagtaaacaaaccaaatgtgctcgctgaggagtccagtaaaacaatcagaatggtgcgcttaggtgtgaaatgaggtcaagtttatattttgttg

SEQ ID NO: 164092 - DNA, 567 bp, Homo sapiens
ttgggggtttgtgttccaccatatctatgaggatctgacctaccaagagaatcagagacatctaagaaatgaaacagatgggtaatgagaaaggctaagaaataaatagcaagtcctcagaatggctttatttccccagttccaataccttcctatgataaacctctattttatttgctagaatgaggtgtctgttccttaaaatcagaataacaagtgaggatgcactatagtaatggcttgcttttatcaactactcagcagatgtcttaaactctagacatgtggttcagttcaaaaactctgtgtmagctctgattgcttaatatgtgccaagccctggactttgccatgtgatagtccttgcttttgagaaatgcacagtctggtagcataagagaggcataaacagagaatgttcaatttaacctggtaaatattgagtcaacagagatattgacagacagctatggaaatgcaaaggtgctgctcagcatgatgggagcttggggagtgggggagaagaagggaggagaaactaaaatgatgaaagggtttttaaaaagc

SEQ ID NO: 164093 - DNA, 533 bp, Homo sapiens
ttagcaaactaacacaggaatagaaaaccaaataccacatgtaatgatgagaacacatggacacatagaggaaracaacatgccctggggctttttggtcccagagtggagaatttgaggatggagaggatcaggaaaattaactaatgggtactaggcttaatacctgggtggtgaaataatctgtacgacaaacccccatgatgcacgtttacctatgtaacaaacctgcacttgtacatctgaaatttaaaatgaaagttgaaaaaaaaaaggaaagtaatactcatgcagcacaatggttgttttatgctgttgcttttgtgcttgtcatttgtttggttggtagaatcacgtggagtccctgcagtacttgtcaaatgactcaagtctctctaaagcccaaggcccagggaaactgctgcactttttacacagggaaactctagggaacatcactcagtgcagaggaaaagctaaagctgtgtctgaggacagccacagcagtagaaaagaccccttgtatatgtagg

SEQ ID NO: 164094 - DNA, 546 bp, Homo sapiens
gatggcacattgtagtgttactgtctttggtgattgcacactaaatatcaagcatagcatgggagaaacactgtgcatagaagaaagaatagagacttttgaatcaagcagtcttctctctgactgtgagttacttaacttcattgagcctctgtttaattgataagtctgaacctgtaagtgtttttttgaggattaaatgacacaatacgtttaaagggtataacacattacaggcattacataaatggtaatttttatagttagggtatcatttcagtctaacaatgaccctatgagatatgtaatactgtccccattttacagatgagaaaactgaagcacaaagtagtcaagtaacaaattcatattgtcagcatgcaggacacctggagttcaaaccagggtctgcctaatrttagagtacatgttcattttattgtaaataccaaatgtcccatttcatatttatccactgaacttacccataaattttgaatatctgacatatagtaggcactcaataagtatctcataaagaaaaaa

SEQ ID NO: 164095 - DNA, 546 bp, Homo sapiens
gatggcacattgtagtgttactgtctttggtgattgcacactaaatatcaagcatagcatgggagaaacactgtgcatagaagaaagaatagagacttttgaatcaagcagtcttctctctgactgtgagttacttaacttcattgagcctctgtttaattgataagtctgaacctgtaagtgtttttttgaggattaaatgacacaatacgtttaaagggtataacacattacaggcattacataaatggtaatttttatagttagggtatcatttcagtctaacaatgaccctatgagatatgtaatactgtccccattttacagatgagaaaactgaagcacaaagtagtcaagtaacaaattcatattgtcagcatgcaggacacctggagttcaaaccagggtctgcctaatgttagagtacatgttcattttattgtaaataccaaatgtcccatttcatatttatccactgaacttayccataaattttgaatatctgacatatagtaggcactcaataagtatctcataaagaaaaaa

SEQ ID NO: 164096 - DNA, 544 bp, Homo sapiens
tacttgctaagggctatttatgatttatttcaacctttagctggctctagggggaaaaatgaataaagttgaaactaaaaggaggagaagcttaatccttagtgaaattccagtggcatggaacaccctgactcttaygatgggtgcattgttaaatttgtatatgtttattttttctcaaaaataaaattaaactcatttatcatttttaattagagaacaagtgccatcattttttaaagagaacaagtttcaagctgtgagtcttttaatgtagactggtctctgagacttttctgaagcacaatgtggaaattttaaacccagtcaaatatttttcttaggaaattggtgataggtcatggtgagatatgggtgtcattaaattttcatagaggttcctaacacaccagagtcaccataacatggacactgagtataatatctccaaagaagcatttgcttgtctgccgtggctctgaagggacctgttacagtccatcagtgaaataatatgtgtgttaaaagtccctaaatatgtatt

SEQ ID NO: 164097 - DNA, 372 bp, Homo sapiens
ggatcatggcatacctaaccacaaatattgttcatatctttcaatgacatataagggcagcagtagacacagygagagtttggtaggtggagagtttcaactcagtacatggtaatagcatagaaaaaaattggcccagaaaaaaatttgtttaatagtattggtctgaaaaactaatgagaattttagttttgactgaaaatatgtgtaataatagtacattctttcacaatccatcgtcattgaaattaataccccaggtgtcttttataggtgttaagaaatgattcacaattgaactgtttgtctcagtgctacagaaatgctatttcacctcactttattcctatcctactcaatagaaaaaacacg

SEQ ID NO: 164098 - DNA, 580 bp, Homo sapiens
cggggtacaagtgcaggatgtacaggtctgttacataggtaaagatgtgtcatggtggtttgctgcacctatcaacccaatacctaggtattaagcccaggatggattagctatttttcctgatgctcccccttcccccttcccctcactcctcacaggctctagtgtgtgttgttcccctccctgtgtccatgtgttttcattgttcagctcccacttataagtgagaatatgcattgtttgtttttctgttcctgcattagtttgctgaggctaatggcttccagctccatccatgtacatctyctaaagtttcctttagttacagtctgctattggcaaaatacttaggttttttgtttgtctgaaaatatctttactttacccttgttccaaaaagatcttttccctaggtatagaactctaggtttgcagatgttttgtctcagcacaataaagatatctttccaccatgtatttactgatccataatataaatacaatacatagtgaagaaggttatttctgcatctgtggattagcacttttcatcagttacacaatattctgtctttatctc

SEQ ID NO: 164099 - DNA, 559 bp, Homo sapiens
gacttatattaagaagattcatcaggcagtaatgtaccaggtgaattcaaggagatagaacagttaggaaagagattacatcatcctgaactgtagcagcaacagagggagtagaaagtaagggggaaaagataaccctgaagagaagacctaaacctggatgactggmaaaatgataaggtcattaaccagcttaggaagaagatcagatctgtgaagagtcactaagaccaacccgctcatgtggagatctggttctgatgccagcagaaagaacttcaggcactaaacttggcagctgaaaagcttggctgcactccactgaatcaatcaaattccactgttttcttgattcttaattaatattttccagtaaacaagttgatcaggtaggagagaaagaaaagagatgagcagattttatggtgtatccattatttattttattaaggataaatatttgtattttaaaataatgcttatttttctaatcttaagtaactatatggtcacagcaaaaatgtctggaaatacaaaggtatattaaaaaaaaagtaac

SEQ ID NO: 164100 - DNA, 525 bp, Homo sapiens
tgggtaggtgcctgagattaaaaccctttttacagttgagggccgtgataatttcaataacattaatttacaattgacaaattgtgtactcttaacactgataatctagccatttattagactttaagagcaggagtaattaagtattactgcccagaagagttgctagggtgttatttataaacacaatgagtataaaaaacaactttttatgttcaaatgaatattaattrtttcttcattaaatgcagcctgagatatttgcgttaatgtttttgctataccattttatttccgaagttgattgggctgctcatttgtcattgttgttctattttgttttgctccccacccctaaccaacccatatgaacttctaaggggtgagaacaaactagagggtattttctgaaagaaagaattttgccccatactctctaagtaaaatactattttcacctggtagtctggggtttgagaactcctaagcaaaaaaaaaaaaaaagtaaaagctttttttatattt

SEQ ID NO: 164101 - DNA, 547 bp, Homo sapiens
cggggcaggtgcagggtgtgagatgatcttggttcaaggaggggctttgactcccctggtcccaggtaggcacacccagccaccccttgctctcatgggtccagcccactgacctggtggcaggaagtcagcaaggctctcacaggaagaccaacacaccctcacggcttgatgtcaatattcaattattaactttaatgtgcaaataaatagaaaaggaaaactacattcaaaacagctgcaaaggaaggacaagccccagaacagaaattcctcaagaacggaaaagaggcgctccctagaagcatgcggggatgggaatactgggaggaggggctcggcggggtctccggctgcacccggggcccaggtggctctgcccgagacggccgtgggcctggtacaggaatcttgatggcaagttcccttcttagaaaaccaggatgtgtacaaagtgcctgtgtgacayttggggagcgggggtggggagcccaggaggacgggtcagcatcggaatcgcccagcctggagtcaaaggcgtcaggag

SEQ ID NO: 164102 - DNA, 547 bp, Homo sapiens
ctgtcaggcacttccacgggttaagggttacaagtctggaattttttaattttttaatttttattttttttgtttttgagatggagtctcactctgtctcccaggcaggagtgcggtggtatgatcttggctcactgcaacctccgcctcccrggttcaagcaattcccctgcctcagcctcccaagtagctgggattacaggcacctgccaccatgcccggctaatttttgtatttttagtagagatggggtttcaccatgtgggccaagctggtctcaaactcttgatctcaggtgatccgcccaccttggcctcccaaagtgctgggattacaggcgtgagccaccatgcctagctgactccatctcttaataaaaattttagctgggcatggtggtacacccctgtggtcccagctactcaggaggctcaagcaggaggatcacttgtgcccctaggagttggaggctgcagtgagctatgattgtgccactgcattgcagccagggtgacagactgagactctgtctctaaaaaatttttta

SEQ ID NO: 164103 - DNA, 484 bp, Homo sapiens
  misc_feature (1)...(484): n = A,T,C or G
caaaagaactgaaaacaggtgttcaaacaaatccgtgcaataaatgttgatggcggcactgttcacaacagccaaaaggcagaaacaacccaaatgtccatcaacagaatacggataaacagaatgtggctcatccatctaacagaatatgattcagccaggaaaaggaatgagcactgatccacggtacgacatggatraaccttgaaaacatgatgctgagtgagaggagccagacacaaaggccacatatggtgacattccacccatctganatgtccagaatgggcgaatcaaatccacagaaacaggaagcacatgggcgttgccaggagctgggggaggtgaatggggtggctgctgatggggactgggtctcctttcagggggatgaaaatgttctggaactaggtagtggtgaaggttgtacaacactgaggatgtaccacatgccatggaattgttcactttcaatggtgaattc

SEQ ID NO: 164104 - DNA, 580 bp, Homo sapiens
aagattctggccaggcacagtggctcacgcctgtaatccragcactttgggaggctgaggtgagtggctcatttgaggtcaggagttcaagaccagcctggccaacatggtgaaatcccatctctactaaaaatacaaaaattagctgtgtgtggtggtgcacacctgtaatcctagctactcaggaggctgaggcaggagaattgcttgaacccagaaggcagaggttgcagtgagccaataccgagccactgcactccacactccagcctgggtgacagagtgagactgtctcaataaataaataaatacataaataaaaataataataataatttaaaaagaatggcaaggcacggtggctcacgcctgtaatcccagcactttgggaggctgaggcaggcggatcacctgaggtcaggagttcgagaccagcctgactaacatggagaaactcatctctactaaaaaatacaaaaaattagctgggcatggtggtgcatgcctgtaatcctggctacttgggaggctgagttaggagatcacgccattgcactccagcctgggcaacaagagcgaa

SEQ ID NO: 164105 - DNA, 580 bp, Homo sapiens
aagattctggccaggcacagtggctcacgcctgtaatccaagcactttgggaggctgaggtgagtggctcatttgaggtcaggagttcaagaccagcctggccaacatggtgaaatcccatctctactaaaaatacaaaaattagctgtgtgtggtggtgcacacctgtaatcctagctactcaggaggctgaggcaggagaattgcttgaacccagaaggcagaggttgcagtgagccaataccgagccactgcactccacactccagcctgggtgacagagtgagactgtctcaataaataaataaatacataaataaaaataataataataatttaaaaagaatggcaaggcacggtggctcaygcctgtaatcccagcactttgggaggctgaggcaggcggatcacctgaggtcaggagttcgagaccagcctgactaacatggagaaactcatctctactaaaaaatacaaaaaattagctgggcatggtggtgcatgcctgtaatcctggctacttgggaggctgagttaggagatcacgccattgcactccagcctgggcaacaagagcgaa

SEQ ID NO: 164106 - DNA, 496 bp, Homo sapiens
ctacacggaaacactgccaatttaccggaactgaagtctctcgcctgccctccagaagggggccactgggaaggacaattgaacttggccaaagaaacagagtgacagcatgcctaggagcaagggcttcagatcagtcaaattcaggtggggcagcagtgccgccacgacggaacaagaagtcatgtgcaaaagtgcttcacctgctccagccttggtttcctcatctgtaaacaggagataataacggtttctctatggtagggatgctgtgaagattaaatgatagcagcgaagcgcttcagccagtacccggcatgtagctggtgcttgagagacrttagctattatcatacaaatggtgctccaaatattagcattggaatgagccgtaactaataagtattgattagcaccatgcatagacaggatgctctgagcgatataaaagtgagtgaggaagaatgcacaatggagcagggaaatagaagtgtcc

SEQ ID NO: 164107 - DNA, 496 bp, Homo sapiens
ctacacggaaacactgccaatttaccggaactgaagtctctcgcctgccctccagaagggggccactgggaaggacaattgaacttggccaaagaaacagagtgacagcatgcctaggagcaagggcttcagatcagtcaaattcaggtggggcagcagtgccgccacgacggaacaagaagtcatgtgcaaaagtgcttcacctgctccagccttggtttcctcatctgtaaacaggagataataacggtttctctatggtagggatgctgtgaagattaaatgatagcagcgaagcgcttcagccagtacccggcatgtagctggtgcttgagagacattagctattatcatacaaatggtgctccaaatattagcattggaatgagccrtaactaataagtattgattagcaccatgcatagacaggatgctctgagcgatataaaagtgagtgaggaagaatgcacaatggagcagggaaatagaagtgtcc

SEQ ID NO: 164108 - DNA, 454 bp, Homo sapiens
agtgactcagcctctccgtgccccaggttcctgagagggtgctcacatatgagctgagctgttagccctggggatgtgttagccttctggagaaatacctgcaactcctggcctgccttgggtgcagcagtgcmattggctgctgatgtcacatgaagtgcccctggcatcaaagaggcctgaatttgtcttcatacctggagaaccacatacatatgacccttgccttatagagctcacaatcccagatggcagacaatggcacgacctccacgggctaccacattgggagcagaaaagagacatgaatgccacagaatgtgctctctgcaggaatgtctctgggccttatctccatatttcagaaaccaagttcagggtcagtcacagggaagtcacctggtaagtaaatagttattgaaattaaccaacaaatattttgagtgtgtgccat

SEQ ID NO: 164109 - DNA, 476 bp, Homo sapiens
ctgtcaagctggaagtgactcagcctctccgtgccccaggttcctgagagggtgctcacatatgagctgagctgttagccctggggatgtgttagccttctggagaaatacctgcaactcctggcctgccttgggtgcagcagtgcaattggctgctgatgtcacatgaagtgcccctggcatcaaagaggcctgaatttgtcttcatacctggagaaccacatacatatgacccttgccttatagagctcacaatcccrgatggcagacaatggcacgacctccacgggctaccacattgggagcagaaaagagacatgaatgccacagaatgtgctctctgcaggaatgtctctgggccttatctccatatttcagaaaccaagttcagggtcagtcacagggaagtcacctggtaagtaaatagttattgaaattaaccaacaaatattttgagtgtgtgccatgtgccagga

SEQ ID NO: 164110 - DNA, 415 bp, Homo sapiens
caagcccctgtttgtagaacatgaaagcagaggccacaaagcaccagagaaccacaataattgagtcataatgaacgtgagatacttaatctctgtcatctacaaagcctctgacaacttcatcatgcggcattttcctttatgtccttttccccactyatgctatgaaaaaagaaaagcaacgggggatggtgtgagacttgtcagtatttggacatgtatcttcagccgaaattatttgccttctcagattcagtaaggaggccccattttcaatcagcgtgaatgccggattctccccatgaccagggtgaaatcagcggcaatttcacagcagtcaaactcacagggcagtgacagtggggaagagctacctccttctgaggtcgtcattatatgctgagctcaagtctca

SEQ ID NO: 164111 - DNA, 414 bp, Homo sapiens
cagacaggcagccaagcccctgtttgtagaacatgaaagcagaggccacaaagcaccagagaaccacaataattgagtcataatgaacgtgagatacttaatctctgtcatctacaaagcctctgacaacttcatcatgcggcattttcctttatgtccttttccccactcatgctatgaaaaamgaaaagcaacgggggatggtgtgagacttgtcagtatttggacatgtatcttcagccgaaattatttgccttctcagattcagtaaggaggccccattttcaatcagcgtgaatgccggattctccccatgaccagggtgaaatcagcggcaatttcacagcagtcaaactcacagggcagtgacagtggggaagagctacctccttctgaggtcgtcattatatgctg

SEQ ID NO: 164112 - DNA, 617 bp, Homo sapiens
ttgaatgggagaactcagttttctaaagatgttaatcgtccctaaagtgacacacattataaggaaatgattctcataatttttctttagaacttaacaaaataattttaagattcaactagaaaactaaacatggaataataagtcaaaaaagatttaaaacaaaatwattataggggatcatatcaagtttttaacaagttataaaacttcaaatattaaaacagtatgaagcttgcgccaaaatacatagatcaaggaaacaaaacagaaagttcagaaacagacaaaactacaaataagaattcagtacataataaaggtggccttttaaatcagtgaagaaaaggtgtataatatgataatttcttttttaaaagtgtgatgacaactaaccatttgacaagaataaatgtagatccttaattaacaccttaaaataaaatgaagtctccaaatgaattagatgtaagtacaaataatgaaatttaacaatattagaggaaaatataaatgcatttatatagataaagaaagctctttcaatgaagaattaaggcagaaatggaaagatctaactaaataaatattttaagacattcgtatggggaaaaata

SEQ ID NO: 164113 - DNA, 465 bp, Homo sapiens
cttgcttccaacctcccagctatccttgttcattcctgggcgtaggctgaactaactttgggaaaaaattagtttatagtttaagcaaagatggtaacaaccttttcccaaggcagacctccttcttacctggggactagattgtgtttgtaagactaacattagccacaagagtagaaattatggtttaggagtcatgcagctggaggatacaagattctgaccctccataaactgctcctaagatcaatgcttgagatattttgcagaccctgcayttgatggatcagttggccccacccagatcaataaactggctcatctgatcttgtggcccccacccaagaactgactggatgcaagaagacagctccaacttcctatgatttcatctctgaccaatgagcacttctggcccactggcttcccccactcaccaagttatccttaaaaactctgctctct

SEQ ID NO: 164114 - DNA, 561 bp, Homo sapiens
taaattaactgactccatcttgcttccaacctccaagctgtctttgttcatttctgggggaaggctgaactaactttgggagaaacttagtttacagtttaaacaaagacagtaaaacccctttcccaaagcagacctcctttttgcctgaggactagattgcctttgtaggactaacattagccacaagagtagaaattatggtttaggagtcatgcagctggargctacaagattctgaccttccctaaactgctcctaagatcagtgcttgagatattttgcagaccctgcacttgatggatcagctggccccacccagatcaataaactggctcatctgatcttgaggcccccacccaggaactgactgcatacaggaagacagctccagctccagctccttctgatttcatctctgaccaatcaacactcctggctcactggcttccccccacccaccaagttatccttaaaaattctgctccctgaatgctcaaggagactgatttgagtaatcataaacctccagtctcccacacagccagctctgtgtgaatt

SEQ ID NO: 164115 - DNA, 561 bp, Homo sapiens
taaattaactgactccatcttgcttccaacctccaagctgtctttgttcatttctgggggaaggctgaactaactttgggagaaacttagtttacagtttaaacaaagacagtaaaacccctttcccaaagcagacctcctttttgcctgaggactagattgcctttgtaggactaacattagccacaagagtagaaattatggtttaggagtcatgcagctggaagctacaagattctgaccttccctaaactgctcctaagatcagtgcttgagatattttgcagaccctgcacttgatggatcagctggccccacccagatcaataaactggctcatctgatcttgaggcccccacccaggaactgactgcatacaggaagacagctccagctccwgctccttctgatttcatctctgaccaatcaacactcctggctcactggcttccccccacccaccaagttatccttaaaaattctgctccctgaatgctcaaggagactgatttgagtaatcataaacctccagtctcccacacagccagctctgtgtgaatt

SEQ ID NO: 164116 - DNA, 522 bp, Homo sapiens
aaattaatgagaagcttaagagtcttgaaatgacaaataaatacttctagaaactgaaagtcctataaaccatargtaagaagaattttacttaaattttgaaaattttagcaaggttcttttattgttgcttatggaaaactcaaaagaaatatatgtaacttaagagcaaagctcctgttgattttagaattgtctggttatctcaggtgccacatgtaatatttgtgctttaaaaaaaaatgtagcttggactgtatatagcaagttataaagcttaggaactcaaagaaaagagaagatcctaactgtaaaatgagtggagaattcaagagctgttagcattatgaatgggagctattatctgaaaaaatattggtgcaggaggtttagactgggacattaaaacaaatcgttgtcctgggcattgaagttaaataagggggcatgataatgaagtttcattgtcttgaatctgtgggaaatagatatttcaggtctatgagctcacaagcatttaat

SEQ ID NO: 164117 - DNA, 496 bp, Homo sapiens
caaatggaagtgcaaatagaagagagaaattgccataattattcagagaatttggacacaaagtagttattttgcttgaaaaatataatttttcaggatgaaatattccagcagtttaaataccctggcttaaaatttttggtgccattttggtttaagcggaagtggtttcagaactagggcccttcctttcacttttgtctaattatctgctacatctctttcctttcttcttctctactttcctttattttcacawcatacttttctttaaaatttctgttttgatttcaaatttctcaacggcttgaagctttttttttttttgcttgtattcatcaggcttttattttaataaaatgccccctttggcattctaatttgagacaataataggtaataaaatcaaagaaccaactttctgcttcttggaaacacccaaaatagtgctatcctcagatactcttcccctaccaaccctcagatgtgctgccct

SEQ ID NO: 164118 - DNA, 514 bp, Homo sapiens
tttgtgttttatttgcccatttccctctctttaaatctgatcctattttgtttaattaattgtgccctctacatatcagtgggattttttaaattttaaaaaggcaataacttttaaaagcttggagaaaattgacttgtctttatgcatcactttgatcccaataagacaggcacaacaaaaatctcaacacttgccacttgagccagactgaggtraacaccagcagtatgttgaattgttgagaaaagtattcaaatgcaatactgtaccccaaaataattcttgctctcctgccacaagaaaaaaaaaactccattccagtactagttctctgtacatttcccctcattcccaaagcattttaatattcacaactatgtaacagaatggagaaatgggcatagatgttcagagcagagaaacagcagtgttcataataataaataagtaatactgagccatttcgtgattctccaggagagtggacctgccaaatcagtaaccctggggg

SEQ ID NO: 164119 - DNA, 620 bp, Homo sapiens
aaatttctttattgaagcctcacaattgtgctaaccccatagttttttcacaggaaaaggaaaaacccatattgactagacatgtttgaggctatgtcttcattggccatagcagactgygtgggtgcctgacccaaagacaatgaacagtaagctagacagctacctatgaggtcgcctgggatgaaaaagtattctgaaagtaatctgttcacttttagggatatttgggaaatttggagagtattaggccattggtagatgatcataaggatcatgagattacaacaaagccaaagtgttatgtgaactggagttttaatgaaggaaagttgtgatgtagagacaaaatgcagagtaaatctagatggtaaaagaggaggaaatagaagagtacagaacaagggagaactatgttatgttaatgatcaatggtaatgatcaatggtaaaattccattgaatctggctgccatgatctatagtgctgttgcaaatctggaatgaccttcttcaagtccaggctccatgagcgcagattgtatctcactttttcgctagttccattcctttcactacttgcagtaacttgatagcacctaaaagagccagactgattcc

SEQ ID NO: 164120 - DNA, 552 bp, Homo sapiens
aagaactttgacattacctctgcagtatggtaaacgctgagataggagggaggcggagatttggccagattcagaacagagcaaggaaatggatttgatcttggtgatttagagtgtgggaactcatgtcaactttaggatatgcacttgggtgaattttacttaaataaagggaaaattagcaaatgaatgtttcagaaagagttaaagcttgtctcatatgctatctatggagtgggagaatccaatttgataacatttgaaagggaaaactgtaccaaaaaattacaaagagcttttgctccctaaaaagggttgtttggcaaagtgcctgctttcacattagattccacttatgatgttttcattatacaatttatgtttccgctttttttttttttaatttcccaagtttaacttaaaagtatttctacagaattatttatattttrtctcattctcactatggtagttcctaaaataaaatatacaaatacttattggttattggttttgctgctttttaatgctgtggaatcctgtatactgtgt

SEQ ID NO: 164121 - DNA, 595 bp, Homo sapiens
cagtttaattttcacataactgtatggttttgagagattttctttgtattgatttctctgtttattgtgctgtggtccaagagtatggttagtatgattttctttttttggaattttttgagaattgctttatggcaaagtgtgtggwcaattttagagtatgtgccatgtgtgatgagaagaaaaagtattctgtttctgttgggtggatgttctacaggtgtctgttagggtccatttggtcaagtgtcaagtttagatcacaaatatctttgttaattatctgtgtcaatgatctatctaatgctgtcagtgaggagttgaggtctacctctgttattgtgtggctatgtaagcttcttcataggtttctaagaacttgttttacggatctgagttctccactgttgagtacatatgtatttagtacagttaagtcttcatgttgaattcatttctttatcattatgtaatgcccttctttgtcctttttgtttattgttggtttaaagtttgttttgtctgaaatgagaatagcaccccttgctcttttttgttattgtttgcttgactgatctttctccatccctttact

SEQ ID NO: 164122 - DNA, 595 bp, Homo sapiens
cagtttaattttcacataactgtatggttttgagagattttctttgtattgatttctctgtttattgtgctgtggtccaagagtatggttagtatgattttctttttttggaattttttgagaattgctttatggcaaagtgtgtggtcaattttagagtatgtgccatgtgtgatgagaagaaaaagtattctgtttctgttgggtggatgttctacaggtgtctgttagggtccatttggtcaagtgtcaagtttagatcacaaatatctttgttaattatctgtgtcaatgatctrtctaatgctgtcagtgaggagttgaggtctacctctgttattgtgtggctatgtaagcttcttcataggtttctaagaacttgttttacggatctgagttctccactgttgagtacatatgtatttagtacagttaagtcttcatgttgaattcatttctttatcattatgtaatgcccttctttgtcctttttgtttattgttggtttaaagtttgttttgtctgaaatgagaatagcaccccttgctcttttttgttattgtttgcttgactgatctttctccatccctttact

SEQ ID NO: 164123 - DNA, 560 bp, Homo sapiens
tgaattcaattttggcagagtaattaatagaataatttgtgctctattcttactgatatacttatttcccttcacataatcctgcaaaaactgtctagtccttgtctttctgtgctttagacgttgtcatatttccagggatccaaagatccagtactttggtttggaaaaactcagactcttagaaatgatggggctatatttatcaatagggagaaggcccaccccccacccccaaggattaggagggccaattggagaagtaagagaggtttagaaagatttagtttttaggagatagcagaaggaaggaactagggtcctgccagttctgcagatgaaaggaccagggctttggtaccatgcaacatcatagagagrtggctagacctcagatggaagcatttatggtaatacctagagagggtggacgttatgacttgagtcttcaatttagaacagtggagccacctgagaccctgctgtctcagacaatgagtctattagggtagccaatatggactgaagatgagacgatgccccacagaacaacctggaat

SEQ ID NO: 164124 - DNA, 401 bp, Homo sapiens
agatctcaaagaacatgcaaaaggtactgaaatcagtcagtgagggcttagcaaggtaagacaaaccaaagacccaactgagaagtaatttaaatcaaatttactcctcatttttttcacctactcgtgccaggtggtagacgctaaattyagtgcttctctcaacactcaggtaagttagcagaccagcatactgtcaccctgggctaacagggagaataattctgccatccccaccggtacaacattaaaggaaatgaatctcattctgttcttttttgggaagtaatttatcagatgatttatttacagtgcagactgcatgacaagtaaacaaatatgttatttttgcccactgtagttgggttttaaacatgagaaagagacagagtaagtgtctt

SEQ ID NO: 164125 - DNA, 439 bp, Homo sapiens
ttagcagcatttttttctctaacatggatatatattttgcatgatttttgggatagagatttgtttttacaaagatacggacttttatctgccattgatagtttggtggtttcaaatgtaaaattaattgcaatcttctaaatactcttcaagctatgatattttggtgccaggagaaaccagctatagcaatataggtatttctgagtgactgtcaatatttagggaacacagacgtagtataagagataatttgttaaatagatttattttgtttaaaccagataatttaatgaacaatggctatatgttgagttgtcaatcagattctcattttattaaagctatccaactaygaaatgaagatccaatcctaatggatacctcagagtaaaatagtatgtacttgaaattcactcgcagtacaaaacaaaagtgc

SEQ ID NO: 164126 - DNA, 593 bp, Homo sapiens
tgcaatacgaaataagcacatcatggagaatggggcattcctcccctcaaacatttatctttgtgttacaaataatccaattacactctttcagttatttaaaaatgtataattaagttattattgagctgtatctattcaatggaggtgagagtaacttctacttcatacacttacaataatgaaaaataatgcactggcacagagtaagtattctggatacattaattactttgattctgatgtacaagaataagaatattgggcaaaattaaaaatcaaaatctaaattttctccctgtagacaggagaataaaaaggagttcagtgcccaaagatatttgataaattggtaaatttaccaattggtaaatagtgctagagaagaaagctactaaattatgcctatgtgcaagagaaattgtgtaaatttaccaatttggtaaattggtaaatayttcaagctaaagccccccacccaacttttttttagagtttcaccatctccatcagcaacataaggaaggttctgagtttttcaataaagaaacttgtatttttgtttaccctaacattttaaactttgtttaaat

SEQ ID NO: 164127 - DNA, 569 bp, Homo sapiens
cacaccatattaatgtaacgaaaatgaggcttccctggtggtttcttttggaaggaagaaaaacatacttatgtaaaaaataatcaaaaataaaaataaaccagtgcttcactattgttccaagttaatgggaaaataatttatccttatattagtgaaattaggcaacacttgcccaggagctacttgtgcagataactggtgagctgaacaaacttcttargaaattgtttaggttggttcttcattattaaactcaagctgaatttgacataattacaggaaccactctcctcttctttctctcagtcgtactcttgaacaaaaagtttttgtgttaatcgatttgccttttgattttattgtttaaatgttccatcaaagacaattatggaaacctaggtatgatctcacgtttatattgctcaacagttcatcagtgttctgacactaagtcagcatttgaaagcagtgatcacaaaagctaacaatcaggggttcatgtcccagcacacgccacggagcgaccaaagtagctttctttggcttgaactaacactcccctcaca

SEQ ID NO: 164128 - DNA, 569 bp, Homo sapiens
cacaccatattaatgtaacgaaaatgaggcttccctggtggtttcttttggaaggaagaaaaacatacttatgtaaaaaataatcaaaaataaaaataaaccagtgcttcactattgttccaagttaatgggaaaataatttatccttatattagtgaaattaggcaacacttgcccaggagctacttgtgcagataactggtgagctgaacaaacttcttaggaaattgtttaggttggttcttcattattaaactcaagctgaatttgacataattacaggaaccactctcctcttctttctctcagtcgtactcttgaacaaaaagtttttgtgttaatcgatttgccttttgattttattgtttaaatgttccatcaaagacaattatggaaacctargtatgatctcacgtttatattgctcaacagttcatcagtgttctgacactaagtcagcatttgaaagcagtgatcacaaaagctaacaatcaggggttcatgtcccagcacacgccacggagcgaccaaagtagctttctttggcttgaactaacactcccctcaca

SEQ ID NO: 164129 - DNA, 447 bp, Homo sapiens
tggaacctcttgttcaaaaatcattaagagtttcaagacagtgacaacagaaccttaaacagaacaggatccttataagcacaggttgcacacccagaaagccagccctagctgcccttaagtttgtgtttttaaccttttggatatactctgtctcttctgagtaagttattaaacggtgaggttcctgggggtacccagagttgttaagtcattatcaattgacctgaaatgccttttttaatgcctggaagaaagatcctttttcacagacaggatctggatgtttaatcccacctatatcacactgctactcagtgaggtatcaaagtatyatgaagacttgaaactctttactgaatttctgtctgaaaatagtaaatgcctgcaacaaaggaggaccttacaatacaagggagaactacaactaaatactagcctacagac

SEQ ID NO: 164130 - DNA, 435 bp, Homo sapiens
atcaagttccaagaatcagtgtccatatttactgtgtcatttgtctacaggtttttatgtagacaatacaggaaatttacaatacaggaaagcccattgctttcttatggtcatatactacttttaatttttcaaagtgctttcaaaacaaaagtgaaaaataagtgtattccctgtgagggtgacattgccatatatgtccagcttagatattaagaatgttaacgtaaaaaataatgccaaataatttttaagtgttcaaaatttgttgaacattatcaggtaaacatgacataattgrtgaatcgtattttcatgtgaggctcagccacttataacataagtatcactatccatgaatgtgccatgaggcttctcagccacttattcaaatgcaacttaaagggaaatggaaaccttctactcaaatattta

SEQ ID NO: 164131 - DNA, 530 bp, Homo sapiens
ttacctctctaagactttgtttcctcatttataaaaatggaaatgatgctttctgctttataaggctgttacaaggatcagataatacacactatctgaaaaagattggtgcataatatgtgttctgaaatgtcarcttccctgctttaggtataatcaattgataattcagcccagaatgggaatgttctctcttttgcaacacaggcaagtgattaaaggattctgatcttcagatcaaacttgtttttcctgtagtaatcacagtaaaatatgtgaaagtcattaaaggagagaaaatattgatgcaaaccctgcaactctgaagaatgtatgtcaacttcaaccctttatacagttttacagatgaaaaacttacagacaccagggttaaaatgaaagtggacttactctacactcaagcaatcaaagaggtccctttttggtaatgacacaagaacaataactcttggttaaattttatctgggttcacagctttttaacttttggataaaaaaaatcaaagtat

SEQ ID NO: 164132 - DNA, 530 bp, Homo sapiens
ttacctctctaagactttgtttcctcatttataaaaatggaaatgatgctttctgctttataaggctgttacaaggatcagataatacacactatctgaaaaagattggtgcataatatgtgttctgaaatgtcaacttccctgctttaggtataatcaattgataattcagcccagaatgggaatgttctctcttttgcaacacaggcaagtgattaaaggattctgatcttcagatcaaacttgtttttcctgtagtaatcacagtaaaatatgtgaaagtcattaaaggagagaaaatattgatgcaaaccctrcaactctgaagaatgtatgtcaacttcaaccctttatacagttttacagatgaaaaacttacagacaccagggttaaaatgaaagtggacttactctacactcaagcaatcaaagaggtccctttttggtaatgacacaagaacaataactcttggttaaattttatctgggttcacagctttttaacttttggataaaaaaaatcaaagtat

SEQ ID NO: 164133 - DNA, 530 bp, Homo sapiens
ttacctctctaagactttgtttcctcatttataaaaatggaaatgatgctttctgctttataaggctgttacaaggatcagataatacacactatctgaaaaagattggtgcataatatgtgttctgaaatgtcaacttccctgctttaggtataatcaattgataattcagcccagaatgggaatgttctctcttttgcaacacaggcaagtgattaaaggattctgatcttcagatcaaacttgtttttcctgtagtaatcacagtaaaatatgtgaaagtcattaaaggagagaaaatattgatgcaaaccctgcaactctgaagaatgtatgtcaacttcaaccctttatacagttttacagatgaaaaacttacagacaccagggttaaaatgaaagtggacttactctacactcaagcaatcaaagaggtccctttttggtaatgacacaagaacaataactcttggttaaattttatctgrgttcacagctttttaacttttggataaaaaaaatcaaagtat

SEQ ID NO: 164134 - DNA, 370 bp, Homo sapiens
tggctcttggaagagctcagatgataatgtgaatttcctgactccaggtcatcaggaagcaaatcttgtctttcytgggtacttccaggatgcctaatacaagtgctcagcacttccaaagctcaatgcatttgctcagtttgattaatccatcttgtaccccaccattataagtacttttccttctgtctctggactttggtgtaccctacaatctcttcttcctttccagacctcagccagatgttaggcatgatgcttatggaagctccaaagccacagaaagctacccctcttctgtgtagctccactcaccagcaggaactctggcattgcaacagatgaaatgttttgccaaccagaaaaagag

SEQ ID NO: 164135 - DNA, 592 bp, Homo sapiens
taactctctgcctttttaattactctcaattactttcccactatttataaggattttttcttttgcataacaaaatccaactctaatcaatatatgcagtatatcccagctgattagtataattcttgctccaccatgatgctggaattgtgccarccttaccttacacacaattaaatgtctgttaatgcctgctgctacccagcaggcctcatgagttaatagggaaaaaacgggatttacatttgcctctatcagcccctatgtgcccttgctccctctcatctgcttatagacatgtacaaagtatgcctggagaaataaaggcctaaaacaatcacacaaaactaaaaggcatgggagcatgaaaaaaggatctccaaagtctaactcgtcatcttcccatttcagtaaatctcgccagaaataagatatcccttttcctacccaagatcccaacactgaactgtgagcaaattttaagtacaagaaagattcagggatatagactccaatattatgaattatgtgcagtgtacctccgagccaatttttaataaacacagatcacttaataagaaattaagagcat

SEQ ID NO: 164136 - DNA, 592 bp, Homo sapiens
taactctctgcctttttaattactctcaattactttcccactatttataaggattttttcttttgcataacaaaatccaactctaatcaatatatgcagtatatcccagctgattagtataattcttgctccaccatgatgctggaattgtgccagccttaccttacacacaattaaatgtctgktaatgcctgctgctacccagcaggcctcatgagttaatagggaaaaaacgggatttacatttgcctctatcagcccctatgtgcccttgctccctctcatctgcttatagacatgtacaaagtatgcctggagaaataaaggcctaaaacaatcacacaaaactaaaaggcatgggagcatgaaaaaaggatctccaaagtctaactcgtcatcttcccatttcagtaaatctcgccagaaataagatatcccttttcctacccaagatcccaacactgaactgtgagcaaattttaagtacaagaaagattcagggatatagactccaatattatgaattatgtgcagtgtacctccgagccaatttttaataaacacagatcacttaataagaaattaagagcat

SEQ ID NO: 164137 - DNA, 462 bp, Homo sapiens
aaaccaagcaacagatctaaatgatgaatacctaaaggacagaacactctgaggtgttctgtgacaaagttaaccttgagattcataactgagtctcaaacataggaaaacagaggactaagaatacaccatgtgcacctgcatgcaggctcccagacacattcaaaaatcytaaaagttacctttgaaattggggggtgggagaccacaaggggatagtggagaaaggacatgaataaattctgaagtcttctcaaaatattaactaacattccgacagcccatttgggctgccccatgaatacgttcttccaaaaaggagctctgcactgccccctgacaaatgaaggaattaatttatttcatagtgccttgcatacattagggctgtagtaagaattattaaatggaattatattcactttaataacttacactcctcttaaaagtttactccacctc

SEQ ID NO: 164138 - DNA, 590 bp, Homo sapiens
gcttgaaccatttcattctctaattctcttaaataattgaaataaagaatcctaagaattaaaggtgtattttacagatgcaggagcatgctcagaggggcacaaccacttaatattgcagtgctaaggaagtgtcagatcaggattagaaagaaaactagcttggccatagctctttcctgcccaacaacttccacccccgccccccacacacagcccaaccacattcctcctttcctatccaattctgttaatgccaccatctttctccttgccatctaacccctaatccttcatcttcctctccatcccactctgaatcagtggttaaagtgttggctcttycacaaggccttggtcactagttctgtgtcttcattccacctgctccatcccttattacaactcttcctaactcaccagcctctactgcatctctttctctaacccccatgtgcctccaattccttgtgtacacggcctgcctccaggtaactctccactaatcatggttctcatcataatgttaagatgctcacattttttagggatgcacaactgcctaacaaataaagttctagtgctcttcc

SEQ ID NO: 164139 - DNA, 593 bp, Homo sapiens
agaccttatctgtcttgttcatcatatacccctggggcttgagaaagcctggctagaagtaggcacagtaggcactcaaatttcttatttattcaatcaatacaaaagtcattcataattaaaaaatataactcatgggtcttttcccagtaaactgatgatttttaaactatatttctactttaattaatactaaaataaatttgaagtttataagcatattattggagaagtgaaaggtaagaaaactagaataggaaaactaactggttgtagaaaaatctacaatcagatcatcatgaggcaattttatttcagtaacttcatcaattattttcaagtgttttaagaattaagtacctgctttttttgcctgtcacattctaaatattcctaaagaaattaagacaaataattggatgcactatatataacattacttacaccatagtttttaaggaagacaaggatctaaaacacatttaggttctatcacttgtgtgagyccaccaacaagtgaggtaacctcccttaggttcaagggcttcatctgtaaagatggatgacagaacctacctcggaagcaatgaaac

SEQ ID NO: 164140 - DNA, 566 bp, Homo sapiens
gtcctatgtcagtgtcataggggcaggactcctgtaggatggtgttcataattctgttctgaaatttaacataaattgtaatacatctatttatatacaagttcccaagttaatcratgaaatcctcaagtatagggactaaaacttatttacctttatcttcacaggatccttggaacacattaaagtacttattaaatagttaaatttgattaagtgcttattagatgaataaatacatggatgaatgaaacaaacccatcccatccaagattatttcataaccccaccaccaaaggtcttttgtcaggacaaccatcctcaagtagatccaggttcactttagatctcaagttaatccttagcgagacattctgagaacttctgaccctcggtgagatttacgcatgttagcagaagccataaggtttttttttaattacagctgaaaatatatatgaatattaatagttattacaagaagctctggagctttgggaaaaaatatgtggatttcaaggaaaagaaatattctatctctggcacaatttcaagtaccaagagca

SEQ ID NO: 164141 - DNA, 423 bp, Homo sapiens
agtaggtgtgtgtataattaattttactgatataaaatatgtgtacaccagatttaccgataataaaatatacaatattttcattataaattccatatagcaactgattttcacagactcacagactgctttcattgatttttgccaaacttagtgttcatggacaacacatggttgcaattgacaacaagtacggtcctgacaaaaatgctgtttgatatttggtttacattatagaatacagtaaaagtgaaacaaygaaaccatatgtcagaacctcactcattcatcaagagtaagagcaacttttcactgaatcaaataatcgtttttgaagactagaagtttattcctgttttgcgttatttataatgtaatagacagacatgacacattttaagatttaatctgcattattaacat

SEQ ID NO: 164142 - DNA, 433 bp, Homo sapiens
tttgaatcagagtaggtgtgtgtataattaattttactgatataaaatatgtgtacaccagatttaccgataataaaatatacaatattttcattataaattccatatagcaactgattttcacagactcacagactgctttcattgatttttgccaaacttagtgttcatggacaacacatggttgcaattgacaacaagtacggtcctgacaaaaatgctgtttgatatttggtttacattatagaatacagtaaaagtgaaacaacgaaaccrtatgtcagaacctcactcattcatcaagagtaagagcaacttttcactgaatcaaataatcgtttttgaagactagaagtttattcctgttttgcgttatttataatgtaatagacagacatgacacattttaagatttaatctgcattattaacat

SEQ ID NO: 164143 - DNA, 613 bp, Homo sapiens
aatatttcaagtggtcatcttgatatatatttttatctgacttctctgcagatctgattagaataacactgtttttaccacataatgtggctgacaaaaattgtctaccattctatacaatttgtttgtggttgtgttacaagcgttaccttccatccattatttcttggaagggwactttttaagccatttctccatgttgccagagctagttatttacaaatccatttaacagaaacctataggacacagcaaacacagagaagggcagggaatgtgaaaagaaggaaatcttcctgctcccttgtgggtagtagaactgctactctcctcaaatcatgcttcactctccctaagggacagagagcccacagacgcccacacagcaactattgtgataccctgataatttcctttataaaggtaaaaaacaaaaatagatgagatttctcgtcttgatgatcttgctcaacccgagggcacctgcacccaactctagaggaccactgctctggacaagttcatggagggcaaggattacgttttcttcattttctctgtttaattcaatcagaaaggctcttccttttaataacagtaataataaataccc

SEQ ID NO: 164144 - DNA, 536 bp, Homo sapiens
tctaccattctatacaatttgtttgtggttgtgttacaagcgttaccttccatccattatttcttggaagggaactttttaagccatttctccatgttgccagagctagttatttacaaatccatttaacagaaacctataggacacagcaaacacagagaagggcagggaatgtgaaaagaaggaaatcttcctgctcccttgtgggtagtagaactgctactctcctcaaatcatgcttcactctccctaagggacagagagcccacagacgcccacacagcaactattgtgataycctgataatttcctttataaaggtaaaaaacaaaaatagatgagatttctcgtcttgatgatcttgctcaacccgagggcacctgcacccaactctagaggaccactgctctggacaagttcatggagggcaaggattacgttttcttcattttctctgtttaattcaatcagaaaggctcttccttttaataacagtaataataaatacccatatactgcttaagcattttaccttc

SEQ ID NO: 164145 - DNA, 621 bp, Homo sapiens
ggaaggtggtcaagtcccaatactgacatttagagatcacaccatagttgatgtttagtgttttttagctgggacatgtgtccagtggaacattctgagtggatatgcatattttagcccactatggtttaaatatttggaagctatagaaaattcaggaaacattaggttttaattactgtaaatttaggtgttacttatggcagagaagttttaaaaatggtaatattctaataacctgggaataatccactcaataagagccaagatagaaaagaaacccactacttttattcatttcctagcccatttatttacttgtgcaagcataagtaaatcacataaacactcctgagtgtttattatgttccagaagcagagagccmagaggtcaacatgacagctcctgcctcaaggagctttcagtcttctctacttgcttctacttatctccattgtaccctggaagacaagtcaatagtaattgtaatttagtgtaatacatatacttgcttcctttccagagtggctgtccctttcagaatacctctaagcccccaacctgcttctattgtacagagaaaaggaaacaattttttttaagtgaacaactatttgaat

SEQ ID NO: 164146 - DNA, 475 bp, Homo sapiens
aaaattgcaacattcttttccaaagcccttagtctccggagaacaagcacaggtttacatttcaggatgtggattccatcccactggctctttctcaatgcaactgctgtccttttgttccagtttgcttgggcttcaataacttgaacatttcaacgcctgcatgcacttaacattcttgatgtaaacacactgagttagactttggtgatccagaactcttttcctttctgagatgcctgggccatggaagtctctgcccccrgtctttcctgtgtgagaagcaaaaagcctttcctttcctcagtcaataccaccacgccctgcttttcacctgacaagatgatgagaacttgaattatctcctgaatatcttgatgctcagtgctcaggccaactctgctaaaacataacctatctctgaaggatttgttcatgagctgagcaactaaatcttttctcaccagacagttga

SEQ ID NO: 164147 - DNA, 500 bp, Homo sapiens
tttgagactatttggtgctaaatcactggtgaacagccatgcatcatttaaccacggggatgcagtctaagaaatgcgttattaggcaactttttgtcattgtgtgagcatcgcagaatgcacatacacaaacctagatggtgcagcctactacaaacataagctgtatggcgtagcctgttgctsccagcctacagacatgcacagctgttactgtgctgaatgctgtgggcagcaggaacacaatggtatttgtggaccaaacagctaaacatagaaaaggtaccgtaaagctatgatataaaagattttaaaaatggtaaacttgttatagggcacttagcatgagtggagttttccagagtggaagctgctctgggtgagtcatgaatgagtggtgagtgaatgagaaggtcttagacatcactggacactgctgtagcctctataaacactgcacacttaggctacactacattttctttcttcaataatgaatt

SEQ ID NO: 164148 - DNA, 604 bp, Homo sapiens
ttccagaggaggcctgagcttctgtacttgcagaagggcctaagaacacagttttgtgatgtgccaaatagcacggcaggattggtcgagcgtaaggttaatggatacatcactatctactgggcaggcctccaaaatattaattcctttccaatgaagtttataaaagagtctctgcaatcttgttccttatttccaatttctccgctgcctctccagtgactatcatcacagcttttgaatgcacccccattggaggacgctcggtgtctccctcagtttcctgccttgcatccaacttcaaacaggcaggttccctggagaacaagcccatcgccatcaaatccatgtctgggctctgggtgggggtcagcgggasgcccacgggcagggtctccgccatggcactgggatgctgaaatagcagcatttgacacatttaaaacttgctgtttgtgcaatcactaaaaactgcaccattagctggattttcagattgcatgagtgcagatcattaagtgttattacagtattaattattagaaatgtcctgtactgcccaaattaaatagggatagtcaacgacctgcgagtttccaatacc

SEQ ID NO: 164149 - DNA, 584 bp, Homo sapiens
gcaacagcctataaaacataatagttacattatgaaggaagtagatggcttaatgtaaatcattaatrtgtgaaatttatttggcaaaattattcagtccagcttttaaaatgactatagccatgcacaacttacagaaaagcatagtaagagaatattatataccaaataacctttatgcaaacaatcaatgaacataacgcaagtgttataaaacaatatctagctttacagaaaaggtataatgcaggtattactatgttaaaaattgattatctttttaaacatcatttcttaatttaactttccaaaatgcataggaaactgagaaattttaaaaatatacttacccttcgacttatttagaaaacctctgctcttggtgaaaagcagaaattgtttcactgctcactttccctgaatctatcaacttaaacattaaatcagtgaacaccacctctctggaccacactggtttgctagacactactgctatgtggaagagttctgctgcatctaagctatatactgagtgcaatggataacctaatatgcctttcatttaactggctgggcaggtttct

SEQ ID NO: 164150 - DNA, 409 bp, Homo sapiens
agaagttttttagcccaagaaatatttcttcaagaaaaagaactggctgagcacagtggctcatgcctataatctcagtactctgggaggctgaggtgggaggatggtctgagcctaggagttcaagacaagcctgggcaacataggaggaccttgtctctataaaaaaatcagaaaattagtcaggtgtagtgttatgtgtagtcccagctactctaaggctgaggtgtgaggatcacytgggcctgggaggtagatgctgaagtgagccaaggtcgcgccactgcactccagcagagcgagaccctgcctcaaaacaaacaaacaaaacctacaacaaaaaaaaattaatgaatgagtagaataactaaggcattaaataatattaatgatgtaaggaaacatggtt

SEQ ID NO: 164151 - DNA, 419 bp, Homo sapiens
agaagttttttagcccaagaaatatttcttcaagaaaaagaactggctgagcacagtggctcatgcctataatctcagtactctgggaggctgaggtgggaggatggtctgagcctaggagttcaagacaagcctgggcaacataggaggaccttgtctctataaaaaaatcagaaaattagtcaggtgtagtgttatgtgtagtcccagctactctaaggctgaggtgtgaggatcacttgggcctgggaggtagatgctgaagtgagccaaggtcgcgccactgcactccagcagagcgagaccctgcctcaaaacaaacaaacaaaacctacarcaaaaaaaaattaatgaatgagtagaataactaaggcattaaataatattaatgatgtaaggaaacatggttcttgtctcaa

SEQ ID NO: 164152 - DNA, 635 bp, Homo sapiens
taaaaatttcaaacagtagagagggcataaaattaaaagtaaaaaaatacctttatccctcttcagcttctaattgtattgcccagaaggtttttttttttttttgtagtcttccaggcattttctatgcaaattcaaataagtaaacataaaatatcctttgtttatatacaactgagatcatactctatatattaaatctgtaatgtttgtttytgtttttgttttttttgagacagaatctcactctggttgcccgggctggaatgcagtggcatgatctcagttcactgcagcctcgacctcccaggctcagcctcccgagtagctgggactacagacatgctgaccaccatacctggctaattttttgtatttttagtagagatgggatttcgccatgttgcccaggctggtcttgaattcctagactcaagcaatccgcctgccttggcctcccaaagtgctgggattacaggcaatgaaccaccgtgcccaacctaatctgcaattttttttttcatatactgtatcttgaagatttttctatagtggcacagcaggtcctcaaataacgtcatttcattcaacatcatttcattttaacattgatgagaaaaaaaattgattcccag

SEQ ID NO: 164153 - DNA, 583 bp, Homo sapiens
acaacatggtattgtacacttaataatgtgttaagagggtcaatctcatgttaagcattattaccatcaaaaacaaagagtgacaaagaaagttttgtaggtgatggatatgttaattaccttcactgttataatgatagyatcatgggtgcttgtacatgtccaaactcatcaatttatatatatataaatgatataaatatatatgtataaaatacttacaggtgttttttgtatatcaattgtacttcagtaaagctattaaaattatatgcatctatttttgaaatttacataatgcattacttttattgatgtacaaattatttctttacaggaaatcaaataattcattgaaatgttgggaaaatggtattgtggtttttatttaaattgatgatcacaaatttcacagagaaaaacacaaatatatcaaaataatctttcctagatccgacagaaatttatttaaattttaaactctatatctgattcttaaaattacttcccacaaaaggagataaaatttcaaaattcaggtttcctttaatactgcaaatcttgactcgtactgttttcaaac

SEQ ID NO: 164154 - DNA, 583 bp, Homo sapiens
acaacatggtattgtacacttaataatgtgttaagagggtcaatctcatgttaagcattattaccatcaaaaacaaagagtgacaaagaaagttttgtaggtgatggatatgttaattaccttcactgttataatgatagcatcatgggtgcttgtacatgtccaaactcatcaatttatatatatataaatratataaatatatatgtataaaatacttacaggtgttttttgtatatcaattgtacttcagtaaagctattaaaattatatgcatctatttttgaaatttacataatgcattacttttattgatgtacaaattatttctttacaggaaatcaaataattcattgaaatgttgggaaaatggtattgtggtttttatttaaattgatgatcacaaatttcacagagaaaaacacaaatatatcaaaataatctttcctagatccgacagaaatttatttaaattttaaactctatatctgattcttaaaattacttcccacaaaaggagataaaatttcaaaattcaggtttcctttaatactgcaaatcttgactcgtactgttttcaaac

SEQ ID NO: 164155 - DNA, 597 bp, Homo sapiens
acacataaaaaatacacgtatgtacagataaacagacacaaacaccctcatacaaagattctacagcttttactttagaactccagacatgagatattgatacaaactcactggtttacaaataataataataagaagaaaacaaaaacaaaataatggttctagccaaaaagtgattttttttttcctcagtagaaaactagcagtagacataaagcaggtagaaaaaagaaaaatagagaacataaaaactttatagttacatgtaagcctttgggtctaaattttcacttagtgtaattgggccatcagtttaaaatgtgcaaaacagaacataatatgtaactatctagagccctagaaagtctgatattccattatgacatagttataaaaaactacctgagactgggtaatttatgaagaaaagaggtttaattgactcacattccacagggtrtataggtagcatgactgaagaggcctaaaaaaacttataatcatgcaagaaggtaaagtggaagccaacatatcctacattcctggagcagcatgaagatggggtttggtaatacacccttttaaacaaccagatct

SEQ ID NO: 164156 - DNA, 540 bp, Homo sapiens
ttacccaaaatgtccaaatagtargtctcatctgagacaaggcaagtcccttccacttatgagcttggagaataaaaaacaagagagttacttccaagatccagtggggatacagcaactgagtgaatgttcccattttaaaaggaaaatgttgaccagaatcaaggggctccaggccccaggcaactcctaaacccagcagggccctcattaaatcttaaagctccaaaataatttcctttgactctatgtctcacatctatggcacaccagtgcaacgggagggctctcaaggctttgggcagctctggccctgtggatctgcctgtcttttcctcatcttcctgtctttttctgagccttccaaactgtttcaacctctgcccattaccaagctccaaagttgcttccacatcttcaggtatctttataacaatgccacacctctctagttttctgtattagtttgctgtcacattgttctcacatcttctgtattactttgttctcacatttgttctcatattgctataaagaact

SEQ ID NO: 164157 - DNA, 447 bp, Homo sapiens
tcctacaaaatatttgcaacctataaaaacctgagaaatctattcttgaagaagtataatgtaaattaatcttttcaaataaatttaaatatatcatttgaaactgaagttctacatctagaaatctgtcatgcagaaatccttgcacgtaagcacatgtatgaacaggatgtttcctccagcacttaaatggctataagtcaatatcttcaagatatttctgggatagtatttatttcctctatgtggggcccatttgtgaacatctattttatatttaaacatctataaataaatatatttaaaagttttaaaaaatattagcagttatagaaatctaaattcacaaaattttagtaatttttctgatttctatgtcaatatacaataaatattacartaacttagtgactgctgctgcgtacttcaacaggttttatatatggt

SEQ ID NO: 164158 - DNA, 402 bp, Homo sapiens
gtcttgctccagtacattgatgatcttcttctagcagccccaactcaagaggactgcttccaagggacccaagacctcctgcacctgctatggaaggcaggatataaagtgtcagggaaaaaggctcaaatttgctttgaaagtttccaatatttaggcttctatataagctaagggaaaagatggcttggttgtgaatggaagcaggtggtttgtgcacttcctactccaaccacctggtgamaaataagagagttcctaggggtagcaggctctgccacatctggatcccaaatttctcactcatggctaagctattatatgaaaccacaaagtgggggaaaaggagaccatcctctgggaggccaaccaggagaaggcctttaaggaaatcaaagaagc

SEQ ID NO: 164159 - DNA, 387 bp, Homo sapiens
cgcatgtttgttacataggtaaagaaccctcttctatataaacaaatacattcatatggaatatatgtgtccctgtcagaaaaaagaaaaagaaaamgaaaaagaaaaacagagcaagatccttgttaaaaattgcaagacaaactttattttgacaactgaagaaggggatagtgactacagtatgaactgagcttaactccaactaagacaaaggtaactgagacttttaaagaaaatctgtttatgaataaaaagggaatatgaggaaatcaaaataaggaaaccaaaaagagagtagtgggctatatggaagtagaaaattacataaaaattaagtgtaaaatgattgattattagacaagattagttagggtaattttggaa

SEQ ID NO: 164160 - DNA, 387 bp, Homo sapiens
cgcatgtttgttacataggtaaagaaccctcttctatataaacaaatacattcatatggaatatatgtgtccctgtcagaaaaaagaaaaagaaaaagaaaaagaaaaacagagcaagatccttgttaaaaattgcaagacaaaytttattttgacaactgaagaaggggatagtgactacagtatgaactgagcttaactccaactaagacaaaggtaactgagacttttaaagaaaatctgtttatgaataaaaagggaatatgaggaaatcaaaataaggaaaccaaaaagagagtagtgggctatatggaagtagaaaattacataaaaattaagtgtaaaatgattgattattagacaagattagttagggtaattttggaa

SEQ ID NO: 164161 - DNA, 387 bp, Homo sapiens
cgcatgtttgttacataggtaaagaaccctcttctatataaacaaatacattcatatggaatatatgtgtccctgtcagaaaaaagaaaaagaaaaagaaaaagaaaaacagagcaagatccttgttaaaaattgcaagacaaactttattttgacaactgaagaaggggatagwgactacagtatgaactgagcttaactccaactaagacaaaggtaactgagacttttaaagaaaatctgtttatgaataaaaagggaatatgaggaaatcaaaataaggaaaccaaaaagagagtagtgggctatatggaagtagaaaattacataaaaattaagtgtaaaatgattgattattagacaagattagttagggtaattttggaa

SEQ ID NO: 164162 - DNA, 439 bp, Homo sapiens
ttcattagcacaataacaaggagtaggtattgaaaaaaatctaaaacatatcatggagtttaggcttcccatgtaatctgggcctttttacttcccctaattttgaaataggccaattcagtatgttgctcagggggctattcagagaatggaaacccaaggctcacccctccctgagtctaagtaccactaagccaggtagattttgagaaatggaaaaaccaaactgccttggtgattggactttgccaatgtctkaaagaaaggagtaacagaaaagagggggatctaaggtagatcccgtgcagtataaaatgtgccccaaaaggactttgcttctaacacatatattgatgctacctcccatctgagaaagaagggggatataagcaggactcaaggccaggaacagtggctcatgcctataataccagcactt

SEQ ID NO: 164163 - DNA, 517 bp, Homo sapiens
ttaccacataattcaataattgcctttctaggcatatacccaagaaaaataaaaacatgtctacagaaagcatgtacatcaatgttaatcaacgctattcataatggccaaaagtggaagaaaaacaatgtccgtacactgataaatgaatgaataaataaattgtgtttataagtagcatctgatactatttggcaataaaaatgtgaacgctatttataatggccaaaagtggaagaaaatcaatgtcyatccactgaaaaatgaataaataatttctgcttataagtagcatctgataaaaagcaataaaaatgaaatccttatatacactattctatggatggtcctttaaaaacattaaactaaataaaagtagccagccacaaaagaccacatattatatagtttcatttatttttaaaaagatcctgaataggcatatttgtagaggcagaaattagattactggttgcccagtacagtgtgggtgcagaaattcaggtggggagatgac

SEQ ID NO: 164164 - DNA, 549 bp, Homo sapiens
attagaaactcatgtacatgttaataccatcacacgtatgtgagttttatgcatgttacaaatagagaggaatactaaagaaactttgaaaataggkttggttaaattaaagtcttgattatgcaacacctaagaaggtattggtcattcattcaaagaatatttaccaagagattatcacaaaacacaggtaagtgcacaattttcagagaaaaaaaatagacacagtttctgtccctacataccttacattctactttgaaatatagaatataagtaagtaatgaatattatataaaaactattatctcaagaaaaaaacccaatgctaagaaagcatcagtggagataatagaaagtatcctggagtcactgatgagtacgatgagagctgaacaatatgcaggaatagggaaaagaatggtggggagagacagacaaaaagggaaagcagataaagtggtcaggacagttctcaagtcctcaggtttagtttgcagggaatgattaagaatcagatgaccctaaaaggtaaattagagccagata

SEQ ID NO: 164165 - DNA, 602 bp, Homo sapiens
tagaagtggatgctggggtcatgctatacagtatactaaactgtgagccaattataattccttacttcataagttatgcaacsacatgtattaattcataacaatgcaagaatggcctaaggcaatgaattaaagatttaactctacaatctcaaactgtaagaatcttaagggaaaacctagaagacaccattctggacattcgcctttggaaacaatttatgactaaatccttatgtattagcccattctcgaactgctagaaagaacttcccaagactggataatttataaaagaaagaggattaattgactcacagttccacatgactgaggaggcttcatgaaacttacaatcatggtagaaggggaagcagccatatcttacatagtggcaggcaagagaatgagtgtgtgagggaaaaaactgtcagacacttataaaaccatcagatttcatgataacttacaatcacaagactatcacgggaggcacattgcctccataatccaatttcctcccatgtggtttcttccttgatgtataaggattatggggtttacaatttataatgagattttagtgaagacataaagcctaa

SEQ ID NO: 164166 - DNA, 568 bp, Homo sapiens
taagttaatttgcctgtacatatcaagtctatgaaaggcatttaaagtgtcaaataattcaaagtaaatgtcaaagaattgacatagaatttaygtattttaatttgagtcatcatagaaagtttggcttttaaattggacttttctcattaacaaatatttttaaagtagaaaaggaaggtcaggtgagaaagttattttttcaagcagagaaagtatgaggcatttttaatttgtttttaattttttaattttaagtttttgtgggtccatattaagtgtacatatttatggggtatatgagatgttttgatacaatgtgaaataatcacatcatggaaaataagatactcattccttaagcatttatcctttgtattatgaacacattccacattacactattagttctaaaacaggcatattagaatgtgctcaacatcatgagccattttaagtgctataagaaagatgtgaaaatgcaatctgagaattatcatctctcaggtcctaaaaaggaattttatcatggtgggtgacatgcctcatagctagtcactttgcttct

SEQ ID NO: 164167 - DNA, 602 bp, Homo sapiens
ttaatatctgaatgtagacttgaggccaagagatttgtattgtttacctagatccataaagcctggtaggctatctgcagctaggcacagcttactgaatggaaaattatttaaagcaaatcaatacatgtaaattcaaatcatgtctaaggctaaggacatttgaactgggatcctctgaatattagttctgtgaaacagtctatgcataagaattcgttggaatacattaaacaatattttagtgtcgratataattgtaccttttttcatgtttctacataattctcaaacatatttggataaaaacatgtcttgcattgaccagctctgatcacaactatatgaaaattgcaaagcaaaacaactttttatcagtaaagcaaggaaataaaaataagtcaagtaggtgtatatcagtaaagtaaaaattctactatcttatgccccacaagaccgtaagtcttttaactttttataatattttttcaagtttttgtgaagtaatcacctaagaaattaaagaattctagaaaatgttcaatttaatgactcttgaaaaattaattcaaagaagaccttctgaagattttcttaaatac

SEQ ID NO: 164168 - DNA, 602 bp, Homo sapiens
ttaatatctgaatgtagacttgaggccaagagatttgtattgtttacctagatccataaagcctggtaggctatctgcagctaggcacagcttactgaatggaaaattatttaaagcaaatcaatacatgtaaattcaaatcatgtctaaggctaaggacatttgaactgggatcctctgaatattagttctgtgaaacagtctatgcataagaattcgttggaatacattaaacaatattttagtgtcgaatataattgtaccttttttcatgtttctacataattctcaaacatatttggataaaaacatgtcttgcattgaccagctctgatcacaactatatgaaaattgcaaagcaaaacaactttttatcagtaaagcaargaaataaaaataagtcaagtaggtgtatatcagtaaagtaaaaattctactatcttatgccccacaagaccgtaagtcttttaactttttataatattttttcaagtttttgtgaagtaatcacctaagaaattaaagaattctagaaaatgttcaatttaatgactcttgaaaaattaattcaaagaagaccttctgaagattttcttaaatac

SEQ ID NO: 164169 - DNA, 602 bp, Homo sapiens
ttaatatctgaatgtagacttgaggccaagagatttgtattgtttacctagatccataaagcctggtaggctatctgcagctaggcacagcttactgaatggaaaattatttaaagcaaatcaatacatgtaaattcaaatcatgtctaaggctaaggacatttgaactgggatcctctgaatattagttctgtgaaacagtctatgcataagaattcgttggaatacattaaacaatattttagtgtcgaatataattgtaccttttttcatgtttctacataattctcaaacatatttggataaaaacatgtcttgcattgaccagctctgatcacaactatatgaaaattgcaaagcaaaacaactttttatcagtaaagcaaggaaataaaaataagtcaartaggtgtatatcagtaaagtaaaaattctactatcttatgccccacaagaccgtaagtcttttaactttttataatattttttcaagtttttgtgaagtaatcacctaagaaattaaagaattctagaaaatgttcaatttaatgactcttgaaaaattaattcaaagaagaccttctgaagattttcttaaatac

SEQ ID NO: 164170 - DNA, 602 bp, Homo sapiens
ttaatatctgaatgtagacttgaggccaagagatttgtattgtttacctagatccataaagcctggtaggctatctgcagctaggcacagcttactgaatggaaaattatttaaagcaaatcaatacatgtaaattcaaatcatgtctaaggctaaggacatttgaactgggatcctctgaatattagttctgtgaaacagtctatgcataagaattcgttggaatacattaaacaatattttagtgtcgaatataattgtaccttttttcatgtttctacataattctcaaacatatttggataaaaacatgtcttgcattgaccagctctgatcacaactatatgaaaattgcaaagcaaaacaactttttatcagtaaagcaaggaaataaaaataagtcaagtaggtgtatatcagtaaagtaaaaattctactatcttatgccccacaagaccgtaagtyttttaactttttataatattttttcaagtttttgtgaagtaatcacctaagaaattaaagaattctagaaaatgttcaatttaatgactcttgaaaaattaattcaaagaagaccttctgaagattttcttaaatac

SEQ ID NO: 164171 - DNA, 480 bp, Homo sapiens
tatttgtattttctttgaccttgcaacctgagcttctctaagctttaattttcccatctataaaatggggttaataatcatacaactgttgtgaggtttaaacaaggtaatcgtcagcacagggctttatacacagaagccattgaacaatgctatttgtcttgctgttattctctttttttctttcttttttttggcgggtgggacagaatcttgctctattgcccaggctggagtgcagtggcgcgatcttggctcactgcaacatccacctcctgggttcaagcaattctcctgcctcagcctcccgagtagctgggattagaggggcacaccactacactcagctaatttttgcatttttagtagagatgggatttcacacattggccrggctggtcttaaactcctgatctcaggtgatctgcctgcctaggcctcccaaactgctgggttacaggcatgagccactgtgcccgg

SEQ ID NO: 164172 - DNA, 492 bp, Homo sapiens
agtcctaacacagcccaaaagctggactaacatagctggaatgatgaactggttttgggagtgaaataggagattggggaataacacccacacggaaagatggaggagtacatatttggctcttccragctgtctgttctcagtcatgtttggagaaacggaggtagttgagtaactcctgtggttgaaagcccctaggatagctcccagtgaccctgcctcctgacattcacccactgtgtaatcccttcccctggagtataggttgaattactttattttctagaataaagatagactagaatagaatacaaaaaaaaagtgataggttatcacttctgagattagattgcaaaagcattgtgacttccgtcttgcttatcctctctggctctctgggagaaccccagtgccatattgtggtggaactctggaaaggcccaggtagcaagaaactgccatctccaagagtgagtaaggacttgaggcctc

SEQ ID NO: 164173 - DNA, 579 bp, Homo sapiens
cgtcttgcttatcctctctggctctctgggagaaccccagtgccatattgtggtggaactctggaaaggcccaggtagcaagaaactgccatctccaagagtgagtaaggacttgaggcctcccaatagcagtgtgagtgagcatggaaacaggtycttcccatggagccttgaggtgactgctgcccaggctgacaccttgattgcaaccttgtgagaagccctgagtcagaggcactcagctaagccatacctggattcccgacccacataaattatgagatagtaagtttgctgtttgaagctgataaaccttgctatgacttgttacacaacaaatgataactcataaactcctattaaaagtgagatatctttgggatctaggagagtttaggaagactttaggaggaggagtggaagtttgtactagaaagtcttggctaatagaaagtcttgaatcagtgcagaaaacaaactgtgaatatacaaagatgctgagactgattgcccctgatatagttaagcagagcaggaactatagagccactaatattaagtgacagatgatgtgccagg

SEQ ID NO: 164174 - DNA, 341 bp, Homo sapiens
atcttcaaacaaaaataatttgacttcttccttttcaatttggatgcgctttatttctttttcttgtttggttgctctagctaggacttctagtcctatgttaaataacagtggtgacagtgagcatccagatgttagaggaaaggctttcagtttttccctattcagtatgataactacctacgagtctctcatatatgacatttattatgttgaggtatgttccttctgttcccagtttttttgtttttgtcataaawggtgttgaattttatcaaatgctttttcagcgttaatttaaaggatcatgtggtttttgtccttcattctattgatataat

SEQ ID NO: 164175 - DNA, 590 bp, Homo sapiens
ccagtttttttgtttttgtcataaatggtgttgaattttatcaaatgctttttcagcgttaatttaaaggatcatgtggtttttgtccttcattctattgatataatgtatcacactggttgatttgtgtatgtcaaactatcctggcatcactgggataaatccccttggtcatgrtgaataatccttttaatataagataatagtagtttacacatcacaattacagtattacagtattctgtgtctttctgtgtgtgtgcttactattaccaatgagctttgtaccttcagatgatttattcttgcttgtgaacacctttttctttcagaatgaagaactccctttagcatttcctataagacaggtctggtggtgatgaaatccctcagtctttgtttgtttgtaaaggtctttatatctccatcaaaagttggaaggatatttttgccagatatattattctagggtaaaagttttattttttcttcagcactttaagtatgtcatgccactctctcttatcctgtaagatttctacttgaaaagtccactaccaaatgtatttgaacttcatcatttgctattt

SEQ ID NO: 164176 - DNA, 590 bp, Homo sapiens
ccagtttttttgtttttgtcataaatggtgttgaattttatcaaatgctttttcagcgttaatttaaaggatcatgtggtttttgtccttcattctattgatataatgtatcacactggttgatttgtgtatgtcaaactatcctggcatcactgggataaatccccttggtcatggtgaataatccttttaatataagataatagtagtttacacatcacaattacagtattacagtattctgtgtctttctgtgtgtgtgcttactattaccaatgagctttgtaccttcagatgatttattcttgcttgtgaacacctttttctttcagaatgaagaactccctttagcatttcctataagacaggtctggtggtgatgaaatccctcagtctttgtttgtytgtaaaggtctttatatctccatcaaaagttggaaggatatttttgccagatatattattctagggtaaaagttttattttttcttcagcactttaagtatgtcatgccactctctcttatcctgtaagatttctacttgaaaagtccactaccaaatgtatttgaacttcatcatttgctattt

SEQ ID NO: 164177 - DNA, 603 bp, Homo sapiens
ctgaataggggtgatgagagtgggcattcttatcttatttaagttctcaacaggaatggctccagcttttgaccattccataagatgatgggtttgggtttgtcatagatggctcttaccattttgaggtatgttccttcactgcctagtctgttgagaatttttcatcataaagggatattggattgtaccaaaagcttttttccatgttcattgggatgatcatatggtttttgcttttaattctgtttatatggaaaatcacatttactggttgcatatgttgaaacagccttgcagcccaggaataatacttgatcatggtgtatgaactttttgatgmgctgctggattcagtttgctagaattttgttaagaattgttcatcagggctgtttgcctgaagtgtgtgtctgtgtgtgtgtgtgtgtctattcctgattttggtgtcaggctgatgctagcttcacagaatgagttaggaaggagtccctccacttcaattttttggaatagttccagtaggattggtaccagttctttgtatatttgatggaattcagctgtgaaccatctagtccagggctttttttggttggcagg

SEQ ID NO: 164178 - DNA, 603 bp, Homo sapiens
ctgaataggggtgatgagagtgggcattcttatcttatttaagttctcaacaggaatggctccagcttttgaccattccataagatgatgggtttgggtttgtcatagatggctcttaccattttgaggtatgttccttcactgcctagtctgttgagaatttttcatcataaagggatattggattgtaccaaaagcttttttccatgttcattgggatgatcatatggtttttgcttttaattctgtttatatggaaaatcacatttactggttgcatatgttgaaacagccttgcagcccaggaataatacttgatcatggtgtatgaactttttgatgcgctgctggattcagtttgctagaattttgttaagaattgttcatcagggctgtttgcctgaagtgtgtgtmtgtgtgtgtgtgtgtgtctattcctgattttggtgtcaggctgatgctagcttcacagaatgagttaggaaggagtccctccacttcaattttttggaatagttccagtaggattggtaccagttctttgtatatttgatggaattcagctgtgaaccatctagtccagggctttttttggttggcagg

SEQ ID NO: 164179 - DNA, 414 bp, Homo sapiens
aattccagaaataaacaattcataagttttaaattgtgtgctgcttcatcctgcctgggacatttatcattcctttgtccagcatatccacattccatatgctacttagtcacttagtaacttttggcaatcagattcaaaaaacaggtatgtgtgtaagtatatatagggttcagtactctccacagtttcagacatctactgggggtcttggaatgtatccctgcagataaggggggaactactgtaatgtcatataactcctttcttatttctgtttttttgttrttgctattgttacagtgtcccggctcgtgaccatttccaaggatccatatgaagcatgtgatggtgcccatgctgttgttatttgcactgagtgggacatgtttaaggtaaggtaacagaaaagat

SEQ ID NO: 164180 - DNA, 563 bp, Homo sapiens
ccaaatggaaattcttttgataagagaaatcaatgtgattattatccaagaatgaagaatattgggatttatccaagggtagtattaagtatcacaatgagtttgtgtataaagagctttaagatgaagaaatattttttatgcccactrgctgcatccatttagatatccaaatttaccaatgtcttttgttctgtaaattaactaagatcctaccaggcaccaacgtcatgggctgatgcataagagtctatgggacagggagcttggaaaggctctcagttttcagtagaaactctgacaggatcatgacagaagcagttaaatgcatgaaagtagaaaatgacccatactcacctcagagctatttcaagcttcccaagtatacatccaaaattacatctattgatctttattttcagggattgaagacactggtattcaggaactctttaaaatgtctacattaactgtaaacaacatctggacagaaatttttttctgcatagagttcttaaaatggaccacaaggtcttttcacctctgacaatatgggcaagcag

SEQ ID NO: 164181 - DNA, 563 bp, Homo sapiens
ccaaatggaaattcttttgataagagaaatcaatgtgattattatccaagaatgaagaatattgggatttatccaagggtagtattaagtatcacaatgagtttgtgtataaagagctttaagatgaagaaatattttttatgcccactagctgcatccatttagatatccaaatttaccaatgtcttttgttctgtaaattaactaagatcctaccaggcaccawcgtcatgggctgatgcataagagtctatgggacagggagcttggaaaggctctcagttttcagtagaaactctgacaggatcatgacagaagcagttaaatgcatgaaagtagaaaatgacccatactcacctcagagctatttcaagcttcccaagtatacatccaaaattacatctattgatctttattttcagggattgaagacactggtattcaggaactctttaaaatgtctacattaactgtaaacaacatctggacagaaatttttttctgcatagagttcttaaaatggaccacaaggtcttttcacctctgacaatatgggcaagcag

SEQ ID NO: 164182 - DNA, 563 bp, Homo sapiens
ccaaatggaaattcttttgataagagaaatcaatgtgattattatccaagaatgaagaatattgggatttatccaagggtagtattaagtatcacaatgagtttgtgtataaagagctttaagatgaagaaatattttttatgcccactagctgcatccatttagatatccaaatttaccaatgtcttttgttctgtaaattaactaagatcctaccaggcaccaacgtcatgggctgatgcataagagtctatgggacagggagcttggaaaggctctcagttttcagtagaaactctgacaggatcatgacagaagcagttaaatgcatgaaagtagaaaatgacccatactcacytcagagctatttcaagcttcccaagtatacatccaaaattacatctattgatctttattttcagggattgaagacactggtattcaggaactctttaaaatgtctacattaactgtaaacaacatctggacagaaatttttttctgcatagagttcttaaaatggaccacaaggtcttttcacctctgacaatatgggcaagcag

SEQ ID NO: 164183 - DNA, 507 bp, Homo sapiens
gtacagtgggtgctgggagaaatagtctttcatagtctctcccatgaacaaaggaaaaatagattttatctatgatactgtaatgaaaacagagaatttgacatgcaaaggaggaaattctcaggaggacagaactaaataaacatctgagaagttcaaggaattaggctatgtaccaaacacgtctattcttggtgaaagtaatctgtcaggatccaggtgtgtagttgcgggagtgaagtgaaaatggaactaaaaaatgtatttgcaaatgcccaccagaacacatggcttcatttttaataattaaaaaatactcaggtctttttaaactatcacacacacacataagccaataattattctattttggggaggggtgctatttctatagaatacaatagaatatgttaggaatctgttgatgccatcagatgtrtgcagttaagtatgatccttaggagccatattgaatgaattcactggcgaaaatacaaaacaaaagag

SEQ ID NO: 164184 - DNA, 437 bp, Homo sapiens
tagatcttcctaaactataaactgatagttggcatgaaaatgattcttcgcttaaaactcccctttaccattcttgagtagattttgttatgtagaataacattcacctgatatccaccatatttaacgtctgccatgtgacattagacacatacatgctttctcatatcaccatgtcttcatgcatttcaacaccctctgtctgaatggacattactaccttatctgctttggaaacttctatccacactttatgtcttggctaaaayattgcttttttttctggaagccagtgtggactatttctgagatataactcctccttcctttattataatacttatattgtaacaacaaatatacttttcatgtatagagtgctccttgggagttaacaataaatctaaaaattatatgacgctggtgctttcttttaa

SEQ ID NO: 164185 - DNA, 437 bp, Homo sapiens
tagatcttcctaaactataaactgatagttggcatgaaaatgattcttcgcttaaaactcccctttaccattcttgagtagattttgttatgtagaataacattcacctgatatccaccatatttaacgtctgccatgtgacattagacacatacatgctttctcatatcaccatgtcttcatgcatttcaacaccctctgtctgaatggacattactaccttatctgctttggaaacttctatccacactttatgtcttggctaaaatattgcttttttttctggaagccartgtggactatttctgagatataactcctccttcctttattataatacttatattgtaacaacaaatatacttttcatgtatagagtgctccttgggagttaacaataaatctaaaaattatatgacgctggtgctttcttttaa

SEQ ID NO: 164186 - DNA, 437 bp, Homo sapiens
tagatcttcctaaactataaactgatagttggcatgaaaatgattcttcgcttaaaactcccctttaccattcttgagtagattttgttatgtagaataacattcacctgatatccaccatatttaacgtctgccatgtgacattagacacatacatgctttctcatatcaccatgtcttcatgcatttcaacaccctctgtctgaatggacattactaccttatctgctttggaaacttctatccacactttatgtcttggctaaaatattgcttttttttctggaagccagtrtggactatttctgagatataactcctccttcctttattataatacttatattgtaacaacaaatatacttttcatgtatagagtgctccttgggagttaacaataaatctaaaaattatatgacgctggtgctttcttttaa

SEQ ID NO: 164187 - DNA, 424 bp, Homo sapiens
attggtttttgtttttgcctactctactagcctatgctcatgaaaaatcaagaaacaacaaatgaaattttgctgtaagaaaatgggggttattgaaagatgccaaatcatggtcttgtcagagaaaatggccaattattgcatgaaccargcataccctgtactgggtagaaaatttgcaattaaagaaaaactcaaaaagcataaatcttaagattttcacttaaatagaattttaaaaagcttaaatcaagaagggcttggaaaaaggaaatgagagatgacaacaacaaaactttggaagctagaaacaaagccagtcagtttgggtaagtggaagatggggtaggaagcaggggagacttaaaagcaagctggttcacactgctaaatgccagaaaacataagaatcagaagcaccagt

SEQ ID NO: 164188 - DNA, 430 bp, Homo sapiens
tttctgtttaacatgtgtttctggtttagtgttatgtatttgatttatgtctgagagagtccttcatttttaacttcaagtatttcaactgaattcttaaaactgtatgtctttatctttctgatttccattggttttgggggaatrggtattgtctggttacatgagtaagttcttcagtggtgatttgtgagattttggtgcactcatcacctaagcagtatacactgaatacaatttgtagtcttttatccctcacccccttcaacaccctttcccctagagtcccccatagtctattgtatcattcttatgcctctgaatcctcatagcttagctcccacttacgtgtgagaatatacaatgattggttttccattcctaagttacttcacttagaataatggtctccagttgtatccagcttgcc

SEQ ID NO: 164189 - DNA, 547 bp, Homo sapiens
atcccatttaatccctttcctctgattttgctattmtagctcagacttcccagggtacctgcaggctgagagtgagaggagaatgagttacccaattaaaagggagtatatgagctaatagtccagtttgctttagcctaagaaacacctcaaacttgctcttatcactctgaaatgaaaatcggcttttcctatttagctctgaagtaaacaaaagtttggaaaaagccaactcgatgattaaaatgtatcctccttgtaacagttggggccttcacttccttttaaattgtttaagaatcccccaacagagcagatcacatccaacttcttgcagagcaaaaagcaaccatttgtcacaagtcttcttttttttttatacatattttgtattccactgttttgttccaatcttcctttgttttatttggctgctgaagccagagcttcttgcctttggaataaaagcttatgagcaaacattctctgtgccttggaaagcaaaagcatcaccccagtctgcacatccaactgtgcccgtctccga

SEQ ID NO: 164190 - DNA, 471 bp, Homo sapiens
gatttatccagattgtcatctgcattttttgcacgttcagtatgtgaatctacccgcacacagaacccaagcacagtggtcctgtcagcgcataacgaaggaaaaagacttgatcgtgaacctgagggaaagataatcaaatgttgaacctgctgagcctgttagatgaaactgttaacaaggcttgctcaaatcaccaggggaatgctgtgcggagatgaagattggggttcagttctgaaatatgtaagcagggttaggctgaataaggaggtctcagtgcttgctgctgaagctgtgtagccagcctttgaaaggatttgtattttccctcaggagtcacttcagcacacagattcacttgaatcagttaagctcaactcagaaacayactgactgcgaaagtgtcataaaagaataccacatttcaattctaattttcaccaaatgaaaactaaataacaaattgac

SEQ ID NO: 164191 - DNA, 415 bp, Homo sapiens
taccattttcacactaaaagaaggctggagaaactatattaatattaaataatgtagatttcataggaaatattgatataaatatataaacatcgmataaagataaagatattgaaatagaaacacaaataagaaaatatcaatgaaaccaaaggctgactatcaaaaaggtcaataaaactgataaattctcgcaaaagatttggaaaagcaagaaggtgaaacaaagtagatgtcacaaattatcaggataagaaatgagaagagtgattgtatcacagattttacaaataccaaaggggaaataagggtatcagtatcttcacaacaattttatgctaaatatttgtcaacttagatgaaatggacacaatatcaaagctcatggcttttcttcatccttggcaacatttgc

SEQ ID NO: 164192 - DNA, 548 bp, Homo sapiens
ggtaatctttcctgagctggtgaacattgttttattgtcctgtttccaacaaatagttgggtctgtctgctaatttgttttcccttttatattaaaagtactttattgaggtacaattaatttatgatttacacacaataaaatactcaaatcttaaatataaggcacaatggattttgacatatgtttacaactgttaagaaatctcttctatccagggggatatcttttcaataccctttccctgaggtgttcactgttctgatagctataacaatgattttcatcctatctgttcttaaacatgatgtaaaaggaaacacacagtatgcactctttcttatttgacttttactcaacataatggtttgaagtttattcwcattatcacactttgtggcttgttccttcttatgagtaagaattctatgatttaattaatctactatttatggacatttggattgtttacactttggggacactatgaataaagctactgtaaatattctagtaaaatacttcatgtggacatatgcacttatttc

SEQ ID NO: 164193 - DNA, 537 bp, Homo sapiens
attttgaatagtgctgctatgaaaattcatgtgaaaatgttggggtaaacttatgtgttcatttccctagttatatgcataagaatggaactggtaggtcacataatgtatttttaaattttaagtaaaatgycaaatattttccaatatatcaatttaatatgtaaagtttgatattttcttatacatatacacagtgaacagattattatagtcaaactaacaatatccatgtcttcacatggttaacttttgtgtgtttgtggtgagaacacttaggctctactctcagtaaattttacatacacaatacaatattagtaattgtagtcttcatgctgtccttcacattgctagaggttattcattttacataactgaaactttgtacgctttaactgacatctccccatttctccttgccttttcctctggtaaccaccattctactatctgtttttgtaaattcaacttttaggattccacatataagtaatactatgaatttttttgtatctggcttattttacttatcat

SEQ ID NO: 164194 - DNA, 475 bp, Homo sapiens
gtgtcttgattgaagttactagatattcaattaatattggttaaattattagtgggtcgagaagtacagctacatatttcattcataatctccttaacatgtttccttcataagcatttccattcatgaacgctgttggaaaggggagactgttctctctctccatttcaccctgtttctatttctgctcattcttttaggtattttgtggtgaagatgaactctasaatcaggtactgcaatttgaatgctggctccacaactgataaggtacatgccctgggacaaaccacaccacctctcagagcctgtcacaaggcagtcaggacattttaggagcaaacgcctatgaagctcgtaaaaagggcttggcttatggtaagattcctaagagttagcagtgctgtagcaggtttattctattttctatcactattttttcacacagttgtcttttccatatttatgtgtctgc

SEQ ID NO: 164195 - DNA, 435 bp, Homo sapiens
aaaggaataacggagtcatgattgaggtgctttattttttcctttacatgtaggatttttcttgtcactttgcaagcctgggacttcccagccagcgacaccctacctgggccctcatcggccacactggtgttccccagctcacctgttatagcttgtacccatgttcagtggttctggagctcttgtgccatgcccaagaagaatgaggatatgatggacattgaagtgtgaagaggacagagaataactttattgagcaatgaaacagctttcagcagagaggcatgtggggttggtctgcctaccggaaggcaggaatgccctctttgttgctgggtgggggcctttggactcagaatggagagtgtgtgttgatttatttttgagtaygccaaaaaggttacagtgaagacaactcttaaaacgtgggca

SEQ ID NO: 164196 - DNA, 609 bp, Homo sapiens
ttttgttcctcaaggcaaatttggcaatacatggagacagttttagttgtcaaaactaggggcacgtgctgcttgcatatagtggctagaaattctgctaagcaccctgcagtgcccagggtcagccacccacaacaaagactttctgacccaatagcccaggttaagaaacacctgataacccaattggtcaggctattccttcaaccatatccctagcctatttccctttcatttactaaactccagctatccacatggtgttcttcttggacattttttttcctcctcatcctttatgtggctaattacactcatttttggggtttcagtttagctctatcaaccatgatgctaatttctatcctgaattctcatgtttatttcccacaatattaaaatctataattgtatatgtatatatatatatataatttttgcrtgttctattagactctatactcaggaggatctggagtctgcttagcctaattgtagcaaataaatgctcaaaaatttaagaaacaaaaaaaatcagtgttgttggatatagtgatttgtatatgggagacttgtgcaaggtgatgtgagataaataggtagggctct

SEQ ID NO: 164197 - DNA, 547 bp, Homo sapiens
ggagtaatatgtagcatttcccaaactttttggacaagggaatcttttgtttttgtccatgtcataaaactagtatttcatggaactgyaactttgcaaaatgttggtttagaggaagtctgacagaatatgtcctcatataatggtcttgatgtataaattttactcaagcccaaggatgaagtcttcaggaaataaaatcttattaatgaaatatatatggcacagaaatggcaacaaaattcccatttattggcagtaggaactcagtcacatatgctaaaatgtagcatttcagggcagtcattctctgccatgtgtgtggcttgaagctacatatactataaaagaatctcatttttttatgggaaccactgtcacaggggccatgtaaattgcttattatagtaatttataggtggttttgagcactatctaaatgcctggcatttctctaattgtgttgtatctgcttaattctcccccaaaattctatgaggtagccattagtattaggcccattttacagaactggaaacagtcacaa

SEQ ID NO: 164198 - DNA, 653 bp, Homo sapiens
ttgttacacaattccttagaaatatatgcccctgctaaataaaatgaaacctttagatatattgatgaattcaaacacattttggtttagtgagaatcatttaatcttattgtgatttctagatttgtatcttaaagattaatgctcagaagttcattatctcyctgtattcaatatttttgatatcctaccattgaaacacttaagtacttgatatagaactcctatgttttcaggtatgctcaaattctattactttcatgaagtacttgtcattaccagcccatttaggtttattctttaacaactttgtctttatagtaagtttcacatgtttatcatatagcttggtcttctaataggaaacatcttaaaaactgatatcctttcacaattctgtgaaatctcctaagtcacctacataattaacatgagtttatagagtaatccaccttggagattattcattaatagattgaaaatgctctatcaaaaaatgttatttttcatgctactattatacatatcttgatttgagtcaaattttaataaacaaatatataatgaattattcttaaatttgcatatattcactgaatatttacctagatatcattccttaaagattatgtaaattttgataatttatatta

SEQ ID NO: 164199 - DNA, 282 bp, Homo sapiens
tttcactctttgtctctttgtacttttgctaatgacttctgctaatgtacttctctctgacttctgagtcatttgctcaatactttttccatatttcaagtttcatttcctgatattatctcgctggcctggtcattatttttcccccttgctcagagttttgcaccagccttccttgcagacaactgcttagcacatagaccagctgcccttgggtcaagtggctgctggtttcatgccctrtgaaaagagaaggggggtgcaaagcttagaagatggtct

SEQ ID NO: 164200 - DNA, 363 bp, Homo sapiens
cagttccttgccatatgggtctcttcatatggctgcttaagcgtcttcacaaaatggcagttggcttcctccagagcaggttgtctaagataggatgctgcagttacaragtcattttttgaccttgcttcagagtcaacacacatttgcttctggatatattatttgttacgcatgtccatcctagtcaatgtgggaggaactacagaagggtatgaatgccaagatgcattttggtggatgccttccacaaatccctacgtggttgtgtcctttgatttctggagcttttcatcctgtttctatcagtcagtcagttaatagcaacatcaaagctcaactaaagagacacctgacaacaca

SEQ ID NO: 164201 - DNA, 385 bp, Homo sapiens
tgaaaatagtaagttcttacctaccaaaaattacattgactgcaatggattaaagtctttaatcaaaagacataaggtggccraataaatcaatataaagactcaattatatgctgcctaaaagagactcacttcacttgtaagaacacacatagattgaaagcgaagggataggaaaagatattccattgaaatggagaccaaaagagaggaggagtagctatacttagataaaatagactttaagtcaaaaactgtaaagagagacaaagaaggccattatataacgatagagaatgattgaatagtaggatataataattataaaaatatatgcacccaacatcagaatatctaaatatatgacacaaatattaatagatct

SEQ ID NO: 164202 - DNA, 560 bp, Homo sapiens
ggagctcaaaacagaaggtttacttgaagacaggagttmaagaccagtctagaccatttatatgatttggctgtgtccccacccaaatctcatttgaatacccatgtgttgtgggagggacctgatgggaggtaactgaatcatgggggcaagtctttctcatgctgttctcatgatagtgaataagtctcacagatctgatggtcttataaatgggagtttccctgctcaagctctcttctcttgtctgctgacatatgagatgtgcctttcaccttccaccatgtttgtgagaccttcccagccacatggaaccgtaagtctgttaaatctctttattttgcaaattgcccagtctttatctgcagcatggaaatggacttatgcagtgaattgggtaccagtagagtggggcactactgtagataccagaaaatgtgaaagcaactttggaactggctaacaggcaggggttggaagagtttggagggctcagaaggagataggaaaatgtggaaaagtttggaagttcctagagacttgttgaatggctttgctca

SEQ ID NO: 164203 - DNA, 560 bp, Homo sapiens
ggagctcaaaacagaaggtttacttgaagacaggagttcaagaccagtctagaccatttatatgatttggctgtgtccccacccaaatctcatttgaatacccatgtgttgtgggagggacctgatgggaggtaactgaatcatgggggcaagtctttctcatgctgttctcatgatagtgaataagtctcacagatctgatggtcttataaatgggagtttccctgctcaagctctcttctcttgtctgctgacatatgagatgtgcctttcaccttccaccatgtttgtgagaccttcccagccacatggaaccrtaagtctgttaaatctctttattttgcaaattgcccagtctttatctgcagcatggaaatggacttatgcagtgaattgggtaccagtagagtggggcactactgtagataccagaaaatgtgaaagcaactttggaactggctaacaggcaggggttggaagagtttggagggctcagaaggagataggaaaatgtggaaaagtttggaagttcctagagacttgttgaatggctttgctca

SEQ ID NO: 164204 - DNA, 486 bp, Homo sapiens
aaaacactatgtaagggagattgcagaggaacagagttctacaagaaagtgtttgccctagggcctttccactaaatatttatgacctagaaaaatacataggttcatatatatgtccctgatgastttatttttcccagggcttatatcttagcttctgttcctgggaatgggggtggaggaggagagagtttggagacttacttctaccactctctcaatagtccaagccacataatgcaaaacacacatcaagtactacattgcttgtaatttaaaattcttacattctttaaatacatacagagtatgatatatatgcataagttattttaatatatatcctaggagcagaaatactcattacctcaatggttctttagcatttgacaatccctattcaggaactgataccccagagggcagtagtactttagatgttgctctctgaacttacactagaattcgatagcttgcatgagggaa

SEQ ID NO: 164205 - DNA, 486 bp, Homo sapiens
aaaacactatgtaagggagattgcagaggaacagagttctacaagaaagtgtttgccctagggcctttccactaaatatttatgacctagaaaaatacataggttcatatatatgtccctgatgagtttatttttcccagggcttatatcttagcttctgttcctgggaatgggggtggaggaggagagagtttggagacttacttctaccactctctcaatagtccaagccacataatgcaaaacacacatcaagtactacattgcttgtaatttaaaattcttacattctttaaatacatasagagtatgatatatatgcataagttattttaatatatatcctaggagcagaaatactcattacctcaatggttctttagcatttgacaatccctattcaggaactgataccccagagggcagtagtactttagatgttgctctctgaacttacactagaattcgatagcttgcatgagggaa

SEQ ID NO: 164206 - DNA, 481 bp, Homo sapiens
tgaaaggtgctctatttctaggaccatttgttcatggtctccacaactttacaggaaattccattgcctttcctgaccagaaagttgatcctgctgtgacagcaccattacatctgcctcaggacactttttttttttcctaaggtggttgtcygagtgcccaaaggacagtgagatggacttcacaaagctcccagaacaggctgcatgcctgcttttgtgattgctggacccttgatatttgtatgagtgacagactctagtctgagatttgctttcttagataatgtgctaacctgatagccaggttacaaggagatacggttcttaacttctcttttattggtaaaggctactgatatttaccaaaatgaccagacaattgtgaaggtcaaattggtttaaatcactttgcaacactgagaagcatattgatagaataagtcacaatttaggaaagtctttctgaaggtaatgagtt

SEQ ID NO: 164207 - DNA, 611 bp, Homo sapiens
tctgtttttgacacttttttttgttttatgggtgtttttgtttgttttttgagacagggtctcactctgttgcccaggctagactgcagtggaacaatcgtgactcactgcagcctccaactcctaagctcaagcgatcctcttgcctcagcctcccttcaagtagctgggactatgggtgtgcacaccacggctggcttgtttttaacacttttactgtgggtaactagcatgtaactttacctctgagtctttttatccataaagtgaaataatacctacctcagaattgttgtggggattaaaggacatggaatacgttaaccctcaacagatggccactaataatatacttttcaaaaagcaaaaaccatagaactttgcagtaaaaatgagatgctgggatcttaccctatccattcctctaattttgtatttaagcctctctgaagctaaaataattgtcagtagtcacacagctagtagctagacgtaaaccagatctcactaaatcaatatwctaatagaaaaataattcaaccacctactatttgctttagctttgaggttgggctttatgaactccataattattctctgaatcaatcaca

SEQ ID NO: 164208 - DNA, 526 bp, Homo sapiens
atttaaaaaggcatcaggattttagcctatcactagtactaacaattgtgagatggggcactatttgatgtatctgccagataagatgtccactctttgatgtaagtttctaggactcaaaaagaacaaaaacaacccaacacttttctaagggagaagaaataaggctcttaccaaaaagctaaaccaagattttaacyagaacaaatttctatgtcttaatattatatttgtagagggaagcagagtgggaaatcaacttcattccaaacagcacataagaacacttagaatatcttctctgagtagctaacaaactcatgcaaatctttgtcaacaagattttctccaagtagtaaacataaaagctcttcaacttaaaaaataaagtactgaaacacttaaggtatcctgtagaaataaacataatactatttgtcaaaattaaaaatgcacatacctctgaagcctttgcagttccagtcccaagattacactcatatacttgcaaatgtgcaaaataaac

SEQ ID NO: 164209 - DNA, 464 bp, Homo sapiens
ggcatctggtgggtgccctctgggacaaagcttccagaggaaagaacaggcagcaatctttgctgttctgcagcctccgctggtgatacccaggtaaacagggtctggagtggacctccagcaaactccagcagacctgcagtagagggccctgactgttagaaggaaaactaacaaacagaaaggaatagattcaacatcaacaaaaaggatgtccacaccaaaaccccatttgaaagtcaccaacatcaaataccaaaggtagataaatccacgaagatggggagamaccaatgcaaaagggctgaaaattgcaaaaatgagaatgcctcttctcctccaaaggatcacaactcctcaccagcaagggaacaaaactggacagagaatgagtttgacgaactgacagaagtaggcttcagaaggtggataataacaaactcctccgagctgaaggagcacgt

SEQ ID NO: 164210 - DNA, 572 bp, Homo sapiens
tacatttgtcccatttgctttacaacattatgacaggaacctttgagggatacttctgtttcatattcctatactgccagtggttgcaaaatttccaagagcaggagctgtaggtcacaatggaaaatggaaacagtagactgggatttgacttactaactgtatggctttagggcagtctcttaatacctagggttttttgttacttggtcacctgytttctttaaagaagggacttatagatggattctcaaagtctcctctaacttacaattttatattttgtgataaaaagagttgagtttgtcagaggacaaaattcttttcttgattttgtctgaaagggaggaatcttcaggtctggacaagatgcttcttttcttacctaattttctttctttctttctttcttttttttttcctaattttctttaatgaacatttgtctttcttggctgaaagaagataaaccagatgggaaaaggttccatttaatattagtagtgtattcatatgatcttgcagtatccacagtacgttttcacctgttcaggaggtgtgggcaatcactt

SEQ ID NO: 164211 - DNA, 572 bp, Homo sapiens
tacatttgtcccatttgctttacaacattatgacaggaacctttgagggatacttctgtttcatattcctatactgccagtggttgcaaaatttccaagagcaggagctgtaggtcacaatggaaaatggaaacagtagactgggatttgacttactaactgtatggctttagggcagtctcttaatacctagggttttttgttacttggtcacctgttttctttaaagaagggacttatagatggattctcaaagtctcctctaacttacaattttatattttgtgataaaaagagttgagtttgtcagaggacaaaattcttttcttgattttgtctgaaagggaggaatcttcaggtctggacaagatgcttcttttcttacctaattttctttctttctttctttctttttttttycctaattttctttaatgaacatttgtctttcttggctgaaagaagataaaccagatgggaaaaggttccatttaatattagtagtgtattcatatgatcttgcagtatccacagtacgttttcacctgttcaggaggtgtgggcaatcactt

SEQ ID NO: 164212 - DNA, 558 bp, Homo sapiens
aataaatatattgtggataatgagaaccaggttctcactgtagaagaagggagatacagatatggaaaggagggagagtagaatgaaccctgtggtattggattagaaatagaattatcagtatatacctacggtttttaatagacagcataacaaataggcatatagataaatttagatagatagatggatggatrgatagatagatagatagatagatagatagatagatagatagcaatgaactgattgttcatatccctccaagatgttaatggtgaaatcctaaccccaaagtaatagtattaggagattgggtctttgggaggtgattaggtcatgaaggcagagacgtcctgaatagaattagttctcttataaaagagaccccacagagataaaaggtccttataaaaagacccttagtccttctgccatgtgaagtcacagtgagataaaggttctctacgagaaagtgggccctctcaccagacaccaagtctgccaactcattgatcttggacttcatagtctccagaactataagaaataaatttc

SEQ ID NO: 164213 - DNA, 590 bp, Homo sapiens
atcaggttatcatagcttgaggacaccagcgagtctaatagtccaactaactctccatgtcttggtttcaagccacttagcaagcttttgactctaatttagcatccctcctagactagacagtagaataagaatcagttgatcagcaaaaaataataactaacaattactgagctgttcagttcttactatgtgcaaggctaacaacattacacatattaactaactttaattctcacagcaaccctatgaggttaggactaataatattattgcccttattttacagatgatgaaatcaaggcatatagagttcaagtaacttttccaaggtcagataggtagtgagtggtagtgctgagattcaaacccaagcaatctggctctaggcccacaatgtctgttacaccatagtgccactgcaaatatgcaagccacttgayagttgtatttttttttttttgtaaagtaatcaatagtccagctgcttctaaaactaaagccaaacaacaatgtgtctcctaataacatacatagtaaaacacctttattgtggtctgagaggttattacatctcagtctctactcac

SEQ ID NO: 164214 - DNA, 584 bp, Homo sapiens
ttgtcattgttatttttgttattcaacaaatatgttttgaatttgtactatgtgacaggaattgtggtagataatagcaatgctattttgaacaaaatagacaaggttatagctctcaggggaactgatttataatctagccacatttcttacgtctcacaaacttacattctaaattgtactattgtagtcacattatatgctgcttttctcttgctgttgttctctgctctgggcattttcttgtattcttcctgtcttggaaaacattctctccccaacctccctcacctgtataactcgttgttcttcagataccagtttaaatgtcacatccaagagttctataactggattagtttccccttagtttcttagatctccccctaccttaacccatttgtatwttacctgtttatgtatgtatatcccaatgcactctaaacaccaaaacagtgagggagtctgtaggtcttgtttaccagtgtttctccaatatcaagcatagtgcctgttacatataggcattaagtatatttgtggaacgaaataagagagttattaaaggccaggaggacactttt

SEQ ID NO: 164215 - DNA, 536 bp, Homo sapiens
tttgagttctacatgtagtttgtcaactctctagagatgttactttgaaaaaaatattttcaactctccagaccatagatttctttattcatctgtataatgattataataccctgttactgttggagctcaggatatgccactccaaaaattctggactttaggaraccagaatatgccatcccaaaatatacttatttgacatattgattatgtatagctggttattttgaggaattgcagacataggcagagctctgaaaagctccccttttgtaaaggaatttatatctacaaaagaaattttcattaataaaggtaactgtactaggaagagaactgctaagaaacaacttttatcacctgagaaactcttacttgcataacaaggcaaactttattcaccgtaaattttctcccctcatcctcctataatttgtcttcaccactgcctagaaatgccaagtttctattcctttctgtagatcagaatcttatataagcttcaatcatctgacctttctttaagtttccta

SEQ ID NO: 164216 - DNA, 519 bp, Homo sapiens
ttgtaatgcctaatggaaactagaaattgctcatatggaattctctagaagttgccttcattttgtggcagagatttttttctgttttaaatttatttaattttttgtgttgttgttcttgtttgagacagagtcccgctctgtggccaggctggagtacagtggcacaatctcggctcactgcaacctccgcctcctggtttcaagcaattctcctgcctcagcctcctgagtagctaggaataaaggcacatggcaccacrcccagctaatttttttttttttttgtatttttagtagagacggggtttcgccatgttggccaggatagtctcgatctcttgacctcatgatccaccagcctcggcctccctaagtgctgggattacgggtgtgagccactgcacccgacctatttaatgtttttgaatgagtgacagccttagatattgagcagactattttccaaagattttttttttaaaggggaatgatagttctctgtcatactctaaaaac

SEQ ID NO: 164217 - DNA, 519 bp, Homo sapiens
ttgtaatgcctaatggaaactagaaattgctcatatggaattctctagaagttgccttcattttgtggcagagatttttttctgttttaaatttatttaattttttgtgttgttgttcttgtttgagacagagtcccgctctgtggccaggctggagtacagtggcacaatctcggctcactgcaacctccgcctcctggtttcaagcaattctcctgcctcagcctcctgagtagctaggaataaaggcacatggcaccacacccagctaatttttttttttttttgtatttttagtagagacggggtttcgccatgttggccaggatagtctcgatctcttgacctcatgatccaccagcctyggcctccctaagtgctgggattacgggtgtgagccactgcacccgacctatttaatgtttttgaatgagtgacagccttagatattgagcagactattttccaaagattttttttttaaaggggaatgatagttctctgtcatactctaaaaac

SEQ ID NO: 164218 - DNA, 417 bp, Homo sapiens
gaagctactaatgctacaataygcaggccagcccccagaacagaaaatgatcagcccaaatgcaaacagggctgaacttgagaaaatctggctaaagccatgatttccagatttgcacagtcacccagagcccaatacatattattaagaatgtagagctcagctcaattaaatgctgaaagagccagacacttgtgttacaaaacacttcaccatcacacattcctgcccaccctgctagggttgtgccattgcctacagtctcatctaatagatgttgaattgcccccataatggatttatgttttcgggtagagttgggaaaggaagtatattcaattatcatcatctctcagatcttctctaaggacaaaaggtaaagagttaaatttgggaaactgaaggacatttcaaatc

SEQ ID NO: 164219 - DNA, 472 bp, Homo sapiens
gcctgtgctgcatcagcttcacacctagagaagagagtgaaagagaagggagagccgtccttttgggctgccttgaaataaaggttgacccatgggttcatgtattgtcattcattctcattttctcytcctctctttctctctctcccctgcccctgaagttagcttttctaaaccctacctggataaggataagaaatagaaggaggggacactttaggatgctacaaaataaaatacaacaacaacaacaataacagcagcagcaacaacaacaacagcaacaaaaggggaagaaacaaatctggccactgcacattcctccttgccaacaaaaagccgtggatgcaaaaagctgcccttcactgcatagacagaacagggcgcgctcgagctatgaatctcggaaattactcaaaccatcagcctctgcaagaagcaaagtggacggccgggcgcggtggctcactcc

SEQ ID NO: 164220 - DNA, 472 bp, Homo sapiens
gcctgtgctgcatcagcttcacacctagagaagagagtgaaagagaagggagagccgtccttttgggctgccttgaaataaaggttgacccatgggttcatgtattgtcattcattctcattttctcctcctctctttctctctctcccctgcccctkaagttagcttttctaaaccctacctggataaggataagaaatagaaggaggggacactttaggatgctacaaaataaaatacaacaacaacaacaataacagcagcagcaacaacaacaacagcaacaaaaggggaagaaacaaatctggccactgcacattcctccttgccaacaaaaagccgtggatgcaaaaagctgcccttcactgcatagacagaacagggcgcgctcgagctatgaatctcggaaattactcaaaccatcagcctctgcaagaagcaaagtggacggccgggcgcggtggctcactcc

SEQ ID NO: 164221 - DNA, 348 bp, Homo sapiens
gggcaatttttttttttttttttttttttgagacgcagcctcactctgtcgcccgggctggagtgcagtggcgtgatcttggctcactgaaacctctgcctcctggattcaagcgattctcctgcctcagcctcccaagtggctgggattacaggcatgagccaccatgccyggcctagagtcggcatggaaattaaacaacctgcttccaaatgacttttgggtaaagactgaaattaaggcagaaataaaaaaattatctgaaactaatgaaaacaaacatacaacatcccagaatctctgggacacagctagaacagtgctcaaaggaagtttctagtgctaaag

SEQ ID NO: 164222 - DNA, 348 bp, Homo sapiens
gggcaatttttttttttttttttttttttgagacgcagcctcactctgtcgcccgggctggagtgcagtggcgtgatcttggctcactgaaacctctgcctcctggattcaagcgattctcctgcctcagcctcccaagtggctgggattacaggcatgagccaccatgcctggcctagagtcrgcatggaaattaaacaacctgcttccaaatgacttttgggtaaagactgaaattaaggcagaaataaaaaaattatctgaaactaatgaaaacaaacatacaacatcccagaatctctgggacacagctagaacagtgctcaaaggaagtttctagtgctaaag

SEQ ID NO: 164223 - DNA, 348 bp, Homo sapiens
gggcaatttttttttttttttttttttttgagacgcagcctcactctgtcgcccgggctggagtgcagtggcgtgatcttggctcactgaaacctctgcctcctggattcaagcgattctcctgcctcagcctcccaagtggctgggattacaggcatgagccaccatgcctggcctagagtcgkcatggaaattaaacaacctgcttccaaatgacttttgggtaaagactgaaattaaggcagaaataaaaaaattatctgaaactaatgaaaacaaacatacaacatcccagaatctctgggacacagctagaacagtgctcaaaggaagtttctagtgctaaag

SEQ ID NO: 164224 - DNA, 347 bp, Homo sapiens
agtgaatgaatacacaaataaacaaatgattctcaaacttaatatttagtgttgatcaattgacccatgaaaaatgcatgtaaagttaacaaaaamgacatttttcagaaggcttttcctttccttttcctctgtattctaaaaatcaggttttttttggtaatacaacccatttttgactttaatgtacacagaagtttcttgtcttcattttggttatttcatgtgttgatttctagcggcttcccagtttctcagcctttagaaacttgaattacttcagtcatctaagtgtcttctttcttgaatttagaaacctaaattttgatcaatctttctaaaggttt

SEQ ID NO: 164225 - DNA, 534 bp, Homo sapiens
aaacttaatatttagtgttgatcaattgacccatgaaaaatgcatgtaaagttaacaaaaaagacatttttcagaaggcttttcctttccttttcctctgtattctaaaaatcaggttttttttggtaatacaacccatttttgactttaatgtacacagaagtttcttgtcttcattttggttatttcatgtgttgatttctagcggcttcccagtttctcagcctttagaaacttgaattacttcagtcatctaagtgtcttctttcttgaatttagaaacctaaattttgatcaatctttctaaaggtttatgtaatcaatcagttttttcaatttttggttttgttgattttctctattttgtctttgtttttttattttctcacttttgctcttgtggtaatgatttctttcctcctactttccctggacttactgttttatattccttctgttaaattcttgtgtgtgtgtgtgtgtgtgagagggagtctcaytctgtcacacaggctggattgtagtggcaagatc

SEQ ID NO: 164226 - DNA, 606 bp, Homo sapiens
tcatttcttatatatctttctatckttccgaatatcttaggtatggttttacaggcaataatcacacagagagcctttattgaatacaaactagtagggattaaaagaccaatgtgaaatttgtggcagagtggatggtatttggttttgttgcttcttagattttgaaagtcttataatacccagcgttaactgttgtttgactctccttgcaaaacatataaacaaaaaaatcaaaaacaaacaaacaaaaggtaataaagtttagaggaggtgctgaaatgcccaatattagcagcaatttgcttccttagtccttctatgcccattgccttcatttacacattttgtcttctgtcttcttagtgctgcatatggaccgtgagaaaattaatatttctcaaattagcaccagaaaagcatatttccaggtatacccagacctgacactaattttaacatgtcatgctttccttgacttctcaaagcatccattgaagaaaatgagaacagatagtttgtacctctattttatattccatatgatattttcataacaacttagtagaatttgtgatttcagactgagttctataacctcaaacc

SEQ ID NO: 164227 - DNA, 606 bp, Homo sapiens
tcatttcttatatatctttctatcgttccgaatatcttaggtatggttttacaggcaataatcacacagagagcctttattgaatacaaactagtagggattaaaagaccaatgtgaaatttgtggcagagtggatggtatttggttttgttgcttcttagattttgaaagtcttataatacccagcgttaactgttgtttgactctccttgcaaaacatataaacaaaaaaatcaaaaacaaacaaacaaaaggtaataaagtttagaggaggtgctgaaatgcccaatattagcagcaatttgcttccttagtccttctatgcccattgccttcatttacacattttgtcttctgtcttcttagtgctgcatatggaccgtgagaaaattaatatttctcaaattagcaccagaaaagcatatttccaggtatacccagacctgacactaattttaacatgtcatgctttccttgacttctcaaagcatmcattgaagaaaatgagaacagatagtttgtacctctattttatattccatatgatattttcataacaacttagtagaatttgtgatttcagactgagttctataacctcaaacc

SEQ ID NO: 164228 - DNA, 237 bp, Homo sapiens
agcttatccaccactactctgtgacgagaaccaagtaaaattaattttagctaagattttaattactgataatatgagtgctttgccagccgattctaatacataaaactctggtttacttaatcaactgcaatactataacaaaacaactacacaggaaccataaggcgggtkaaatagtgctccctacccccaattcaggtataccaggaaccctgaatacaaccttatttgtaa

SEQ ID NO: 164229 - DNA, 574 bp, Homo sapiens
tgaagtctctaagtacggtacatgagctaccaagcatacaagggagtattgaggtaataaactgtcttcatatagctgtatagcttacataacattttccatggagctatacyttataaatccatagattgtaaatacatttatttaccagaaacaatcctaaactagaggcatcctactgaaaacattcatagataaggattctcatcctagcatctatttggtagcaggtttagttgtcagcttgtttacaagaaattgatacccctacctttctttctttccctggatcatacccctgataacagaagagaaatggattataagccagttgtttaactgctttctccaaaagactcaagtggcatatatttgtgaattagtatttatgttcacgattatttatttgagatttaagatacaagaaattaaattgtatcattaattttaaaaagacctgttaaaatattataaaacatctgatttaccctgctctatgcctgagtgaccttagcttagttacattgctatgaaaataagtatgcttatctgtatggaattacttgataaataa

SEQ ID NO: 164230 - DNA, 574 bp, Homo sapiens
tgaagtctctaagtacggtacatgagctaccaagcatacaagggagtattgaggtaataaactgtcttcatatagctgtatagcttacataacattttccatggagctatactttataaatccatagattgtaaatacatttatttaccagaaacaatcctaaactagaggcatcctactgaaaacattcatagataaggattctcatcctagcatctatttggtagcaggtttagttgtcagcttgtttacaagaaattgatacccctacctttctttctttccctggatcatacccctgataacagaagagaaatggattataagccasttgtttaactgctttctccaaaagactcaagtggcatatatttgtgaattagtatttatgttcacgattatttatttgagatttaagatacaagaaattaaattgtatcattaattttaaaaagacctgttaaaatattataaaacatctgatttaccctgctctatgcctgagtgaccttagcttagttacattgctatgaaaataagtatgcttatctgtatggaattacttgataaataa

SEQ ID NO: 164231 - DNA, 549 bp, Homo sapiens
ttcttactttaagttactctttataattttaacttgatggcttcttttagctttttgttgtgttggattgctattaatgtcagtggggatggcacaaggttygagaggccaaagagacccagaaccaggcaatgagacatggggtttattgaagtggaggttacatacagtgtggtccagtagcagcgggctggacagaactgccaccgcctacagaaagcatgcagtttaaatagcattttcacttaacaccctccacctggcagtctccacctagcttaagacgttattgctatcaggtggatttaccatacacctcagctcagaatctccttgaatggccctaacatttttatcgtatcattcttccgtgatttccccagggccaggtatgcagaggagcattgctgccagatgtggcagcagcactaaaaactacaacaaaaaacaaataacaatcactctgcaaagattgttcttccaagcacttgggagttgatcctgtacatgccacggcaggcccatggtggaaagcagcagctctccata

SEQ ID NO: 164232 - DNA, 515 bp, Homo sapiens
cattcataacattggagtattccaacgtaacgttattcgttactccattcctgtgttttctctggaattagtcccgtgctgaatatcttaaatccattctccatgttcgttaagcatatatcttctattttttattttatctaagttttggaatatttctatgacttcaacctctcactacactttttaaaaataagttctccaatcatatcttttataaccatcaactctttttcaaggtgacatatagtattcttgttttatgtatatcatattttcttyatgatcctaattaagatgtttaaaaaggtccctctgttccatgaatcatactttcttcctcttgcatcatttatttatgtgttcattttggatcttctgttttgtgcagtttacttcaaatgtctggtgaaccttgattgcctacttacacgaatgaaagactagattgacttgtatacttaactgtatacaagtgtagtttattcagtactttaatagttttatttttgaac

SEQ ID NO: 164233 - DNA, 477 bp, Homo sapiens
ttcatgtgattaatgtaacatagaatttacaaatttaaatgcataatgctggaaaagtagaaataaagatttttatagtaacayaaatctgtgctacatacatttaatatattcatggattataaaatgaattgtgttcaatagctcaacatttttaattgggtttgcaattataataaattgttacacacatttctcaagtggattttcagacttctcaaatatttgagtctacattttcatgtctactagaaagcatacagagaagttttttacacaagtaataatgttatttctaaatggctttttggttttttcttccacacattgtttatccctgtgggcaaatctttgtcgagattttctcatcctaggagtaaaagggtttaaactggcttctctagtcagattgatcttacaggaatcagttttagatgtatagtcaagcaaatggacttctaaggacagcaaaaatga

SEQ ID NO: 164234 - DNA, 539 bp, Homo sapiens
aagaaagttactccccactttgaaagagcctctgtgacatatgaccttgtccaatagaatggcccaaaaatgaaggtgtcagatatgtgtgttagacatccactggggtgaccacacagaccctctgtcaatgtgactcagagcaatgtgctgccctttattcctctcctcacttccccacagcaggcactcacaggctatctccatcaccccaccccacacccacacccactgagcccaatgctctgatctagatgctagagcagctcagtgtatttcattcttgggcmtgtctggtcagaagaagtaaggtcaataaaaagtcacagtgagattcagtgaaagatagtggaattggatagtactttactcttagaatcagaggaccgtcacaggcctcaccccaagagattctgatacagtaaatgagggatggagcagggagacaaaaatccatggtttttacgtttccctggtgattccgatggtcagctaaggaaggaaagttactcatcctccttgaccttcttggtggcagt

SEQ ID NO: 164235 - DNA, 539 bp, Homo sapiens
aagaaagttactccccactttgaaagagcctctgtgacatatgaccttgtccaatagaatggcccaaaaatgaaggtgtcagatatgtgtgttagacatccactggggtgaccacacagaccctctgtcaatgtgactcagagcaatgtgctgccctttattcctctcctcacttccccacagcaggcactcacaggctatctccatcaccccaccccacacccacacccactgagcccaatgctctgatctagatgctagagcagctcagtgtatttcattcttgggcatgtctggtcagaagaagtaaggtcaataaaaagtcacagtgagattcagtgaaagatagtggaattggatagtactttactcttagaatcagaggaccgtcacaggcctcaccccaagagattctgatacagtaaatgagggatggagcagggagacaaaaatccatgktttttacgtttccctggtgattccgatggtcagctaaggaaggaaagttactcatcctccttgaccttcttggtggcagt

SEQ ID NO: 164236 - DNA, 582 bp, Homo sapiens
cacacatgtgtgcatgtccttcggtatccaattaaaatgttcctcctccataagacctatttgaatgcccgagccagaatttgtggaacctacttctgtgtcctggtggcactttctgtcatgccagtggcccacatctgctgccttgtggtattagcaattatggctgtgcctggtttcagaatattactcgaagctgatagataagctccttgagatggggcctgaatcatccatgcaggttaccttcctaccaagatgctctgtatactgcagtgttcagtaaaggctaccaaatcatatctgctttccaaaaatttactaaaatataaatattctggggacacccagaactccctttactaaagcaattggttgctctagcagtattaagagacaatggggtttgtttcacaatagagcttaaatcattacattaatygtttccatatgttgcagttggaaagtccagttccttgttattcttcctactgtgatcctaataaattacattgtctcttcttggctgctggagcctaattagcattaattcttcagtgaattttaaatatattcactatc

SEQ ID NO: 164237 - DNA, 557 bp, Homo sapiens
atgagaacaacatggaggtaactgccctcatgattcaatgacctcctactaggttcctcccacgacatgagaggattatgggaactacagttcaagacgacatttaggcagagacacagccaaaccatatcagacacagccaagccatatcagaaattgtctcacatcctaggaagaaagatgagtgggaggatcagacattccaagcaccaacccccatcattatcccagccaaatatccaatcaaactgttgtttgtaacatgaattaatgattgcagagattaaagttcacattctagactggtttcctaagaaaatagtttcatcagtaaaaattatatcttaattatacagccagaatatcttatttacttgacctcaccagagaggaggtactccatacataggggagttgtctagacaaccaaaatgtacaccttttaggagcttagacttcaaagtacttcttttgattataagcttataatactccctrtgccttttaaaactgatcacaattaaattgaaaggtttagtgatgactgcaggttatca

SEQ ID NO: 164238 - DNA, 475 bp, Homo sapiens
agaacatttattttgtgttacattacctgtatccctcaccccagctcacacctttctactcttagtttccatcccagagacagcttagttccctgtcacttgtctgttctatgacttgcagagctccagcctacctgggtggcacctcatggcactgactgctatgagagttccacaaaactgtccatggtgtctgtgatgtgctggtgtcctgtactcacagatgtgctcacacctgttcaggtatccaaccctcagagccctccttctctggttcttaatgtcatrttgacaattgactctgtctgagagaccaaaatagatggtcctttatcaactaagatgaatcctaaggttaaaaaacagagtagcttctgggttgacggttcagggcccagctggcatggcagatttctaaattcctacaggaaaaaccacactcctactagactctctaacagtaagtgctaccagg

SEQ ID NO: 164239 - DNA, 582 bp, Homo sapiens
ttacaccatggaaaccccatagtacagggctgacatgccagtgtttagtagagaactcaataaatgttaactattacgatcatcatcatcatcccgtatttcccmctagaaaaaaagtctgtgtaagctacaagcacactgctcctggaccccactatcttgaggaagacatttctgaaaggcagccatgtcttgccttagcaattgctaggtagcactgaaatcttcaactcagttttatgaagtgcatgacgtaccgttgatctagaccccaggtgtcagcagggtgggagacataacagaaatacattggaagatactttctgcactcagggaatttagtctcataggaaaaacagaaccatcatacttaccatttaaggcagcttatttaaaacaaaaacaaaacaaaacaaaaaaagagtggagctttgtggattataagctatgaacagtgtaacatgtcagagcagagctgagtaacaggggatctttgcggacctgaagggggcctgaagaatgggctgacctgcagagacagaggccagataactatacagggaatataaacaagtgaagctt

SEQ ID NO: 164240 - DNA, 399 bp, Homo sapiens
gaggagctgtgtttctttggaggagaagaggcactctgatttttagaattatcaggttttctgctctggtttctccccatctttatggttttatctacctttggtctttgatgatggtgacgtacagatggggttttggtgtggatgtcctttctgtttgttagttttccttctaactgtcaggaccttcagctgcaggtctgttggagtttgctggaggaccactccagaccttgtttgcccgggtrtcaccagcggagcctgcagaacagcaaatattgcagaaaggcaaatgttgctgcccaatccttcctctggatgcttcatctcagaggggcacctggctctatgaggtgtcagtcagcccctactggggggtgtctcccagttaggctactc

SEQ ID NO: 164241 - DNA, 399 bp, Homo sapiens
gaggagctgtgtttctttggaggagaagaggcactctgatttttagaattatcaggttttctgctctggtttctccccatctttatggttttatctacctttggtctttgatgatggtgacgtacagatggggttttggtgtggatgtcctttctgtttgttagttttccttctaactgtcaggaccttcagctgcaggtctgttggagtttgctggaggaccactccagaccttgtttgcccgggtatcaccagcggagcctgcagaacagcaaatattgcagaaaggcaaatgttgctgcccaatccttcctctggatgcttcatctcagaggggcaccyggctctatgaggtgtcagtcagcccctactggggggtgtctcccagttaggctactc

SEQ ID NO: 164242 - DNA, 491 bp, Homo sapiens
agctttacaagatagctttctccttcttttgtctttccctcctttctgttgggttaaggcagggatttggtggaaagctttgcatcatgttggtctgtggaaaccagatctaatgggagaaaatggatctgtagcctcttaaagtgagatacctatatattatctcagatataagcaacctaagataacattcctgacataatctgtctccaggaaccttagcaaaaccgcaaagtataaatgatgtggttttttggcctccttgycccccattctgagccttgccccctattctgctgttctctttgccaatagttctcttgatgaattttcatcacgaaagtgtcccgctttacccagccctgcctctaaagctccaaaaggagctcttatacccttcaaccgcaagacacacccccattgtcactatagttgatgttggtggagctgatgttctgtttgtttaaaatttgacttcctcccagacaaca

SEQ ID NO: 164243 - DNA, 316 bp, Homo sapiens
gtgatatttcgatgcatgtcagccttgacaaaatatgtttgctcttttattcaatttgccttcagaggaacacgccagttataagttgtggctgaatggcgaaccttcatttaggtgatttcaattttctttattcattttttwaaattgaccaatgtattagtttcctggggctgccattacaaattaccacaaaccaagtggcttaaaacaacatacattttttttctcacagttctggaggccagaagcccaaaaccaaggtgttggcaggtttggttcactctggaggctctgaaggagaatctgtcccatg

SEQ ID NO: 164244 - DNA, 288 bp, Homo sapiens
tgaattcaacaaatattcattgaatccctactctaagccaggtttagatcaggggcataaacaaatgaggcagtgtcaggagctcagggcagagctgggagacagatatgtaaatggtacrttacattttagggtgttatgagtgttgtaattgggcaatcatggagcattttcgaggaataatatgtaatggagctgattagcaattctgtgacctttttctctcctgtggtggcttggcagcctaaaaagagcagttacaaccaaggactgcagggacccagagtt

SEQ ID NO: 164245 - DNA, 596 bp, Homo sapiens
gaactcaaatacatacaccttgacatttcttttacagcctaatttcttagcattatctgtgaaataccatttaaagtgatttaaaacaaaaattggcttttaattcttgaaagtttttcccttttcaggtcaagagacaatgcagactctacaagctctagagtatatcagaagtgggattaatcctaactcttccatttacaggctgtgtgattatggcccatttctaaaactctctgagcttcagtacccttgtttataaaatgcagctaatcataatgccctcctctggcttattggaatgaaatgaaatgasagtatatatgtaaagcgttcctattactaaaaaatgttgggtatcattaatctctctatccacggtgtattgtacaaaaaaacaggatcttgagtcaatgaatctggccttgggtcctgattcttctatttactaactgactctggcaagttagatttctaaacattaatttcttcaatgacaaacttggagtgattatataatgccacattatataatatcacttcagtgtgttattgtgagcattaaataatgaatgctaagtatgtttggcaaagat

SEQ ID NO: 164246 - DNA, 596 bp, Homo sapiens
gaactcaaatacatacaccttgacatttcttttacagcctaatttcttagcattatctgtgaaataccatttaaagtgatttaaaacaaaaattggcttttaattcttgaaagtttttcccttttcaggtcaagagacaatgcagactctacaagctctagagtatatcagaagtgggattaatcctaactcttccatttacaggctgtgtgattatggcccatttctaaaactctctgagcttcagtacccttgtttataaaatgcagctaatcataatgccctcctctggcttattggaatgaaatgaaatgagagtatatatgtaaagcrttcctattactaaaaaatgttgggtatcattaatctctctatccacggtgtattgtacaaaaaaacaggatcttgagtcaatgaatctggccttgggtcctgattcttctatttactaactgactctggcaagttagatttctaaacattaatttcttcaatgacaaacttggagtgattatataatgccacattatataatatcacttcagtgtgttattgtgagcattaaataatgaatgctaagtatgtttggcaaagat

SEQ ID NO: 164247 - DNA, 363 bp, Homo sapiens
gaagtgagtcaagaaggctgtcccctcagcacctgccacccctgccgggccgygcgaggctgtgactcaggaacccactccccctccacaccaaatccatcacaggtggctgactcatgccagcacatgctgggctgaagaaagaaacagcaacgcttttagagcctgtgacttaggaacctacgtcagtgtctctgatggattttaaaaacatatagctggagccaggccccatacccctcaccccatcctgtcctcctcctgcggggctggctgatgaaacgaggtcaccgtggggtctctggtgaggctgccgctgctgctcaaaacacgcaaactctgacatctggctgctggtcaact

SEQ ID NO: 164248 - DNA, 593 bp, Homo sapiens
caggattgagagcccctctgctggttcatgctagggcagagagagaagggagaggtgagtgccctcctgcccagcccagccaggacccagaggacagggggcggctaggactcgggggtggagtaacacctctgcagtgagccaaggcctgcctggctgtcttcttggtgtcaaatgacggcagaggctggaacactgaggcagtggccaaggccagccagcagttgttcttgcggcctccaaggagtggaaatagggacagggaaaagttacgggcagcagccagcagttcacagcaggttctgtggaattgctggggctaagcaaggactcctgtgctctcctatgaatcgtccttggcctttcatccaaactggacctgcccacctgggaggtccaccacccccgcctgtacccaaagggatcacaccctgaccatgcagtgtcagtgatgccaggagggaggggctgccagcatccccactttccaggtagcamgataaaggtcacccaaggtggcattgctggcaagcactggaggtggaactcaaacccttggcttgcagagcccccacagcctgaagccaagccaa

SEQ ID NO: 164249 - DNA, 470 bp, Homo sapiens
tcgcccacagatgcacaggctggtaggaaatggtcaccaggcccggcctcctctccagcaaccagggccccccaaggcttccacttctacagtctgttgcccccaaggcaacagactgtaaacacagctgagtagatggagggtatccacggaggggttgcaagaaaatcagggtaacaacactcccctcctggggcgtgatactggctaagaaagccagctttggcacagagacaggcacttgggacttagcggcatcacctgctgtttgtgtgacctcggccaagtcctgtcccccctatatacccctgcgtcctcctcaagaagatgggaatgggaaatggctcctacctgacttgaggatgsactgagggaatccaagaaaagcctttagtctagcacttgataagcagtgactattgtgggcactactgttgtcacagcatagccctgggaagtcacctgaaaga

SEQ ID NO: 164250 - DNA, 564 bp, Homo sapiens
ttaatagacacagggtttcagttggggaagacaaaaaagttctgaagatggatggtggtaatagttgcataatgtgaatgtacttcatgccacagaattgtacactcaaaaatggctaaaatagctacaagaaaaaagtacacaaaaagagaaagggtatagattcaatctcatcagtaattattagtgaaaatcatgtagcaaaatgggtgcacagaaaccaaagaattrgagacattcatgcagtatctaccacaatgggaatcgttaaaggtggtagtacttttagcaaggcactagaatgattacagtattaaattttcttctaagtggcctgatatttataacagatttaaaaaattatagagaggtattataccagtcttagcactgaactctaaatgcaataggggtttaagttttgatccagagttcaagaataccagtgacagaacacccaaccctcttagcacacaaaatactagttacagtgacacatttgcgttactgggaataattcaaaccctgtttaggttttcttatgatgaatatcacatgatgcat

SEQ ID NO: 164251 - DNA, 564 bp, Homo sapiens
ttaatagacacagggtttcagttggggaagacaaaaaagttctgaagatggatggtggtaatagttgcataatgtgaatgtacttcatgccacagaattgtacactcaaaaatggctaaaatagctacaagaaaaaagtacacaaaaagagaaagggtatagattcaatctcatcagtaattattagtgaaaatcatgtagcaaaatgggtgcacagaaaccaaagaattagagacattcatgcagtatctaccacaatgggaatcgttaaaggtggtagtacttttagcaaggcactagaatgattacagtattaaattttcttctaagtggcctgatatttataacagatttaaaaaattatagagaggtattataccagtcttagcactgaactctaaatgcaataggggtttaagttttgatccagagttcaagaataccagtgacagaacacccaaccctcttagcacacaaaatactagttacagtgacacatttgcgttaytgggaataattcaaaccctgtttaggttttcttatgatgaatatcacatgatgcat

SEQ ID NO: 164252 - DNA, 608 bp, Homo sapiens
gaagtcaaggcttttccaatcatggtggtatgcttggaaatctccaaggttctaaataaaagctctctctggattccatgagaagaatttctgggtgggtcacacaactacaactttaactctggcagaactgttaggtgaagagctgttgacccagagggaaaggagtccatttatttttcatgcctgctaaagaaaattagtccagctattctgacaaacaacagcaacaacaagaagcacatcttatttctcattctgagctattccccattcaaaaccatgcctcttctacttttgagaatctttttcattacaattttatggtctctaaaattctaaaaatttttcaaacccaaaaatctccgataattgtcacatgatctgaaatattgcaatctctgaaacttcacagttctaggaaktatcaattattacatgtatgcaagtcttttattatcatgaggtaattaatatacattggttatggaaaagcaccaaaaatgatactatagaattacaggattagttttagcgttaaagggaaccacataccctgaagtgtgtccttaattattcagaagcaagtaatcatctacatggaatat

SEQ ID NO: 164253 - DNA, 680 bp, Homo sapiens
agttctaggaagtatcaattattacatgtatgcaagtcttttattatcatgaggtaattaatatacattggttatggaaaagcaccaaaaatgatactatagaattacaggattagttttagcgttaaagggaaccacataccctgaagtgtgtccttaattattcagaagcaagtaatcatctacatggaatatatgaataattaatgtctactttaacgcactttaacggaactcttcttttgtacagtgaatcaacatattcaacactaaaaagtttaaagttttaacaaacttagaggtgatatcagtagcgggaactcaggcttgggtctttgtctttattacattctcctcctgggttctctcatctagtgctacgtctataaatagcaattatgtgctgctgatgtctctaaagtttatttgtccaactcagtctgctccactatattccatayccattcattcaactgcttatttgatctttccacttggatagatatctagtaaatatattaaacttagtactcccaaaagtcaactctatgttgcaatttataaaacctactcctctaccaattttgaccactggggcaaaaaaatgccaccatcttctctgtaacacggttgaaaataccacacgtcattccagactccttgcttacactctctccatg

SEQ ID NO: 164254 - DNA, 607 bp, Homo sapiens
aacaggataaaaccagagtgtagtaggagaatctgtgtttcttgccagaccatcaactctatgagaggaactgtgtgcttttgatttacaatttatcttcaaaatgtaacagatttctggcagagaatagatactcaatgaatacttgttgacttaaataaaatcaagtacttmcttccttcccacagctgtcattttcctccctgaaattttcatgagcagagtgaattgaatttgggatgataaaacatatagggcacacctaggttatatgttaaacagggtgtgtgtgtgtgtgtgtgtgtgtgtgtgtgtttcctccagagacaaaaggctcagttggcttttgaaaagaaaaggcttctctggtttgtcgatttgggttttgaaaattttgatgttatttccgactcatcataggtaagtaagttcatattaaaaaaatttagctgatctaagaataaatagaatacaaagatagatgcaaatgcttaataatgagtatttggtaatgttaaacatgtaaaagatttattgcactttgaaggtgacataaagtaccatcagatttacttttaaatcctaatagctaaagtgcaagtatatt

SEQ ID NO: 164255 - DNA, 607 bp, Homo sapiens
aacaggataaaaccagagtgtagtaggagaatctgtgtttcttgccagaccatcaactctatgagaggaactgtgtgcttttgatttacaatttatcttcaaaatgtaacagatttctggcagagaatagatactcaatgaatacttgttgacttaaataaaatcaagtacttacttccttcccacagctgtcattttcctccctgaaattttcatgagcagagtgaattgaatttgggatgataaaacatatagggcacacctaggttatatgttaaacagggtgtgtgtgtgtgtgtgtgtgtgtgtgtgtgtttcctccagagacaaaaggctcagttggcttttgaaaagaaaaggcttctctggtttgtygatttgggttttgaaaattttgatgttatttccgactcatcataggtaagtaagttcatattaaaaaaatttagctgatctaagaataaatagaatacaaagatagatgcaaatgcttaataatgagtatttggtaatgttaaacatgtaaaagatttattgcactttgaaggtgacataaagtaccatcagatttacttttaaatcctaatagctaaagtgcaagtatatt

SEQ ID NO: 164256 - DNA, 512 bp, Homo sapiens
atgtaacatattcacaccatggttcaaggataacttagtgtgaatttgagtcagaaagatgtttcttcaaatgcagattcctcctgaggtaagatatacaccttcactaaaccttaatttcttcatctacaatatggggattgcawcatatagattgaaaatcccttatctgagcatctgaaatctaaaatgctcccaaatttgaaactttttgagcaccgacatgacaccataagtaaaaaacttccatatctgatttcatgtgagaagtcacagtcaaaacacaatcaaaactttgtttcatgaatgaaagttatgtaaaatcttataaaaaattactttcagtctatataaataagatgtatacaaaacataaacaaatttcatatttagacctgggtgccattcctaagatatctaattgtgtatataaaatattccaaaatccaaaacaatgtgaaattcaaaacacttctggtcctaagcatttcaaaaagataactgcttatttc

SEQ ID NO: 164257 - DNA, 571 bp, Homo sapiens
attggccatgcttcacacaatactattttctcacgagtatcaaatagagtgatattcctagtggaagtggaggtatactgagaatagttatataaaatcttatgctaacacttaggagcatgagcaagtaaatttaaaaaagctttaacgtatctagcaaaaattcaaggtgcatatttataataattttacagccagaaaaatgatgaatatgtgagtttttatrcaacaatattagagagagaaaaatactctgttaactaaacagaaagtgttgtctccattaatgggtcaagttatactacagtagaggtggtatttttgttttcacttctcaggatctgtattagtccattttcacactgctataaagaactacctgagactggataatttataaacaaaagaggtttaattgactcacatttctgcatggctggggaggcctcaggcaacttacaatcatggcagaaggagaaggggaagcaaggcacatcttacatggaaacaggagtgaggggattgccacgcacttaaaccatcacaagaatagcatgagggaaaccatacc

SEQ ID NO: 164258 - DNA, 571 bp, Homo sapiens
attggccatgcttcacacaatactattttctcacgagtatcaaatagagtgatattcctagtggaagtggaggtatactgagaatagttatataaaatcttatgctaacacttaggagcatgagcaagtaaatttaaaaaagctttaacgtatctagcaaaaattcaaggtgcatatttataataattttacagccagaaaaatgatgaatatgtgagtttttatgcaacaatattagagagagaaaaatactctgttaactaaacagaaagtgttgtctccattaatgggtcaagttatactacagtagaggtggtatttttgttwtcacttctcaggatctgtattagtccattttcacactgctataaagaactacctgagactggataatttataaacaaaagaggtttaattgactcacatttctgcatggctggggaggcctcaggcaacttacaatcatggcagaaggagaaggggaagcaaggcacatcttacatggaaacaggagtgaggggattgccacgcacttaaaccatcacaagaatagcatgagggaaaccatacc

SEQ ID NO: 164259 - DNA, 361 bp, Homo sapiens
cttccaagatggccgaataggaacagctcygttctgcagctcccagtgagattgacacagaagacaggtgagttctgcatttccaactggggtacctggttcatctcactgggactggtttgacagtggatgcagcccatggagggtgagctgaagcaggatggggcatcgcctcaactgggaagcacaaggggtcagggaatttctctttcctagccaagggaagctgtgacagactgtacctggagaaatggtacactcctgaccaaacactgtgcttttcccacagtcttagcaactggcagaccaggagataccctcccgtgcctggctcggcaggtcccatgctcatggaaacttg

SEQ ID NO: 164260 - DNA, 573 bp, Homo sapiens
gacttctcagcatctataactgcaagaaataaatttcttttctgtataaattaccatatttcaggtgttttattgtaagcaacagataaatggactaagacattacttcacattttctgcggatgggatgtggagctacttagcccagtgattctggctcagggtttcacactgctgtcatgacatcaattgaagatacacttttataaaagtttgaatggcgctggagaatctgcttaagatggytcattcacataggtgagaagttggtgctatctcttggcagaaggccaagtttcttgatgcacagacctctccatagcactgcttgagtgtcctcatgacaagggggccaacttccaccagaagaagtgaatgatcaaaagagatgaaggtggatgctccaatgtcttcatgaacactcttggaagtgacacaacattacttctatcgcattttattcattagaggcaaaacacaaagtccagcccatactgaagaggaaggaagttaagctctgctatggtttggtttggtgtccccacccaaatctcatcttgaattgtaatccca

SEQ ID NO: 164261 - DNA, 359 bp, Homo sapiens
atttgtgcttttgattactcacttattaattctaataaaaaaggtcatagrgattgttaaaatctaagaaaaaattaagttaaatattagagaattttgttgaataatgcattgtttgaataaccggacttgttttaattagcattttcctctgtatatttatttataaccagacaagggaataatttacatgcaaactattgaaccatttttccacaaagtttagataaatagagaacaccttaaataaccagaagtggacaaatatgatagctagctttatgataaggactatattttacctggaaatacaggttaaaatcataatatgcacctcccttatgtaacataaatatgtt

SEQ ID NO: 164262 - DNA, 575 bp, Homo sapiens
cttatttgtgcttttgattactcacttattaattctaataaaaaaggtcatagggattgttaaaatctaagaaaaaattaagttaaatattagagaattttgttgaataatgcattgtttgaataaccggacttgttttaattagcattttcctctgtatatttatttataaccagacaagggaataatttacatgcaaactattgaaccatttttccacaaagtttagataaatagagaacaccttaaataaccagaagtggacaaatatgatagctagctttatgataaggactatattttacctggaaatacaggttaaaatcataatatgcacctcccttatgtaacataaatatgttatgctattttcccatatgccatccacgcaaagatcttctaacrtcattgaaaatattagatcagagatacagaaggatcccagaatccattttaatgcaaatgggcaaatactaaatatgttttaatgattatcagagtttgcacaattccaagattgaatgcaccttcagtgcatataatgtgtgtgcgtgtgtgtaaatatccttttagct

SEQ ID NO: 164263 - DNA, 306 bp, Homo sapiens
taaatacctcaggtttatccctcaacactaagtgacaacatgactaaataagcttgtctgctcgtattaaaatggctaaattatcaaataaactcagaaccttaatttagataccatccttgaacattcccaattgcayatgaagctataaattaatacaataaaattccatatgtacatacttcaattgaattaatttcatcattcacataataaatatgaacactttaaataaaaatatcgcttctggtactttaatcctaatttgaaccaaattatatttttgactatttaatatgcctcact

SEQ ID NO: 164264 - DNA, 251 bp, Homo sapiens
gacagctattgcagaagaagacacaaaaattgaatttacacacacacacacacacacctatatacatacatatatacacacacatatatacgtatatatacatatatacatttatacatatatacaaatatacatatatacacatatgtgtatayatatacatatatataaaatgctgcttaagacatatgatgacttcaaacagcaattcttaaagtttatacagtggccctttcaaaagaccaatggtt

SEQ ID NO: 164265 - DNA, 398 bp, Homo sapiens
agatctctacacccagcattagctctgaacctgcagaacaccagacctcctagcaaggagtgacacctacccacttctgctctcacagccctgccctctacccctaggagaaaacagaatggggcgggtaatgtgcaacacttccccttcttccatcaggtccttggtgcctctctggaagaatgggcacatggagctaatgatgacttctactctctggatcaaattcaaagttctttgcgtggctgtccaggcctgtacatccrgtccttgctcagctgccatcttgcaccatcttccccttggtgggagatgcatcccaaacagaacggacttaaatgtcctctgccccttcctaccccagggcctttgcactggctgtgccctctgcctgggac

SEQ ID NO: 164266 - DNA, 593 bp, Homo sapiens
cagctgagatctaaatccttcccttcctggagtaccctctgtctaactcctagaccaaacactcagcaagagcagggttacccactgggccagactgggcattatatagacctggggtagcaaactggctatactgattgatagaggctgcttggagagctgtactgaggactctgctaagcttgagagagtgctgtgatggattagtgatgtctgccacaggyaggagaccaaccagtggtggtatgcatgctcaatatttttctttccacccaatttataggtagtcctggagaaaaaaagagatactttcttcttgtgaggcagaaaggaagaaagaggggtgaggcagacctagacttaaccaggttgtctgcactagaggtgcttgaagaatgggcaggaaagaggaaaagcttgagggaaatgcctctatgcattcctataaaagtatagagagggaggaagttagagtggtgacagctgcccccctgaggaaggccctggaggattatgacagaccctgagaagggtcaaatgaatactcagtgcccctcttcctggggcccccccgcagggtgcccgacaagaaa

SEQ ID NO: 164267 - DNA, 456 bp, Homo sapiens
gtgttttgcctctctgggcctcagtttccccatctgtaaacaggaagtggagagagatgtggcataaatcaaaagctctcaaatgaggctrtaggaagtgggttacgacattgccaaaatgtaacaggtcttaggtctttctgcaaagtgaatcctggtctgatacatcagcactacgtaagagttcatctcacctgatgttatctgcaagtgaggacaatgacagccacctcgggaggtgtgctgagcattcaaccagggggtcccaaactggccagtccaaccacaaatgttttgtaatgcatgacccaaagtgtttttgtgtgtttggttttcaggtgaattcatgctgacattttaaaaataagagatcaggccgggcgcggtggttcacgcctgtagtcccagcactttgggaggctgaggcaaggggactgcttgaggctaggagttcga

SEQ ID NO: 164268 - DNA, 456 bp, Homo sapiens
gtgttttgcctctctgggcctcagtttccccatctgtaaacaggaagtggagagagatgtggcataaatcaaaagctctcaaatgaggctgtaggaagtgggttacgacattgccaaaatgtaacaggtcttaggtctttctgcaaagtgaatcctggtctgatacatcagcactacgtaagagytcatctcacctgatgttatctgcaagtgaggacaatgacagccacctcgggaggtgtgctgagcattcaaccagggggtcccaaactggccagtccaaccacaaatgttttgtaatgcatgacccaaagtgtttttgtgtgtttggttttcaggtgaattcatgctgacattttaaaaataagagatcaggccgggcgcggtggttcacgcctgtagtcccagcactttgggaggctgaggcaaggggactgcttgaggctaggagttcga

SEQ ID NO: 164269 - DNA, 431 bp, Homo sapiens
ttccccatctgtaaacaggaagtggagagagatgtggcataaatcaaaagctctcaaatgaggctgtaggaagtgggttacgacattgccaaaatgtaacaggtcttaggtctttctgcaaagtgaatcctggtctgatacatcagcactacgtaagagttcatctcacctgatgttatctgcaagtgaggacaatgacagccacctcgggaggtgtgctgagcattcaaccagggggtcccaaactggccagtccaaccacaaatgttttgtaatgcatgwcccaaagtgtttttgtgtgtttggttttcaggtgaattcatgctgacattttaaaaataagagatcaggccgggcgcggtggttcacgcctgtagtcccagcactttgggaggctgaggcaaggggactgcttgaggctaggagttcga

SEQ ID NO: 164270 - DNA, 589 bp, Homo sapiens
ttgaggattgagtcccgccagctgctgaaagtagaagtctcatctcacatctctctatctccactgcagcctccacatttccgccacatgcttgcagacacatggacacgttccttcttttcttgctgcctgttctgtgggaatgtgttctgttttcctatccaagtccacaagttcctgcaagccaggcctcaaacttcactcatttaatttcactgccctgggaggatgtttgaggtacactgggtacagctcagtgggcagattaagagcacagattttggaggccgacaaaacttgggttggactctgatttctgaaccttctagaagggggaagtcacctcccctctctrtgcctctgtatattggagatcattctggtggacacttcactggtgtgttgagaagtaaagcgcttagcaccatgcctggcatatagtaggccctcatgaaataggattataatgatgatcagcacatagtaggttttcaactaattcccactgagggaaataatgcattattcaataaatggtattgagacaattaacagtcatgtagacaaaaagtaataaagtttaatcctt

SEQ ID NO: 164271 - DNA, 555 bp, Homo sapiens
actgcatccagctcaccccttttattatgggcaaacaaggcctgggaaaaggaaaggccaggaccctgaactaggtggccctattcaccttttgtccctttgggagtctgacttcctgggttcgaatcccctcttggccacttctcttttttttttttttttttttttttttttttgagatacagtttcactctgttgcccaggctggagtgcagtggcacaatctccactsactgcaacttctgcctccagggttcaagtgattcttctgcctcagtcttctgagtagctgggactacaggtgcatgccaccattcccggctactgtgtgtgtgtgtgtgtgtgtgtgtgtgtgtgtgtgtgtgtgttagtggagatgggatttcaccatgtttcccaggcttgtcttgaactcctgacctcttgtgatctgccagccttgcctcccaaagtgctgggattacagtcatgagccaccatgcccggcccccttcttgaccacttctgagctgggagacctgggacgagtccctctccttccttgagcctcagttt

SEQ ID NO: 164272 - DNA, 555 bp, Homo sapiens
actgcatccagctcaccccttttattatgggcaaacaaggcctgggaaaaggaaaggccaggaccctgaactaggtggccctattcaccttttgtccctttgggagtctgacttcctgggttcgaatcccctcttggccacttctcttttttttttttttttttttttttttttttgagatacagtttcactctgttgcccaggctggagtgcagtggcacaatctccactgactgcaacttctgcctccagggttcaagtgattcttctgcctcagtcttctgagtagctgggactacaggtgcatgccaccattcccrgctactgtgtgtgtgtgtgtgtgtgtgtgtgtgtgtgtgtgtgtgtgttagtggagatgggatttcaccatgtttcccaggcttgtcttgaactcctgacctcttgtgatctgccagccttgcctcccaaagtgctgggattacagtcatgagccaccatgcccggcccccttcttgaccacttctgagctgggagacctgggacgagtccctctccttccttgagcctcagttt

SEQ ID NO: 164273 - DNA, 560 bp, Homo sapiens
gacctttggggtcactgcatccagctcaccccttttattatgggcaaacaaggcctgggaaaaggaaaggccaggaccctgaactaggtggccctattcaccttttgtccctttgggagtctgacttcctgggttcgaatcccctcttggccacttctcttttttttttttttttttttttttttttttgagatacagtttcactctgttgcccaggctggagtgcagtggcacaatctccactgactgcaacttctgcctccagggttcaagtgattcttctgcctcagtcttctgagtagctgggactacaggtgcatgccaccattcccggctactgtgtgtgtgtgtgtgtgtgtgtgtgtgtgtgtgtgtgtgtgttagtggagatgggatttcaccatgtttcccaggcttgtcttgaactcctgacctcttgtgatctgccagccttgcctcccaaagtgctgggattacagtcatgagccaccatgcccggcccccttyttgaccacttctgagctgggagacctgggacgagtccctctccttccttgagc

SEQ ID NO: 164274 - DNA, 377 bp, Homo sapiens
gtctagtcttttggtaaagctctagcttgtacttatttacttattcattgaattcttccactccaggatacctgtttygttcttttttatggtatttatcttcttgttgaatttcttgttcaagtcatgaattgttttcctgatttcatcaaattgtctagctctattatcttgtatctcactgtaagattactattttgaattctttttctgtcattttgtatatttctctatcattggggtctattacacaggaattattgtattcctttggaggtgtcatgtttccttgctttttcatgttcgatgtatccctatgttgatgtctatgcatctggtggaataattgcctcttccaattttatgtggtaggtttt

SEQ ID NO: 164275 - DNA, 377 bp, Homo sapiens
gtctagtcttttggtaaagctctagcttgtacttatttacttattcattgaattcttccactccaggatacctgttttgttcttttttatggtatttatcttcttgttgaatttcttgttcaagtcatgaattgttttcctgatttcatcaaattgtctagctctattatcttgtatctcactgtaagattactattttgaattctttttctgtcattttgtatatttctctatcattggggtctatwacacaggaattattgtattcctttggaggtgtcatgtttccttgctttttcatgttcgatgtatccctatgttgatgtctatgcatctggtggaataattgcctcttccaattttatgtggtaggtttt

SEQ ID NO: 164276 - DNA, 574 bp, Homo sapiens
tgtctgaccccatcatacgctgcacctggtcctctgccctccattctcctcttccacatctcatttgttccgtgtctgcttccctccgtgcccagcttgctgcctattgtcttattagtgaacaatctcatgttaattctagcagtggaatcaacggctgccaatgtcttgtcttctggaggtattttmaccgaaacctccttaaaccctaggattgaaaccacagtgaattagttgatgggaatgtttagggaatttggcaggttagtgtcaggtggtttttttggatggaggccttctgaggacctcttgggtcctgccactgggactgccttctgctcttcatgcccataaggctgatccatgtggtggactaaagctgttgcttgttggtgtgttggtgaatggctgagtggcatggggacagagatcatactggggagacactgtcaagcaaaggtaactgaatccctgagggttgaaataaagttactggccagacttatttacatgctctcaagatgaaaccaagggcaacatagagattggtgtatcttttctgttcaggaccaga

SEQ ID NO: 164277 - DNA, 574 bp, Homo sapiens
tgtctgaccccatcatacgctgcacctggtcctctgccctccattctcctcttccacatctcatttgttccgtgtctgcttccctccgtgcccagcttgctgcctattgtcttattagtgaacaatctcatgttaattctagcagtggaatcaacggctgccaatgtcttgtcttctggaggtattttcacygaaacctccttaaaccctaggattgaaaccacagtgaattagttgatgggaatgtttagggaatttggcaggttagtgtcaggtggtttttttggatggaggccttctgaggacctcttgggtcctgccactgggactgccttctgctcttcatgcccataaggctgatccatgtggtggactaaagctgttgcttgttggtgtgttggtgaatggctgagtggcatggggacagagatcatactggggagacactgtcaagcaaaggtaactgaatccctgagggttgaaataaagttactggccagacttatttacatgctctcaagatgaaaccaagggcaacatagagattggtgtatcttttctgttcaggaccaga

SEQ ID NO: 164278 - DNA, 574 bp, Homo sapiens
tgtctgaccccatcatacgctgcacctggtcctctgccctccattctcctcttccacatctcatttgttccgtgtctgcttccctccgtgcccagcttgctgcctattgtcttattagtgaacaatctcatgttaattctagcagtggaatcaacggctgccaatgtcttgtcttctggaggtattttcaccgaaacctccttaaaccctaggattgaaaccacagtgaattagttgatgggaatgtttagggaatttggcaggttagtgtcaggtggtttttttggatggaggccttctgaggacctcttgggtcctgccactgggactgccttctgctcttcatgccyataaggctgatccatgtggtggactaaagctgttgcttgttggtgtgttggtgaatggctgagtggcatggggacagagatcatactggggagacactgtcaagcaaaggtaactgaatccctgagggttgaaataaagttactggccagacttatttacatgctctcaagatgaaaccaagggcaacatagagattggtgtatcttttctgttcaggaccaga

SEQ ID NO: 164279 - DNA, 447 bp, Homo sapiens
tcagagattgggagactcaatattgtaaagtcatcagttccctcaagattgatttatagatttagagcaaacccacttacagtccccagccagatttttgtttccgttttgccacttgagaagctgattacagccactgtttatatggttaatgcaaagagataagaaragctgagacaatttttaagaacaaaaaggccagaggactcacatgaccagttatccagactcaccacaaagctgtagtgtggtgttagcacaaggataggcagataaacccgtggaacaaaagagagggttcagaagcagtctaacacatatattgtcacctgatttatgacagaggtaatcttttcaataaatggcattatgtcaactggatatccacatggaaaaaaatgaatcttggcctctgctatcaccctacataagaaataattccaaaag

SEQ ID NO: 164280 - DNA, 401 bp, Homo sapiens
cactgccccgctgtgcagtggagcctcagtttccctatccaagaaatgaatcggggtgtttgggyttctcagaatgcagaggagcagcaggtaccgcagcctactgcatccgaagcctgtgtggggaccccactccatggagtggcagcagctactgtcaaggccacccccatgtgacaggtgacaaaacggaccatcccaaggtcacatcattagcaggtggccgagagagagcgacagaggcgggcttaaaggtcattcttcctgccttcatcgttcacccaagtttggcccaggtccagccgctttctcccacactcgccaggaggtgcccaagtcaccgattcccaggcctggcagcctaaatttattacccaagcggtggctccacccccaaactc

SEQ ID NO: 164281 - DNA, 516 bp, Homo sapiens
gaggctctgcaatggagattgagattaattaagatgatttatgttaagtgcatagcagagtgtttgcacttagtcagtttccaacaaatggtagcagtattacctttayatgtactaaatcatttcatcctgacctactatgaaaagcctgatcactttccatattttactgtttttaagataccattgattagagtatgcattgttattttatttttcaccaagaaaaatgtgctgccgttttagactatgacacgctatcatttataaaacgtgtcccaatttcagagcagctaacctgttgaaataaaatgtgagtcttataattgattattgtaaaacacaacagtaagtcttctttgattaggtgcaactgaacaatactatgaccacattcagtagcaaaggcacttagaaggatataggaatatagcttagcaggaaggtagcatcgggtatctctctttagtaggatgagtatgcgtagcaatctctgaagcacccagggagccatcc

SEQ ID NO: 164282 - DNA, 380 bp, Homo sapiens
cataacaatagtggcccttatcatcaatgatagattagatagaaaaactgttaattgtggggttgacaaaatagccaaatggtagaaggcactccttataagtaagtaagttatgagtgggagctaagtgatgagaacacatggacacatacaggggaacaacacacaatggggcctatcagagggtggaggttgggcggagggagagaaccagaaaaaataactaatgggtactaggcttaatatctgggtgacaacataatctgtacaacaggccctcatgacacaagtttacctatgtaacaaacttgcacrtgtacttaaaataaaagttaaaaaaaattaagtgaatggacacttaatgtttacaaaaaagttgt

SEQ ID NO: 164283 - DNA, 635 bp, Homo sapiens
gctttccatctccctccttatgtaatagcctgtgaataaatgtgacctagacttcaacatggatatggagaagaaaaaaaagtagaaaggtttatcccaggccagctttttgccaaagaaataagcaattacatgacatttcactaaaaattcttgacccaataaaatactgaagcctcaatgccgattttactcttttataagaaagagcaacaaagaaaagaaaggtcacggaccatattgtgattctttacagctgttggagacagacactatgatgcagtagcttgatttgaattaaaccaaacaatatgaaaagcatcaaggctggcaagcaaagcaataaagccccaaagaatttaatctaccttgaaggtgggactacttttgtattgatggcagcacaccaggacagaaatgagtcctttaaagcaatgactcgttaatagccttaagatcacaatatataaataggatatgctgatcaaaaagacagctttgcctctgctattacagtatggccagtatttccttacaagttatttcactgattataaatagtccacgtcaatggcaaatgtacaacaggsgaagcataacccattatgaggtaatggatattgctagaggttgct

SEQ ID NO: 164284 - DNA, 501 bp, Homo sapiens
cactgcaactgtattgtaaagatttatcttagtctgttttgtgttgttgtaaaggactaccggagagactgagtaatttataaagaaaacatatttatttggttcacagttaagaatggctggaaggttcaagattgggtatctgcatctggtggaggcctcmggctgcttccattcatggcaaaaggccaaggcaaaggggagccagctgtgcagagatcacttggtgacagaggaaacaaaagacgggtaagggagatgccaggctctttttaacagccagctctgaggaattaatagagtgagcactcactccctaccgagggaggtcatatatctctattcatgggtttcgcccccatgaccaaaacacctcccattaagcctcatctccaatattgggccaggatcaaatttcagcatgaggtttggaggggacatcaaaccgtagcatatgttaaatgtcatgtttgaggcatgaagacagtgtaatgggaattc

SEQ ID NO: 164285 - DNA, 555 bp, Homo sapiens
tcaacatgagatttgggtggggacacagatccaaaccatatcagcaaatattgctgcagtatgtcctaaaagataagggggatgaaaactttaggaaaccctctgaggaagagaatcagttgattattatatgtttcctagagaaaatcaaaagcttgtctacagtgttatttagaaagctaactgttcttattttgagcattgaaccttatacttttagagaaaattgtactgattaatatgttagtaactacttaattgtctgcagtaataatattacattgggtacaactaaaagcttcatccagaagattcyattttagggcattgagaatcagataattatttgtgagtgtgtatgatatgtccttatggtaatcaccactttctttctcccaccccaactgtcttttctcctttaggtgaaatcccaattgttccacttaattttgtcatgatatccctggagggtccatttaacagagatgtagtggaaggatgtgtgaaggagacgttgctttttttatcgcgttccatttccatgaaacaaaatgt

SEQ ID NO: 164286 - DNA, 575 bp, Homo sapiens
atcagcatttttctttttcttaatatatatgttttattttattttttagaacagtgatatggtttgtctctgtgtccccacccaaatctcatcttgaattgtaatccaaatccatagtccccatgtgttgagggagggccctggtgggacgtgattggatcacaggggcagttttccccatgctattcttgtgatagtgagtgagttctcatgagatctggttgtttgataagtgtctggtgcttcctccttttctstctgtcctgctgccatgtaagatgtgcctgcttccccttcaccttctactatgattgtaagtttcctgaggcctccccagacatgtggaactatgagtcaattaagcttctttcatttataaattacctagtctcaggtagtatctttatagcagtgtgaaaacggactaatacaaacagtatttacagaaaaactgagaagacagtagagttcccatataccccctcagccagtgtcccgattattaacatttgacattagtattatacgttcattagagtcaatgaaccagtaatgatccattattattaactaaa

SEQ ID NO: 164287 - DNA, 575 bp, Homo sapiens
atcagcatttttctttttcttaatatatatgttttattttattttttagaacagtgatatggtttgtctctgtgtccccacccaaatctcatcttgaattgtaatccaaatccatagtccccatgtgttgagggagggccctggtgggacgtgattggatcacaggggcagttttccccatgctattcttgtgatagtgagtgagttctcatgagatctggttgtttgataagtgtctggtgcttcctccttttctctctgtcctgctgccatgtaagatgtgcctgcttccccttcaccttctactatgattgtaagtttcctgaggcctccccagacatgtggaactatgagtcaattaagcttctttcatttataaattacctagtctcaggtagtatctttatagcagtgtgaaaacggactaatacaaacagtatttacagaaaaactgagaagacagtagagttcccatataccccctcagccagtgtcccgattattaacatttgacattagtattataygttcattagagtcaatgaaccagtaatgatccattattattaactaaa

SEQ ID NO: 164288 - DNA, 540 bp, Homo sapiens
caaaatggtacaaaggcactctggaagacagtttggcagtttcyaacaaaactaaacatattgttaccatatgattgagtaatccattccttatatttacccaaacgagttgaaaacttacatccacacaaaaaaactacaaattgatgtttacagcagctttatcatactttctgccaaaactcaaaagcatctaagatgtcactcttcagcagatgagtgaataaaactgtggcacatccaatcaatggaatgttattcagagacaaaaagaaatgagctaacaagccatgagaagacactgaaggaatcttaaatgcatactgtggatacatttaacaccatataatgataatgcaaatgtgacaccatgctctcttgtagtcaaccctcctccccaacctcttgccccagccctgacaatcactgatctaagtagtttcaaaaccacattatcatctctaagggaggccaccattatcaggtgcacatgagaattctgctcagtgaacttcagccatcaccttttcttaaaactgc

SEQ ID NO: 164289 - DNA, 540 bp, Homo sapiens
caaaatggtacaaaggcactctggaagacagtttggcagtttccaacaaaactaaacatattgttaccatatgattgagtaatccattccttatatttacccaaaygagttgaaaacttacatccacacaaaaaaactacaaattgatgtttacagcagctttatcatactttctgccaaaactcaaaagcatctaagatgtcactcttcagcagatgagtgaataaaactgtggcacatccaatcaatggaatgttattcagagacaaaaagaaatgagctaacaagccatgagaagacactgaaggaatcttaaatgcatactgtggatacatttaacaccatataatgataatgcaaatgtgacaccatgctctcttgtagtcaaccctcctccccaacctcttgccccagccctgacaatcactgatctaagtagtttcaaaaccacattatcatctctaagggaggccaccattatcaggtgcacatgagaattctgctcagtgaacttcagccatcaccttttcttaaaactgc

SEQ ID NO: 164290 - DNA, 592 bp, Homo sapiens
tagtttaatccacaaatttggagtacttcattgtgtaggaagatataatcaaaacagtgatgtttaatattttaagggtaccatcattcctgtctcaataatgttttcaagccacaaactttgcatcaatttcatactttaaccacaaacatacaataattttaatgagcacagtccacgcgctgatcctcaaacactagtattggaaataagatagtgggaggtggccaagaccacaaataytactaaaataaataaatagcacgcaatatcacaaattacaactattcatttataagattcctcatttattccagttctaacttttcaacaattttaaatcaaaatttaaaaaataaaccacaagtagaaactattcccacgtaagcattcatgaatgtatttcaaaatcagaaatataagaaaaattacctataagcagtggttctcaaccaggggtcattttgtccccaagacaaattcagcaatgtctgaagtcctcttttgttgtcacactaagggacagagggttgctggcatctagtaggtagaagccatatactctgctaaacatctcacattgcacaagact

SEQ ID NO: 164291 - DNA, 502 bp, Homo sapiens
taggttgtaaatgtttcaccacaaagcagaacacagaattagtgaacttgaagacagatcaatagaaaatatctgaactgtctttgtagacaacgacactgcccagaaccccgacatcactgtggacggtacgcccttgggctgcatctccttcaagctgttagcagacaaagtttcaaaaacagcagaaagcttcatgctctgagcactggaaagaatgcatttggttataagtgttcctgctttcacagaattattccaragtttatgtgtcagggtagtgacttcacacaccataatggcactggtggcaagtccatctatagggagaaatttgatgataagaacttcactctgaagcatacaagtcccggcatcttgtccatgtcaaatgctggacccaacacaaatggttcccagtttttcatctgcactgccaagacctcagtggttggatggcaagcatgtggtctttggcaaggtgaataatagcattaatatt

SEQ ID NO: 164292 - DNA, 508 bp, Homo sapiens
catccaggacatcaaagggatcattccaagaactgggaaagaaccagagacctacatatatttcttattaagggcaaaacattgtctgttttaggcctaagagacaattacaaaacattccacccaacaacagcagcatagttatcaagtgctcatgaaacacttgatagagcctgttatgccataaacaagcttcaataaatgtaaaagggctgaaattacacaaactataatcgatctcctgtaacagtaggaaaattagggaatatacaaatatgtggaaattaaacaacacactcctaattaaccagtgagtcaaagagraaatcacaaagaaaaacagaaaagactttgagatgaataaaaatgagactaccacctgtcaaatcttacaagaggcggccggacatggtggttcatgcctgtaatcccagcactttgggaggctgaggcagtcagatcagttgaggtcaggagtttgagaccagcctggccaatatggcaaaac

SEQ ID NO: 164293 - DNA, 478 bp, Homo sapiens
taaagaggtatttgagtttttaaaaaatcagagggttcgcaggtgatgaaatcttaaagcaaatactaattaaataataattctcaatagaagttccaaatgtggtatagagatgctggaagtctgtgaaacactgatataaaagaatccatgacatacagaggtgttttaaaaaaaacttcaaaatgttattaatagtcatgccatattaactggagaaaaattggacaattgagaaaattgagaaaaattaaagtcatcctccaccctacagggatgtgctgtgtatggctggtgatgttagcttggaggggtgtggacccaagctaaatttggaccccaagatggtacttccccggtgtccttgcaagcacatccagaacctggcctccggctggcttcaactgaaggtcaaggccattgcagctgaygctgagacctttggctgtatgatacctggccagtggcgaggggatgc

SEQ ID NO: 164294 - DNA, 527 bp, Homo sapiens
acccagtctcactgtttgtgcatatgccgagctgttgggctccatcactccttcttttyagagactaattgacacccatcctttcttcagttctcagctaggtctttgcttccccaggaaagacttctgggactaagccaaatgtttcctttattctcccctcgacattaaatttctgttttttgaagcagttatcacaagagtctttctacatttgtgtgtgtgcttacttcattaacttctgtctcttccattagactgtgagtttcagaaggcaaggaccacatctgtttgctgtcaccattaaattctcaatgccttatacagtagtggaaataaagtatgcacttgggaataattggcgaatgaatcaatgagtcaataagcacggaggttggtttctcttgttcaagtcattggttgtgaacgaccctacagagttctttatgaaagagcagatggatcctgcctaagtaaacaggtgttccaaaggcaggtggctatttgtactgctggccagcagccag

SEQ ID NO: 164295 - DNA, 550 bp, Homo sapiens
actttgtcatgtggtcaggtttagttgaaaggaggctgggaacaatgtagtcttgtttctggttacaacaatatccctacaggaaaagggaggaatggagaagaggggacaactcagagtctgccaccagcaccagaactgccctcaagggctgggttacctcttggtcccttgttgagccctggtgttacacacagggcatggcacatagtaacctcctatgaatgttggggaaatgaatgcatgagtgaataaacggctgagggaacagaatccagagaaagccctcatcaaagtgmttgagaaaataaatacacagattgcctacttcttccctaaattccacctgtgtgaccttgggcaagttgcttaaactctccaaacctccattgcttcatctctaacatggggataataatagcaccttgctcataaggctgtttgaggagtacgttagttcataagtgtaaagtgcttagaatagtgcctagtacatggtgtgcactcaataaatgatgggtacaaatactgttattttaatattattaca

SEQ ID NO: 164296 - DNA, 565 bp, Homo sapiens
tgttactccttttcttttttcctgcccttccttcccccagtagaaatacaccctcagcaggagcggaggccttaggttgcacacctgtttctgaattatggtccctctgtctccttggcaaggggtgggtagtagtccatgagaatgtctgttagtctgttctcccactgctataaagaatactacctgagactgggtaattataaaggaaagaggttcaattgactcacagttccacaggcttaattggaagcatggctaggaggcctcaggaaacttagagtcatggtggaaggtgaaggggaagcaggaatcttcatcacaaggtggcaggagggagtgtgttaaagaacaaggaagactgtcctctctgccctgtgccttggcctcctgctggcctgcttgccacccactgccccttccagcctggactttccattcctccaccaagaccattcctccagtaatgacccctaacttgcatgtgaagaaacagcattcaagttagccctctgcactgaatggccattatttaygcattaaaaaagtacataatgtattttta

SEQ ID NO: 164297 - DNA, 488 bp, Homo sapiens
ggaattctggacttgattctaagtggtgtcagaagccactaaagagttgtaaacagaggcatggcatgatctgccttttgttttcaaaagcatgttggcagtgggaggacagtgggttgcaggagacagtgggaggaagcagggagaccccctaagtctrttcagttctagccagggaggatgatgactctggctagggagggagagcaggacagtcagggtgtactctaggaggtatgctgatgggagctgctgatggcaccagtggaagagggggattcagaattggggtttgagcaactggatgggtgatgatgtgcatttgctgctgtggggaagagcagatttgtggagtggaggtgggggtcaagctagcaccacattcattgggaagctcagcaacaaggtgttgaaccaaattcaacttgtgcagagacaacctgtagaatgggagaaagtatttgcaaactattcatcagaccagggac

SEQ ID NO: 164298 - DNA, 488 bp, Homo sapiens
ggaattctggacttgattctaagtggtgtcagaagccactaaagagttgtaaacagaggcatggcatgatctgccttttgttttcaaaagcatgttggcagtgggaggacagtgggttgcaggagacagtgggaggaagcagggagaccccctaagtctattcagttctagccagggaggatgatgactctggctagggagggagagcaggacagtcagggtgtactctaggaggtatgctgatgggagctgctgatggcaccagtggaagagggggattcagaattggggtttgagcaactggatgggtgatgatgtgcatttgctgctgkggggaagagcagatttgtggagtggaggtgggggtcaagctagcaccacattcattgggaagctcagcaacaaggtgttgaaccaaattcaacttgtgcagagacaacctgtagaatgggagaaagtatttgcaaactattcatcagaccagggac

SEQ ID NO: 164299 - DNA, 434 bp, Homo sapiens
tcattcctcccccatattcactgcacagtcagctctgacctgaggttctgcttctcttgggaagatgatagataaagccagagagggctctggggaaatggtccaaagtctgttagcaaagaacactggcaccaggcaaggcctctgaggtcagatctcccttctctcctcaaaagcagagagccagttcccatgacacccgccctggcctacacctcagctgggtgcatacacttgtttgagaccccagtgaggccatgggccttttttgccctgggatggactgcaatgagcaaaagagctaggtcactttctctgcctttggggagccattcccaacaagtytggctacgagtcccccactttccaggagctttctcagttttatcagctctccaacacttcttccacctgggattcccacctgctcctct

SEQ ID NO: 164300 - DNA, 605 bp, Homo sapiens
agtcccccacaaggttacatgataagaataactccctaatagtaaattttggagcctatataggacatttcacacacagctgctgctccttctcccctctggggtgggggaagaagcagcatgcatcacctgcacatgacctactgacctttgctttgtaaacaaatcctctcagggagagaaggggagggtctctaggtttacaaccttcagaaggaaaacaaattatcttggggagaagtctctgaatctctccacaggtctttaacttccaaggcttgtttgccattcaaacattctttaggccgggcgcgayggctcacgcctgtaatcccagcactttgggaggctgaggtgggcagatcacgaggtcaggagatcaagaccatcctggctaacacggtgaaacctcatctctactaaaaatacaaaaaattagccaggcgtggtggcaggcacctgtagtcccagttactcgggaggctgaggcaggagaatggcgtgaacccaggaggcggaggttgcagtgagccgagatcgcgccactgaactgcagcctgggcgacagagcgagactccttctcaaacaaacaaacaaacaaaca

SEQ ID NO: 164301 - DNA, 566 bp, Homo sapiens
ctatatttccatttagtgataaatctattcatattacaccacaatgcaaaagtgcatcctgaaatgtactctggtttyaaacgtaggacgagctttaaatacataaaagacaaaatatacactcagataagcctgtttcaaaagtaaataggcagtgagaaaagggaaagtgtaggctgcctttcctaaaccacatcattggacttcagggtcacaaattagttcatgaagggaacttgctctgtttcaaagttgtcaatctaataaatgaagaaaaattgatacaatgttgccattttgaaataatggatctaggcaaaaatcaccagtggcttctaacatcagtgacagacaaacggacctacagcctctgatcaagtatacaccaccacctatgattttattcatgttagagttcttagaaaaataaaacctgtgtctgaccagcctcaagatttgattgccaatttccaggaattatagaaaacaaagaagcatgttaaataacaccatggggatgcaatcaacaaaatccagactgtgggaagctacaggacaaaggcccc

SEQ ID NO: 164302 - DNA, 566 bp, Homo sapiens
ctatatttccatttagtgataaatctattcatattacaccacaatgcaaaagtgcatcctgaaatgtactctggtttcaaacgtaggacgagctttaaatacataaaagacaaaatatacactcagataagcctgtttcaaaagtaaataggcagtgagaaaagggaaagtgtaggctgcctttcctaaaccacatcattggacttcagggtmacaaattagttcatgaagggaacttgctctgtttcaaagttgtcaatctaataaatgaagaaaaattgatacaatgttgccattttgaaataatggatctaggcaaaaatcaccagtggcttctaacatcagtgacagacaaacggacctacagcctctgatcaagtatacaccaccacctatgattttattcatgttagagttcttagaaaaataaaacctgtgtctgaccagcctcaagatttgattgccaatttccaggaattatagaaaacaaagaagcatgttaaataacaccatggggatgcaatcaacaaaatccagactgtgggaagctacaggacaaaggcccc

SEQ ID NO: 164303 - DNA, 596 bp, Homo sapiens
gcatggtgaatttccctcagataataacaaaatcttctttatttgtctttttaaaaatttgtttaaagactggaccgctccttcagtcatgctgtgcaccaaaaaggtacacctcaggccactggtccctgactcggcccggagttttctacatcggccgagaagatggatacattgatatctgggaccttctggagaaaacccatgaaccagcccagtctcaaaacatttgcataactatgatcacctacatcaaaccctggatcttttcttgtatgttaattctaactaaataagctaagtcattttgggtaactcgggaacatcttgacattcatctgaaaagcctccaatgtttatttcttagttttttgtttttcttcctgctcatcccttcttatcccttcccttctcttcctttccttttcattcttctctcttccctttccttcccatctttcctcttccttttccttctctcttggtctcaaacyttggacacaacctgagctcttctcactgttgcctcatcaagaatgatttctgagacacgtgtcaggcagaggctggttttgaactgcacgatgggaacatcc

SEQ ID NO: 164304 - DNA, 242 bp, Homo sapiens
cgtatcagttggttaactttataatgctttattcctcataaattaggaaggccaaaaacaaaagaaaatataaaatttgttcaatttggggggttgtgggtattgaatggcattaatgtattgttatttttgtacttttctgtatttgaaattttctcaaaattaaaaaatcatcttctagactgtaagatccttaagaacagcawctatattttattaatattttcattggcagtatctaa

SEQ ID NO: 164305 - DNA, 439 bp, Homo sapiens
gaatttgggcagaaaaataatcaagtcaatgtcccaggaacattctggctaggattctaccatcagaactggactctcaaaaatataaccacagtgattaatttcaccatttcccttcaaatttgcatcagtccaagtttcaaagtcctagctgaaaccatgaaatggctgcatctaaatcatatgtctacatacagggtgtcagaattggacaarggaatagctgagcccttagactcctgtactaggaggactgacagaaaagatgttcaaatggttagaagttgtaaaaggaaaaaagtaaatgctcactattgaatcttacaaaaaagtaagcttgagattcaatagtcagtccaggaaggtgaaagcaggtataaaccagggtgtacagggtgagaagaaaaactgttcaggaaagtatataaaacataaaaac

SEQ ID NO: 164306 - DNA, 439 bp, Homo sapiens
gaatttgggcagaaaaataatcaagtcaatgtcccaggaacattctggctaggattctaccatcagaactggactctcaaaaatataaccacagtgattaatttcaccatttcccttcaaatttgcatcagtccaagtttcaaagtcctagctgaaaccatgaaatggctgcatctaaatcatatgtctacatacagggtgtcagaattggacaaaggaatagctsagcccttagactcctgtactaggaggactgacagaaaagatgttcaaatggttagaagttgtaaaaggaaaaaagtaaatgctcactattgaatcttacaaaaaagtaagcttgagattcaatagtcagtccaggaaggtgaaagcaggtataaaccagggtgtacagggtgagaagaaaaactgttcaggaaagtatataaaacataaaaac

SEQ ID NO: 164307 - DNA, 439 bp, Homo sapiens
gaatttgggcagaaaaataatcaagtcaatgtcccaggaacattctggctaggattctaccatcagaactggactctcaaaaatataaccacagtgattaatttcaccatttcccttcaaatttgcatcagtccaagtttcaaagtcctagctgaaaccatgaaatggctgcatctaaatcatatgtctacatacagggtgtcagaattggacaaaggaatagctgagcccttagactcctgtactaggaggactgacagaaaagatrttcaaatggttagaagttgtaaaaggaaaaaagtaaatgctcactattgaatcttacaaaaaagtaagcttgagattcaatagtcagtccaggaaggtgaaagcaggtataaaccagggtgtacagggtgagaagaaaaactgttcaggaaagtatataaaacataaaaac

SEQ ID NO: 164308 - DNA, 487 bp, Homo sapiens
tgtcctcacttgcaagatgaaaaatacaaatagtacctatttaataggctagttgtggaaataaatgaggaaattcatgtaaagggctaagcacagatgcaagaagttttctggaggcatctgggaaaattcttcatcattcttaactggaagtctacttttcactcactggccttgaataagaaactatgtagtggttgctgctcacagccaacttctaaccacaaactgttggaatttgactctggggataagagaatggagagatgaaaagaacttgggttcctgaagatgttgttcagctgctgaatcaaacctgaaatccaacctagttgtgggcatcttgtgatgtacatttatatattycatccagtttgaattgaggtttctgtttatttcaaatgaacactaatagagaatttggtgaattatagaagttctaaggagcagaagtgccacaggctacaaacgcaggagtcaaagaaag

SEQ ID NO: 164309 - DNA, 419 bp, Homo sapiens
aactttggcatgtctttttgaggggatgcaattccattcataacaagcagaaaagaaaaggtatgttttgttacagagtctgggtcaaaatctaaatgtagaatgtgtgtcagacccctattgacttaccatattagagaagccaaagaagagatctggagccagtgaacaagacaaactgtttattgagggacttacatatagggcagtccattggcagcaggctgggcaagagaactgctaccatttataaaaagcatgcagttyttaatagcattttcatatagtactatccccttagcaaactccacccagaaactttcacttaacccaaaacaaagggccttgatcccctgcatggcccacattacgtgggatgggtcagggattcagatatgccactctcagatttttagccc

SEQ ID NO: 164310 - DNA, 584 bp, Homo sapiens
tgcttttctgaagatatttttaaaagagtacccaaataatcattttctggagaagattggagtactattttgctggcccagagtaaatagttaaataataatgctattattttgaagttgaatatatacagcatctatcttgttatttacctttgaaggtactttataactataaataaattttatgagcctaaatttatcaaacgtacctaccaaccaatgaaaacaatatgacttttttgaggaattcaaattcctcagtggcacacattaagtttatagtaacttgaacatttaaactgctttctgtgtgaatgtgtgartgaatgggtatatgtgtttgtcttgaaagcatagctatgctaatagcttaacttgatcatttcaaaacatttacatatatcaaaacatcacattgcacaccagaaatgtatacaattttatttgtcagttataccttataaggctgaaaaaatagtaaagttttatttcaaggaatttggaaactacagcaatttatatagaatttcttaaatttcatttactttcaactcaaagacgtttcttagcattgtgatacactg

SEQ ID NO: 164311 - DNA, 506 bp, Homo sapiens
acatctattggtaattgcaaattgttatctctttgaaaaaaatttttttaattcatgttcctcatatatrttatcaaaataagcttggctgtgctgataaattaatgatacctaaattctcacttccttacattctactcaactctctgctggaaaagttatttccagttacttattgtgaaagaatctttggcacctgtgtgctcatcagaaattatattattcttacctattctaactcttacctgttctttcaaagtattttccttaggctgaaaatcagtagcttttgttcatgaataatacattataagacttaaaactgaatgtctgatactgtatcttcagataactaaagctctttgtcctcaatgatttcactatttgattatcttttagaaatgctgctctattgaggactgcttttatactatctaatgcctcctctagataaacaaatttcaaaatctcaggtggaggtgagtgtttgccttcatggtaaactc

SEQ ID NO: 164312 - DNA, 513 bp, Homo sapiens
gagcattcacgtgggatacaaataccttcacagtttttgacaactcagagaggtccatccaacatacctcttccccagatttttttgtcactaattttccaatcatgcttcttccaagttcctgaccatccagccaaaccattgtctacagcccatgaatcagtatataattgcacatctggccatttcttcttccwtgagaagtgcataatcaggtgcgctactcaaagttctgtccactgggaagatttccctttaccgctgtccctcagggatttcctaaaaaggggcacttagtgaaacagctgtccacttttgggtggtgcctgggtgtcatgcagaaccatctgtcaaccaggtcctagtattctctgcctctgttgactgatcatagggaattccccatgaggccatcagtgcagcctgaggagaaggcagggtggcaggaatggagaccttgggcatttgagccacttcctcatgtaacttacttgtgccttcaggacctgctca

SEQ ID NO: 164313 - DNA, 550 bp, Homo sapiens
ggggagtagtaatctgcagaagaatggcatggtcttgcttcaaaatcctagaggcctctatctactgtgattcacctatgagggcctgtcaaaggctccaaacagcatccctatatgccactgaaacctcaagcaccactggatctgctgggtcttacagcccaagtggcagagcagcttkcacagcagtctggacctgttgcagagccttctcctgttttggaccccactcaaaattggcagctttttgagttactcaataaatgggccagaataacacacccaaatgaggaatgtgttgcctccaaaatccaaataggcccaccaggcattgggcctttttcttggttgtgggaggggctaaatgcaggaacttatccttcaccttaaaaggaacatctcgacaggccaccatacctttggacctctacaaattttactgaagtagaaggtccctgaattttagtcagatttatttcccatcctctgacatgcaaatatctccccagtaagtgcagtgtgtttgctactgcttgctcattggatccaa

SEQ ID NO: 164314 - DNA, 550 bp, Homo sapiens
ggggagtagtaatctgcagaagaatggcatggtcttgcttcaaaatcctagaggcctctatctactgtgattcacctatgagggcctgtcaaaggctccaaacagcatccctatatgccactgaaacctcaagcaccactggatctgctgggtcttacagcccaagtggcagagcagcttgcacagcagtctggacctgttgcagagccttctcctgttttggaccccactcaaaattggcagctttttgagttactcaataaatgggccagaataacacwcccaaatgaggaatgtgttgcctccaaaatccaaataggcccaccaggcattgggcctttttcttggttgtgggaggggctaaatgcaggaacttatccttcaccttaaaaggaacatctcgacaggccaccatacctttggacctctacaaattttactgaagtagaaggtccctgaattttagtcagatttatttcccatcctctgacatgcaaatatctccccagtaagtgcagtgtgtttgctactgcttgctcattggatccaa

SEQ ID NO: 164315 - DNA, 432 bp, Homo sapiens
gtacacaccacctcatgggtcacactctcaacctcacttctaggggcctgctgggactttagtctagttataggtttagaagcaagcaggggtgttggggatggctcctgagtagaatcaacattatcatgcctggcaactgcctcaggggaggccataactgttgcctcaggcagtgcagggtttatctactcagacaatggtggaaaggctgatgtcagcatgggttgggaaggggatgttgtcagtagtggggatgggaagctgtttcttctggtaaaaacattcatcagagtttacaarctcagtgtccccagcttcatcagggtcctcctacaaatccatattccaagttgtagggtcccattcttttccaatcaatgccctcactttagcagtagacacctggagaggctttgcatgcacctttca

SEQ ID NO: 164316 - DNA, 537 bp, Homo sapiens
tgtcttgtgcattatagaatgttgagcagcatccctaacatcttcctactagatgccactatcagtacctccttcctgtagatgtgacaagcaaaaatgtctcttggtattgccaaatattctctcacgggcaaaatctcctggttgagaaccactgctttgggaggatccattccaactcctctcctagtagccctgtgcagcaccaaagaayagaagcatttgccctcctggttgtgttggcaaggtaactcttagtaacagggcatacacaaaccttgacctttcggagctttttttgtatgtaggccactgagaactgccaaactcttggttcataaactttcttcaaaatcctgcactaagagacttgatgaaactgtaacataccttctggcaaccaaagatttaatccctgggaagacccatccagtttttgtctgggaaagctcaagactgtcaaagcaatttattgtgttctagccagcatctgagataggccccgacctcctttatttagagcattttctaaaaagt

SEQ ID NO: 164317 - DNA, 572 bp, Homo sapiens
tcttttgtttgtagcgatccccatgccggagacctttcttttctgtggctaagcaatcttctccctgggcttctggatgctcatttcaagagcactccatttcagtgactcatagctaatttactgaaccttggatgaggttctgggctctgtacaaagtgttctggaaacacagtccttgtccttaagttcccttcagtattctatttattagtaaaattgtacttctccttgtctccaaacatacctggctccttcctgcttctrtacttttgctcataatgtttacttccaggaataccatctccattccctaccctccctccctactcacatcatctctacttctcaatattcttcttatctgttttagctcaattcaaatacctccttgcagcttttctcctgctttcccatatccctctttctcctccaaagtctcatcttagagtccttatcttattcaaattgtcattttggagtgtcattttctatttacacatttgtcttccctaattcaggataatataccaaagagagaaatctgttattcccttttgggtctcccacaa

SEQ ID NO: 164318 - DNA, 609 bp, Homo sapiens
aagttaaaaacaggtctatgagtgctcacctgagttttgctttttatgaaggttttttttgtgtgtagatagtcgtacaacttggtgtcttgttggggaggacaattggtggaggtttctgttttgccatcctgctgcaccctccaggattcaatttrtttgattttttaaaaattatttcattttgatttttagaatttcagaataagcaccaaagaagaaaataaataaggcaaagagaaaaaaagtaatggattcacaactatgtgccaatttttataagtctgttattacttctaatcctcccagcaacaaaggttttatctatcaaaggaaatagattttgctatagccccattttaccaagaaggaaactgagactcagagaaagtaacttgtgcaatgctagggttgaaaccacaactgaaaccctactcttgctgaacctaatgccatactctttctttcatcacttcacacaagtgttccatgtagatgttctggaattaatgctttattttttaaccttgtcttgcttgtcaggacagcccagtaacctttataaacctgcatcagctccaaacctgctgcctgctcctattcccagtg

SEQ ID NO: 164319 - DNA, 564 bp, Homo sapiens
tgtaatgtatttaggtaccaataatagtatactgagacttatcttttgaagaatcataacgttttcttaacattccttatgaatcttcaagtatragaaattagtttttataatttcagtaaaatttaggagcaatatgttatatacaataacattcagattaaaataactcaactatcactgtgtagataatgtatgaatatacaaagaatatacagttataaaggatagctagacccaagaattctacagctttaggtaaaagaaagattataactattatggtaagattttataattattggggtaagattttctcgtataataaatacaagtccacttttattttttccaaggataactacaaagaacataagttgccaaaattacattccacaaagaaacttacattttatacctgagatataacagttttaaaatgcaattatcacccaagtaggctgcaaacaatttgaaaatgaatttgtgaattccaccatcaattttgaggctactgaattcagagttttccacatacttgctaactttattgaagggctgaat

SEQ ID NO: 164320 - DNA, 564 bp, Homo sapiens
tgtaatgtatttaggtaccaataatagtatactgagacttatcttttgaagaatcataacgttttcttaacattccttatgaatcttcaagtataagaaattagtttttataatttcagtaaaatttaggagcaatatgttatatasaataacattcagattaaaataactcaactatcactgtgtagataatgtatgaatatacaaagaatatacagttataaaggatagctagacccaagaattctacagctttaggtaaaagaaagattataactattatggtaagattttataattattggggtaagattttctcgtataataaatacaagtccacttttattttttccaaggataactacaaagaacataagttgccaaaattacattccacaaagaaacttacattttatacctgagatataacagttttaaaatgcaattatcacccaagtaggctgcaaacaatttgaaaatgaatttgtgaattccaccatcaattttgaggctactgaattcagagttttccacatacttgctaactttattgaagggctgaat

SEQ ID NO: 164321 - DNA, 564 bp, Homo sapiens
tgtaatgtatttaggtaccaataatagtatactgagacttatcttttgaagaatcataacgttttcttaacattccttatgaatcttcaagtataagaaattagtttttataatttcagtaaaatttaggagcaatatgttatatacaataacattcagattaaaataactcaactatcactgtktagataatgtatgaatatacaaagaatatacagttataaaggatagctagacccaagaattctacagctttaggtaaaagaaagattataactattatggtaagattttataattattggggtaagattttctcgtataataaatacaagtccacttttattttttccaaggataactacaaagaacataagttgccaaaattacattccacaaagaaacttacattttatacctgagatataacagttttaaaatgcaattatcacccaagtaggctgcaaacaatttgaaaatgaatttgtgaattccaccatcaattttgaggctactgaattcagagttttccacatacttgctaactttattgaagggctgaat

SEQ ID NO: 164322 - DNA, 545 bp, Homo sapiens
tattcgagttcctaatattattaagactgatgtctcatctttagtgtgcatgtctcttcagatttgaactaaaacgcacctgaaattaccttataaagaggaacttattataataaaattaaagtgttacatggaataccaaggctaaaatatatgccaggtaaaagaatgtaagctccataagtacaaagactttgttggttttgttcactgycaaattcctgtcctttattacagtgacttttaaataacaagcatgaactaaatattttattcatgaatgaatgaataatgaaatacgtgagaaggagtcttatgtaatgctttttttgtgcctacttcaatcatctctgttcctattaaccaattgttctgccaagagtggtaactgttaactagtcctcaactttaggctccttgagatcatctgatttcactttcacacttatagtttcaaaaattgtaggaaagtataattggcttagttgggattaggattcctaattaggactcccactgtacccatcagtgatgaaaaggagaca

SEQ ID NO: 164323 - DNA, 564 bp, Homo sapiens
tgtaatgtatttaggtaccaataatagtatactgagacttatcttttgaagaatcataacgttttcttaacattccttatgaatcttcaagtataagaaattagtttttataatttcagtaaaatttaggagcaatatgttatatacaataacattcagattaaaataactcaactatcactgtgtagataatgtatgaatatacaaagaatatacagttataaaggatagctagacccaagaattctacagctttaggtaaaagaaagattataactattatggtaagattttataattattggggtaagattttctcgtataataaatacaagtccayttttattttttccaaggataactacaaagaacataagttgccaaaattacattccacaaagaaacttacattttatacctgagatataacagttttaaaatgcaattatcacccaagtaggctgcaaacaatttgaaaatgaatttgtgaattccaccatcaattttgaggctactgaattcagagttttccacatacttgctaactttattgaagggctgaat

SEQ ID NO: 164324 - DNA, 544 bp, Homo sapiens
gaccaagaaccctggtgttcctccactcatcagagctgcagcagttacaatggggccaaaaccactatgcctttactgttaataagttgggtttacacttccatcttagaagcaacaaaaaytcctgttgtactttagtattgtttatatttgatctagattgtatagcctgagctcttcaaagttttttagcaatgcaggaaaaaatattaggaaataatgtgcaaatacataaagaaaatttaagaaaatatttggtttgattcattaagattcacattataagattatacattatagcgagagggaaaaagactggtttaaacttaagacattaatcattcaacaaacacttattgaattcagtgtgagcaaagctctaataacgcaaaaatgaatagtttcttgactaaagtctagtaagggagaaaaattggaaaacaataaatatgaagtgtagaaagattgcacaaaaaatacaaaaggagaataaacaaataacagaaactcatagaaattaaccaattgcttgagtaaattggga

SEQ ID NO: 164325 - DNA, 520 bp, Homo sapiens
aaacagggcttcttaagagttaactatactaatacaaagtgagtaaaatagtgcctagtacattgtaagtcctaaatattctttagttgtttaatatttatttttgaagtccagttcatcatacttaacaacatttgcagtcattcactttccttaaatgttcatggcagtccccgacatagtcatccacccagttgttcaagccacaaacttttcccatttctttctcttgcycttttcataattttcttcttttttccccctttttttcttttcttttcttttctttcttctcagattgagtctcactcttttgcccaggctggaatgcaagtgttgcgaactcagctcacggcaacctccacctcctgggttcaagtgattttcctgcctcatcctcccaagtagctggaactacaggcatgcaccactatgccgggctaatttttgtatttttagtagagatggggtttcgccatattggctagggtgcctggaacccctgacctcaggtgatcca

SEQ ID NO: 164326 - DNA, 520 bp, Homo sapiens
aaacagggcttcttaagagttaactatactaatacaaagtgagtaaaatagtgcctagtacattgtaagtcctaaatattctttagttgtttaatatttatttttgaagtccagttcatcatacttaacaacatttgcagtcattcactttccttaaatgttcatggcagtccccgacatagtcatccacccagttgttcaagccacaaacttttcccatttctttctcttgcccttttcataattttcttcttttttccccctttttttcttttcttttcttttctttcttctcagattgagtctcactcttttgcccaggctggaatgcaagtgttgcgaactcagctcacggcaacctccacctcctgggttcaagtgattttcctgcctcatcctcccaagtrgctggaactacaggcatgcaccactatgccgggctaatttttgtatttttagtagagatggggtttcgccatattggctagggtgcctggaacccctgacctcaggtgatcca

SEQ ID NO: 164327 - DNA, 520 bp, Homo sapiens
aaacagggcttcttaagagttaactatactaatacaaagtgagtaaaatagtgcctagtacattgtaagtcctaaatattctttagttgtttaatatttatttttgaagtccagttcatcatacttaacaacatttgcagtcattcactttccttaaatgttcatggcagtccccgacatagtcatccacccagttgttcaagccacaaacttttcccatttctttctcttgcccttttcataattttcttcttttttccccctttttttcttttcttttcttttctttcttctcagattgagtctcactcttttgcccaggctggaatgcaagtgttgcgaactcagctcacggcaacctccacctcctgggttcaagtgattttcctgcctcatcctcccaagtagctggaactacaggcatgcaccactatgccgrgctaatttttgtatttttagtagagatggggtttcgccatattggctagggtgcctggaacccctgacctcaggtgatcca

SEQ ID NO: 164328 - DNA, 522 bp, Homo sapiens
tcaataaatagatccataagcaactcaagcctctttgtcacttttatttctagtaagtggcaaaatgacactttctttgatttggttagttgtttctcctagcaactccctaggaggttaatgcgttctgaaatgcccaagtggtcagagaaagaaaaataagtaggaagaaaaaagaaacctgaaactcataccaaaaaaaaaaaatgaattatttaagtgagctgtattttaaaactatgaaatttttattaatataaataatttttataaactatatagaagagatgagaagtattttttttttcctgtgcaaagggaaaactatatgggmtcttacaagcttgctgacagaataaaaattaaaattagcttcctcattggtagactggatttacactacttgacaaacttgaagattaaataaagcaatatataaaacccttagcgttttatacataacttggtttgctaaaatttcactttaatttagtgctaaagattttctaagtaccattattg

SEQ ID NO: 164329 - DNA, 427 bp, Homo sapiens
caggtatgtgccactatacccagctagtttactttttctcttttatagaggcataaactcattttgttgcctggggttggtttaaaactctgggatccaacgatcctcccacctcagcctttcaaagtgctgggattacaagcatgagccactgtgtctggccttgctgtaagaattataatttaaatatgaaaagcatttagaacaatttctggtccataaagtagaggcaatagtgacacatacctacactcaccgcctcttgtgtactcattaccttgtgcaattattatcaaaatttgggcattttctttcaactctacacctgcacactttattcccttcactagaatgttctaaagcmaactccaaatgtcagctttttatccacaatgatttgggatgtgtaaatgtgtatctctaatgg

SEQ ID NO: 164330 - DNA, 596 bp, Homo sapiens
tgaaaataaaatgtttcaatatcctctcttggtatgttataaggaatatggcttcacaagcctggaagataatgtttgcctggttctatggagaaaaacaataagaaaaaaaagwcctaccatggacatgcatatttggcaactcgtgcctaatcctatcatcacactggacaatcacttaccctctagagcctcaatttctcacctttaaaactgttataatagtgtctaccatgctgttttcactggattgtattgcagtaattatcaagcaaaatagtggatatgaataggcttttaaaactgacaattttatgtaaatgtatgcagtgtttatgcaatatttcctaacgcattcatagaataacgacaccaatgagcatatggctttggtgacaggtagtaaaatctttgagactcttaacactaaatgtagcactgcctactgctatgaaaaccacatgtaaacacatacacaaacacacacgcacacacacactcatgtcttacaattaattaccttgaagtagtatatagttttctaaatgatactttgaaacgaatactagcagaagtgcatccttgataatgttaag

SEQ ID NO: 164331 - DNA, 321 bp, Homo sapiens
ctgaacttaagttaacgtggttattgattttaatggctgggctttgttagaagccagaaagcccaagattgatattacacaaggtkatataacactcatgattgcctttggttaactaatgtatagcatttcagagtaaactattgaaggttgttggtgattggaaatatggagattaaattgggtgcaatatattcaaatggagaaaaaatataccttaatttaaaaagcaaataatattctaatcctgtgtttaggaacacaggatagaatgataaacttgtctaaatttgcaataaaatattaatgagaatagttcat

SEQ ID NO: 164332 - DNA, 609 bp, Homo sapiens
ttataaattctaacacgaatagtaaaatgttcagtattttcaccttatttttatttcttttacttctcttatgggtattccaaggacaggattcaatattaaatatggcttttgttttatatgtagattgagttctctgtgtcaaggcccacttatttagagggaaaatgggattctatttttggaattaaattgttggcccttaatcagtctagyacgtttccatacttcagcactgttgacattttggactggatgattctttgtcttggaaactgttctgtgtgttgcaggatatttagcagcatttatcaagagcgtctacttaccagatgccagcagcactcctctgatatgacaaccaaaaatataccaaaagtgcaaaatcaccccagttgagaacaactagactctagtagtttagttcaaatataaaatgaagcttgatggtgggatcaatttgatgacaatgagaaaaaaaagttaatttggttattctaaaaagattttccttcaaaaagcaatgttaactaaatagacagaactgttttttctttctaaactatatcagaggtgtattagatcattttcaccctgctgataaatata

SEQ ID NO: 164333 - DNA, 609 bp, Homo sapiens
ttataaattctaacacgaatagtaaaatgttcagtattttcaccttatttttatttcttttacttctcttatgggtattccaaggacaggattcaatattaaatatggcttttgttttatatgtagattgagttctctgtgtcaaggcccacttatttagagggaaaatgggattctatttttggaattaaattgttggcccttaatcagtctagtacgtttccatacttcagcactgttgacattttggactggatgattctttgtcttggaaactgttctgtgtgttgcaggatatttagcagcatttatcaagagcgtctactyaccagatgccagcagcactcctctgatatgacaaccaaaaatataccaaaagtgcaaaatcaccccagttgagaacaactagactctagtagtttagttcaaatataaaatgaagcttgatggtgggatcaatttgatgacaatgagaaaaaaaagttaatttggttattctaaaaagattttccttcaaaaagcaatgttaactaaatagacagaactgttttttctttctaaactatatcagaggtgtattagatcattttcaccctgctgataaatata

SEQ ID NO: 164334 - DNA, 609 bp, Homo sapiens
ttataaattctaacacgaatagtaaaatgttcagtattttcaccttatttttatttcttttacttctcttatgggtattccaaggacaggattcaatattaaatatggcttttgttttatatgtagattgagttctctgtgtcaaggcccacttatttagagggaaaatgggattctatttttggaattaaattgttggcccttaatcagtctagtacgtttccatacttcagcactgttgacattttggactggatgattctttgtcttggaaactgttctgtgtgttgcaggatatttagcagcatttatcaagagcgtctacttaccagatgccagcagcactcctctgatatgacaaccaaaaatataccaaaagtgcaaaatcaccccagttgagaacaactagactctagtagtttagttcaaatataaaatgaagcttgatggtgggatcaatttgatgacaatgagaaaaaraagttaatttggttattctaaaaagattttccttcaaaaagcaatgttaactaaatagacagaactgttttttctttctaaactatatcagaggtgtattagatcattttcaccctgctgataaatata

SEQ ID NO: 164335 - DNA, 609 bp, Homo sapiens
ttataaattctaacacgaatagtaaaatgttcagtattttcaccttatttttatttcttttacttctcttatgggtattccaaggacaggattcaatattaaatatggcttttgttttatatgtagattgagttctctgtgtcaaggcccacttatttagagggaaaatgggattctatttttggaattaaattgttggcccttaatcagtctagtacgtttccatacttcagcactgttgacattttggactggatgattctttgtcttggaaactgttctgtgtgttgcaggatatttagcagcatttatcaagagcgtctacttaccagatgccagcagcactcctctgatatgacaaccaaaaatataccaaaagtgcaaaatcaccccagttgagaacaactagactctagtagtttagttcaaatataaaatgaagcttgatggtgggatcaatttgatgacaatgagaaaaaaaagttaatttggttattctaraaagattttccttcaaaaagcaatgttaactaaatagacagaactgttttttctttctaaactatatcagaggtgtattagatcattttcaccctgctgataaatata

SEQ ID NO: 164336 - DNA, 388 bp, Homo sapiens
gtgtacccaccggctgaacaccacatgtaagctgccaaggcttggaggttgcaccctctcaagcaatggcctgagctgggatgcagggcaccaagtcctgactgcacaaagcagcaaagccctgggcctggaccaagaaatcattattttctcctaggcctctgagcctgtgatgataggggcttcctcaaagatctctgacataccctggagacattttccccactgtcttggcaattaacattgggctccttgttacttatgcaactttctgcagcaggcttgaatttctctccagaaaatgyggttttgttttctatagcatcatcaggctgcaaattttccaaacttttatgccctgcatcctcttgaacatttcatcacttag

SEQ ID NO: 164337 - DNA, 444 bp, Homo sapiens
tgcttttaaaattttcaactaaattttttattttgaggtaaatacttattcatgtatagtttgataaataatacaaaagttctttgtactcttttyattttcccaaaattatagcatactacaaactacactacaatattaaaatcaagatattaatattgatacagtcagtcaaaataccaaacagttccattatcaaagattttcctggttagttttttaaagctaaacatcccttttaccatcctctcatattcctgacttctgtcaatcactgatttgttctctctttcttctctatttttatgattttatcatttcaggagtgttatacatggatcttgcagtatgtgaccttttggaggtttttttttttttcattcaatgtaattctctagagaataaacattttaaagtatcaatagtaatttccttgttaatact

SEQ ID NO: 164338 - DNA, 526 bp, Homo sapiens
taaaaatgaaattgagcagcttgatttcgatggactgtggagaagcatttcttgggacttaatataaatawttcttcctcagaaaaccgctttatacatggtgacatagtttgaatctgtgttccctgcccaaatctcatgttgaattataggccctaatgttggaggtgggcctggtgggaggtgattggatcatggggatggtttttcatgaatagcttagtaccattcccttggtactgtcctcagaatagtgagttcttgtgagatctggtcctgtaaaagtgtgtggcacctcccaccctctctcttgctcctgctccttctcctgccatgtaagatgcttgatctcactttgtcttctactatgattggaagcttcctgaggcctcctcagaagaagaggcagctaagcttcctgtaaagcctgcagaaccatcagccgattaaacctctttttcttataaattaaacctagtcaggtatttctgtatagcaatgtgagaaaggattaatgccaatggtt

SEQ ID NO: 164339 - DNA, 524 bp, Homo sapiens
tcttgcatctttcaaaattctcccactgtttttgacttttaacaatatgattataatgtgtcttggtgtatatttctttgtgttcatacttttggggccttttgagcttcagcaatctggatgtccgtttttcttcccaaacttgggaagttttttgccattagttctttaaataagattttttccctctttctcctttctgaaacttttataatgcattaaaataaaaatttgaacaataaaaacttcattaggtctaataattcccttaartgttcactctttttcattcttttttctttttgctcctttgactaaacaatatcaaatgatcactctctgagttcactgattctttcttctgcttgataaaatctgctgctgaagctctgtattaaagtttttggttttgttattatattcttgagctccagaatttctgcgtggttctttttgatagcttctacccccttgttaatatttctatcttattcatgtattatttttctgattttgtttagttg

SEQ ID NO: 164340 - DNA, 519 bp, Homo sapiens
cacaacattttaatttctaaattttttttactgaaggcagataatgttattcaacaagtttcctctgttatttaatagtgaatctagcaaataataggaggtggtcaatatccacataatatccttacagaatacttcatttatctaaaaaatatttaattgaaaataaattagaagtaaagcatacctttgagtctgaggtctcatcctacctcttatgacctcggacaaataatttctcttctttaygcttcagatactaaacaagggagtctacccaaatgatgtctagctttttttagataaaacatgctatcataatcttgtgatactaaaaactaacattttagtcagagtcataaaaaaagtcttccacttaatggcatctctgacaaaaatgtaatttttaattcaactcatctcccttttcaaaattaattataaaccctcaccacatacacttatattgaatctaataaaaataagtctgaaataaaaagtaagaattaatcagagatg

SEQ ID NO: 164341 - DNA, 396 bp, Homo sapiens
cctactgcctagtgacatcgtagctgtcataaagtcgtagcacagttattttaaaaatggaatgtagcataagtgtgcagtgttcattaaatcttcactagtgtacagtgatgtcctagaccttcatattcactcaccactcactcactgactcattcagaggagcttccagtcctgcaagctctgttcatagtaagtgtcctatgtaagtataccatttttcatctttcgtttctcttttcttttygtttgttttcatttctttttgtttctttctgtttgtatgttttttgacagagtcttgctctgtcgcccaggctagagtgcagtggcatgatctcggctcactgcaacctccgcctcccaggctcaagggattctcatgcctcagcgtcc

SEQ ID NO: 164342 - DNA, 554 bp, Homo sapiens
aatgaaagtgttatgcgaaggaagccagatacaaaagaaaaaagtattgtatggtcccatttatatgaaatggggagaacaggcaaatttataaagatagagagtagattgktggttgcctatggcagggagttggaggtatggagggcaatgggtaggactgcaaaaagttatgggggcttgtagggggtactgataaaaatactttaggtttaggttgtggtcgacggttgcaacaatatatgaatatgctgaaaaccatcgaattgtgtgcttgaaatgggtaaacttatggttagtgaattatatctcaataaagctgtttaacaaaatagaaaacaccaggattgcaaaaggacatttcatcaggcctgtattaaagcaggattggtaactgctatgatttgtttgtcccctcggaaactcatgttgaagtgtgatctccaatctggtgatgtctggaggtgggatagtgggaagtgtttggttcatgggggtggatttctcatgaatagattaatgctttcccacaagagtgagtgagttctctttct

SEQ ID NO: 164343 - DNA, 474 bp, Homo sapiens
acctatagatttatcttttggtactttagataggattataaccttggtaaagactcgtttggcataatgatctactagataatttcttttaacttccatattgccccttcttgcatggacctaaaccattatcatagtcatctgtctaagaagtaggagtgcctctaaaagttccttaactatagtctattttttttggtyggtgttgtcagctacctagaaacccctttgtttccaaagcatctcctaatcatgtattactccagaagcgtgtttgttatcagtatatatccctctctgaacttcggtgaatggaaaagctctagcaagtgcagtaagttctcccatctgggctgattttctctcaggtataagattgtattctaaaggagagcttaaattagtgagagtgtatcctgtttaatcccctccagtttcagttttgaggtatgatattagatgaagttgctcaat

SEQ ID NO: 164344 - DNA, 474 bp, Homo sapiens
acctatagatttatcttttggtactttagataggattataaccttggtaaagactcgtttggcataatgatctactagataatttcttttaacttccatattgccccttcttgcatggacctaaaccattatcatagtcatctgtctaagaagtaggagtgcctctaaaagttccttaactatagtctattttttttggtcggtgttgtcagctacctagaaacccctttgtttccaaagcatctcctaatcatgtattactccagaagcgtgtttgttatcagtatatatccctctctgaacttyggtgaatggaaaagctctagcaagtgcagtaagttctcccatctgggctgattttctctcaggtataagattgtattctaaaggagagcttaaattagtgagagtgtatcctgtttaatcccctccagtttcagttttgaggtatgatattagatgaagttgctcaat

SEQ ID NO: 164345 - DNA, 521 bp, Homo sapiens
aaggtgatcttgaggtcctctttattatgacgaaggcaggaaagcagaaggactcagggtgttgtaggactcagtagtttaactgagacctaggtcaagcatggagcctagaactagttcagcagaaatattgacatgtaatagcaactggcctaagaccaagtgaacaagtcaaatgaggctatagtaagcatttgggttttttgtttcccatgaaccacagaggacaaaaaggcttgttcaaaccacttaygcacaaatagacaaaaaaggctgtttgcagttaacgaagcctagggaagaaagctttgaaaaaccttccttaggtaatagaaggcttgttcatgttttgaatcctaaaagagagagtctcttatttaggacttagtcagttaataaaattgacgcaatttcagaaaaaaaaaattggcacatgttgtctgcaatatccagttaaacccagaaatcctctcaattattgtattgtaagaggtttaggaacagttcagtagtgtttattc

SEQ ID NO: 164346 - DNA, 549 bp, Homo sapiens
agggtgtcagccaccattactggtgctagatagagattcaaaggcaggcagaggagtggggaggcttcatattgacaaaaataaaaagggaagctttcagataggctctgattggatgttgttggcatgaggaagctgaagacaggctacctagaagtgagacatctcatatgataggttttggaagcatatttggctttctctagttagtctcgagttggaagcagcggcaacaaataagaaagctgactgtctttgaccaagccatgatytttctgggcttattgtggttcaagttgttgtttgacttaccgagatggttgctgcagaggttgtgagtcccagctttattgtcatacgtggtcatgtgacctggcctttgtccatttgtatgtggagtttctccacttctattgtcattattagtgatatcatccacaggacatcatagcccccagtttgttacaaagaaagaagcaaacatcaaagcagaaacttctggagcacagagttgactcctcttaatttgattataacaccatatataaa

SEQ ID NO: 164347 - DNA, 566 bp, Homo sapiens
ttcagcttactatgcagaaaactcattcctgcatctgcttttactgtgttcacctctgtatttctagactaggttcttgtctaattcttggtttatccaatgtagctaccaggttagtttctagggctgccacaacaaaacaccacagacygggtggcttaaacaacagaaatgtgtttctcacagttctggaggctagaagtccaagatcaagatgttggcaggtctgattctcttgaggcctcgctccttggtttgcagaggagccttctccacgtgtccttccatggtcttccttctaggcatgtgcatccctggtgtctctgtgcatccaagctgtctttttctagaacaccagtcttattggattagggcccatactcacagctttattttaatataattatctacgtaaaggctttatctccaaacacaatcacattctgaggtaccagtgcttaggattttaacctatgaatttggcaggacacatctcagccccagacagctaccatctattttttgtagtggtatttgagaatttcattctcctttagtcagccacc

SEQ ID NO: 164348 - DNA, 572 bp, Homo sapiens
ggacaataaaaaggaaaccaaaaaatgatactgatttattgagtaaagctttgtcaatagatagttaagagctggctttgtattaaacttgaatatctagaaaatcagatacacagatctttcttatttaaaaagacatctaaactactatatattatatagtacatgaggtatcatagattatttaatgggcatgtgtatgtagtttgtgctgtgcaaacaatgctacaattgattgattgattgattcatttattgactcatacattcactgattcaacaagcatgtagtgagcactgagtatgtgccacattctcctaagaacttggcaggggataaacaatttgtttgctcatggagtttctactatcaggaaatagacatccttargatactgttgagaatagacaagtactgtaaattcctagcagaggaactgttgaataaaagagcatgtgtttttgaaattctgctagatactgttaaattgccatgcaaaatgttatcccccgttgacaaacgcatcaaccatataagggattgcctgtttcccaacccttcacctacatgc

SEQ ID NO: 164349 - DNA, 548 bp, Homo sapiens
tgaagtaaacatttggacaagacttgagggcttcaattttataaatgaatggcattcttaaattaattctaacctcatttagaataatcatatgacatttcaaagtgcaaaaacaaaatgttgttgaaacttagaaaatggaatattgtaaacattagaacattacatctgtcctttaattaagcctagtgtagcttaaaggccaaagttacaaccttacgactaggctaaaagacccaggaaaggtagaatggttgacgaagataagagtatttccctgtggcagagagtgactgcgtgcacyccattccccagggccaacgtactagcctgtgggctcagggacttaagctaattctttccagccttgccaaccttaatccaatcaatggtttcccccatgacctaagagttggcacatctcccttagtatttgaaaacacaagagaattccaatctcttatttgtcaagccaccaaatgaagaatttcagggggaagaaaggaatacatgttatttttcacttattaatcagctcctccattgag

SEQ ID NO: 164350 - DNA, 582 bp, Homo sapiens
tggaagggggcaagataggaggagatcatacggacaatggaaaagatttttcaaatgaaacaattccttaagaactttcaagataatgtgatggcatgctggtcgctagcattatgaaataaggatgttggagaaaacacggtgaggcaagatcatgaaattggctgagttcactcagaggtctacagttttctatctgtatgtgctttcaccaagcataacacaggccaaaccaacctgagctgggccattctctgttccacactctatttcccctctttttttagtttggccatgcttccagttcttggtgcaatattgtaagaatgatgttgacaaacaacgcattttaagatgaatgagygattaagggtctaaaacctatatcagttgaagaatggctggcatacctatgcatatttaatttctcaagtgaaaccatagggaagaacgatgtgttcagtgttttagcacatttaagagactgctaaatagaacagagattagaatacatctgtgaaactttgataagacaggatgaatgggtgaacattaaaacaaagtagattttgtttcaattat

SEQ ID NO: 164351 - DNA, 592 bp, Homo sapiens
ttgtccatttcttttgcttacaggtaagtgggtatttacttatttaacaaagttaatgtaacttagatgaaatatgttttcccctgaggtattatgctttgctataaagaaatatcaaagaaatttaaatgtgttctcaattaaatgcattggcccagattccagagctgagctgaatttctcaaattatagctcaaatgcatcaatcttcctatgaagtttattgttctgtaagggaattggctaagagaaacttcaacactggtgggctttaaggatgcagtaatagctcttgaatgaccatcatcatagaaaatggtttgagatagagattaaatttgacttaaactccttcaatatgcacaggtcaaaggactctgcacaggtcaaaggattctgagattttcctttaagagaaaaatctcaaaccaagtgataataataaaacacctccataagaatgatgtctggctaatttcacccagaaaatatcatgacatttaagcccaaagtgactggtaaaatctttctctttttgattaaaacagcagccttygataaacaacacattggatcttcaagtctctggtca

SEQ ID NO: 164352 - DNA, 414 bp, Homo sapiens
agccaaagggaaatagcagcaaaaaacaactcagtctgtatgtagtagcaagcacctctgtgatctctcccatagatggaaaccatagttaacttgcagagatagatagaagccaccttcattccaacttccaaatggctcttgcattgttactaacactctaaatgaaggtacttattgtcttactcctatacacatctttgaaacataaatgtttctatgagtgtaacacataagtctgagtasgtttttcaaggtatctttactctgagacaggaggctaagctaatttagtcatatgaaaacttcagggtatttgtgagagagctggggagaggttgggattagaggaaagataaaagagaaaacaaggagaaatagaagaaaataagggggtatattgagaggagccat

SEQ ID NO: 164353 - DNA, 414 bp, Homo sapiens
agccaaagggaaatagcagcaaaaaacaactcagtctgtatgtagtagcaagcacctctgtgatctctcccatagatggaaaccatagttaacttgcagagatagatagaagccaccttcattccaacttccaaatggctcttgcattgttactaacactctaaatgaaggtacttattgtcttactcctatacacatctttgaaacataaatgtttctatgagtgtaacacataagtctgagtacgtttttcaaggtatctttactctgagacaggaggctaagctaatttagtcatatgaaaacttcagggtatttgtgagagagctggggagakgttgggattagaggaaagataaaagagaaaacaaggagaaatagaagaaaataagggggtatattgagaggagccat

SEQ ID NO: 164354 - DNA, 631 bp, Homo sapiens
aaaattatcatgcagagataataactcttggcttttaaacatattttatttaattaggacctgcgatgatttatgtggttgtgtggtttatgtatggatatatgcattttacataattgagttgatattttatgtataatatcctaggagttattttcacttgacaccaagtaagaacattgtttatttcttttaatagtttttgaaaactttttttttaactaactaaataatttggataatattatagtgaaattaaccacttcactctggtatctttaagtaatgtttttgatttgtcaatgagatgaataataatataatggtaatagtaataatagattgttatttgaatatttcctctgcctaaataaatatgactttagaaatgaagcttaccacaacatttttagggctttttatatatattgtaargttatggttcagaaaagttttatctatttgcatgactaccagtatttgagagtacccgccttaagtgcactaaatattattggtaacatttgcgtagttgatcaatgtaagagtttgttcattttatatttactctattttctttagttatttgtaagaaggatttttttcctttttcaaataaccatttttaatt

SEQ ID NO: 164355 - DNA, 444 bp, Homo sapiens
tctctttgggttgactgcaacttgttggaggtatggataaggcacttagggtctttgccccttcattagcctgagggtagcaaggacagttccactgcagaggcagtggcagacaggctttcagttgcccctctgaggctctgtccagggagtaacagctgataccrgcttgagagctcttgttgggggtggctagaggcccaggcctagaggacctgcccagtgaggagatatgggaatggacatccatataacagtctggccacttttccatagagctgctgtgatatgctggggatctgctccagtccctagtcagcttagatttttcagtacctgaaggtatcaccagtgaaggctacaaaacagcaaagatggcagcctgctcctcccactgggagttccgttccagggaggtatggacctaatgccagcttgaacaca

SEQ ID NO: 164356 - DNA, 585 bp, Homo sapiens
tgccatgcacaccagatacaaagaaatcacagtagaaattggccaatgaatgaatagccacttcttaactaaaattcaattaactttttttttttttttttttttgagacggagtctcgttctttcacycaggccggactgcagtggtgctatctcggctcactgtaacctccgcctcctgggttcacgccattctcctgcctcagcctcctgagtagctgggactactggtgcctgccactggatctggctaattttttgtatttttagtagagacggggtttcactgtgttagccagggtggtctcgatctcctgacctcgtgatctgcccgcctaggcctcccaaagtggtgggattacaggcttgagccactgtgcctggccaattcaattaatttttaagcatcattcatcaaagaagcaattccttgatttgtctttgttttaatgattagcagtctatagtatgtcttagtttgcaattttaatatatgtttgttattcaatattattcaaagtctaatatttataagacacaaagatctgtgggtgaaaaaagaagtttcagccaggtgcagtggct

SEQ ID NO: 164357 - DNA, 585 bp, Homo sapiens
tgccatgcacaccagatacaaagaaatcacagtagaaattggccaatgaatgaatagccacttcttaactaaaattcaattaactttttttttttttttttttttgagacggagtctcgttctttcacccaggccggactgcagtggtgctatctcggctcactgtaacctccgcctcctgggttcacgccattctcctgcctcagcctcctgagtagctgggactactggtgcctgccactggatctggctaattttttgtatttttagtagagacggggtttcactgtgttagccagggtggtctcgatctcctgacctcgtgatctgcccgcctaggcctcccaaagtggtgggattacaggcttgagccactgtgcctggccaatwcaattaatttttaagcatcattcatcaaagaagcaattccttgatttgtctttgttttaatgattagcagtctatagtatgtcttagtttgcaattttaatatatgtttgttattcaatattattcaaagtctaatatttataagacacaaagatctgtgggtgaaaaaagaagtttcagccaggtgcagtggct

SEQ ID NO: 164358 - DNA, 452 bp, Homo sapiens
tatttttaactcattggtagataaataaagtgtctttagaaaatggttattgatgacaatttggggatcagtttaaggtctgtagtgctcggatgcccagcaacagtaaatgcatttttcagtgtttcatgaatgatttcctaatatagtccattcccctcccccccaccaatttaatatgagagtgaagaggaaaagtgagctctgtatgtataatgtattttcataggataattgacttagtagcaattaaaatagtgatgtatagacatcaaaagggtatctgtggattcaaaggggtttccagcaatgcacgrgtgaggaattctctgaaagataaatcaaaggtagatgtttaggtagtgatcttaaacttacttggttagaaacataaattatagaaaatcttatgcaagttagagaccattatggtttttgtcactcaaggcagt

SEQ ID NO: 164359 - DNA, 596 bp, Homo sapiens
cagctttcttgtgtcttaacacaggtcaggccaagtgctgcagccagagctctgtaaactcgggtagtggagagggaaattgggaggatttaccttcctggtattttctgtatgatacagacaaccctctgattagctctgctgatggctgccctctagacaactccactgggatgattaggaccggctcactctgaacttaatgcagtttcagaacctatggctcctatctctgcttacagctttctcacctgtaagtttcatctgtggtttcctgtgtcccatatatccattaataaaatcttaccttttctgcctttcaggaattctccaaaatatgttatctactggtgacagccactagggttttcacgactgatatgaattatttcatggcaaacaaaaatttttatacttatatcactggtgtgttgagagaacctatagatagatacgtgctctcaatacattattttacrctgaatgcatatacacccacacatatacacatatcgatatgctcacatatatatctaatagaacacatgaagtagtttatgcaaaatttccttagataatgatagcattggactgaa

SEQ ID NO: 164360 - DNA, 579 bp, Homo sapiens
catttcttcctggtgtattttattttttctgaccctaagaagctgcacctgcgagttggaggggccaaagagggaaattattacttagattttgctttcgtaaatgattttctatagataaaataccatggagagcaacttccatgatactttatacttatatcttatgtcagaggaggatatttgaatgattagttgttagaaaaaatatattgaggaaaaactayggtccctttagctctgtgcacccatgacaatctactgcttttcccaaaaattatttacaaactttatgaagagtaatgttgtaattatttacataatttatataaattttaacttgcatattagtgtagagaaataaattctgaaatacaactgtcatattttatatttttcataccctttgagaactttgggactcactgaatcaacatgtaaagtatgtgcacgtattcagagtaagactgcttagctttgctattctaagtgattatggatgcttctggttgttataaatttgcatatgtaccagtctgttttcacactgctaataaagacatacgtgagactgggtaa

SEQ ID NO: 164361 - DNA, 512 bp, Homo sapiens
tccatcctcttctccacttaatgatgaaagaattcttattccattcatctgcaacttatttgtattacatactaacctaccttccatgtgtacttttaagtttgtttctctgataaagagaatttatttcctcttaaattaataaatcacatgtcttagggaacctatagaaaatacttatgtgttgatgataaccttcatyttccacctaaaaatcacagttctggttttctataagcaaaaccatttgatacatagtggctcattgctttgatatttgtttaaaaaataaataccttgcagatgtgatatatttttgccctcctctagtttaaacttttctttatttgtttttatttattcaaatgtatgtgttgaatgacagccattggccttaaaagcatctaggtttcagaggttaacacccactctcaagctctcttcttgctctttctctctgcatcctcattggtcatgacttgagtatttctagcatctgcccaaaactgaac

SEQ ID NO: 164362 - DNA, 609 bp, Homo sapiens
aattgaacccttatctcacaccatatgcaaaaatcaactcaaaatggactaaaaacttaaatttaatatctgaaattgtaagagtactagaagaaaacataaggggaatctccattacattggtttgggcaatgatttttctgtataaacaaaaaaagatgaatgtgattgtatcaaatttaaarctttttacacagcaaaggtaacaaggaacagagtgaacagacaatcaacagattgggagaaaatatttgcaaaccatacatatgataaggggctagtatctaaaatatattttaaaaattggcaacttaatagaaggaaacaacccaatttttaaaatgggcaaaggacctgactacatatttcttaaaaaaagacaaaaggccagtagacatatgaaaaaatgctcaacattaatcagggaaatgcaaattaaaaccacaatgaaacatcacctcacacttgttaaaataggtatttcagaaagacaaaatataacaaaagttggggaggatgtggagaaaagggaacccttacacactgttggtgggaatttaaattagtcattatgaaaaacagtatgtaaggtcctcaaaaagtaaaaat

SEQ ID NO: 164363 - DNA, 609 bp, Homo sapiens
aattgaacccttatctcacaccatatgcaaaaatcaactcaaaatggactaaaaacttaaatttaatatctgaaattgtaagagtactagaagaaaacataaggggaatctccattacattggtttgggcaatgatttttctgtataaacaaaaaaagatgaatgtgattgtatcaaatttaaaactttttacacagcaaaggtaacaaggaacagagtgaacagacaatcaacagattgggagaaaatatttgcaaaccatacatatgataaggggctagtatctaaaatatattttaaaaattggcaacttaatagaaggaaacaacccaatttttaaaatgggcaaaggacctgactacatatttcttaaaaaaagacaaaaggccagtagayatatgaaaaaatgctcaacattaatcagggaaatgcaaattaaaaccacaatgaaacatcacctcacacttgttaaaataggtatttcagaaagacaaaatataacaaaagttggggaggatgtggagaaaagggaacccttacacactgttggtgggaatttaaattagtcattatgaaaaacagtatgtaaggtcctcaaaaagtaaaaat

SEQ ID NO: 164364 - DNA, 600 bp, Homo sapiens
aaattctagtagttttactgtatagagtaatattgattttgaataaaatgattggcaggtattaatgttttttatatgagctatattagactttctcatattctataaagtgattataataatacmcaccttaggtaaagattaaattagaggaggtaaatagaatattcctcatgatactttgaacccttattattgttaattttactatagttagtcatgcatctatatcatctacctgaatagactataatacagtgtttcccaacctcaatgatattgacattttggactagataaatttttgttggagaaggggggtgtcctgcactttctaatatgtagtaacatcccatgttatgcccactagatgccattagcacttccattcccagttgtaacaaccaaaaaaatctctagacattgccaaatgtacccttgaggatgaaattgtctgcctagatgagaaccactgctggtgagaaacacaataccttgcatagatactttgtgtctatgaggattataagaaaaaaaaatttaattgaattgatttgaatatgtgtaccaataagcaattacatctacattagtgattcc

SEQ ID NO: 164365 - DNA, 549 bp, Homo sapiens
tgtggacttgtttgtagctatttttttcgatagttcttttattttttttctcacccttgaaagcatattttgggtctggaactcaaggttggtggtgattttatttaacatatttaaaaagttattcttctgtcttctggcttccattgatgctgctgacaatgtctaaccatggctgyttttaaggcattatttgccgtcattcctgcttggctgattttaacttttgcaccatggtttgggaagagttaggtttctttttatttacttttcttaggattcactgggcttcttgagtctgtggtttacactaattttgattaattttacaaaatttttctgccattatcactttgaaaactgttttgcctttgcttttcttctcttgggactcctgttaaatacgtttagattttctctgcttccatccttttgaaactccgtgtctcattctggttaacttttcttaatttagctaccctctcactaattctccttagctatctgcaatttgctgtgaaggtttttactgaatgtgttatttaggtt

SEQ ID NO: 164366 - DNA, 529 bp, Homo sapiens
tgtaaattagtacggccactgtggaatacaggattacaattttcttaaaaaaagaaaaatagaactaccatacaatctagcaataccactactgggtatctagccgaaggaaaagaaatcagtatacgaaagggatacctacacttgcatgtttatggcagcactatccacaatagcacagatcagcaacaaacctaaatgtccacggatcccatggatgaatggataaagaaaatgtgaaccaacattgcatcccggggatgaaggctacttgatcatggaagattagtgttttgrtgtgctgctggattcagtttgcaagtattttgttgaggattttcttcatcgatgttcatcagggatattggcctgaagttttttttcttttttgttttgtctctgccaggttttggtatcaagatgatgctggcctcatagaatgagttggggaggagtccatcctcctcaattttttggaatagtttctataggaatggtaccagcttttctttgtgcatctggtagaatt

SEQ ID NO: 164367 - DNA, 529 bp, Homo sapiens
tgtaaattagtacggccactgtggaatacaggattacaattttcttaaaaaaagaaaaatagaactaccatacaatctagcaataccactactgggtatctagccgaaggaaaagaaatcagtatacgaaagggatacctacacttgcatgtttatggcagcactatccacaatagcacagatcagcaacaaacctaaatgtccacggatcccatggatgaatggataaagaaaatgtgaaccaacattgcatcccggggatgaaggctacttgatcatggaagattagtgttttgatgtgctgctggattcagtttgcaagtattttgttgaggattttcttcatygatgttcatcagggatattggcctgaagttttttttcttttttgttttgtctctgccaggttttggtatcaagatgatgctggcctcatagaatgagttggggaggagtccatcctcctcaattttttggaatagtttctataggaatggtaccagcttttctttgtgcatctggtagaatt

SEQ ID NO: 164368 - DNA, 589 bp, Homo sapiens
attttattctctttgtagcaattgtgaatgggagtttgctcatgatttcactcttcagcagtctcaggatacaaagtcaatgtgcaaaaatcacaagcattcctatacaccaataataaagtgctttaatcattaacctgttgcagtttctgaatgatgaatgaaggtgtttgaagctttagagagattcagagtttgagaatattttcatgaatctttgtcctcttcttcttttttttttttttttttgattacttaggtatggcttatattaaacattacttactgttcccatgcattttgtctgctaaactgtgcctatacatatatacataaagtttattttattaacatatgtttgcatattcactctttcctgtctcaaataacaaaaatacagagaccctgagagtttacattacttatatgtgtggttttttttaaattcaagacacactaactcttagaatggtttatacattgcagttagtttttgamacaattttgattttcttgcagctcttggttgcctgacatccttaaggtgtccttgggaaaaagtgcttttatttcagtgtattaaaatgcc

SEQ ID NO: 164369 - DNA, 580 bp, Homo sapiens
tttcctgtttttctaatgatttaaattacctcaaattcattttgatggtagatagatataaacactataaygtataaatgttgctaagaaaaaaaactctaataactttcatttaaaaatatcattcaaaacagttatctgatgtaggatagaaaggacataaaatgacaactcagtttgtctagagcatctgcaagtcactgtataatgtatttttccatgttttatttaatcaatgaaaatctgattaataagcatttttatcttaattgtatagaagatattctaaagttcagaaaaattaaatggctttcccagagatacagagctcgtaagtgttcaaattcagattggaacacaaaactctctgaccctgaagctcattttttccctatgacattgtgccataaccaatataacaactaagttatcaattcactctgatttttacatttttgctgattatcctgacacatttctgcttttatccataagagtatttaaatatggatataattcgtcaacagatttaatggaatggtacagaatggaatggtacagaatggaaacttggatgatg

SEQ ID NO: 164370 - DNA, 580 bp, Homo sapiens
tttcctgtttttctaatgatttaaattacctcaaattcattttgatggtagatagatataaacactataatgtataaatgttgctaagaaaaaaaactctaataactttcatttaaaaatatcattcaaaacagttatctgatgtaggatagaaaggacataaaatgacaactcagtttgtctagagcatctgcaagtcactgtataatgtatttttccatgttttatttaatcaatgaaaatctgattaataagcatttttatcttaattgtatagaagatattctaaagttcagaaaaattaaatggctttcccagagatacagagctcgtaagtgytcaaattcagattggaacacaaaactctctgaccctgaagctcattttttccctatgacattgtgccataaccaatataacaactaagttatcaattcactctgatttttacatttttgctgattatcctgacacatttctgcttttatccataagagtatttaaatatggatataattcgtcaacagatttaatggaatggtacagaatggaatggtacagaatggaaacttggatgatg

SEQ ID NO: 164371 - DNA, 528 bp, Homo sapiens
gcacaacaggatgattacagtcaacacaaatttattgcacatttaacactaacagagagaatataatgggaatatttgtaacagaaagaaatgataaaggcttaaagtgatagataccccatctaccctgatgtgattattatgcattatatgcctgtactaaaatatctcatgtaccccacaaatatacacacctactatgtacccataacamattttagatttaatttaaaaaatgaagtgggctgggatgatgtgacatatagcatcaagtatttgcattaggctctgtccatgcttgagtttttgttttccaccatgaaaatagcatgttccagagagtgggtgcttcttcagtctagatcccagaatggtaagacacgaagaataccatcaagctgagtcctgttgagcgtagcagagatgaagccagttcacattctcatataatataagcaaaaactaaatgtgttatgctacagggtggaatgttgatgtccccccaaaaatttaaatcttcacccccaa

SEQ ID NO: 164372 - DNA, 595 bp, Homo sapiens
attaaagattttgatttcctaaaaggtcctcaaaattttgtagaaaagcactttaytcattactaacctagtatatacacatatgattctaattttcttcccatgttttaaggcttttatagtaatattacacaaatggtctgcctaacagccaatcatttccaagataaaaatgggccaagagacaaatgacaggcaattattaagccttttaaggagaaactgttaagcctagaagaatattgatacaaactgactttctgcacagtggactcaacaaagctaacataattcacaccagagattctctatgggaccataaattaatcagattgaaaagatggcaacccagaaacacaataaattgttctatggcatagtaaggcaccctccacattcttattttcaatggcacaataagacacatacacacacacctgacaaagaatgaataattttggaaaaagctgccatgttttcagtttaatctaaagacagagagagaaagaggaggaggaggaggatcctatattcactcctaactgcaagtttggaagaggtatgaggaatttgggagtgaggcaaagaggccaca

SEQ ID NO: 164373 - DNA, 595 bp, Homo sapiens
attaaagattttgatttcctaaaaggtcctcaaaattttgtagaaaagcactttattcattactaacctagtatwtacacatatgattctaattttcttcccatgttttaaggcttttatagtaatattacacaaatggtctgcctaacagccaatcatttccaagataaaaatgggccaagagacaaatgacaggcaattattaagccttttaaggagaaactgttaagcctagaagaatattgatacaaactgactttctgcacagtggactcaacaaagctaacataattcacaccagagattctctatgggaccataaattaatcagattgaaaagatggcaacccagaaacacaataaattgttctatggcatagtaaggcaccctccacattcttattttcaatggcacaataagacacatacacacacacctgacaaagaatgaataattttggaaaaagctgccatgttttcagtttaatctaaagacagagagagaaagaggaggaggaggaggatcctatattcactcctaactgcaagtttggaagaggtatgaggaatttgggagtgaggcaaagaggccaca

SEQ ID NO: 164374 - DNA, 563 bp, Homo sapiens
tatcaccaaatggttctatagggtttccctgtttttatasacagtagcctccatagttcactaaggtgatattaccatatcatcctgcattataagcttaaggaatacatcccagaaaatgtaccagcactatctctattaaattattaatgttaagtcttgagtactttgcagattaaagcctgtggacattgcttttgaaatgcaaatgatgtgtaacaccactactgggggtagtataatgaagtaatataatctcaaggatcgggatgcttaagtgtagactttggaaatgaccattcagtagaagagtgagcacagcacacctagtagaggaatggtgaaatattctcaaggaagaaaatgatctgtgaaagttagggccccaaagacatgagtagagctcatgttcaaaaggaaaagaaaaacacaaccagggaaagagtcctgttctacaggccagaaagaaagtgggaaaatgagattcacagaaggtccagcataagccacacttggagtcctaagctctgggagcaagatggctgttatattagcttaatttg

SEQ ID NO: 164375 - DNA, 563 bp, Homo sapiens
tatcaccaaatggttctatagggtttccctgtttttatagacagtagcctccatagttcactaaggtgatattaccatatcatcctgcattataagcttaaggaatacatcccagaaaatgtaccagcactatctctattaaattattaatgttaagtcttgagtactttgcagattaaagcctgtggacattgcttttgaaatgcaaatgatgtgtaacaccactactgggggtagtataatgaagtaatataatctcaaggatcgggatgcttaagtgtagactttggaaatgaccattcagtagaagagtgagcacagcacacctagtagaggaatggtgaaatattctcaaggaagaaaatgatctgtgaaagttagggccccaaagacatgagtagagctcatgttcaaaaggaaaagaaaaacacaaccagggaaagagtcctgttctacaggccagaaagaaagtgrgaaaatgagattcacagaaggtccagcataagccacacttggagtcctaagctctgggagcaagatggctgttatattagcttaatttg

SEQ ID NO: 164376 - DNA, 571 bp, Homo sapiens
ccttttttgtgaggtctgcagcattcagtaaacctcccacagaaatttgctcactggagatggccccagcctcagtggatggactctgaggagtggaatcccctggggctggtctcttctctactgacctccccaggaaggcctttacttcctgtcagagagcagacgaatctgttggcccctccctcagaatgtcttacctactctayaccttgtgggcattcctccagttttccagcaggtggaagggaatagggaagtcatcgaccttccctattttctacttctgatatggaagccttttcaactgaaattacattctgatagccttttggatgagaattggaaagaggaagagaataaaatcagtgaactcagggtagttttgcattggaagtcaacgttacattttcagactatatctctctttcatgttctcctttcctcatataaatacaggcaggccatgtttccagaaaatcaatgctgaagtgagtaaatggtctgcttttcacatagagcgtcggcattgatgactctggcagcaaagttcacatttccagaaatgaag

SEQ ID NO: 164377 - DNA, 421 bp, Homo sapiens
tggctccatgagccatgcttccagagccaaaaggatgcccatgctggcaggcactaagcctgggtcacaactccacccctggcatctgtctggcccgtagaaggtgcttaataaatctctgtcagatggaaacwtggttgatgacaagtgcaaggctacttacaagaatcacagaaaaggtcatttgaaatgggaattatctcaggaaatacaagacattagttactctagttgattctggatctgtcaggctagtctggatttatccagatccaaggaatagtgatctcctttttcagttaggtgctgaaaactggaagacaaaaagcctaagtatctttaacaattatagggtgaaagggaatgaaataatttgagtgaatcacattaatctagtacatggcttactgagtttgtaatg

SEQ ID NO: 164378 - DNA, 421 bp, Homo sapiens
tggctccatgagccatgcttccagagccaaaaggatgcccatgctggcaggcactaagcctgggtcacaactccacccctggcatctgtctggcccgtagaaggtgcttaataaatctctgtcagatggaaacatggttgatgacaagtgcaargctacttacaagaatcacagaaaaggtcatttgaaatgggaattatctcaggaaatacaagacattagttactctagttgattctggatctgtcaggctagtctggatttatccagatccaaggaatagtgatctcctttttcagttaggtgctgaaaactggaagacaaaaagcctaagtatctttaacaattatagggtgaaagggaatgaaataatttgagtgaatcacattaatctagtacatggcttactgagtttgtaatg

SEQ ID NO: 164379 - DNA, 487 bp, Homo sapiens
gctttttctcttgtgagttttgagaagacttacttttcccaaccaaagaaaagattatttttggagtaatagaggttttccttgctgattgccactcccagtctgtgggcctggagagggcaggttagatttgargaacttataccttagtgttttttttcaaagcttgaaatgtgttaatattttcgaccctatcatccatgctgttcaagacacatatctggaagttgaggcctgcctgtttctccattcccatccatcagtcatcatctgttttctaaaagctttttgaatgtatccacatttattgccttgtttggtttagagtagcattctcaattcttaccttgcatcacaactatctggggacctttaaaaaattgatacccagatgtcactcttaaatacaatttatctggaatgatattcaacatctgtagtttcaaaagctcttcagccatctctaatatctagctaaagttgagga

SEQ ID NO: 164380 - DNA, 608 bp, Homo sapiens
aatatttcctaaaaatttgaactaacttttattttgcaggatakgctattgcaaagccttgatagtacttttgctctgcaaggattcattttttctttttctttttctttttttttttttttttaagacaaaatcttgctttgttacccagggtggagtgcagtggcgtgatcgtggctcactgcaacttccacctcccgagttcaagcaattctcctgccttagcctcccagtagctgggattacaggcaaccgccatcgtgcccggctaatttttgtatttttagtagagatggggtttcaccatgttggccaggctggtcttgaactcctgacctcgtgatccacccactgtggcttcccaaagtgctgaaattacaggcatgagccactgcacctggcctgcatggattcttaaatgagtcagtgacctgttaacactctgttaaccaccgtttcatcattcatttgtctaatttttaagttgatgagcaatttttgaattggttcaagaaattattaaaacagcttcacaaatcacctttacttttaccaagtgctgtattcacatgcaaagttttagatgtgttaatatttttcttctttgt

SEQ ID NO: 164381 - DNA, 606 bp, Homo sapiens
ttgaagtattctccaaagataacgattttgcttttctcaattttgtcctcttgattctcacacagtgctttctttagtacagacctacataccccaaaaacttctgttctgtgacttaaaaagtcaactctatgattagcatgattcctcttcagtcattactgaaattcttcctaggtggttacatttaagtggtaagaagcttcagtaatataagtcaaagaactcctaccttgctttgcatttcctcagtggccatctgataaagcaggaaggaaaaaaattaaaaatgaacctccccaggatttcatttctattgtggcttagctgcaaatttgaaaaataaaaataaaaataaaccctgaatgtaagcacttgtacgtttttgttagattctttcacaggactggtcaacatcttgacagatattawttggcgattcactggagacttcacagcacctgacctggtttgccgagtggtccgctatttgcaggtatgtcacaccttccaaatgtgatgagacaaactgataccagagttagcttttagatttatctaaggaaaatcatataaaaccttgcattcctatgcatcaaactgccc

SEQ ID NO: 164382 - DNA, 513 bp, Homo sapiens
agtactggctttagtggaatactcagttctccacatgggcctctctataggtacattttagtgtcctcacaacatagtagctggcttttccaagaataacctattcaagtgactgaggtggaagtggcaacatatttatgaactagtctcaaaggtcatacaccatcactttcatatgattattttggttgtacaaatcaacttggattcagtatgggaaaagaagaaccacaaaactaggaagtaaggattattttcracatgttggaggttggcaaccacactatcttcatatttttccaaagcatttgataacctatggtttctcccaattgttaactttaaaatgtcttcttgatttagaaatattcatgtcagtaaaattttttctaactgtatctacaataaatgttaagactatatataaaatatatcttttgacatagggaaaacgatagagaaagaaattctgataattctctcttctataaaggaagcaagaaaattggcaaa

SEQ ID NO: 164383 - DNA, 420 bp, Homo sapiens
atacaagttataggagttatagaaggagatgagagagacaaaaaaaatatagattatttaaagaaataatagcagaatagtttgcaaatctggggaaagatacaaatatccaggtgtacaagaaggtcagaagtttctaatcagatttaatgaaaataagactacaccaagacatattataatcaaactgtcaaaaatcaaaaacagagaaaatcctgataacagcaagagagaagaggcaaatcacatataagagagttataacaaggctagcagaaaatttctcagcaaaaaccttgcagaacaggagagactagaagaacatatgtaaggaatgaaaaacraactgccaaccaaaaatatttacccaacaaagctgtcctttaggaatcaagtagagagaaagatttccccagacaa

SEQ ID NO: 164384 - DNA, 579 bp, Homo sapiens
atcaatttgtcccattactagtgatgttattgtcagatttctccactgtaaagatactatttttccttttgcaactgacaagtattttaagagtacatagccatcctgatactccttaaactttcactcacagcacttaccatacagtgtagattcctgtctgaatcaatgctataaaggtttccaaatgatgattttctaatttcattatttcttctatacttattagcagtctctctactttaaggaagaaatttcccktctctcccatttttaaatttacatcataggttcttcttttattctgtgggttataatttgttgccatagttatttctttttatgcctagattgctgactggggtcagcaagagccctacaatttggtgcgtgtttctgttgacatgtttctcagcatttttgggcatgtcctcacttgccagcacaacatgatgttccaggcttatcttgtccttttcccagccccaggccaggaatcagccatctccaatgagccaagtatatttaagtatattaagcatatttaagagaaagggccacaggcataatcatggcggg

SEQ ID NO: 164385 - DNA, 570 bp, Homo sapiens
tgaggaaaaaagtcacatccaaataaaagcaaatttaaaaaaaataagaagagatagcttatctggatgagaaggaaccagagaaataactcggaatgtatgaataaaatagagtgctacaacacccccaaaggatcacactaactctccagtaatggattctaaccaagatgaaatatttgaaatatcaggtaaagagctcaaaatattgatttttaaaaagctcaatgagatccaagaaaaaattgaaaaccaacataaagaaaacaattcaggacatgcaagaagagatagataccactaaaataaaagaaacggacatttaaaaattattgaaggaaaaacaaaataaaagtgaaagcttcaacaataggctagaccaagtggaagaaagactttcagaactaraagacatcttttgaattaaaccagtaagaaaaatatacagaaaaatgaattttaagaaatgcctagtgcctttgataaatacgggattatgtaaagcacccaaacctacaatttataggtatttcaaagggtgaagaagaaaaagtatggaaaacctatttg

SEQ ID NO: 164386 - DNA, 385 bp, Homo sapiens
gaattcaccagcaaaattaagggctttctgtgtgaagagttttgtatttgttttgcatttggacagccttatattcagatacctcatttattttctgatgagctggttcccatttccccttgaaaacttctggtagattcttgaaacgcatataattccttagtgccaagacctaggtcttgaagaggtgagctggatgtgatcttaaaagcacacaaaactggaaactgtgaagggagccagggtctgagctgagaatcttgaacccaagaccacrtagggttagttacacaaggcccatggtggaagatgggatgggtgaacccaccccagacctccctgctcatttccaagagcctcacatgcttaggaaggtagagtaggt

SEQ ID NO: 164387 - DNA, 399 bp, Homo sapiens
tgaattcaccagcaaaattaagggctttctgtgtgaagagttttgtatttgttttgcatttggacagccttatattcagatacctcatttattttctgatgagctggttcccatttccccttgaaaacttctggtagattcttgaaacgcatataattccttagtgccaagacctaggtcttgaagaggtgagctggatgtgatcttaaaagcacacaaaactggaaactgtgaagggagccagggtctgagctgagaatcttgaacccaagaccacatagggttagttacacaaggcccatggtggaagatgggatgggtgaacccacccyagacctccctgctcatttccaagagcctcacatgcttaggaaggtagagtaggttagaggggtggaa

SEQ ID NO: 164388 - DNA, 190 bp, Homo sapiens
aaagagctttggggttcagaggataagaactagaatgtgagatgggaaacgaagtcaggagcctaggtaagtggacggagcaagacagctgagactaggtaaggctgccatgcratagagatggattccccagggctggaccaggtacttggtaccagctcatggtgcctcagctaattccataccccac

SEQ ID NO: 164389 - DNA, 409 bp, Homo sapiens
agttgagttgacaacttatatccacagaagaatgtttattgtagctttattcataatcaccaaaaactggaagcaaacaagaggttcctcaaaagctgaatggataagctgcggtacatccattaaatgggatattattcaatgatataacaaaatgggctatccagccatgaaaagacatggaggaatcttaaatgcccattgctaagtgaaagaagccagtctgaaaaagctacrtactaaatgattcaactatattacattctcaaaaaggcaaaactgtagaagagcaagaaaccagtgttgccagagatttggagtaggaaagagatgaatagataaaagcagtggatttttaggacagtgaaactcttctgatattataatggtgggtacataacattatgca

SEQ ID NO: 164390 - DNA, 512 bp, Homo sapiens
agcatttcatgtgtttctaacttcattgcttaccatagttgttattattctatgctcttccctcttcttgaattcttaattttaattcaattctcaattagctgaagtatgccaggaagactataaaatattatattttcttccttcttatatatctgagaaaactgttctgtgccttggcagagatatcatatttacaaagttcttgaatcacaattttttttcaaaactctgaacatgttgttatagtgttttctggcattactttttgtgggaaagaggtatgataatttaagatgcatttcttttaggtaacttttawttttttttaccctgccttaaatgcctgaagatggttaatctctgaaattaaatactcttttgattgtatctcaaagtcagcatctttttatcaacattgactgctcttctggacactcttatttatggctcttcctcctgctccagattctgaactgtgcctgtcacctccctcaagacagccacagagc

SEQ ID NO: 164391 - DNA, 713 bp, Homo sapiens
accttccttcagagggctaatttctgttttctctctcggatgcattctatagctcaaacagcagatgcattctcttgcagtggtgaataaaggccattcttggacaggcccaattgctctactaagttagaaggaacctcctttttagctgacatataatcaatcagcatgcattcggtttagagcartgaatcttctgtaagtgacaagagactggatttgttaattttgctttcagcaaatgtaccttaatatggatatttctaagattcttggcagcaatataatttaaaacatggtttagtgtgacaatacaagagcatgatgttctgattctgataaaattttgtcacatatgagagaaggaagaaaaaaaaaggttagtagttcagataagagaaaataattggctgaaaagcttttatatttgagaatgatataaaagtggaaagtgaaatcattgacatgaactgagaactttgacggacctttactctggaaccgcaattgcccagctgtgcctgacatgatcccatctgaagtcaggggtcatgatataaacctctcatctctgattttcccctaaccagggctccaatggacatctcagaattcctcagaacccccacactctccaacagctgactttgatactttgcctgctacgaatcagggcagcaatttgatcacttctcatatggtccaatacatat

SEQ ID NO: 164392 - DNA, 591 bp, Homo sapiens
ttttaaatggacagaagattttagtagatatttttatcaaagaagatatacaaataactaataagcacctgaaaaaaagctcaacattattggctattaggaaatgcaaatcaaaaccacatgaaatwacacttactcatcactgaaatggctataatcaaaaaaacagacaataaaagtgatgtcaatgatgtggaaaaactgaaacgctcattaatacattgctggtgggaatgtaaaatggtgtggccactttggaaagcagtatgccaatttcttaaaaattaaacacaaagttaccatgcaaatcagcaattctactcctagtagtctctccaagagagatgaaaatgaaagatggccacacaaagacttgtatgtgaatgtttattatggataatacccccaaagtggaaacaacgcaaatgtctttcaactggtaaatggataaacaaaatgtgatatagccacaaaatggaataatttacaacaataaaaagtaatacagtactgatataggccacattatgcatgaacttcagaaaattatgctgcacaaaagaaatccaacacaaagtccacatattttat

SEQ ID NO: 164393 - DNA, 591 bp, Homo sapiens
ttttaaatggacagaagattttagtagatatttttatcaaagaagatatacaaataactaataagcacctgaaaaaaagctcaacattattggctattaggaaatgcaaatcaaaaccacatgaaattacacttactcatcactgaaatggctataatcaaaaaaacagacaataaaagtgatgtcaatgatgtggaaaaactgaaacgctcattaatacattgctggtgggaatgtaaaatggtgtggccactttggaaagcagtatgccaatttcttaaaaattaaacacaaagttaccatgcaaatcagcaattctactcctagtagtctctccaagagagatgaaaatgaaagatggccacacaaagacttgtatgtgaatgtttattatggataatacccccaaagtggaaacaacgcaaatgtctttcaactggtaaatggataaacaaaatgtgatatagccacaaaatggaataatttacaacaataaaaagtaatacagtactgatataggccacaytatgcatgaacttcagaaaattatgctgcacaaaagaaatccaacacaaagtccacatattttat

SEQ ID NO: 164394 - DNA, 510 bp, Homo sapiens
tattttatgatttaatttctacaaaatgtctagaaaagataaatctgcagagacaaaaagctgattagtggttgcctgggactggagtggatataaagaatgactacaaatgggcctgagagatactatttgcgtgagagaaatgttctaaaattggattgtggcgatggttgcacaactctgtaaatttactagaagttaattaagttgtgtacttaaaatgggtccccggctgacatgtatactatggtaacgctatttagaaaaacatgtcgccctgactttacagctcggcaaarataatgtacaaatttaagtagatatcacatgcaaaaataaagcttattactttggaaaaaattacctcaaaaatatgagaatagtttgagctgcgggaatttttttaaagaaacagactctaaaatgataatattgagcattgactatattccaggcattattctaagtgctttatatcattttgtcctataaatgagcctctaagtttga

SEQ ID NO: 164395 - DNA, 510 bp, Homo sapiens
tattttatgatttaatttctacaaaatgtctagaaaagataaatctgcagagacaaaaagctgattagtggttgcctgggactggagtggatataaagaatgactacaaatgggcctgagagatactatttgcgtgagagaaatgttctaaaattggattgtggcgatggttgcacaactctgtaaatttactagaagttaattaagttgtgtacttaaaatgggtccccggctgacatgtatactatggtaacgctatttagaaaaacatgtcgccctgactttacagctcggcaaagataatgtacaaatttaagtagatatmacatgcaaaaataaagcttattactttggaaaaaattacctcaaaaatatgagaatagtttgagctgcgggaatttttttaaagaaacagactctaaaatgataatattgagcattgactatattccaggcattattctaagtgctttatatcattttgtcctataaatgagcctctaagtttga

SEQ ID NO: 164396 - DNA, 599 bp, Homo sapiens
ccagatctcatgagaactaaaatcaagaactcactcattactgcaagaacagcaccaagcccttcatgagggatccacccccatgatcgaaacacctcccaccaggccccacctccaacattagaggtcacatttcarcatgagatttgaaggggacaaaacatttgaaccatatcaatgcccacaaggcagcattggtgaatctgatttaagtcacatggggaataatggttagctgcacgaagccctttctggaacacaaagcagtgggggcatttattaaccttttctgttttccaggatcacagggttctggtaaagttcaaacttgtcagaggatacaaggagaaaaggtgcagtgtctccattcaggaatttggagactaaagaaagagtcaaggaaaaattgttcacatttttaaaaatagtaacgattaagcagaagacaagaaggaagacaattagatctcatttgatttccaataccttcatgatgcaggcaccacagtctctcagttaacagatgagaagaaagaggcttagaactgttaagtaaataatccagggactcacagacaggacatagcagagccaagttt

SEQ ID NO: 164397 - DNA, 599 bp, Homo sapiens
ccagatctcatgagaactaaaatcaagaactcactcattactgcaagaacagcaccaagcccttcatgagggatccacccccatgatcgaaacacctcccaccaggccccacctccaacattagaggtcacatttcagcatgagatttgaaggggacaaaacatttgaaccatatcaatgcccacaaggcagcattggtgaatctgatttaagtcacatggggaataatggttagctgcacraagccctttctggaacacaaagcagtgggggcatttattaaccttttctgttttccaggatcacagggttctggtaaagttcaaacttgtcagaggatacaaggagaaaaggtgcagtgtctccattcaggaatttggagactaaagaaagagtcaaggaaaaattgttcacatttttaaaaatagtaacgattaagcagaagacaagaaggaagacaattagatctcatttgatttccaataccttcatgatgcaggcaccacagtctctcagttaacagatgagaagaaagaggcttagaactgttaagtaaataatccagggactcacagacaggacatagcagagccaagttt

SEQ ID NO: 164398 - DNA, 575 bp, Homo sapiens
aaatatgggcaaagggtacatacatgtggcatagtcatagaagataatatcataaagcagttaggtaaatatacagtagattctcattatgtgtggtagttatgttctataaagttgccatgaacactgaattagtaaatacygaatcattgcccctagaggaaatacaggttcctgtgagcctctggtcacatttttctcaaatgatcaagacataatgttgttttgtgtgtctttctgtgtttaaatacaccttatttaatatacttgttggtttattaacaccaaactcacaactaacagtgctgtaactcatgcctgaacaaagcttatcttaaacacctgtcctccacttatcctccggaagtcacatcacagccttcttgtgctttagaaacattagacagcccttcagcatacacttgggaaccattttaaagagggaaattatgaacagaaagcacaacatgtaaaaaaacatgactaaatagaacacgaaaaggacacctgtttacaggatgacagctgtcaagaaggagggtcatcaccttatttgaccttggctgagaatatgc

SEQ ID NO: 164399 - DNA, 610 bp, Homo sapiens
ggtagaatgttactgctgttcaccaaatactggtaaagccatccttccttctaggcacatcctagggttgtactcactgtctgattgtgggcctggggatggaggtgcggcatgtgattagctctggccaatgggttctgagcagaaggaatggagttacttctggaccaccagagcatttcattgttactgcaaggtcctacagaactctttccttttccttgggtayaataactggttacatttgcgaggggctgctctgtcaggccaggtgcctgagtgaccagcaagagcagagtctccctgttaatctaaattgggcaggcagcatgagcaagaaaaaaaaatgttgtcttaagccattaagataatgggattgtttattactgaagtataaccaagactattcaggctgaatttttattctatagtgttgtgagcatttaatgaagtaatatgagaagtatttttcagtgtttagcatagagtaaatacttaagtcacacctacctatattattattatatattattattcctctctaataaattagaatactgaaaatataaaatccaagggaagctccgacttagaaggagagagcagcatg

SEQ ID NO: 164400 - DNA, 610 bp, Homo sapiens
ggtagaatgttactgctgttcaccaaatactggtaaagccatccttccttctaggcacatcctagggttgtactcactgtctgattgtgggcctggggatggaggtgcggcatgtgattagctctggccaatgggttctgagcagaaggaatggagttacttctggaccaccagagcatttcattgttactgcaaggtcctacagaactctttccttttccttgggtacaataactggttacatttgcgaggggctgctctgtcaggccaggtgcctgagtgaccagcaagagcagagtctccctgttaatctaaattgggcaggcagcatgagcaagaaaaaaaaatgttgtcttaagccattaagataatgggattgtttattactgaagtataaccaagactattcaggctgaatttttattctatagtgttgtgagcatttaatgaagtaatatgagaagtatttttcagtgtttagcatagagtaaayacttaagtcacacctacctatattattattatatattattattcctctctaataaattagaatactgaaaatataaaatccaagggaagctccgacttagaaggagagagcagcatg

SEQ ID NO: 164401 - DNA, 568 bp, Homo sapiens
gcaagccaataaaactagtgaatccccaaaaaagcactgaaattaactcactatttaaataaagaaaatgcattgtactaagcatttcactatgcatatcaaaacatcatattttacactctaaatatatacaataaaaatactaagtagaaaaaaatgcattaaaaacaaatgataattccacaataattctccaaaatactactttaagaagacaactttaaaacaaatcaatccaattttaaaactttaaaaacagyctagtgaaataattttaacaactgtaaatacctctggaaataatatcatcctagacttcaaatcactgtctacaaaacaaatagtacagaatttggccaaaccaagtgatacctgaatgaatactttgttaataaaagtttaaatgaaatactattatctctctcttccttccctgtccattagtctattaccaccactgttctcttccattccccttcaccctccctttcccgcatttaaatttgtattaacctctgcattacagctttttttttcctagtgaattttacttattttggtcttgttc

SEQ ID NO: 164402 - DNA, 538 bp, Homo sapiens
actagaaatccattattcctattagcctcagcttgagtatcactgtttgctttctaaaacaagctttttatatggttttgtaattattccttaagaaatacttgagcttccttacataaaacaactcacataccacctgttatttccatacattagttttttaaagaggaatacaatcaagaatacaatttaaaacttgattttccatctgttttttctttgcaccttcctctttcctctaacaccccacctgcaccacatccttcccccayttcaactgtctcctgccactcagtagcagaagaagtttgttatggtccagtgtatgcctcagtgttcagacagccattatgtaagactgtgtagccattattgaatatatatatgcgcacacacacatataaatataaacctcaggtgagaagaaaggattctttatttcccatatccaactaataatatgtatatcagtaaggataatactttattatcttgaggggctattgaatggtggaaaaggtatggacactggcattta

SEQ ID NO: 164403 - DNA, 417 bp, Homo sapiens
tggaaatgaggaacttactgagaactggagtaaaggtcacccatgttatgcgttagcaaggaacttggctgcactctgctcatgctttagggaatttgtggaagtttgaactttagagtgaagatttagggtatctggtggaagaaatttctaagcagcaaagtgttcaaaatgtggcttatttctaacaacctatgctcagatgtgagagcaaagaaatgactaaaagttggatttatatttaaaagggaagcagagcataaagtttggaaaatktgcagcctggccaagtgtcagagggaaaaaaaaaaagctttttcaggagaagaattcaagcaggctttggagcaaccacttgctagagaaatttgcgtgactaaaaggagccaagagctaatagccgatacaatgagcaaa

SEQ ID NO: 164404 - DNA, 260 bp, Homo sapiens
ttctaacaacctatgctcagatgtgagagcaaagaaatgactaaaagttggatttatatttaaaagggaagcagagcataaagtttggaaaatttgcagcctggccaagygtcagagggaaaaaaaaaaagctttttcaggagaagaattcaagcaggctttggagcaaccacttgctagagaaatttgcgtgactaaaaggagccaagagctaatagccgatacaatgagcaaaaggcctcaagggcacttcagagatc

SEQ ID NO: 164405 - DNA, 411 bp, Homo sapiens
ggagtaaaggtcacccatgttatgcgttagcaaggaacttggctgcactctgctcatgctttagggaatttgtggaagtttgaactttagagtgaagatttagggtatctggtggaagaaatttctaagcagcaaagtgttcaaaatgtggcttatttctaacaacctatgctcagatgtgagagcaaagaaatgactaaaagttggatttatatttaaaagggaagcagagcataaagtttggaaaatttgcagcctggccaagtgtcagagggraaaaaaaaaagctttttcaggagaagaattcaagcaggctttggagcaaccacttgctagagaaatttgcgtgactaaaaggagccaagagctaatagccgatacaatgagcaaaaggcctcaagggcacttcag

SEQ ID NO: 164406 - DNA, 548 bp, Homo sapiens
agagaaacaatccctcatacattgctggtggaaatgtaaaatagtaaagacagtctagaagataatttaggcagtttctttaaaaaatctattcttaccatattcttaccagctatcataatcttgggtattatcccagagatatgaaaacatatatacatacaaaaacattcacactattgttcatatcggcattgtttgtaatagccaaaagcagaaacccctgaaatttctccagtaggggaataaacaagctatgatacatttatagcgtggaatactattcagcaatgaaaagtatcaagytatcaatatgcactatgcaaacttgaatggatgtcaagggcatttatgctgagaaaaaaaaagtcaacataacgtttgattttaattgtataagaaaacatagacttgtgttatatatgattctactgataaaacactcttgaaatgacaaaattatggagaaagggaacacatcagtagctgctagtggtcagggatttaggctggagggaagaattgggtgtggctataaatgggtaaca

SEQ ID NO: 164407 - DNA, 604 bp, Homo sapiens
tctggtgagggcagcttcctgggacactgacagccatcttctagttgtgtcctcacatggtaggaagggcaaggggtctctctggagtttattttataagggcactaatcccatccatgatggctctgccttcatgacctaatttcctcccaccagctccatgccctaacaccatcaccattagggtgaaatttcaacatatgaatttgtaaaggacataacatctagtctgcagcagaccttctagattgagagaaaagagtcagttttattgttaaggatgattttggaaccttgctgagaattgtgtcctcagtgggcttcctcaaactctgagtttgactcaggcccacaacctccccgagtccctgacatgaatakaaagttgtggactttcactgcagggacatgctgcttatagcattgatgctaacaaagcagagataacactcgaggcaagaaaaggagggagggagagacagagaatggatcacaccaagcacgcttagtctcttctctgagtaaacgagccagtgaacacacagagatgcaccagtggcaaatgagtcagtacattactaaccatctattgacaccctcctgt

SEQ ID NO: 164408 - DNA, 573 bp, Homo sapiens
taaattgcctccttttagatttatacttttatgattttgatctttagagattgtagcgtttgggattgtggattgtgtctttcaggattataattaactctckgtaaggacatattccattttgtttatgcattcctcaattgatggacatttgagtcgtttccacattttgaccttttttcaagggtatatacctagaagtggttactgggtcatacagtaactatatgtttatcattttgggaaactatcaaatcactttccaaagttggttcattattatacattcccaccagtaatatctggtgcttctaatttatccacatcctagccaaaattcattattgcctatcctcaaaattgtagtcatgctagtgggtatgaagtggaaactcatggtagttttcatgcacattttcctaataattaatattgagcatctttgtgtgtgcttattgtccctcatatcttttgccagacaactgtctatttagattcttttctcattaaaaatatcaagttatctttttaatattgaggtttaaaagttatttatatattctggatactaga

SEQ ID NO: 164409 - DNA, 464 bp, Homo sapiens
aaattagatccattatttccctagacttgtgacttgggagttatgcaaaggaacctcggaaagaataaccctcaccacgtcgtcacgtacctgaacccatcatgtacctgaggctttcctgtgcctcatcttatgagtcatgttttgttattctccaagcaataatgatcctatttttaatttttaatgtacagctatgaaaccaccattgcaaaattgtaactgagacagtgaaagagatcttacctaactgactccgtcttgcttctaacctccaaactccttgttcagcctgggggtaggttgaactaactttgagaggaacttagtttatagtttaaaacaaagattatattaattacaggcctgtccyaagacaaatccctttcttgcttgaggactagatgaacaaattagccataaaattagaaattatagtttaggagtcatgtagctggatgcta

SEQ ID NO: 164410 - DNA, 464 bp, Homo sapiens
aaattagatccattatttccctagacttgtgacttgggagttatgcaaaggaacctcggaaagaataaccctcaccacgtcgtcacgtacctgaacccatcatgtacctgaggctttcctgtgcctcatcttatgagtcatgttttgttattctccaagcaataatgatcctatttttaatttttaatgtacagctatgaaaccaccattgcaaaattgtaactgagacagtgaaagagatcttacctaactgactccgtcttgcttctaacctccaaactccttgttcagcctgggggtaggttgaactaactttgagaggaacttagtttatagtttaaaacaaagattatattaattacaggcctgtcctaagacaaatccctttcttgcttgaggactagatgaacaaattagccataarattagaaattatagtttaggagtcatgtagctggatgcta

SEQ ID NO: 164411 - DNA, 594 bp, Homo sapiens
taatgcttatttttattctggtttacctagtttctaatctagcatttattttcttccccaggatcccatccaggagagcaagttacatttcttcttgtctcttaggctcctcttggctgctacaatttttcaggctttctttgcttctgatgaccctaatggtcttgaggggactgggcaggcattttacagaatgttcctcaatttttatttgcctgatgtttttctcatggttagattgcatttatgggtttggggaaggaagaccataaagcaacattttcatcacattatttacatawtcttcccccttgacatagaatgttgagaaaggagagaaactttttatctgaggagtgtgagcccctttaaattatcaggcccagacaggcattgaggccgcttgcttttgaggccgcttgctttgagggctctagagtgactgacaccaagcagtcataaaattaacccaacagtgccatatgctgaacatcgtaactcacaccgtatagtgagtgatatacaaccaaccactaatcaacgccatttctgtaaaccaacaagaattcctgacaaacgactttgtacagctca

SEQ ID NO: 164412 - DNA, 583 bp, Homo sapiens
cacatttagatctatgaatatttttagttaatttgtacatgtggattaagatttggattgcaatkatttagtttcacatatatgtatatacatatggatctacttctgaatttctattatttttcttcatctattttttctatttttttgctatttatcattctgtcttgaagactgcagctttataagaaagctttgaactcaaaagtcttgcaaccttgtgaaaatcacttatttattctagtatcttttcttttggtatattgcattgggttttctagataggtgagcaagtcatctgcaaaaaacacaattttactccattctaaacatgttaacatttctttccttggcttattgaattgattggaacctccagttaccgtgtggaatagaagagatgagagaaaacatctctatttgttcctaatcttaggaattaaacattcgttctttcatgctaaggattcttagttgcaagttttttgaagatgcactttataaagttgagaaagacgtattgtattcttattttgttgtgagtttttatcatgaaaggatgataatttttttaaaatgatta

SEQ ID NO: 164413 - DNA, 377 bp, Homo sapiens
gttttagcataaatgctggtcatatattgttctgaacttatataaccaatatatagaattcaaaagacaaatacacaccaaatatgttatacaacttatcttctagcaataaagcttgtgtagagaaaacaagccctctttcaatagattcattatgactaagagtattttagaaatggcaaaacaggaaattgtgcactttcccctcataaactgtaatgcaaatttcatgactgaacatcagtgaaawccttttgatatgactgaatttgcaacgttctgctgttacagctattcaaggtaactacgtgaagttagaactgtctctggtgatgaaaatgattttcaatatactttcatgtataaaactatattga

SEQ ID NO: 164414 - DNA, 673 bp, Homo sapiens
ttaattattgttcttagttttaaatttcctttaatattatctatcagaatctcagggtctaaatgtcgcattcactggtgagctttaaccatrtgaagattcttgcctcaaaactcagggtgactaccaacacatgcatttcaaacctacacgattttaagagttcagaacccagtaaacactaaatacagctcttcatctcttaatttatattcacaagaagaaacatcatatattttgtctttgatcaatcaactgtatccaagcttggagaaacagtcaggtgcagagatgtgggaagctgtgcatctccctgagcagggtgtctggttggcaggtctcaggaaagaaagctgcctaggaagacctgaaacatgcctagtgtctgctgcagtccctctgattctaagcatgcatattgtttaaaatcttccattgattgcacatggttactgatgttaatttagagttttatttttgaaatcactatttttgaaaccttatatgattccaggcacagtaaacgaaaaggggctatggaatatatcaaggcagggaaatgctgtgctagggtctccagaattggaggaagttgagacctactctgagctgagagaggtcatttgtagtgggtgcttcaattttaacaaaatcaaattaaaaatggcttata

SEQ ID NO: 164415 - DNA, 673 bp, Homo sapiens
ttaattattgttcttagttttaaatttcctttaatattatctatcagaatctcagggtctaaatgtcgcattcactggtgagctttaaccatatgaagattcttgcctcaaaactcagggtgactaccaacacatgcatttcaaacctacacgattttaagagttcagaacccagtaaacactaaatacagctcttcatctcttaatttatattcacaagaagaaacatcatatattttgtctttgatcaatcaactgtatccaagcttggagmaacagtcaggtgcagagatgtgggaagctgtgcatctccctgagcagggtgtctggttggcaggtctcaggaaagaaagctgcctaggaagacctgaaacatgcctagtgtctgctgcagtccctctgattctaagcatgcatattgtttaaaatcttccattgattgcacatggttactgatgttaatttagagttttatttttgaaatcactatttttgaaaccttatatgattccaggcacagtaaacgaaaaggggctatggaatatatcaaggcagggaaatgctgtgctagggtctccagaattggaggaagttgagacctactctgagctgagagaggtcatttgtagtgggtgcttcaattttaacaaaatcaaattaaaaatggcttata

SEQ ID NO: 164416 - DNA, 567 bp, Homo sapiens
  misc_feature (1)...(567): n = A,T,C or G
nttactaggttagcccccgcccgccctgcctctccgccccgcccccccgtcccccaaactgtcattgtattctctgccaagttttggttgtgaaatcaagctttcatcttgttttacatcctggggacatggccagtaactacttggcagggctttgtttagcaaccctaccttagtggatgagcactctcargttagatatctgcatagttgcctagccctgtcttttaaagggccctacacagagactgggttttcttctgcctgtgtgtgttgtgtgtaatgtctgtaaaaagagctctaattaatttggtttaaagaaaggcaattgcttgcatctaatatttttcaaagggaagataaaagctgtggtatctttcagttcatgtgactttactcgttaacaaatataaacagccctaaagactattggtaaaatgcaggtcagatgcaaggtttgctatgtgttttgaagttacaaactgctttttgggttttgaaaactatttgacttgccggcttcacaactggtaaggctaggggacctatggaactaaccatgaaggc

SEQ ID NO: 164417 - DNA, 567 bp, Homo sapiens
  misc_feature (1)...(567): n = A,T,C or G
nttactaggttagcccccgcccgccctgcctctccgccccgcccccccgtcccccaaactgtcattgtattctctgccaagttttggttgtgaaatcaagctttcatcttgttttacatcctggggacatggccagtaactacttggcagggctttgtttagcaaccctaccttagtggatgagcactctcaggttagatatctgcatagttgcctagccctgtcttttaaagggccctacacagagactgggttttcttctgcctgtgtgtgttgtgtgtaatgtctgtaaaaagagctctaattaatttggtytaaagaaaggcaattgcttgcatctaatatttttcaaagggaagataaaagctgtggtatctttcagttcatgtgactttactcgttaacaaatataaacagccctaaagactattggtaaaatgcaggtcagatgcaaggtttgctatgtgttttgaagttacaaactgctttttgggttttgaaaactatttgacttgccggcttcacaactggtaaggctaggggacctatggaactaaccatgaaggc

SEQ ID NO: 164418 - DNA, 495 bp, Homo sapiens
acatctgcaactagatctggccttggaccagaggcactgtgatctttagttatggctttacgtctcctgctcatgctccaaggtgtatagcagtgccaccaaattgagtctccttctaytctgcttaaagattaagaaaggatgttgccacataggaatagaattttaaaactcatgatgttcccaggtcatttggcttctggataccgtcctcatcatgaaacaccctgtgaattctctctgcattctgctagagctggggctggatctcatgaacacagcaagtaaacaaatgactcagacagcaggagtccaatatcctcaatagtgtggatgggcctcatttaatccattgaaaggccttaaaagtcaaacactgagatttcccagagaagaaattttgcattaagatggcatcattaatcctgcctgagtttccagcctctaccactttcaaacttgccatcccccacaatcatgtgagacaattccttt

SEQ ID NO: 164419 - DNA, 495 bp, Homo sapiens
acatctgcaactagatctggccttggaccagaggcactgtgatctttagttatggctttacgtctcctgctcatgctccaaggtgtatagcagtgccaccaaattgagtctccttctattctgcttaaagattaagaaaggatgttgccacataggaatagaattttaaaactcatgatgttcccaggtcatttggcttctggataccgtcctcatcatgaaacaccctgtgaattctctctgcattctgctagagctggggctggatctcatgaacacagcaagtaaacaaatgrctcagacagcaggagtccaatatcctcaatagtgtggatgggcctcatttaatccattgaaaggccttaaaagtcaaacactgagatttcccagagaagaaattttgcattaagatggcatcattaatcctgcctgagtttccagcctctaccactttcaaacttgccatcccccacaatcatgtgagacaattccttt

SEQ ID NO: 164420 - DNA, 576 bp, Homo sapiens
ataaatctcaataactataaagttatatctgggtatgaaatcagaagtttgggacttgaataccaactatwcaacttactatgtggccatagccaaacaatataatgtctcaactttcatcttctacaaaatggggataagaaaactgcatttacccgaaggaggtttttcgagcaaaataaagttgttgtaattttatgaaattatttttgctgagtgtttaatatggacaatacactacgctgagcacttttactacttaattcttaaaagagcaatataaggtaaaacatattactagtcctattttacagatgctaaaatgtaggcatagagagtgaaactatatatttggtcaaatagttagatatagatttagtttccatgcatttttgaatccagagtctatgacatcacccataacctacaacacttctttagtcctataaaggttgcagaagtgtatagataaaaatcatctttaatattgttaataggaataatagaaaaaaagtaaatagaaaaaaatttcaaaaatcgtaagagaaaggatatatgagtacaagttcaaagtac

SEQ ID NO: 164421 - DNA, 366 bp, Homo sapiens
tgatcctttcccatgtctaaatataaacactctacatcaccagcagttgtggacaataccattgcactttttcttttgagatattttaaatctgctatgcacacttttattattattgaaaattctagattggagagrtgatggtgagatagcctgataactttgaatgatcgctttaggttagtatgaaatacagtaagatattttgccaccattggccactgcagctattgggaaaaaatattttctatattttaggttgaaaaaagacaagaaatggattgattgttcttcatgagtaccctaaaaatatcattagaaacagtctgggtttggaaaacattacagtgattttgaaagtgaacc

SEQ ID NO: 164422 - DNA, 619 bp, Homo sapiens
tgaaacatgtatatgtgcttaacttgcgaaattgtttgttccctgtttgacttacaggtgtgtttctcccttatgtccgcccttataaacatctaggtctttagaatatatttctcagatgctcagttaaagcgtatcttgtcatttagatttcccaggcaaagtcaggtgaggctcttttgggctttagcaaaaatctactctggttcttctaattgatgatgcataggtggtatagctattatttctgcctgatagaactcatgwatgaacgaaggtgatttttaaaaactataatttaaagctgttcttagttgttctccaactgaaagaatatatgaggaaacgcagttcccagaatttcttacatcttttccattaccttctgctccctttctatctgcaaatctatatgactttatattgcagaatgtagcctccaatcttcagccccttcacttctagcacttaggttagtagttttcataatgaaacaagagaggagaagagtgtgtaagttgggactggtttattgattgactctttagttgatggaccatggatctgtacaaagtcaacctcaggtttcttctcagttgagcctctttacagtgtaact

SEQ ID NO: 164423 - DNA, 619 bp, Homo sapiens
tgaaacatgtatatgtgcttaacttgcgaaattgtttgttccctgtttgacttacaggtgtgtttctcccttatgtccgcccttataaacatctaggtctttagaatatatttctcagatgctcagttaaagcgtatcttgtcatttagatttcccaggcaaagtcaggtgaggctcttttgggctttagcaaaaatctactctggttcttctaattgatgatgcataggtggtatagctattatttctgcctgatagaactcatgtatgaacgaaggtgatttttaaaaactataatttaaagctgttcttagttgttctccaactgaaagaatatatgaggaaacgcagttcccagaatttcttacatcttttccattaccttctgctccctttctatctgcaaatctatatgactttatattgcagaatgtagcctccaatcttcagccccttcacttctagcacttaggttagtagttttcataatgaaacaagagaggagaagagtgtgtaagttgggactrgtttattgattgactctttagttgatggaccatggatctgtacaaagtcaacctcaggtttcttctcagttgagcctctttacagtgtaact

SEQ ID NO: 164424 - DNA, 551 bp, Homo sapiens
tgaaggtggggcttcagcagagacctgcccctttctgcccaggagcctgtctccctcctgctgccatctatatgtcatctgcagcacccaagttgttcatgccaaagggcacctgcaggccagtgctgagctaccttcagccccccaaacccaaagtctggaggtggccaaggtggtagggggctggcgtgtcagtgccaccccaaacatgggcacacctggtcaggtcacaayagtgcctgggcttgaccacaactttgctctgaaattggagctggcactgggaacagggataagccagggattgggcatagccacttctgagcctgtagggggaggggggtcttcctgggcccccagtagtgtagggatgcctgggtccatggccacggctaggtggctgcagctgaacccagaaggatgaggcccctgtcatgccaactctgaagtgggcagggctcctgcctgtttctggctcccactggctctgcagagcactcagctccagtcacttctccctcgctgcagctggtgtctttgcagtgccccca

SEQ ID NO: 164425 - DNA, 551 bp, Homo sapiens
tgaaggtggggcttcagcagagacctgcccctttctgcccaggagcctgtctccctcctgctgccatctatatgtcatctgcagcacccaagttgttcatgccaaagggcacctgcaggccagtgctgagctaccttcagccccccaaacccaaagtctggaggtggccaaggtggtagggggctggcgtgtcagtgccaccccaaacatgggcacacctggtcaggtcacaatagtgcctgggcttgaccacaactttgctctgaaattggagctggcactgggaacagggakaagccagggattgggcatagccacttctgagcctgtagggggaggggggtcttcctgggcccccagtagtgtagggatgcctgggtccatggccacggctaggtggctgcagctgaacccagaaggatgaggcccctgtcatgccaactctgaagtgggcagggctcctgcctgtttctggctcccactggctctgcagagcactcagctccagtcacttctccctcgctgcagctggtgtctttgcagtgccccca

SEQ ID NO: 164426 - DNA, 554 bp, Homo sapiens
gcttattattcatgtacacacacacacatatatatatatatcacaatttgttcatccattcatccattaatggacatttgtgttgtttccatctgttggctattgtcaatagggctgttaattaacatttgcaaaatattattagtttgagtaacttcttttcattttgtgggtatatacctaggagtggaatcattaggtcaaatatcaattctatgtttaactttttaagggcctgccaaaatattttttcgacagcactatgttttgaatgtcctttccaaaactcatgttgaaatttaattgccattttgatggtattaagatggggatgtttaagaggagatttgtttatgagggtaaagccctcatgaatagattaatgctgttatcatggaaatgggtttgttatcaccagactgggctcttgacaaaaggattaatactgtccccattttttctctccctatgccttccattatgtggtgaccctcactaggtgctgacactatgctcttagaytgcctagcctctagaattgtgagccaaataca

SEQ ID NO: 164427 - DNA, 556 bp, Homo sapiens
ataggtttgtttctgaactctcaattcgattccattaatatataagcttatctttatgctacgaccacactgattttattacagttgctttacagtaaattttgtaattaggaagtgtgagttctccaattttgttctgcattttcagaattaatttggttatttggggtcccttgaaaaccttaaaatccaatagatttggattttagaacaggtttctccatttttgtaacaaacaccattaaaattttaataaggaatgtgttgaatttgtatatcacatttttagtattgttatcttaataatgccaagtattccaatatatgcataaakgatatattttgacatatatgtgtatctttgacttttttcagcaatgttttccagttttcagtgtacacgttttgtgcctaagttcattcctaattatgattttattctgttgtaaattgaattaattcattttcttttcaggctggtttttaataatgtatagaaatataactgatatatgcttgttgatttcatatcctacaagctggctaaatttgttta

SEQ ID NO: 164428 - DNA, 556 bp, Homo sapiens
ataggtttgtttctgaactctcaattcgattccattaatatataagcttatctttatgctacgaccacactgattttattacagttgctttacagtaaattttgtaattaggaagtgtgagttctccaattttgttctgcattttcagaattaatttggttatttggggtcccttgaaaaccttaaaatccaatagatttggattttagaacaggtttctccatttttgtaacaaacaccattaaaattttaataaggaatgtgttgaatttgtatatcacatttttagtattgttatcttaataatgccaagtattccaatatatgcataaaggatataytttgacatatatgtgtatctttgacttttttcagcaatgttttccagttttcagtgtacacgttttgtgcctaagttcattcctaattatgattttattctgttgtaaattgaattaattcattttcttttcaggctggtttttaataatgtatagaaatataactgatatatgcttgttgatttcatatcctacaagctggctaaatttgttta

SEQ ID NO: 164429 - DNA, 495 bp, Homo sapiens
tatttacaacaacatggatgaaactggagatcattatgttaagtgaaataagccaggcacagacagacaaacattgcatattctcacttattgtgatatttataaatcaaaacaattacatttatggagatagaaagtagaaaggttgttatcataggctggtaaatgtactgggtgtgtggagtgggaggtgggrattgttaatggctacaaaaacataacttgaaagaataagatctagtatttgatagcacaacagagtaactatagtcaataataatttaactgtgaactttaaaataaataaaaaagtatgattggattttttttttgtaatggaaaagataaatgcttgagtggatggatacccagtttcccatgatgtgcttattaagcattggatgcctatgccagactatctcacatatgccataaatatatatgcctactgtatacccacagaaataaaaataaataataataataaaaaagaat

SEQ ID NO: 164430 - DNA, 549 bp, Homo sapiens
ataagtgcctatttatgataaaaaaaagacattgcatttataggtggaagacatgaatggaaacatgttccaattaacagcaatcaggttttgtattatccacagttccaggcatccactggagattttggaacatatccccatggatatgtgggaactacagtacattgttacactatgcatcaaaaattcgctgagagtaaacatgtaaacctaatagatatcaaaacactgcagatatcatttagcctttattaggtataataaaaatcaaagttataatattcaaagaatgctataaatgttatamattatttttaaaaatacaaagtaaacataaaagacactcaatagactatgaatagaaagatccttgcttgatttgataaagtagatgcataaaaaaccaacagctaacattataagtaatggggaaagattgatttttttttactaagatcacaaaaaaaggtgtttactctcactatatctattcaacattacactgagtttctatccaaggtaattagacaggaaaaattaatgaaa

SEQ ID NO: 164431 - DNA, 526 bp, Homo sapiens
tgatattaaaaatacactaatacactaaaaattggttagaaaaaatttttacaaggtattaatttactcaaaaaattataagacattttaattttaatccaaacattcaacttttattggttcttactcttttcaggttttttctcctttttgagaagacctgagataataactttctccttcaaatttttmatcagctcccataattttttccttaggttctaactgctgttgtagcctgatgttaaaaatgttttattctaaaggtataaagaaagtgttttcttccaatataacattctgtactcatcttttcttaatatgtctaaattgttctatgaaaccaaaaatattcacttattacccaggatgcactcctccaatgtctaattaattcaagtaccattttcattagttttgacttgcaggttatctaaaaggactccccatggggagaagtcattacattgccgtaggtcttttttttgccttttggtaaatggccttacaagaagattttatgttt

SEQ ID NO: 164432 - DNA, 558 bp, Homo sapiens
atgatcctttgatacctagttgttgagggttattatcatgaagggattttgaatttcataaaaagctttctccaagtctattgagatggttttatagtctttctttttacttctctgtatgtcgtgtataacatgtattgatttgcatatgttcaatcaaccttgcatctcaggaatgaagcttacttgatcatggtgaattaactcttcgatrtgccactggatttagtttcctagaattttgttgaggagtttttttgtctatgttcatcaggaatattgaacagtagttttcttttttgtcatgtctttggaagctttcttttgacaccagagtgatgctgacattagagaatgaattaggaatgattccttgctctttgatttttcggaagagtttcagtagaattggtactagctcttctatgtacgtctgatagaattggctgtaaatcctctggtctgggactatttttttgttggtaaaatttttattgctgattcaattttgaaactggatatttgtttggagtttcaatttattcctattttaatctt

SEQ ID NO: 164433 - DNA, 545 bp, Homo sapiens
tattagtattacaaaattgtatgacaatgaataacttgtctatcaaaaaatatattcagaataaatgcaaaaataaaagaaatccaagtccatacaatttcaatgaaagtttacaagctgttccaaaagacagaaattggtataaagactcccaactcattccataagcctcatttaactgataatataaatatacaatgacatttttaaaaagcaaatgagaaataagcaaaaccagaagacagacacttaaaagttaaaaaaaacaaagaccaaaaaaaaaaattcaaaggyccctgatgccaatgaacacagatgtgaaaactatatattaaataatacataactgaatgcaacattgaattaaaatatgtatcttgatctactcataattaccacaattaagtgtgactttcatcataaaaatgaattaatataagttatatattactgaaccaaagtatcagagcagcaaggaaataataaatatatatgtgtaccttggagatattgtagattttgttccagatctctgaaataaagca

SEQ ID NO: 164434 - DNA, 545 bp, Homo sapiens
tattagtattacaaaattgtatgacaatgaataacttgtctatcaaaaaatatattcagaataaatgcaaaaataaaagaaatccaagtccatacaatttcaatgaaagtttacaagctgttccaaaagacagaaattggtataaagactcccaactcattccataagcctcatttaactgataatataaatatacaatgacatttttaaaaagcaaatgagaaataagcaaaaccagaagacagacacttaaaagttaaaaaaaacaaagaccaaaaaaaaaaattcaaaggcccctgatgccaatgaacacagatgtgaaaactatatattaaataatacataactgaatgcaacattgaattaaaatatgtatcttgatctactcataattaccacaattaagtgtgactttcatcataaaaatgaattaatatawgttatatattactgaaccaaagtatcagagcagcaaggaaataataaatatatatgtgtaccttggagatattgtagattttgttccagatctctgaaataaagca

SEQ ID NO: 164435 - DNA, 504 bp, Homo sapiens
gagtcacatgattgtactgatttcccagtgcatataaaatttgtgattacactatactatagtatactaagtggttaacagtattatgtctaaaaaaatgttcacactttcactaaaatatactttaaattattgataaaaatgttaacaatcatctgaaaattaacatcattttctggtggacagtcttgcctggatattgatggctgttggctgattagggtattgactgatgatcgttggagtggtggtggaaatttcttaaaataagactaaaataaattttgtcacatcattaaactctgtctcaaaaatatttctctgtagcatgtgttgcagttttacagcattttacccataatagaacttctttcaaaattggagtgaatcctctcaaaccctaagtatgtgtgatattctgaatctsttatttcaacaatgttcacaggatcatcaccaggaaggttccatttcaagaaaccattttctttgttcattcataag

SEQ ID NO: 164436 - DNA, 581 bp, Homo sapiens
tccataaatgtgaaatacctccacttatttgtgtcttcttcaatttctttcaccaatgttttatagttttaatttagagacatttttctccttggttaaatttattccttgatattttttcttttgtaactgttataaatgggattgtctttctgactttatttcagatagtttgctattagtgtatagaaatgttactgatttcagwtattaattttaaattctgcaactttagtaaatttattaattctaatagtttttgaaggaatcattagaattttttatacatgacaacatgttgtatgcaaacaaggacaatttaatttcctccctttaaacttggataccccttattcctttctcttgccttattgctctggctaggacttccagaactatgttcaataacagtggtgaaagtgggaacccttgtcttattatagatactaaagaaaaagctttcagctttaccctgttcagtatgacattagttgttggtttgttacatattgcttttattgttttgaggtatatttattctataattaatatgttgagggtttgtattatgaagtgtatgt

SEQ ID NO: 164437 - DNA, 554 bp, Homo sapiens
gggatccaaagagggagtcgcagacttggctcagggagctcccaggtctgggctccccgaagggccgcaactcttctctccttctcttctctcgcaatgtggtaagcgaggggtgtgtttcagtcccatttgtgttacagctctttcagccccaccattcagcaggtcccaagtttttgtcctgtgccgaggaagaatgaggaaaacagacaagtggagggtgaacaaggcaaagaggagctttactgagcaacagaatgagtagcagggaagtgggtagctcctctccacaggcagattgtcctgtcaagtgttcagctctcagcagagaggagaccctaggttgggtagctcccctctgcagggaggttgtttcatcttctctgtagctctcaatagagaggaggatttggagtgggtaactcttctctgcaggcaggttgtcctgtcatctcccaaaatatggctgagtccagggstttttgtgagcctcagagggggggaagtgcatgctgattggtccatgggcggcatgggcaggcccaggaaaaggt

SEQ ID NO: 164438 - DNA, 574 bp, Homo sapiens
agagtcagagctaggaaggatcatatcacagaaagagactaggcacctgcccagacagagactgtcacaggctatcactattctgcaggcagttcgagattacctgagaatttagctgcataataagacttttttttttttttttttttttgagacaggagcttgctctgtcacccaggctggagtgcagtggcatgatcatagctcactgcagccttgaactcctgaactcctgggttcaggcaattgatcctcctacctcagccacttgagtagctggaactagcggcatgcaccatcatgcctggctaattacaaaagaattttagagatgggggtctcactgtgttgcccagsctggtcttgaactcctgggcccaagcgatactcctgccttggcctcccaaaatgttgggactacaggcctgagccactgcacccataagacattttattcactgtgcattgcttccccaaccctctcatagcttgtcaccatcttcaccatctgccaccatctggtgtcataactcactgcagccagaagttcaaaaccctattccaatgctataaa

SEQ ID NO: 164439 - DNA, 574 bp, Homo sapiens
agagtcagagctaggaaggatcatatcacagaaagagactaggcacctgcccagacagagactgtcacaggctatcactattctgcaggcagttcgagattacctgagaatttagctgcataataagacttttttttttttttttttttttgagacaggagcttgctctgtcacccaggctggagtgcagtggcatgatcatagctcactgcagccttgaactcctgaactcctgggttcaggcaattgatcctcctacctcagccacttgagtagctggaactagcggcatgcaccatcatgcctggctaattacaaaagaattttagagatgggggtctcactgtgttgcccagcctggtcttgaactcctgggcccaagcgatmctcctgccttggcctcccaaaatgttgggactacaggcctgagccactgcacccataagacattttattcactgtgcattgcttccccaaccctctcatagcttgtcaccatcttcaccatctgccaccatctggtgtcataactcactgcagccagaagttcaaaaccctattccaatgctataaa

SEQ ID NO: 164440 - DNA, 406 bp, Homo sapiens
tttgtcctaatgctctccctccccttgccccccaccccacaacaggccccggtgagtgatgttcccctccctgtgtccatgtgctctcattgttcaactcccacttatgagtgagaacatgcagtgtttggttttctgttgctgtgttagtatgctgaggatgatggtttccagcttcwtccatgtccctgcaaaggacatgaactcattcttttttatggctgcagagtattccatggtgcgtatgtgccacattttctttatccagtctatctatcattgatggccatttgggttggttccaagtctttgctattgtaaacagcgctacaataaacatacatgtgcatgtgtctttatagtagaatgatttattaccctttgggtatatacccagtaaagggat

SEQ ID NO: 164441 - DNA, 471 bp, Homo sapiens
actttgaaaagttatgatatactcctgggtatctacaagrctgtgtacacactcaggaaagactaagaggaccccaatctctcactttggctgaccttgaggccctgtgaaagtaggaagcgaagggtaaggcagagttagaaacttcctgagcattgaaggtgtgccccaacccacaaacagagctccttgtcaaaaggtggaagatttactagctcaaggcatttaaggaaatctctgtctgatcattagctgaccactaatctaactgggcagagacttcagttggctacacattacgaggagtgtagactttacggaattagtccaggaaagtgagcaaaaaacaacagaaaaacaacaacaacaaaagccccacagaaacagcagcaacaaactggcaacgacaacaagccctggaagagtgagtgtctgattatcagggcttccaaattatattacctaaagagc

SEQ ID NO: 164442 - DNA, 650 bp, Homo sapiens
tctatcaacagtcccttcacagtaatctaatgttttactagcatggtcctcaaaactccttcaaccaccccatctccaccaaaatctatattagtcagagttttccagagtaacagatcctgtgtgtgtgtgtatgtatgtgtgtgtgtgtatgtgtatgatttcttataagaaattgactcacatgattatagtggctgacaagtcccaagatcttcagctgacaagctggagacccaagacagctgatggtatagttctattatagtccaaaggccagtaagttcatgacgcaggaagaaccaatgattcaattttaatctgaaggcaggaagaaagctgttatcccagctgaagcagtcaggcaagaggaattccctcttccttgtaaaagggtcagccttctttctattcaggctttcaactgattgcatggggtccacccacactgaataaagcaatctgctttactcagtctactgttagtttactaagtcaaatggtaatctcatcaaaaagcacactcagagacacactcagaataatgtttgagcaaatatccaggcaccctgtggcccagtcaggttgaytcatataactgacaatcacaagggacataaaagaggaaatgaataaatggagagacatat

SEQ ID NO: 164443 - DNA, 661 bp, Homo sapiens
actcagttcaaattcacattggttactttgtaggctatgtgttagatgtattgaaaatatgtmtagctgttttaaggatattgttctttgctagttaattctttactagcatggaacacagtttttttaaaaaaaaaaaacaaaaaacctaaatgcacatgttgctatgtcatttatcatcagtagttggattacttaggaaccataatgatcttccttgctgctattgcttacattgcgacttttcttctttccccaggaaataggatcttattaaaaatattcagtcccatagcaaaatatcatttctctgtgtaagcttgatgttttcagtattcaaactattttatgtggtttgtaaagttgacaaaacagtggcttctggaatgaagcatgttttgagcctacacactgtgagacctatgactttaatatttagcagtgatagagaaaaccacccaaggaatgcttatttaatgggcaggaaattttcgaggctatgagacctgacattttgtcttttttgtcagcgccgtcccatagtgcctgatgcatgttgtttttctcatagaaggaacgtgggaatgctgccgcaggccagagcaggtgggaggagtgtggagcccatcctggctctgggatgaccaaaggccagcacaca

SEQ ID NO: 164444 - DNA, 661 bp, Homo sapiens
actcagttcaaattcacattggttactttgtaggctatgtgttagatgtattgaaaatatgtatagctgttttaaggatattgttctttgctagttaattctttactagcatggaacacagtttttttaaaaaaaaaaaacaaaaaacctaaatgcacatgttgctatgtcatttatcatcagtagttggattacttaggaaccataatgatcttccttgctgctattgcttacattgcgacttttcttctttccccaggaaataggatcttattaaaaatattcagtcscatagcaaaatatcatttctctgtgtaagcttgatgttttcagtattcaaactattttatgtggtttgtaaagttgacaaaacagtggcttctggaatgaagcatgttttgagcctacacactgtgagacctatgactttaatatttagcagtgatagagaaaaccacccaaggaatgcttatttaatgggcaggaaattttcgaggctatgagacctgacattttgtcttttttgtcagcgccgtcccatagtgcctgatgcatgttgtttttctcatagaaggaacgtgggaatgctgccgcaggccagagcaggtgggaggagtgtggagcccatcctggctctgggatgaccaaaggccagcacaca

SEQ ID NO: 164445 - DNA, 661 bp, Homo sapiens
actcagttcaaattcacattggttactttgtaggctatgtgttagatgtattgaaaatatgtatagctgttttaaggatattgttctttgctagttaattctttactagcatggaacacagtttttttaaaaaaaaaaaacaaaaaacctaaatgcacatgttgctatgtcatttatcatcagtagttggattacttaggaaccataatgatcttccttgctgctattgcttacattgcgacttttcttctttccccaggaaataggatcttattaaaaatattcagtcccatagcaaaatatcatttctctgtgtaagcttgatgttttcagtattcaaactattttatgtggtttgtaaagttgacaaaacagtggcttctggaatgaagcatgttttgagcctacacactgtgagacctatgactttaatatttagcagtgatagagaaaacmacccaaggaatgcttatttaatgggcaggaaattttcgaggctatgagacctgacattttgtcttttttgtcagcgccgtcccatagtgcctgatgcatgttgtttttctcatagaaggaacgtgggaatgctgccgcaggccagagcaggtgggaggagtgtggagcccatcctggctctgggatgaccaaaggccagcacaca

SEQ ID NO: 164446 - DNA, 627 bp, Homo sapiens
ggattaccggcatgagccaccgcacccagctgagatttatattttgaaagcatctctctgtctgcagtgctaagagccaaaaggtggagaacaagttgccagaacttacgagtcttcttaggcctcactcacaggctcatgggagcccagcctcccccagggtcctcagaacaggggtcccaaagtccctgaggtagtcctctcttggctaccaccccggcactcttaacacagtcttgcatttgcctgccatttctgttgctcttcctgtagctcagacattctccccttgtccctgatgggcaccatgctcagttgtgtcttgatttcattgccaccagtctcgtactgcccagactgtgctacattctggctgccagcttctgtgtgcccggaggatacccttcattcttacttgagctggccttggttatacaggaatggagacagcaccaccttgtgctctaatctcatacagarctttcaaacccaaatcttcttccaaccacctcctccaccaggaagttggtttaaatggctggaaagaacgtgcagagccaaagaagcctgagcagcacatactctgcgggattcaaggccatcctttctgcccattctaaactgacc

SEQ ID NO: 164447 - DNA, 382 bp, Homo sapiens
aacccagactaatacagggagtgaccccggaccttagccttccagcctgcaactcaacggttcaggggaatcatgcttcctgacatgtgatcatctcaaccaggaagaagaccctgtattaataaatgtattaactaaatatcttgcctgtaaattattttatgctctcctttgacctttttgagaataatgaacactatcatccctggacttscttttcagaaatgcccaagcttggaactgacagatgtattcaacataacaaccaaggtctgcattcaccagagtgatctcatgggtgggaagctgggcacaatacactcttgggactgtacaaatctcaggctagtcacagtacgtgtcactgctccatcctttgaaa

SEQ ID NO: 164448 - DNA, 611 bp, Homo sapiens
gatatacaaaaaaaaaaaaagaatcatagaggaaattgaaaactgatatcatcttatcactatctaccagaatattagaatgtgaaacccaagtgatgaatggccaattcccaataactcaattaatcaaggctgaattttggaaatctctatccagtcatttaaaaagttaatggtttggaaaagttggaggaactctgtatttgtgtctgtgtgtgtgtgtgtgtaaagtatgtaatttattttgtagttttcccacttattctacctcttgtagcagtaatattaatattaatgtgcaaaagttagtgaatcctgtgtccacaaatttccattcatgaatcaagactgcatattagccatctcattattttttagtcttctgaagactacatatttgccttccctccaaaaaatgttawgtaacctgataaaaatcaagaaactatataccattttaaatgtgaataaaatttcaggttaagctgaaatcctcatctgtagaaaatggttttcttgccagtcctctaagaagccacactaatgaaagaaatgatcagcggatgtggtatgtctgtccacaaacattttagttcaaatcttatattgag

SEQ ID NO: 164449 - DNA, 537 bp, Homo sapiens
gaagaaaaaaaaaaaagtacatccacctttgccctgtactttcattcttatagctgctaagacagagctttagtctatttctaaatcagcccatgcatctctcacaagctactgataagtcaattcatcaaggatcatcaactgggaaaccttttcaatttaaaattaatcaaaacattctatgctagctgttggcaactgggagcttaraaagagctagccttttacatcctttcttaacacttaagtgaatatgcctcaaccaagttcaagcttcctctctgataggctgcaaccgcaaggctactattctataagatcacaacttggccttgttccccatgtgccagctgtttccttctaagcccccaaagcaccagttcagggctgtctaacttcctgatgggaaccaactttaacaaggtataattattataaccagagagccagatagaattctgagaaaagcaaatctggcaattgtaaaatattttcagagatcccagatcaaacagaaatccattttatgatcaaact

SEQ ID NO: 164450 - DNA, 571 bp, Homo sapiens
gacagaattgtacatttggttttagttgatgggtacaagggactatttctggtcaatgaattgcaagcagcagtcatgtttgccactttcaggctacagcatttaattgctaaagtgagactgcagagctctcttttttcccctctggcatagtaaggagttaagtttgaaacagtagtcyctgaagagctgtaattaataagccttctctgctgtcccacaaaacacatgtagtaaaagcaggaaataaaactttcttatcttaggccactaatactttggagtttcatttcactgcagcataacgcaacctatcctaactgaaataacatcaaagtcaagtattcaataatagtttaagaacagggttgccaggtaattatgggatgtccagttaaatctgaatttcaggtaaatagtgaaaacaatagcataacattcaatatttggaacatacttatcctaaaaaatgatttattatttatctgaaattcaaatttaactggatgtactatatttttgtttgcagtggtatctgaggtagattttaaattattagtagaatttgaca

SEQ ID NO: 164451 - DNA, 570 bp, Homo sapiens
tctctccttcagttaataatacatgtctgccacctaagcttaagaacatatagaataattcatttctaatgatattgtaatttatgtaatctctttggaggtgaatatagcattattattaaaggccattaaaatatctgtgacctttgaaacagtaatccaggtcctgggaatttgaccaacaaaaaaacctcaaaaagagagcatatgtgtattttcaaatatgctcttatcatcaacatttcaatagcgttctcaataatttaatttatagtagtaaaaaacagaaatatatgaatggactattgcgtctcgttaaaatgtataaagaagargactgtgtcaacatgatactggtaagtgaagtgatgctgcaagttttatatatatatatatatatatatatacacacacacactgtacttcaactctgtatattggaaaatgggaagaaataaagcaattgttttagggagtgttagtttgctaaggctgcaataacaaaatactagataattagtgaaataaagtgaaacttaatgggaagatttacgttaatgaatttaataa

SEQ ID NO: 164452 - DNA, 572 bp, Homo sapiens
ctaatttaagtgtcagcaatattttttctaatatgyctgctgacatatcctctatctgataataaaaatgatgcacaaaaggtaaagatcatttcatgggagtgaagattacctaggaaaacatcaccattcatggtgaacatccatttttatatgactgacattgtattaataattatgacagtttcacttgccaccaaaaggggaaaaaagcagaataccagttttattgtacaaagatagattcgtcatttgtattgcctgatgaatattaaccatcattactttttaaattaattatcttttttaaaaaattaatatgtcataagcatcctcagggcactaactattctgaaatacaagttattggaagacatgggtatattccttacatatctttaaaatgcaacacggtaggcttatcatgcattcacatcatgtgatagagcagatataatcagtgaattagtagagtgttgtcccactagtacattaatgttttattcattaaattattaagtcgttggctactgcactaaattagggccactagaactccaaagtatgcttgt

SEQ ID NO: 164453 - DNA, 572 bp, Homo sapiens
ctaatttaagtgtcagcaatattttttctaatatgtctgctgacatatcctctatctgataataaaaatgaygcacaaaaggtaaagatcatttcatgggagtgaagattacctaggaaaacatcaccattcatggtgaacatccatttttatatgactgacattgtattaataattatgacagtttcacttgccaccaaaaggggaaaaaagcagaataccagttttattgtacaaagatagattcgtcatttgtattgcctgatgaatattaaccatcattactttttaaattaattatcttttttaaaaaattaatatgtcataagcatcctcagggcactaactattctgaaatacaagttattggaagacatgggtatattccttacatatctttaaaatgcaacacggtaggcttatcatgcattcacatcatgtgatagagcagatataatcagtgaattagtagagtgttgtcccactagtacattaatgttttattcattaaattattaagtcgttggctactgcactaaattagggccactagaactccaaagtatgcttgt

SEQ ID NO: 164454 - DNA, 572 bp, Homo sapiens
ctaatttaagtgtcagcaatattttttctaatatgtctgctgacatatcctctatctgataataaaaatgatgcacaaaaggtaaagatcatttcatgggagtgaagattacctaggaaaacatcaccattcatggtgaacatccatttttatatgactgacattgtattaataattatgacagtttcacttgccaccaaaaggggaaaaaagcagaataccagttttattgtacaaagatagattcgtcatttgtattgcctgatgaatattaaccatcattactttttaaattaattatctttttwaaaaaattaatatgtcataagcatcctcagggcactaactattctgaaatacaagttattggaagacatgggtatattccttacatatctttaaaatgcaacacggtaggcttatcatgcattcacatcatgtgatagagcagatataatcagtgaattagtagagtgttgtcccactagtacattaatgttttattcattaaattattaagtcgttggctactgcactaaattagggccactagaactccaaagtatgcttgt

SEQ ID NO: 164455 - DNA, 589 bp, Homo sapiens
tttcctctctccatcctgatggctgctgccactgctttgactcttgcccttgtcttctcttgcttcgctgattgagatattctatttagtcttttctcmccaaagtcctttcgtctcattaaaacgtatacaaaaacatagaccgattttgtcactgccccacttaaaatagcccttggatacctgtggtggtcagaacactgtgtttactcagtagttattatggcattggtggccattcccaatttggactcaacaccacactcatcactaactacacaagcagcatgctcctgctttccacatctgggtctatccctccagatgtgcatatttgtcaagcttttccccagattgattcattagagtcttttacaacactgtaccttttacaaatgtttccttccctggaaagttgttttcacagtatctttgcctaaaagataaactccatgatcattccaaaaaacgcagtttactttagttcaagtaaagttttataaggggacttctacatgcacaagacggagaacataaaaaaagtatgttttttttttgccctaagagttcatagtctgtaaggagtggg

SEQ ID NO: 164456 - DNA, 600 bp, Homo sapiens
aggaaactttaatttagtcatagatagtgacatccatataaaccaaatatataagtgacctgctgtatttgaaatccttaatattacttccaatgctgcaaggagcactttgtatagctcaagctttgagtgtttgtaaaaaatataaactttgaatctattagaaatgatataataaaattwgagcagaacataacaaagcaaaaagaaaattttattgtgacactgtgaacattggataattataaaaaatagtgctaaataaatgaaataatcagaaaatgataaagaagacggtgaaaaatattgctatcataaatttaggtgttcttgaattattctacttctataaaagaagaagaatgtctaaattttaatagacgtatatttgatattttgtctctctagatgaagttttgatagtacattttacatttttttagtggtacaaattggatgtgtagcaaattcaaaatatgaatgtaattttacttaagaaagtcaagggaagccggatcatactgaatgctgtctttaagcagttagaaaattaaaattttagagaaaactaataataactggcaatattataaatatttg

SEQ ID NO: 164457 - DNA, 670 bp, Homo sapiens
caatcactgccctgcttctctcatttctggacattgaaaaccttttttatatgtagaataatggcttttccggggtgagataaggcaggcagtttctctgggaaggctaataatttggcatttgaataaatctttaactcacatgttgagtcttggattgaatcaattcaatccaagtttaacatgtgagtttaacatttatcattgaatcatatgttgagtattgattgattattattgattcaatccaagactcaacataggagttgaacattttaactctgtttaaaggaaatttttacatatgtaaaatgaaaatcaacaaataatgttggatgtacaatatctattaaagatccttatatggctgatttgcttggtatctctaaaattcactccttacccaaacatagcacaacagaaatgacaaagcagaataaaaaaaaatgaagcctatatataattctggctcttgcctaatggttgaaattttaaaaagataaagtaaggtgataaaataggacatgaataacatctcgaagaacaatccayagctgtcttttttccaattaacaaagagctttcagcacatattttaaaagaaatattttacttttaagaatgtagtcattgaagctgtggatgtcattttagaggatgatttactaac

SEQ ID NO: 164458 - DNA, 504 bp, Homo sapiens
atgagggtggagagtggaaagaaaccagtgcagctattgaaattttttaatcaattcatgattcatagaatcaaaatattctggcaaccataaacataaaaataaatgtacatattcaaatagaatggcaacaattcataaagtagattaaatttaggaacatcttttagaatctgttctcctttatcacaatgtcaatggtcttagtaatgtcaacttcgcatatgttacaagatcagtttaattccayaaaaagaaaagatttgtcaaaacgtgttcctaccctcatgtggctatggaaaggcaatctctgtaagaagctagaggtcctgcaaacctgattccctgagatgcaacatccctccttgttgaaaataagaaatattcaccactaattgaccacccatgcatcaatgggatattaaaagacccgaagctccattacagcttattcataaatgaagcattaattttgtctagcggtattaatcacaacatattaaa

SEQ ID NO: 164459 - DNA, 574 bp, Homo sapiens
taacatttttaaaaaatactcttctgctaaaaatggttgaagtttccttacacctctaaatttctaaataaataattttcattgagtataggaaaaatcatatggacaacttgttattcaaaggacctatatcacagagaaactgtatttcctcagaagaaagactgagtgacagtaagaggcaggtaattaggcaattataagacaaagacatggtaataaacagcagaggaataaaaacaattgcaaaaaagtacatacccacccttacactattctactaccttcaagcacttaggaaataagcttattcatatttaatcagttgaaacaaaccctgaaatttagagattaagacagaatagcttgtaatcaagcaggtcataaggtttagcccataaatattcttattgcttttaagcacttaagaaatttctactttaaaatcatgaggaatagtttaatttatagaarcacaatttttaaaaaggaatgagatatatccacacaaaactttcatatgaatgtttatgaaactccattgataattgccaaaacttggatgcccacaaga

SEQ ID NO: 164460 - DNA, 552 bp, Homo sapiens
aaagccacatttctatgacctatactatttgtcagagtgaaccaaataactgtgagctatggaaaagtgaagcaatggattagagtaagatgagctttctcagatacaaaatggtggtatgacttggaaaactagacaggccttcatttttgcacgtaaaaatcaaacacttgattagactaaatcaaagatttttacattgttttttcagaacctctgggctatatgaaaatgttttagagaaggctaaggaggaagaaatacagttctcctgagtggggcttttactcctctttctaccagaatagctctgtacgtatctttcttactaytggggttcatcataagatttagtttaataaaaatgtttccctttctaaaaatacattaaatagtaggcgagttctatagtctttttcatatctcagagaaaatggggttcttcttattgtgtattttgtcctaaaatgttgaatgcctcagactttgcatccatccctcattcttcccttatttatagattttctaaccttgggtctggccacagggaaa

SEQ ID NO: 164461 - DNA, 566 bp, Homo sapiens
cattacagaaaaagtgtattgaccctgctttaaagtcaataggtattaaattcaaatcttgattttttttctagctatgtgatcttaagacaatttctttcaacctcggtgtccttatttttaaatgatgcctaccgttgaaagtttattgcaagacaaaacaataaactatctaaagcacttaacctagtgtctttcacacaataaatactctaatatagctacagatattctacccagataactctaactccctatttaagtttgcagcctaccatttctataatatgttttgggctccaaaaattcatttagaatttctttatatcattatcatacccaaataatatcacacctaaataattcatcgtagtatcattttcctgtaaagaagctagtgtatttatgagccagagggtagcattgacataactaacactgkgtaaagtgttgactatgcgctataaaccaacttacttcaagaaatatttagagaccccaccataatctgggaacaatcccaagtactgctctggtatccctctgtgaagagcctgatgttgctt

SEQ ID NO: 164462 - DNA, 558 bp, Homo sapiens
tatgttttattctgctcttcaactgaaaccataaatctaacaaagatatcaggagactgattggtcataccattaatggaaaattaatcttcgagaaatcttttctgacagcggttagtgaatagagtaaacatttcagataacacatagacgctgaaaaatmttttacttttattgtttttaatgttataataaattataaatttgttataattagcaattatgcctactctttcaactccatatccccatgatattgttattgttattattattgccattattattttttttttgagatggagtctccctctgtcacccaggctggattgcagtggcgtgatcttggctcactgcaacctccacctcctgggttcagacgattctgctgcctcagcctccagagtagctgggaccacaggtgtgtgacaccacacccagctaattttttgtatttttagtagagacagggtttcaccatgttagctaggatggtctcgatctcctaacctcataatctgcccccctcagccccccaaagtgctgggattacaggcg

SEQ ID NO: 164463 - DNA, 419 bp, Homo sapiens
agacttgtaggactatgggaaaatattggtatccagaatttatcaagaagggatagcactagtcaatttcccacctttggattgggatttgaaaggttacaccatagaaataagattgaacaactagtagaaatcccttcaaaagacgttagcccagatcaagtcacccttatctctgtaaaaggatccaagtgatctatcattactagctctcctagctgcatagatcgaaaatattttaacaatatatagttattaaatagatcaataaagagtatcsttaaaggtcaaattttaatttgcaagattaactaaattagtcaagcacttacttgtcctggataattgctaagttagaatagccaattcctatttttttttgagcaacccttaataaaagattatacagcagtaaaaga

SEQ ID NO: 164464 - DNA, 398 bp, Homo sapiens
aacaaaatattttcacatacatgcttgagaaaatttttcaacaacagatttgcctaataaataataataaaggaagttgttcagtcataaataaatcacagatgaaagcaaggaaaaaagggaaatgaatgaagagcaatgggaatgatcagtaagtgctaaatccaaatgaacactgattttataataataggtactgcctaaaatgcattcagaatttaaaatataatgaaaataccacacaacctgggkatatatagaattttatgtgttctaatgtcttttggttgtctgacatatggcaaaaagtgctaattatattatactgcttaaataagttaaacatgcatataatattgtaatatccaagatgaacaataaaaaatagtacagtaaat

SEQ ID NO: 164465 - DNA, 398 bp, Homo sapiens
aacaaaatattttcacatacatgcttgagaaaatttttcaacaacagatttgcctaataaataataataaaggaagttgttcagtcataaataaatcacagatgaaagcaaggaaaaaagggaaatgaatgaagagcaatgggaatgatcagtaagtgctaaatccaaatgaacactgattttataataataggtactgcctaaaatgcattcagaatttaaaatataatgaaaataccacacaacctgggtatatatagaattttatgtgttctaatgtmttttggttgtctgacatatggcaaaaagtgctaattatattatactgcttaaataagttaaacatgcatataatattgtaatatccaagatgaacaataaaaaatagtacagtaaat

SEQ ID NO: 164466 - DNA, 601 bp, Homo sapiens
gttgcttaaccatttgtcttagaagcaattattttaaaaacaagttcagaattgggactactgtttaccatgaataagcctttaactgcctttatccattccaaaacagctgttgaatttcataaacccaacaattaccacttgctcccctcaagccctcagagcttctcttaaatggattatctttgcctaaatccattctaaaccaaataggaaaatatgttttcatgaatcccgtgtggtagtttcaaggctaagatagtttttttgttcaggaatatttaagcattttttccctgggcagttcagctgasattcaaactatcaaacacagcaattcaactttataggaaatatcattccaaaataatattttcacatttgtgctggaaggaaaagagggaatattataacaactttcataatttctctgcaataaggctcagggtaagttgaaaagtaagagagttatatactagaagatacaaacaaaccttagagtcttgccaaattggaatcaaaatcttagacatttcctaatgcaacagtgggcaggctgcttatgtatctaagtctcagtttcctcacttaaaacaggaca

SEQ ID NO: 164467 - DNA, 586 bp, Homo sapiens
ttgtcttagaagcaattattttaaaaacaagttcagaattgggactactgtttaccatgaataagcctttaactgcctttatccattccaaaacagctgttgaatttcataaacccaacaattaccacttgctcccctcaagccctcagagcttctcttaaatggattatctttgcctaaatccattctaaaccaaataggaaaatatgttttcatgaatcccgtgtggtagtttcaaggctaagatagtttttttgttcaggaatatttaagcattttttccctgggcagttcagctgacattcaaactatcaaacacagcaattcaactttataggaaatatyattccaaaataatattttcacatttgtgctggaaggaaaagagggaatattataacaactttcataatttctctgcaataaggctcagggtaagttgaaaagtaagagagttatatactagaagatacaaacaaaccttagagtcttgccaaattggaatcaaaatcttagacatttcctaatgcaacagtgggcaggctgcttatgtatctaagtctcagtttcctcacttaaaacagga

SEQ ID NO: 164468 - DNA, 582 bp, Homo sapiens
gaattcattgcttgatgaccctcaaatggtgatgctgaaccattttgtgctccctttgtaaaggtataatcccctgatctttggttgctgcaaaatgcatacaacatttttattgaaattagatgggtttatgctgaaaacctatcactttaaaaatataaagcacaaggttccttgacaggccagtcacttagtatttattcggcactgttccaggcactgcagggagctcaagaaaaaataaattatagttgctgcgctcaagcaacctgtaatttccttgagtagtttaaataaatgcattcaaagcagggagtccagagatgagtttcaggtatgyacaatattgtaattatattcattattttggggggagggtgtccagagctctcattcttaataattttgtttcttaaataattttgtttaaataattaaataattttgtttaaaaaaagatacgaagaatcacacaagtagagaaataaataggtacaaatctctgcaattctgattccaagtgtaccagtttagagaagatgcattgacgtgacctgaactaattcggaaaagtattctaac

SEQ ID NO: 164469 - DNA, 484 bp, Homo sapiens
ggttcttgccaatgattcgctcaaatatgatgggagatggtaacttgtaggtgcgagtgttcagcaattttatctatagttaattcacataattcacaacttttaaattctttctattcctttattattgaagcttttagaaatgcaaagttgtttctaaggatttataaatatttcttcctgatatccatagaaagccatataacactttaaaacaataaaaaattcagacaatttttaaaatgtgtgtgcctgatgagaaatacttcatttttatatttcctttacctagacttccttccaagactctggcaaaaccttctcaagtacacrtctgagatggttaaagtcaacacactataattctcctgacagccatggaccttaggcggctgcgcccagaaaaacttttccaaaccagcgagtcaagggattttgatgcttgtcatgaaattcttccaagagcatcactgactttctaact

SEQ ID NO: 164470 - DNA, 433 bp, Homo sapiens
aaaatttactgccagctctctgctcacttaaattaagccaagtctgtcaagcccttaacagtatttatggtcagattttttgtagtctcttaattaaatggacaacaagaatctctagacattaggggaaatcctcagtgcaaagtataatcatccaaatacttattttaaagaaagagacaaaaagaaatcctccccacaggaaaaacaaatattttgggaatagaacaatatttagaaaacatcctaattaatgtctctagagaaatttagaagataatactttaataaaatgagagcaggtttacttgaaaggagaaaaaataccaaatactaataagaaagcacatttgaatttgaacatgtaggtatttacataaatatcwtatctgtatatctctgtcaatctgtctgtaaaatgataaagtgaaga

SEQ ID NO: 164471 - DNA, 626 bp, Homo sapiens
atgtgtaataaggttgttttcaagactgaatgaatcaacagatttaaagcatttagaatgctgctcaacacataagaagtgccccaaaatgtgacctgtgatcaatattattatctttaagttatgagactaaaaattcaaatmtattaagcataatctcaaatagtcaaggataagataggcaacaatgaatgccccataccagagagcaatctagccaacaagaaatcactaaaccatctgaaaaaaatttcctactcagtttcaaaactgccagaaaattacaaaaacataccaagtacattataaggttgcttgggatacatttcattcgcactttgatttgtccctgtattagtctgttttcacgctgttgataaagatatacccaaactgggtgatttacaaaggaaagaggtttaatggagaactcacagttccatgtggctggggaagcctcaaaatcatggcagaaggcaaggaagagcatgtcacatcttacgtggatggcggcaggcaaagagagattgtgcagagaaactcctgtttttaaaactatcagatctcatgagacccattcactatcacaagaattgcataggaaagatccgcccccaagattcaat

SEQ ID NO: 164472 - DNA, 527 bp, Homo sapiens
gctatctgtaactcaaatgtgttcgttttttaatctggcatatcccccagtataaatataccacaattttttcattatgttcttggacacttaccctaatgagctgccattcttaaaagagaaactcttcaattgcctacacatccctggaccmcagagtggtgttttctcacttggtgattgggagacttatgatagagagattttatctgcagcctacaggaaaatgtaatgaccatttggtgggtagtctagtaagaggagaagaccttttgatttttttcttataattctcaggtgggaaaactcagggcacatggtgaaatttaattacaactacctttaatcttatttgtgacataatgggatgtttctccctgacttagacacgtaaataagagtaagaaagcaggatacctcaattaaggagatgaggtttaagttgttttacaaaagccatttattctatctcagggtagccatggaaagatcaagtattaggatgattaagagtggtggtcccaaag

SEQ ID NO: 164473 - DNA, 577 bp, Homo sapiens
attttttttagtgaacttccatgtgatatttatgaactcatttattaattatagatgttatccaaaatgatgcccatacaataatttagtcattctaagcatctcacacattgtcatgttggaaccaaatagccyaagcttctccttacatctctctgtagctagtgtttgcttctgattcagtagagggtcttgagagagtgatgagaagtacatatatagttgctgataagaatgggccttcttaccttccaattaatataacacaaatgtattggttgttatgtgattccaaacaatagatacaatctaatgtgtataattcttactgatctttagtcaacaatctaatgtgtataattcttactgatttttagtcacttattttgaggaatgtactgttttacttttaccatgtttaattcacaaattatttaatcttttctctattatctaacagtactccaccaaaactacaaacccaccatcaagagttaactagtttaactcaaagatgagagtgatttaggcaactagtaagtgataatagaaagtgtagagaattaatacccgtatt

SEQ ID NO: 164474 - DNA, 588 bp, Homo sapiens
tttttttagtgaacttccatgtgatatttatgaactcatttattaattatagatgttatccaaaatgatgcccatacaataatttagtcattctaagcatctcacacattgtcatgttggaaccaaatagcctaagcttctccttacatctctctgtagctagtgtttgcttctgattcagtagagggtcttgagagagtgatgagaagtacatatatrgttgctgataagaatgggccttcttaccttccaattaatataacacaaatgtattggttgttatgtgattccaaacaatagatacaatctaatgtgtataattcttactgatctttagtcaacaatctaatgtgtataattcttactgatttttagtcacttattttgaggaatgtactgttttacttttaccatgtttaattcacaaattatttaatcttttctctattatctaacagtactccaccaaaactacaaacccaccatcaagagttaactagtttaactcaaagatgagagtgatttaggcaactagtaagtgataatagaaagtgtagagaattaatacccgtatttgaaccccctgtt

SEQ ID NO: 164475 - DNA, 588 bp, Homo sapiens
tttttttagtgaacttccatgtgatatttatgaactcatttattaattatagatgttatccaaaatgatgcccatacaataatttagtcattctaagcatctcacacattgtcatgttggaaccaaatagcctaagcttctccttacatctctctgtagctagtgtttgcttctgattcagtagagggtcttgagagagtgatgagaagtacatatatagttgctgataagaatgggccttcttaccttccaattaatataacacaaatgtattggttgttatgtgattccaaacaatagatacaatctaatgtgtataattcttactgatctttagtcaacartctaatgtgtataattcttactgatttttagtcacttattttgaggaatgtactgttttacttttaccatgtttaattcacaaattatttaatcttttctctattatctaacagtactccaccaaaactacaaacccaccatcaagagttaactagtttaactcaaagatgagagtgatttaggcaactagtaagtgataatagaaagtgtagagaattaatacccgtatttgaaccccctgtt

SEQ ID NO: 164476 - DNA, 607 bp, Homo sapiens
cttcttctccctttgccagggaagattgcttgcttatgtaggtttctaagagaaatgaaaatcaactgatatcatggcttaataaactttcaaaaatgagtagattgtttccaggagagttttcaagctgctgggtcttctgtttttaaccttaagttccagttattattttctgttttcaaacaattctttttgacttaatgaaataattgatattgtttatgtcttggtgatagccacatgcttgagtagaatcagcttagaaatattgctaatgatgaaattgtaaatgttagtgtgtcaagatatctgtaaatgtcattaatgtgtgtaaataatttaggaaatttatgtacctataatggggattaataagaaaatttatgtactgctagaaatatataatcaaggagtgggacagctattaaaccagatattgaagaaatcccaagtattttcccatgactgggcagttcctccatcctctgggctttggctgcttcttcaatwtcatttttgttaccaccttccttacctgcattagtgatattgaactatttatagttacccgaaaacgccaaggcattttatatttttgttactttac

SEQ ID NO: 164477 - DNA, 474 bp, Homo sapiens
tttcaaattgcaaatgagttgtaaagattgtttatcaatgcagtcatttatctcatcttagtaataactacttaaaaataggtttcccagagatcttttctagtatttcaatcacagagcttggaatttaatagagagaatttaaaggagaaartgagaggaggaggaggaggaagtgaaagagaagagaaaaggagagaaggaggaggaaaaaaaagacaaagtattttgaatcaacacatcttattcaactgctgcttaagagatcacttttcctgacattgttatcacctggtggtaatatcaaatattattcagttttttaagttcttccagatctgcattgattctaatcaaaatagatcccttctccatttagatcacctactccttgcttttaggaagttttgaagccaagcatctgatagagcaagcaccaagctctttcacaaatacacgtttcccatgaagagg

SEQ ID NO: 164478 - DNA, 520 bp, Homo sapiens
agcttatgtagttctttgacaaatcaattggattttttctgtcttctcaacttttttagacatgtatgtgaacctattcttcctttgtaaccttgacaaagttctgatgatgtactttaagaaatctaatctcctgctaagtaattagtttaaaaggagatgaaaggaaggagcccaagtgagcagaaattttgctaacaaaacatatcattataacataaaacgtgaaccctaatgtaaactatggtcttcaggtgataatgatgtgtcagtgtaggttcatcagtggtaagaaatgtaccactttgttggcagacacaggaagcaggaaacgctatgcaggtgtgggtacagggratacataggaaatctctgtaacttcctctcatttggctgtgacctaaaactgctctaaaaaataaagtctattacagaaaggaaaaagagaaatgccatgttgctttttaacaacttgccactgggatttttttttaacactgaagaatatacagttactttt

SEQ ID NO: 164479 - DNA, 538 bp, Homo sapiens
tctttgacaaatcaattggattttttctgtcttctcaacttttttagacatgtatgtgaacctattcttcctttgtaaccttgacaaagttctgatgatgtactttaagaaatctaatctcctgctaagtaattagtttaaaaggagatgaaaggaaggagcccaagtgagcagaaattttgctaacaaaacatatcattataacataaaacgtgaaccctaatgtaaactatggtcttcaggtgataatgatgtgtcagtgtaggttcatcagtggtaagaaatgtaccactttgttggcagacacaggaagcaggaaacgctatgcaggtgtgggtacaggggatacataggaaatctctgtaacttcctctcatttggctgtgacctaaaactgctctaaaaaataaagtctattacagaaaggaaaaagagaaatgccatgttgctttttaacaacttgccactgggatttttttttaacactgaagaatatacagttacttttacttggaatawtttcttcctttaaatcctc

SEQ ID NO: 164480 - DNA, 501 bp, Homo sapiens
caccagtcctctgcactttgcctcccctgctttctcatgtgctcgctctctatatgtagatagatgtatactgggtgactctgtgccaggtgttgtatttgctcatagtgttaagtgaaacagattctgttcctgctttcatcagccttctagttaagtgtggagacagatatttaatagtcatgtaaataactcttgttggtgtgctctttggttctatttagaaaagcagtcatctctagtcagatgtattagctggcccagtttactttttttttgataaattccrtcaagtgaaataactttttttttcttagagtctgataaagctgtttggcctaccacctttaaaacattgggcacggatgagaaaccacccttatttcataactgagatgtattttcttttttctcagtataaccctcagttcggtgatgcattttggaacagtagtaaatacaacatggtgagctacctgcttcgaatgatgaccagctggg

SEQ ID NO: 164481 - DNA, 267 bp, Homo sapiens
gtgacctatgatagtccaaactactcccagcaactccagtttgttgtttctttatgtgtagtccaaagaaggaaaagcatgcagagttcttatacccaggcaggcaccctggagagagttcaaagatttacaggctctgaatgaaggaatgctgcttacataggcacttctggttgaatgcaacttatgattttgttattttattcggartctgttttggaatataaatgattataaatgctggaaatatagtgctttgaatgaaaa

SEQ ID NO: 164482 - DNA, 267 bp, Homo sapiens
gtgacctatgatagtccaaactactcccagcaactccagtttgttgtttctttatgtgtagtccaaagaaggaaaagcatgcagagttcttatacccaggcaggcaccctggagagagttcaaagatttacaggctctgaatgaaggaatgctgcttacataggcacttctggttgaatgcaacttatgattttgttattttattcggaatctgttttggaatataaatgattataaatgytggaaatatagtgctttgaatgaaaa

SEQ ID NO: 164483 - DNA, 433 bp, Homo sapiens
cagctttggcttcaaaattatttgagccatcatttgaacctcatcccgaatgatacacatgcttcatggaggaggtagcattgagatggtccttgaaggaagaataggatttagatggtcaggaagagtagggaaacatcataggcaaggggataaaataaaaataaaaaactattaaatttacagagtagtttacagcttatagagtgaattcacatccactattttatttgttcctcataataactgggtatgttatatgcaaatattatcttcattttacagattrgaactgtggagtccaaagatggacaaacgattaaatggaaaggacattggatttgtagtcagaaagtctgggtttgagttttttattgtgatgggcaaactttaaggtggcccccatgattcctctcctggtgtttatgttttt

SEQ ID NO: 164484 - DNA, 492 bp, Homo sapiens
agagccaaggaagctggtagcatggctcagtccaggtccaaaggcctcggaaccaaggaagtcaatggtgtacccctgtctgaagcagaaagcccaaaagcccagggggccactggtgtgagtcccagaacccaaaagccagagaacctggagttctgatgtccaatggccagagaagagagasagcaagaatgcacccttccttcacctttttgttctatccagacccccagccaattggatggtgccggtgcacattgagggcagatcttcccctgccaatccaccaactcagataccaatctcctccagaaacaccctcacagatatacctggggcaacccaattattctaatcaaatgccaaaccaccagggtttccttttcacaaaagagggacagcctcagtactgactgaagcattgagaataaataatgcaatgattaggaataaataatgctttaccagcaatctgggtatcctttaattcag

SEQ ID NO: 164485 - DNA, 586 bp, Homo sapiens
catcattatgttatctaaggaagattatagaaactttgatttctagtattggatgtaggtcacctcatagaaaamacaaagtaatttttgtaatacatgaacaaagtccaatgattttaagaggacaagtttattaccatcattacaggttcatgatgggttctaaataatccacctagttgttctggttctttttctttcccttatattaatagcaaaataacagtagtaagaactcatttcttcttaataatagtattagctatttagccatggtaatgtttagtgtgtgtttagttggcttttattgttgctgtttcctgaattgtatcatttccttcccacatcaactctgtgaggtgatttttgcacacgtggaaactgaagtataaagaggattgataccttagtgaaaagcatggtggccataaaatagacattatcatattaaggtctaactacctatagagtctgagctcttgaacacatggcagaatttttaacaattttattggggtatgattggcatataataaaccatacatatttaaaatgcataatttgtcaagttttgacataaatatat

SEQ ID NO: 164486 - DNA, 492 bp, Homo sapiens
aaactacctaaccttaccttttccctttccaaaacagaccaactgagccaccctaaatgaaaccttagttccttacttttaggaacaagaacatgatgagatgaatagatttttactaaagtaggtattattctgcattatgtaagcagtaattgtaagaatataaaataattgtgctattctataatcatcaaaaagttgatctgtaggagcccgaagttttaacacatgcaagaaatgtttatgcagttattagtttgctaaaagagtgataccgacatacactcaactgatcagattttaatttagcaagcatcatttctcttcaataaatttacataaaawtatgaaaaaaaatgtagtgacaaacctttacaattccacttagagtgggtctgctggtgacaaattcagttctgtttgtctgaaaatgtctttattttactctcacttttgaaagacatttttgcagtgtgtagaattctagactgt

SEQ ID NO: 164487 - DNA, 569 bp, Homo sapiens
tcttcttgccctttgaggccatgggtctgcctttacccatcctctccaagctgaaatcttagccacggcactcacactgttaatgttatctcagcaactgaacaagctccattccctcaacttctcattttctcagatttttaggagttggctatctcatgtactgatttcctcatccatgacatyaatagtttagcaatttcctgtaaactatggttcgatcatactgaaatatattaactgcgatgagcgatgaaattgccagtgctgttattgcgtgagccatgctttagaaacagtgacaacccttgagagattacattcagggcttgaaatttgtgatttcttctgaacccagagaaatggcatttatttggaaggaggaagtggagggccaagaccagttgctttaatatcaacttagctgtgtattaaagctatttttctcttagaatcagaatcatgcttgtagcatccacagtaacagagtttggcaataaggaaaataggaaaccaaacttatttgggttcaaatgatgtctcttctttcaactcctaaaacatttttg

SEQ ID NO: 164488 - DNA, 614 bp, Homo sapiens
tagataggtaaatctgactaaaaagcagacacactgactctttggctaatgacttcttaaaagtcccttttggatttgatgcaatcaacattagtggtcttgtcacttttttttcctattgattttctgaatatcattttctttaacttaaaaggtcagtgagaaacagagtttgtagataacgttgaatgaatttgtgtgtgtgtgtgtgtgtgtgttttggtcagataaggtttacttttaaaacaaaatgatgaatagtgttttcttaattttaatttacaattcagtctaaaataaaataattctcctggtctttgatttagyattcatttcatcataagacttttcaactcatgtttagtaacatgaaggaccataacaagacctgcatacatttctacaaattagtggagaagaaaacagagttggacttagttagacaataactagaatagcttatgtcactgattggatgtttctataaataaaaaaaataataatctgctgtagcctaggctagttctatacttaccacacgtgaaagtactttggtttttagagagaacagtatctccagttctaaaatttaatatttgtaaccccaatcttag

SEQ ID NO: 164489 - DNA, 614 bp, Homo sapiens
tagataggtaaatctgactaaaaagcagacacactgactctttggctaatgacttcttaaaagtcccttttggatttgatgcaatcaacattagtggtcttgtcacttttttttcctattgattttctgaatatcattttctttaacttaaaaggtcagtgagaaacagagtttgtagataacgttgaatgaatttgtgtgtgtgtgtgtgtgtgtgttttggtcagataaggtttacttttaaaacaaaatgatgaatagtgttttcttaattttaatttacaattcagtctaaaataaaataattctcctggtctttgatttagcattcatttcatcataagacttttcaactcatgtttagtaacatgaaggaccataacaaracctgcatacatttctacaaattagtggagaagaaaacagagttggacttagttagacaataactagaatagcttatgtcactgattggatgtttctataaataaaaaaaataataatctgctgtagcctaggctagttctatacttaccacacgtgaaagtactttggtttttagagagaacagtatctccagttctaaaatttaatatttgtaaccccaatcttag

SEQ ID NO: 164490 - DNA, 494 bp, Homo sapiens
ccttcgccattgttgtttggggcaatctggagtggggctgtagtgcaggagctgtctacttttgggcagtaccttgcagaaccatctgtaaaccaacttagttaagtgtgggctaagaaagaaaagggaacgtagcagcagcagagactataggatttctcttcactagcttatttgtgccatcaggacctgctcaaacctgaactcctatataccacttccatttgatgasatagggctgctctgcatgcctaattgtgtttgccacaaaacatttacatatttaaatgctcacttcatgatcactagctcaagtaatgtagtatcccagggataagcatacagtctctattaaagctcagtaggaagccaaatacaatatctcaaaaggaggatacttatccatagggatagcatggctttgctccaaatgctaagagtctgagctatgatttaccaaaagctccaacagggtccctatcccccactgacat

SEQ ID NO: 164491 - DNA, 494 bp, Homo sapiens
ccttcgccattgttgtttggggcaatctggagtggggctgtagtgcaggagctgtctacttttgggcagtaccttgcagaaccatctgtaaaccaacttagttaagtgtgggctaagaaagaaaagggaacgtagcagcagcagagactataggatttctcttcactagcttatttgtgccatcaggacctgctcaaacctgaactcctatataccacttccatttgatgagatagggctgctctgcatgcctaattgtgtttgccacaaaacatttacwtatttaaatgctcacttcatgatcactagctcaagtaatgtagtatcccagggataagcatacagtctctattaaagctcagtaggaagccaaatacaatatctcaaaaggaggatacttatccatagggatagcatggctttgctccaaatgctaagagtctgagctatgatttaccaaaagctccaacagggtccctatcccccactgacat

SEQ ID NO: 164492 - DNA, 553 bp, Homo sapiens
aacagtgcctctgaggatagtttttttttaaagtctaatgtaaaataaatgctaagatcaaaaaacaatattatagttctatactgcagtatcctctagtttgcctcaaaaggcaaatagctaaaaatcctctaacgtgtaaaaatttggcatctcttacctatttgaattaagtgcaaattgacaatatgtcctttcctatttttaaagatggtgatattggcgtgattgtgtctttgattataactgaaatgttcagtacatagttattcttttttctgtattttgcttgctcatgtatgcaccacagtatcatggcttgcttttgcatcttttggcagacccattgtcatttcatattcttgcactcttctctttacatatgttttattgtctgcatgcactagtctctcttctttatcctcctattcccagccttggagaacttcttagatcccttttttcccttgactgccaccatctacttttatttcctgcgrcactttcctcagacaccatctctattttatctagactagcttaggtatcactt

SEQ ID NO: 164493 - DNA, 515 bp, Homo sapiens
tttatgatttcatgtgtcaggaagtatctttataaactataaaatactatgtaaatgtaaaaggccaactagaacatcagcttcttgacagttgtttctttaacaatratgtataatccaataatgtataatccgtgcttaataatgtataattattaataatgtataatccaataatgtataatccagtgcttaatgcacagcatatatttaagaaacatttgtaaattaatgaatgaagaatgctcaatcgatatatgaacacttttaagtacgtccttgctttaaaaaaaagaaaacttctgtgatttcatttgactactgtgacatcatttctttgtctactgatgcagttttgtctgagtagttatcttatacgtttatatatttatgtaacatatacgccatatatatttttaaaatatcaatttgaatacttattttagcaaaatgatcatgagattattttactaatgttattaattaacattaatatatgtattatatttcatact

SEQ ID NO: 164494 - DNA, 637 bp, Homo sapiens
aaatcaacctcaactagccagtggttctgaaacttactcttaattaacaattaaatacggtttttgtttttgtatttgttttgcaagaacaaagtgtgaagatttgtttcgctgaggcaggtagatagagctatcttcagggtggagaatgaggaggaactttgctttatcttagagacatgcagattccttcatcatgwtcaatttaaaagctattggcctaaagtttattgttattcttaaattttcattctaatatcttgattatgcacttgatttttatgaaaaatgctggtatatttatcttggaatattatgggaaaataaagaagatagaagataaataatgcaaagaaatatctatactggcaaaaatgtttattcagttccctcctcttccatgggaacaccaactcttcccccatttctgactttcaattccaaagactctgctagattagctcagaagttagtaactcaattacaaggaccttcactttttctccattaattttatttttgtaaccaagagaggtgtctatactttagatatgtttgcatttctctgtgccagacatcttacagaatgaatgctttcagttttcaaggaattcttcttgtcaccatgtctcacagc

SEQ ID NO: 164495 - DNA, 637 bp, Homo sapiens
aaatcaacctcaactagccagtggttctgaaacttactcttaattaacaattaaatacggtttttgtttttgtatttgttttgcaagaacaaagtgtgaagatttgtttcgctgaggcaggtagatagagctatcttcagggtggagaatgaggaggaactttgctttatcttagagacatgcagattccttcatcatgatcaatttaaaagctattggcctaaagtttattgttattcttaaattttcattctaatatcttgattatgcacttgatttttatgaaaaatgctggtatatttatcttggaatattatgggaaaataaagaagakagaagataaataatgcaaagaaatatctatactggcaaaaatgtttattcagttccctcctcttccatgggaacaccaactcttcccccatttctgactttcaattccaaagactctgctagattagctcagaagttagtaactcaattacaaggaccttcactttttctccattaattttatttttgtaaccaagagaggtgtctatactttagatatgtttgcatttctctgtgccagacatcttacagaatgaatgctttcagttttcaaggaattcttcttgtcaccatgtctcacagc

SEQ ID NO: 164496 - DNA, 421 bp, Homo sapiens
tttaaaaagagggtaaggtaaaattaaatttttcaaagtctaaatctgcaaaactaacattttttttacatgasagataatttttgaacatagaatctaatcattctggaaatgcaaatcaaaatcacaatgaaatgttaccttacactttttaaggagactattataaaagagaagagataacaaatgttggcaagaatgtggtgaaaagagaactctcatacactgtcggtggaattggaaattgatgtggccattatgaaaaccagtgtggaggttcctcaaaaattttaaaaaacaaacccaaactacgatgggatctagcaatgccacgtcagagtacatattcaaagaaaacaaaaccagtatgttgaagagatatctgcactcccgttattgcagaattattcacaatagtcac

SEQ ID NO: 164497 - DNA, 601 bp, Homo sapiens
atggtttttgaggcattctagaaagctgatttctgtaagacacggtcttactatatttacatagctagtaaatctgtggtgcctatttattctaaaatgtggtaaaatgtgaaaacataaattgatttagaagggtttagataaatttatatataaataatttattatattgtcatcatctattaacaactatttattttcacattagcattcagtttcttcatataataataaaaataatatcttcataataataataatataggtgtataagagatgtgacataggatttagttatatattgttcacatctacactatctatgtcaacatatgcccttcagaaattttaagtcatcagcactcatgtaaataattgaagaataataatagaaaatttgtgatttacaaaagtcctacttcataaaacacaacgtagtaatcattgattctttgtgaaagcaattgaatatttccatttttttttttgcatttaatatgatggacaagaaacttattttaggagaaatttaatctatttgatatataaawgtgttggaaatggcttgaggtattttgttgaaattttgttttttttaatt

SEQ ID NO: 164498 - DNA, 421 bp, Homo sapiens
tttaaaaagagggtaaggtaaaattaaatttttcaaagtctaaatctgcaaaactaacattttttttacatgagagatartttttgaacatagaatctaatcattctggaaatgcaaatcaaaatcacaatgaaatgttaccttacactttttaaggagactattataaaagagaagagataacaaatgttggcaagaatgtggtgaaaagagaactctcatacactgtcggtggaattggaaattgatgtggccattatgaaaaccagtgtggaggttcctcaaaaattttaaaaaacaaacccaaactacgatgggatctagcaatgccacgtcagagtacatattcaaagaaaacaaaaccagtatgttgaagagatatctgcactcccgttattgcagaattattcacaatagtcac

SEQ ID NO: 164499 - DNA, 421 bp, Homo sapiens
tttaaaaagagggtaaggtaaaattaaatttttcaaagtctaaatctgcaaaactaacattttttttacatgagagataatttttgaacatagaatctaatcattctggaaatgcaaatcaaaatcacaatgaaatgttaccttacmctttttaaggagactattataaaagagaagagataacaaatgttggcaagaatgtggtgaaaagagaactctcatacactgtcggtggaattggaaattgatgtggccattatgaaaaccagtgtggaggttcctcaaaaattttaaaaaacaaacccaaactacgatgggatctagcaatgccacgtcagagtacatattcaaagaaaacaaaaccagtatgttgaagagatatctgcactcccgttattgcagaattattcacaatagtcac

SEQ ID NO: 164500 - DNA, 463 bp, Homo sapiens
gacttgtctttggagataggacctttaaagaggtaagtaagtttaaaagaggttaccaagcatcatcaagctttaatgtgatagaactgatgtccttatgaggaggggtcaccagagctctctctttctacacacacacacacacacacacaccacatacacacatggagagagacaaaaggccatatgaggacacagccagaaagctgccacctgaaaaccaggaagaaagtgtttatgagaacccaatcttgatggcaattcgatcttggacttctagtctccagaactgtgggaaaatagatttctatygtttaagccatccagtatgtggtactttgttagggcagccctagcagactaacacaaaaggtttcaaagaggaagtagtgactatgtccaatgctgctgaagtaacgtagaatgaacattgagatttgacaacaactgtagggatttatat

SEQ ID NO: 164501 - DNA, 557 bp, Homo sapiens
tctattgtttaagccatccagtatgtggtactttgttagggcagccctagcagactaacacaaaaggtttcaaagaggaagtagtgactatgtccaatgctgctgaagtaacgtagaatgaacattgagatttgacaacaactgtagggatttatatcaactgtcacgtccataagatctcttttattttaataagaaggagagcttgtttgaaatagtttgaccagacaatgcaaatgaggaaagagagctgctcagttatcaattataaactagttctttgtaatggtcaacattttactttcctattgttttccaatgccattattatgaaattagatttcttgtaccctaattcattctccaaatctctatcaacctaatcttgtgaaaattaaaatyttcatgcacgtcccctagtcaaaaactcttacgtttgagatgaagtctaggtatttaacgatgggttctaaaatcttcctaatacaattccagtaatttgatatgatttattcttcacaaattctagaatgaaatttttgcccttggggtgagtt

SEQ ID NO: 164502 - DNA, 464 bp, Homo sapiens
taatataaagtagctaagccatactgatgggaaacactggcaaacacaccaacggaaaaagagtcagaagactcgaataggtttatcactgacaagcaaatgctcatggataataaaccatatcatcagtgactcaaatgcattgtttgcttgagaattgctaattagagttgccagaaatctcaaaatatacccrtaaacctgacagaaactaaaaagaaccatcacatctacgactgttgggatgggaagaaaagatgccttcatacgttactagtgaaaatatgcaatgctatagcctttctgaaaagagaacaggccatatcgagtacaattaaaaacacatagactctgattcagatatactatcctggaatcaaactcatacacacaaaagcctccatacatagagcatgtgtacaaggatgattattatagcactattcaaaggaagaattaactaa

SEQ ID NO: 164503 - DNA, 591 bp, Homo sapiens
aaagttttagagaaaataaagataaaatatttgagatctaaagctaagcgaagagttgttagacaacaccaaaaagcatgattcattaaaaaaacacaaaaatttgactttattaaaactagaagcttttgctctatgaaagaccctgttaaaaaaatgaaaagacaatttaaaaaagtaggagaaaatatatgcagactacatatagaacaaaggactagtatctaaaatatgttttttgaaagctatcaaaactcaactgttaaattctaaacaatccaattacaacatgagcaaaacacagaaagaaacacttacccaaagacatactgatggcaaatraagacatgaaaagatgttcaacatcatcaataggtcaatgcaaattaaaatcacactgagatatcactctatgcctattcaaatggctaaacaaaaatagcatctataacaaatgacggcaaggatacagagaaaatggatcctcacattgttgttggaaacgtgacttggtaccaccagcatcaccactagaaagcattttggcagtttctttaaaaattaaacatgtaactatcacatgacatagca

SEQ ID NO: 164504 - DNA, 499 bp, Homo sapiens
tagcacagggagatcaatgaaataaaatgaagaagtcaagtgagttttaatagaattacattactatataaattaataagtaactcacaagctacaactaagaatatttataactccttgagaattcaaaagatgttgaacctccaaccttcaacagtaggaaagcagatggagaaaactgctcacctcaaagagaaagtcttctctaatgytcatatagtgcggacaagaaaaacgatgaaaaatgaaacatatctcaaaaggcagaaagtaaaggaacatggacaattatagactgagtccctcccaggaaaatgagtgtgaagttactgaagaaatatgagaccctaccaaagtgatggcccatctccacaacgtcaagtggaatgtcggaattgctatgatccccataccacatttttccaagttggggtgttcattgtggttgcatcagccgtagtttcgtcatttcatattgaatgtgcagggcatctaattt

SEQ ID NO: 164505 - DNA, 525 bp, Homo sapiens
tagcacagggagatcaatgaaataaaatgaagaagtcaagtgagttttaatagaattacattactatataaattaataagtaactcacaagctacaactaagaatatttataactccttgagaattcaaaagatgttgaacctccaaccttcaacagtaggaaagcagatggagaaaactgctcacctcaaagagaaagtcttctctaatgctcatatagtgcggacaasaaaaacgatgaaaaatgaaacatatctcaaaaggcagaaagtaaaggaacatggacaattatagactgagtccctcccaggaaaatgagtgtgaagttactgaagaaatatgagaccctaccaaagtgatggcccatctccacaacgtcaagtggaatgtcggaattgctatgatccccataccacatttttccaagttggggtgttcattgtggttgcatcagccgtagtttcgtcatttcatattgaatgtgcagggcatctaatttctattttttttaatttttcaattcat

SEQ ID NO: 164506 - DNA, 525 bp, Homo sapiens
tagcacagggagatcaatgaaataaaatgaagaagtcaagtgagttttaatagaattacattactatataaattaataagtaactcacaagctacaactaagaatatttataactccttgagaattcaaaagatgttgaacctccaaccttcaacagtaggaaagcagatggagaaaactgctcacctcaaagagaaagtcttctctaatgctcatatagtgcggacaagwaaaacgatgaaaaatgaaacatatctcaaaaggcagaaagtaaaggaacatggacaattatagactgagtccctcccaggaaaatgagtgtgaagttactgaagaaatatgagaccctaccaaagtgatggcccatctccacaacgtcaagtggaatgtcggaattgctatgatccccataccacatttttccaagttggggtgttcattgtggttgcatcagccgtagtttcgtcatttcatattgaatgtgcagggcatctaatttctattttttttaatttttcaattcat

SEQ ID NO: 164507 - DNA, 489 bp, Homo sapiens
tagcttttagcacagggagatcaatgaaataaaatgaagaagtcaagtgagttttaatagaattacattactatataaattaataagtaactcacaagctacaactaagaatatttataactccttgagaattcaaaagatgttgaacctccaaccttcaacagtaggaaagcagatggagaaaactgctcacctcaaagagaaagtcttctctaatgctcatatagtgcggacaagaaaaacgatgaaaaatgaaacatatctcaaaaggcagaaagtaaaggaacatggacaattatagactgagtccctcccaggaaaatgagtgtgaagttactgaagaaatatgagaccctaccaaagtgatggcccatctccacaacgtcaagtggaatgtcggaattgctatgatccccataccacatttttccaagttggggtgytcattgtggttgcatcagccgtagtttcgtcatttcatattgaatg

SEQ ID NO: 164508 - DNA, 510 bp, Homo sapiens
tagcacagggagatcaatgaaataaaatgaagaagtcaagtgagttttaatagaattacattactatataaattaataagtaactcacaagctacaactaagaatatttataactccttgagaattcaaaagatgttgaacctccaaccttcaacagtaggaaagcagatggagaaaactgctcacctcaaagagaaagtcttctctaatgctcatatagtgcggacaagaaaaacgatgaaaaatgaaacatatctcaaaaggcagaaagtaaaggaacatggacaattatagactgagtccctcccaggaaaatgagtgtgaagttactgaagaaatatgagaccctaccaaagtgatggcccatctccacaacgtcaagtggaatgtcggaattgctatgatccccataccacatttttccaagttggggtgttcattgtggttgcatcagccgtagtttcktcatttcatattgaatgtgcagggcatctaatttctatttttttt

SEQ ID NO: 164509 - DNA, 618 bp, Homo sapiens
attgaaaatgaacttattttagaaagaacggtttggaacttgtatgtttactcatttttatgttttctaacttttaatcgtttggaccatttatatttaaaataattttccatatattgggatgtatctgtagatatggagatttttaaaactcttatatgttctttgttcatttactcctcttttcctgagtttattttttaggatggcattttatattcactgttggaatgtttgcttatggtactttgatttttaaaaaatattttgtagtgtttaattgtaggatttacattaagcgtgtagcctatttctataaactataacaacactttacacataagtaccacaattatctaggtgcattgcttctcctatcactatgtcacatagtttacttctacacattgtaaaccccaaagtatctgttatatttggtttaaacaattatatttcaaacaaaatgaaaatataaaatattttatatttattcataaattaaccatttttgtgttctttattgcatagatccgtttccatctggcgtcattttccttcagcctgaaaaacttgaggtagaatttcttatagctcakgtctgcagataaatattgataa

SEQ ID NO: 164510 - DNA, 581 bp, Homo sapiens
tactgctaaggtccaagtattctgtgttctttactgtgtacctctggtattcagcagattctgacccttctggccttccaaacgctgaagttttgtgttagcctgggaattgctctttctctaaatttttcttgctatagtctttatggaatttaattgagggcacatgctgattggcatttagccaaagtctcacagacctttaatttcyggaattgtttttctctgtggagttgtttcctctcgggtattttaactccaaaattctagctgccccaaacctccttgaacatcaatttcagtttccttaatgcaagtagacttgctgagcttggtttggttttcccctccccacactacagtctttaaattgttccccaagcagaaagcaaaacgatcataggattcactctctccaggattacaatgctgcagggcctgctgtccggtgacttagaactcaagtttcctatattttctccgaattttagttgtttttagtggaagaataattctaataggagttacttcttcatggactgaaagaaagtcaccaaaataccagactaattcaatgtttg

SEQ ID NO: 164511 - DNA, 552 bp, Homo sapiens
aggcatacctcagactgggtaatttataaaggaaagaagtttaatggactcacagttccacatgggtggggaggcctcacagtcatggtggaaggcaaaggagaagcaagggcacatcttacatggtggcaggcaagagagtgtgtgcagaggaactgccctttatgaaaccatcaaatctcatgagacttattcactatcatgagaacagcatggaaaaaaccagcccccatgattcagttacctccccctgggtccctcccatgacatgtgggatttatgagagctacaattygagatgagattttggtgaggacacagccaaaccatatcatctgctattccaattacaatgttatggaccaggaatcattaatagtctaccataaaatgattggagtacatgttctaatctagccttaaaataagaacctattctcttttttaagtttttcttcatgaaactggcagggatgtgtagtgatataagtgtgtgtctgacttacagacagacaagcccctttttacgtttttccatctgagaaaacgctg

SEQ ID NO: 164512 - DNA, 413 bp, Homo sapiens
ggaattccataacatttttctgtgagaagaagtttttttccccttaccaaccacataataaaagtacaacccaacgaaaagacatggggcaaatttctaaatcagaaaggattacaaagtgtttcattctttagtttttctctttccttatacgtatcgcttctccaattaccttggagaaaatgtgaaaaagaaaattggaggagaaatgagtaatataaatataaaatagcagtgtcacyatcagcgttaaaatagcgatgtcacgatccgcatttcaaggcactgtttcccccctagataattgtatatacttgggattaaacctggcttttttcacttctcattaagcttgagtatttggtttttgtgtattagttttgcaagtagccacctagtggttttggttttgt

SEQ ID NO: 164513 - DNA, 438 bp, Homo sapiens
gaattccataacatttttctgtgagaagaagtttttttccccttaccaaccacataataaaagtacaacccaacgaaaagacatggggcaaatttctaaatcagaaaggattacaaagtgtttcattctttagtttttctctttccttatacgtatcgcttctccaattaccttggagaaaatgtgaaaaagaaaattggaggagaaatgagtaatataaatataaaatagcagtgtcactatcagcgttaaaatagcgatgtcacgatccgcatttcaaggcactgtttcccccctagataattgtatatacttgggattaaacctggcttttttcacttctcattaagcttgagtatttggtttttgtgtattagttttgcaagyagccacctagtggttttggttttgttaattaaagcatgtgattttctgaat

SEQ ID NO: 164514 - DNA, 423 bp, Homo sapiens
ttttccccttaccaaccacataataaaagtacaacccaacgaaaagacatggggcaaatttctaaatcagaaaggattacaaagtgtttcattctttagtttttctctttccttatacgtatcgcttctccaattaccttggagaaaatgtgaaaaagaaaattggaggagaaatgagtaatataaatataaaatagcagtgtcactatcagcgttaaaatagcgatgtcacgatccgcatttcaaggcactgtttcccccctagataattgtatatacttgggattaaacctggcttttttcacttctcattaagcttgagtatttggtttttgtgtattagttttgcaagtagccacctagtggttttkgttttgttaattaaagcatgtgattttctgaatggttgatactgaaagaatt

SEQ ID NO: 164515 - DNA, 415 bp, Homo sapiens
tagcaagggagtacggggttttccaagaacacatatctaggggtctcaacctagtcgagggagttgttttacactaattctgttattttaaccttttctagttttatccatccctttaattggctttattttatcatttgtktggaatattgtccatttggaattttattcctgcttgatggactggcaggcaggaaatgtggatgtgagggtggctgccacaaggatattcctcactctaatcatgtattccttccagcaaacctcagcaaccccccacaacacatacactcctttcaaaatgtggctgtggatccgagttagaataaaactacctcaacatttataccttaactcctgggactaggttttccaaacatctttttggtggggagatatcttggtggtggtgggt

SEQ ID NO: 164516 - DNA, 443 bp, Homo sapiens
ttacttggtcagctagatccttttgagccttgcttttttaggcttcatcaggattaggatagcctctagggcaggacttattccattactgaggcaacacctttgagtactttgtcctatatcccatgagttaggtttctattctggwtgctaagaataaaattatttcaagtgctatgtgagttccaaggatcatttcctttaagtcccctttgggtggttcttccctggcctaaggtagtttcttcacatgcatctggagctcagcattcagctgaagattcaaggaggaccctccatgggtctctggggtgttctgtgtgtggctgtctcctccagcattctgccctgctaattctagctacctgggccggccagaattcaactcatggagattgctaggctgtgttgcctgtgcctgggctgcattctagatactctcc

SEQ ID NO: 164517 - DNA, 423 bp, Homo sapiens
ttcccctctcccttcccagttcctcctggagacaatccattgataattccctggcacacaactccttgtctcaaggtctgcttctgggagaactggagggatgatgacagtgtcaggaatgctctctttaggggagacaccttcattcagcagtcattcaacagaagagtcaagggaacctcaaactcccctctacagctgcaggggaatcagcttcccaaaggggttttccaytggggaacaggaaccttagatgcaaggggatgagaatggggagcatacaggttctaagcagcagcctgaagagatagttaccacccacccaccatttactagctctacaatcatgcaaaaccttattctctataacctgcaatttcccaccttaaaaatagaataagcagcacctgtcatgaagaatta

SEQ ID NO: 164518 - DNA, 578 bp, Homo sapiens
agatctataaatattttttttcagtagcgagggcgaattgtaggaggattaaatttaaacatggaggtcaggagggtttcactgaagtggtgttttgatagagtggagttttgttcttaattcattattcccctgcaatgtataaggtaagataatacggtcacagwttttgccttgtaattgcagtgtctcctactgaagagagagaatacgttctggtcacactgatgtaggcgctgctatgttattttctccatctaatgctttgtggtttgccctgtctagtgtgtgcaacttgaaataaagtataaatatggatacatggctcagtttatcttcttgatacctaccacaaaaggaacatgtcttgagaacctgcttgtcacagaataacagaagtggaattgacctatgtattagtccattctctcgctgctatgaagaaatgggtaactataaagaaagagatttaattgactaacacttctgcatggctggggaggcctcaggaaatttacaatcatagtggaaggggaagcaaacacattcttcttcacatggtggcaggaaagagacct

SEQ ID NO: 164519 - DNA, 385 bp, Homo sapiens
aggagcaggtgtcaaggtagatgtgtacaggcaagatctattctgagaaaatacctatgaagattatgtgagaaggatcaggatcaagcagagaagaacttcagattatggtacacatcttacacctgtgaaaggagagtgacaggaaggaggattgggtaaggggagcttcagactaaagtacagctctgggacagtctcaggcaggatgatgggaaacctcagagcaaagattgccaaatagagtcccatattgggcaggaacagtcccaccatcayaccactgtcataacgttattggctctgaaaagaccagggagagtgtgaccttgaagtgaatgttgtggcagatagaagcatgagacagctggaagccaattcccct

SEQ ID NO: 164520 - DNA, 616 bp, Homo sapiens
cccaaagtccagccaattcatttcatgtakgcacaaacttattggacataattcctttttaaaaaggttaacttcaatgtaaccactgaaaagctaaattatgaattattttatgtatataacggttttgtagaatttattatttttccatgcttgacctaacttaattctacataataatgtaaaagttacccttgatttttgttagaatatgtgtcactatccagtgaggaagcttctcagtatgggaaatgctaaacattttatatttagtgtagatgtagttataatagaaaccccccaaaatattataacttctggttaaaattagaattcagaatatttttcttatgtcctaagcagcttatacacaaattccattgttcactcaaggtgatgccccatagagttggcatggtttaatctcactaaatgtaggtagtgaagaaaaaaaaaaggggggctcttttcatctgatcacaactaaaaactaagcctaaattcaagtcaaggatatgtgagctatctagtcttatacccaaactccccacaatccaaaactgtttgttcaaatctgacccaaattaaagaagattgagcaaaaaggacagtgaaa

SEQ ID NO: 164521 - DNA, 534 bp, Homo sapiens
aacaagatcaggaaaaaggtgaagatgttccttatgacctctgctttttcacctcatactgaagaagcaaaagattcaaaatacccagcaaaatgctgaaagggaaaagagactgaggaatgacacacttcccaacctcaagacttactataaagctaaagtaagcaagacagtrtagtattagagaaataactgacaaatagatcaatgaaacatgaaaaagctcagaaatacacttacataaatagaattaatttatctttgacaaaggagcaaagacaatataatagagaaaagatagttctttcaacaaatggtggaacaactaaacgttcacaggaaaaaataaaaataaataaatccagatgcagatcttacacgcctcataaaattaattcaaaatggatcatagacccaaatgtaaaatgcaaaactataaaactcttaaaagataatgcaggagaaaacggctgtgatgacttcctggaatggtgatgactttttagattatgacaacaaaggcatgagccatga

SEQ ID NO: 164522 - DNA, 534 bp, Homo sapiens
aacaagatcaggaaaaaggtgaagatgttccttatgacctctgctttttcacctcatactgaagaagcaaaagattcaaaatacccagcaaaatgctgaaagggaaaagagactgaggaatgacacacttcccaacctcaagacttactataaagctaaagtaagcaagacagtatagtattagagaaataactgacaaatagatcaatgaaacatgaaaaagctcagaaatacacttacataaatagaattaatttatctttgacaaaggagcaaagacaatataatagagaaaagatagttctttcaacaaatggtggaacaactaaacgttcacaggaaaaaataaaaataaataaatccagatgcagatcttacacgcctcataaaattaattcaaaatggatcatagacccaaatgtaaaatgcaaaactataaaactcttaaaagataatgcaggagaaaacggctgtgatgacttccyggaatggtgatgactttttagattatgacaacaaaggcatgagccatga

SEQ ID NO: 164523 - DNA, 559 bp, Homo sapiens
tgtgcttagaaattccacatctagggaaatagggttaattgtgtatcataaggcatttacccagacattcactgaagcattcatcaacattatttattgaatgctgtgctagatattttcaatttgcttctctagatctccctctattgcatcaaagagctccctagttattcaccttctggttgraaatgggagattgtaagttcggttatgtcatcagagagggaaagagagtgcagtcaaatgatgtattctctcctgactccctcattgcagaatttccctcatgacctagtacttaagccacaactccactgaaatggctttctctgtatcactcttttattccctctatttggcccttcaaggaataataatttaggtgtgcgttccatttcttgttacccatgacacaggctgatactagagctcactagatggcaggtattttcctagttgctaccattatatcactcatttagctcacattctagttggcaagtagaacaacacaaacataaatgagtaaaacatatgaatttataggagaaaaagtaaa

SEQ ID NO: 164524 - DNA, 593 bp, Homo sapiens
aatcatatgtccaaagtgacattactccacaaacgtgcttgtttgtgagtttatgtgctcttttgtgtgtgtgtgtgtgtgtgtgtgtgcatgctacctaccctcagctgcacttgtatggaccttgagaaattgaataattaaatttattgagagttgttattttagaaaatgcacgtgatgagataaaagtggtgaaaatttttagggtatttgtttgggtgtgattacaaaatagatttttatatatcagtaacttgtatggccttaccatataccaggcactattctaagttatttacaattattcactcattgaaatatcataacagccctgtgaggcagatattataattttcccatttttatcagtgaggacacygaggcatagaagggttaggaaatttgactaatgcgtaagcacttttaaaggatagacttaaatctccaaccctggcaatctgtgtctacagctcatgcccttaaggaatttgagcaggatacaaagagaggaaagtacatgaagtgggaagtaaaataataaaccttacaagaaactgggatactagatggagtaagtgggaaaggaccaa

SEQ ID NO: 164525 - DNA, 524 bp, Homo sapiens
cccaccaggacctacaaatctctgtgcactgtggaaaaaaaaaaaagcaaaagcagtctgattatcgtattgtacttcagctggcaacatgcttactcagtcctcaagcttcctcagcacaatttgagatggaaattttctgatcagaatttttcctataagtcttagaaacttggatttgagcccattatgtaagccagggtttttttttttttttttccaattacttgacaagcaggttgcctttgagtcactcatatgaatggccttgatgtagacattggcacatgctgaaaaggcaaaaaaaaaaaaatttacttttctttgaccctttaagaagattagtctgttcacagttttctcctgtgcttataaaccttcatgtttcctgcctrtcctctcatcttttaagtctctcctaattgatcttcaaagcattgaggctggcttgtgctgggtcctcactactccaggccattcctgcttccccttccctggtacctgcaaggcctgcctccagtcca

SEQ ID NO: 164526 - DNA, 533 bp, Homo sapiens
tgatataactggttataaaattaccaggagagagagtgttggytaaacaagaatagagcctgctttattgatgttaggtttgtcgaataagctagagaacaaagtagatatattaactgctcaaacaaagaaaaagagcttggggtcaagacacaaagaaaaagagcttggggtcaagaggcaaagaaagacaatatgggcatcttactttgaatataacgaagaataaaaggtatcactgaacaggtaatttccaatgagaaaatagatctagaaatcactgtgtaggaaaaacaacttctcacctgtatcaaatattctaaagccctttcattattaactcctaagtagttacacttgatttggatgaagtagcatgaaggcttctgctaggcttttttattcatttctcgatacagtgtgtggtgaggctttagctttacagcctccacatttggctatattttgggataatggaaaataaaatttaatacaaaagaactgtattttgatttaagaaagagaatcatcag

SEQ ID NO: 164527 - DNA, 533 bp, Homo sapiens
tgatataactggttataaaattaccaggagagagagtgttggttaaacaagaatagagcctgctttattgatgttaggtttgtygaataagctagagaacaaagtagatatattaactgctcaaacaaagaaaaagagcttggggtcaagacacaaagaaaaagagcttggggtcaagaggcaaagaaagacaatatgggcatcttactttgaatataacgaagaataaaaggtatcactgaacaggtaatttccaatgagaaaatagatctagaaatcactgtgtaggaaaaacaacttctcacctgtatcaaatattctaaagccctttcattattaactcctaagtagttacacttgatttggatgaagtagcatgaaggcttctgctaggcttttttattcatttctcgatacagtgtgtggtgaggctttagctttacagcctccacatttggctatattttgggataatggaaaataaaatttaatacaaaagaactgtattttgatttaagaaagagaatcatcag

SEQ ID NO: 164528 - DNA, 586 bp, Homo sapiens
tctagaaccaactctaccattaattgtgtgcccttgggcataactttgaacctctatataaatgaagatccttatttataaaatggatttcttaaattgatagacaccaatgarcagaataaacatttttttggctctgaggctcatatataatgctgtacaaggaatgaccttttactgaggtaggcgcttggtgacaaaagcacaaacatagataatggcagtcgaggagggtatatagcaaggatcaaaaagtggcatcggaaaacacaagcatttcttgagcacccactgtgtgcctcacactgtattgggcctggcaaaggctttatagtgcacagcaaagacagcctgtgcaggcagggtgtagagcccatgtcgctggttattacaggagcaactatgatgcagcttgcttttgccactaaatttaaatcagcaaatagactcaaaggaagagattgttcatcttttctgcccagccaccttttcagaaacccaaataattcctataatatagggattatttgtaataattgctataaccttcacttaaggcctgattacatgccacacattatgtact

SEQ ID NO: 164529 - DNA, 461 bp, Homo sapiens
attagtgggttgtaagactcctttatgtattctggatagagatttacataatatccagatttataggttgaaaatatgttcccctagactatgttccccaagactatggaccacattttgatttttgtaatgatgtctttcaaagactgaaaattttaaaattttgtcattattttcttcagtggtttatgttgtttatgttttttgtgtccgaatctaagaaattttgcccattccaaggttgcaaagattaagttttcttctagaagttttatagatttcattttttaaaaaaatttaagtgtaagatctgttttgtaattatttttgtatgtggtatgaggtaaaggtcacggttttccataytgatatttatctgtccaggtaccatttatcaaagactactgtttcctcattaaattgccttgaaactgtgccaaattcatttggctgtatatata

SEQ ID NO: 164530 - DNA, 551 bp, Homo sapiens
caaccttttaacttacagaggacaagccaaactgttgagtaaagtgaccaatctgaattcagtctgcttgtctttttccagtcctatccacaactcctagtgaaggactggggtacttttctgtattaagtgagtaaaggtgagttcttctgctctacatacacacacacaggttagttttgctctatatacaccctcaaaaaaaaaaaagtcctagaacctgctgatattgacaatcatttagtctaacattctcattttaaagataaaaaaaaaaactggctctagggcctaaatgacttgcctaagttcacakaaatacttagtgggagagcccaaggccagaaaaattataattcataccctaagcaaactatccgatattctcttcagtccactgcaaactttacctattttatccttatcataaccctctaaaataggtatcatcttcaccatcttagagatgtgaaaactgaggctcagacactgtgaagtaactcctttaaaacctgacaactgtcaactgatacaatcaagattgacacgct

SEQ ID NO: 164531 - DNA, 517 bp, Homo sapiens
atgaggatttgtctaacgagttctctttctgccacatractatggacctcaggagggttcgaactatattctattcatctttgcattcccagaaggcctcaatcattacttatcaaatagatgaatgaatgaagaaataattctatattgcctgagaatcatgtggatatgattagcgaagacctcaattttggctacaaaatggcctttaagtgttataagtcctatttttattttattcaaggatgacaccaattatatacatcacaaagtatactgttaatttgctattaataaactaaatctgatttttaaaatctgttatacaggggctttttttactgggaaaggcaaaagagggcaaagaagttggcccacctgtagtaagggctcaattttgttgaatgagtgaacaaataaatggatgaataaatgaataaatgaactatatacatgacacaaataatgttacaatttcaaaagagaagggaattattgctgcatggttgacactatg

SEQ ID NO: 164532 - DNA, 486 bp, Homo sapiens
ttgtcattcacttattatttcactcattcagccacataacaaatattactgagcattcactgtgtatagctatcgaacagtggctacagtgacacagaggctagagtgaccaactccacctgggagagtcccagaaaatatcacattataggtaacatttcaactaggtatcagttggggctcttttcaaaaaaaagttatcaccattaagccaggcacggtgactcacacctataatcccaatactttgggaggctgaaggaggaggatagcttgagctcgggagttggaggccaagctggggaacataaacagatcccaattctacaaaaattgttttaaaaaattaactgggtatggtggcttgagcctgtagctccagctactcctgcttgggccaggagtttgaggcagtagcgagctatgatcacamcactgcacaccagcctggtcgacagcaaaatcctgtctcaaggaaaaaaaaat

SEQ ID NO: 164533 - DNA, 609 bp, Homo sapiens
gtttttgcctaaatctcccaagttatttttgttggctgacatattattgacaatgttacgctcccagagtgacgtctgctctttactatataattctttcgtctttagggattctaaaatctcagaacatttgcacttctttccctccgctaagaggaaccaggatccaatattttgcagtaactgacctgtgggtgcctccacaatatccagaaaattgctattatcctttttacaggacacagggcaacttcacatcccaagtttttactttacagtaatatatctcatgttttcaggggtctagaacaccctccagctcacttaggaaatccgctcccaagcagcactgtrctataggaattttgtttcatataaggacttttataaccccttcatttcttagaaatgttctcttactagtaggtcatttgtatatctttgcttataatatctggggaaaaaaagattgcagagccaatgaattaaaaatatgattctaggtctcctgtgtgccaatgaatgccctcattaaagcagaatgagtgagatgagatgggtttcaaagctttccatccctttgccccagagccaccaaggccaggcact

SEQ ID NO: 164534 - DNA, 485 bp, Homo sapiens
taatatctacctattctagtgtttgttttctagctttcattctaatactaacatacagacacagccccatttctccttttctgtaactcagctaagctacagacccagctactgcatcaaaatcctttgggaggtcatctcagcttatcagacagacatcattgtcattattttgrattagactgaaagtagcacagatgtaaacctcttgttgtaaatagttccctgttctatgaatctacccactttaaagtagccaatcatcacatggtacataattggttcctcatcttgacttcatactaggcaataaattttctgacattatggggaacactaggcaatttctgaatcacttcaacctctttctccacctcccacctccttcagagaaacatttaaatatcaaagtccaaggaacagctgagtagaggggacagtaaaaatgggaaaagtgtttcttctcagctttgagctgaaatagt

SEQ ID NO: 164535 - DNA, 558 bp, Homo sapiens
taaatgaaaaaaatgcatattacagggagtgaacaatacagaagtttgwtttttaaaatgctgataaagatataaaggttcctcattctcaaggatctcacgtcacatgtacatatggattttgcttccacatacaggtctcttcagagggactagttcagttgactgatgagtctcattagaaagagccctggctgtggaatccagtggcttttgtgttcttactacatatatcatcaatcagctgtgtgaccctgggcaagtcacttcccatcttctagcctctgtccctctagtgtgaaaagagaggcaagaccaaatgactccaaagttccatgattagccacacagtttacacaccactatttaccgatgaaagagcagaaacaattcaggttctgaagtcactccaaacctgtttttctctttgcaattttattttatgctttcccagacaatgcaaagataaatgccatccagatccatccacatataatcagaattagcaagactttaaataaagagaagtgaaattgcaatttacgactgtagactgag

SEQ ID NO: 164536 - DNA, 558 bp, Homo sapiens
taaatgaaaaaaatgcatattacagggagtgaacaatacagaagtttgatttttaaaatgctgataaagatataaaggttcctcattctcaaggatctcacgtcacatgyacatatggattttgcttccacatacaggtctcttcagagggactagttcagttgactgatgagtctcattagaaagagccctggctgtggaatccagtggcttttgtgttcttactacatatatcatcaatcagctgtgtgaccctgggcaagtcacttcccatcttctagcctctgtccctctagtgtgaaaagagaggcaagaccaaatgactccaaagttccatgattagccacacagtttacacaccactatttaccgatgaaagagcagaaacaattcaggttctgaagtcactccaaacctgtttttctctttgcaattttattttatgctttcccagacaatgcaaagataaatgccatccagatccatccacatataatcagaattagcaagactttaaataaagagaagtgaaattgcaatttacgactgtagactgag

SEQ ID NO: 164537 - DNA, 558 bp, Homo sapiens
taaatgaaaaaaatgcatattacagggagtgaacaatacagaagtttgatttttaaaatgctgataaagatataaaggttcctcattctcaaggatctcacgtcacatgtacatatggattttgcttccacatacaggtctcttcagagggactagttcagttgactgatgagtctcattagaaagagccctggctgtggaatccagtggcttttgtgttcttactacatatatcatcaatcagctgtgtgaccctgggcaagtcacttcccatcttctagcctctgtccctctagtgtgaaaagagaggcaagaccaaatgactccaaagttccatgattagccacacagtttacacaccactatttaccgatgaaagagcagaaacaattcaggttctgaagtcactccaaacctgtttttctctttgcaattttattttatgctttcccagacaatgcaaagataaatgccatccasatccatccacatataatcagaattagcaagactttaaataaagagaagtgaaattgcaatttacgactgtagactgag

SEQ ID NO: 164538 - DNA, 493 bp, Homo sapiens
catggttctacaaatctgttacaacaactttcttggttccctcattcattaacaacctaagtaaattttctgacaggtgtttgcatatctgtatttgagtcaattttaaaaaaattattcttttgcagaggttacgaagatgccatttttactatcttgaacctcacactttcatttgggagggcatacataccaaactgtaatcaatgtgaccacaaattatatatacctatgtacatactggggagggagaatggagaaagaataaagtgattaagaggtcacttcagcaaacagtgaggtcacttacagaatccacaagacctggctttggaccatggctttcccactacctgggtatgacactctggacaagtttactaaacctctcaaagcttcrtttacctcatctataaactagggataataatagtacttgcctcataagattgactatcaacacaaaaattaagtaactatctttttttttttc

SEQ ID NO: 164539 - DNA, 600 bp, Homo sapiens
tgcagcctcttctataaatgcacgcatgcaatagactcattcctgacttcatccattactcaattcacagagttagtcatttaccggtagtggagaaccagaagaaattcagggtaagtgaagacctcaactactgcctaatagatcagctcacaggaagccacagccaggcataaaaagagtagagtcggccgggcgcagtggctcatgcctgtaatcccagcactttgggaggccgaggtgggtggatcacgagctcaggagtgtgagaccagcctgaccaacatggtgaaaccccgtctctactaaaaatataaatattagccaggcgtggttgtgcgcacctgtaatctcagctactcaggaggctgagkcaggagaatcacttgaacccgggagatggaacttgcagtgagccgagatcacaccactgcactccagcctgggcgacagagcgagactccgtctcaaaaaaaaaaaaaaaaaaggaaaagaaaaaaagaaagagtagagtcaggctgatcttgcacaagtcacttcatgtctttagccccagtttctcatgagtaaaacggagatgagaataactgtactaccacg

SEQ ID NO: 164540 - DNA, 362 bp, Homo sapiens
gaacattatgaacaacccaatacattagctagacttaaccactaccgtaatatcaccatgttgtccagtatgatagctattagtcacatatatctatcagcccttaaaatgtgctttgtccaaatgaagatgtgcttcasgtgtgaaatacacaccaccacttgctgggcatttggtatgaaaaaataaagtgaaatatctcattaacatgtttgttacattgattacatgttgaaattataccattttcatgcatctaactaaataaaacatattactaatatttccacatcttttttatttttaaaatatggctactagaaaatttaaaattacatatgtcgctaacattgtgtttcttt

SEQ ID NO: 164541 - DNA, 581 bp, Homo sapiens
caccataatctatgccataaacatattcatctactccaaaatttcctattgccctttttattataattatttattattcgtgataagaatatttcacaatttttaaaatatatagtacagtattgttaactgtagaccctaggctgtacagtggagctctagagcttattcatctcacataactgaaactttgcaccttttgactgatacctgtctgttttccccttttgtcagccattaacaaccatcatcctactctctgttcctatgactgttagaatcctcatttaagtgatatcatgtagtacttgtctttctgatttatttcacttagcatcatgtcttccaattcatttatgttgytgcaaatgacaggatttccttttcggagtggaaataatattctactgtatgtatagaccaaatgttctttatcagttcatccatcgatgggtacttacgttgcttccacaacttggccatttgtgaatactgctggaacgagcatgggagagcagatacctctttgacatattgatttccatttctttggatatatacccagaagtgggattgctaga

SEQ ID NO: 164542 - DNA, 581 bp, Homo sapiens
caccataatctatgccataaacatattcatctactccaaaatttcctattgccctttttattataattatttattattcgtgataagaatatttcacaatttttaaaatatatagtacagtattgttaactgtagaccctaggctgtacagtggagctctagagcttattcatctcacataactgaaactttgcaccttttgactgatacctgtctgttttccccttttgtcagccattaacaaccatcatcctactctctgttcctatgactgttagaatcctcatttaagtgatatcatgtagtacttgtctttctgatttatttcacttagcatcatgtcttccaattcatttatgttgctgcaaatgacaggatttccttttcggagtggaaataatattctactgtatgtatagaccaaatgttctttatcagttcatccatcgatgggtacttacgttgcttccacaacttggccatttgtgaatactgctggaacgagcrtgggagagcagatacctctttgacatattgatttccatttctttggatatatacccagaagtgggattgctaga

SEQ ID NO: 164543 - DNA, 391 bp, Homo sapiens
ccagaattcagatcatcgatgactgacagaatgtttttgctgggcagtcctgatttaactaagactgggttgtggttaaatgaatatgttcagttttttgaattttaatagtagttacaattcactaaatgctatcgctgtttactccttctaaagatatgactggacttcattagtaatgttcaacttttcacaaatatggtgaatgccatcttaaaacttattggagtttggttttatatttagagttatataactggttatattaatatatttaaataytggagaaattccttcattgtctcaaaaccacctgtgctttgtgttcatttgcctctaaagggtaagggctgaagataaagtagcaacatctactttatatttttggcct

SEQ ID NO: 164544 - DNA, 547 bp, Homo sapiens
gaagctttatatgtaacaggrgaaattaattggttccttttgttctgagtcattactgtagtgtatgtttctgtgaactaactaaaggttttcttcttcatcaccaaaacataggtatgcagacaacatagcttgatgagtaattgatatattctttacagaagccaacgtgaatgttcaatgactatttttaataatgacattttattgtcttattcaaaagtaccatagtcatactaattctgattacttcctgggtatctgattctgatatagattttttcaaaggtcttagtcctgccaggattttctcataggcccaatgtcaagtgttcttatttgtagtgttttaatattaacaatttgtatgcatatattattgtgtttctttgaaggacagccaaatctactatcctatcatagttatttgtgctagccatattgctttgatacatatcccgttttaaaaacttactgtgtaccaatatttaagaggaatttttcaaataaaaaatcaaagtacattatgacatggctataagacagc

SEQ ID NO: 164545 - DNA, 564 bp, Homo sapiens
cctttgaggctaaataaataaaatcaggggtgacctttttataaagttatccataccatttatcttaaagatggtctccattgggagaaaaaaaaagattgaatccatcatatttttatctattgctttttctgtgcataagtcacacatttgtatatcragtgtatacatattggttgtaccttgaccttaacaacttctcatttagttgtataccatcgcccgccatgatagatgttacagctaagggtctagccgcaatttcattatagaccccactttgcagggtttcataaataagcagtcaaaatctgctgcaggctatgtaatgttttagtttgcatatctgtattatcattttagttccatattgcggtttccatccatcaactatagagtcatttttcattttcagaggcagttcttacaggaaatcatcttaatgaccatcaagtgaagaggaaatttgcaaagagtaggaaaaatattaaatttcattccaccccaccaaaataaataaataaacaaataagtatataaatggaatgactgaataatgcacat

SEQ ID NO: 164546 - DNA, 564 bp, Homo sapiens
cctttgaggctaaataaataaaatcaggggtgacctttttataaagttatccataccatttatcttaaagatggtctccattgggagaaaaaaaaagattgaatccatcatatttttatctattgctttttctgtgcataagtcacacatttgtatatcaagtgtatacatattggttgtaccttgaccttaacaacttctcatttagttgtataccatcgcccgccatgatagatgttacagctaagggtctagccgcratttcattatagaccccactttgcagggtttcataaataagcagtcaaaatctgctgcaggctatgtaatgttttagtttgcatatctgtattatcattttagttccatattgcggtttccatccatcaactatagagtcatttttcattttcagaggcagttcttacaggaaatcatcttaatgaccatcaagtgaagaggaaatttgcaaagagtaggaaaaatattaaatttcattccaccccaccaaaataaataaataaacaaataagtatataaatggaatgactgaataatgcacat

SEQ ID NO: 164547 - DNA, 414 bp, Homo sapiens
actgtgattcaccagattgacagaattaaaaatatatatagtctcaatagatgcagaaaaatgcttttgataaaatcccaacatttcttcatgacaaaaaccctcaacaaactaggcattgcaggaacataactcaaaataataagagccatytatgacaaacccatggacaatattatactgaatgggcaaaagtgggaattattccctttgagaactagaataagacaaggaagcccactctcaccactcatattcaatgtagcattggaagtcctagccagagcactctggaaaggaaaagaaataaaagccatccaaataggaaaataagaagtcaaactatattcaatgatgatgtgatactatacctagaaaacactacagactctgccaaaaggctactagaataga

SEQ ID NO: 164548 - DNA, 511 bp, Homo sapiens
tgaatgtctcctccaaggcccctccaaagatccacttcagatttaatgttgaaattcaattaccattgtaatagtgttgaaaagtataacctttgagaagtgattagatcacggggcactgcccttgtaaacagattaatgccattattgtgagaacaggttagttatcatgcgagtggactcctgataaaagaataacttcatccctgtttctctccccacttcatgtgttcccttgcctttttgccatgttataatgcagcaagagggtcttcaccagatagacttccmagtctccggaacgatgagtcaaatcaacatctgttctttagaaattatccagtctataatattgcattatagaagcagaaaacagactaagacactcagtaagattgtgaagttccacatgtgtttcctttgcctatgaagtgaactggaaactctcctcagtaagtcagctggagtaatctcaggtctcacctcatttatttaccttcattcaaagatc

SEQ ID NO: 164549 - DNA, 654 bp, Homo sapiens
acctggttttcactttgtaatgctgaaagaggcacagaagtggtaaaaagaaacagtctcaagttgcagacactacccctaatttataacctggcagtggcggcatgatccagagagcgtttctgagtgctgggagagggagaacgcaacaattgtaaggcactaaactcagtgctgtcctgttagagcagaatgtaaaaccagaycaaactcagccaatgccttcctggagggagcagtcaaaccagctctagccagaggagagtcgctgatcccagtgttcagaatttgaattactgcaagcctctccaccacagcctaaagtacaatggggatctaaataattgtgaaatacagtctaggccaaaagaactgcaacactgaggcaagtgctactgctgaactgatcccagaaccagtagactggggggcacatgacctactgagacaccaggtggaaaggcttaaggaagtgctggcatcacttgtcccctaacccaaggctacaaagctcacagctatgaaaaacaaaaacaaaaacaaaaacaaaaaaaaaccctttcttccacttaaggagaggagagaaaagaatggggaggagtttgttttgcatattggatacctgctcaggcacagcagaatataaaattggtc

SEQ ID NO: 164550 - DNA, 654 bp, Homo sapiens
acctggttttcactttgtaatgctgaaagaggcacagaagtggtaaaaagaaacagtctcaagttgcagacactacccctaatttataacctggcagtggcggcatgatccagagagcgtttctgagtgctgggagagggagaacgcaacaattgtaaggcactaaactcagtgctgtcctgttagagcagaatgtaaaaccagatcaaactcagccaatgccttcctggagggagcagtcaaaccagctctagccagaggagagtcrctgatcccagtgttcagaatttgaattactgcaagcctctccaccacagcctaaagtacaatggggatctaaataattgtgaaatacagtctaggccaaaagaactgcaacactgaggcaagtgctactgctgaactgatcccagaaccagtagactggggggcacatgacctactgagacaccaggtggaaaggcttaaggaagtgctggcatcacttgtcccctaacccaaggctacaaagctcacagctatgaaaaacaaaaacaaaaacaaaaacaaaaaaaaaccctttcttccacttaaggagaggagagaaaagaatggggaggagtttgttttgcatattggatacctgctcaggcacagcagaatataaaattggtc

SEQ ID NO: 164551 - DNA, 654 bp, Homo sapiens
acctggttttcactttgtaatgctgaaagaggcacagaagtggtaaaaagaaacagtctcaagttgcagacactacccctaatttataacctggcagtggcggcatgatccagagagcgtttctgagtgctgggagagggagaacgcaacaattgtaaggcactaaactcagtgctgtcctgttagagcagaatgtaaaaccagatcaaactcagccaatgccttcctggagggagcagtcaaaccagctctagccagaggagagtcgctgatcccagtgttcagaatttgaattactgcaagcctcwccaccacagcctaaagtacaatggggatctaaataattgtgaaatacagtctaggccaaaagaactgcaacactgaggcaagtgctactgctgaactgatcccagaaccagtagactggggggcacatgacctactgagacaccaggtggaaaggcttaaggaagtgctggcatcacttgtcccctaacccaaggctacaaagctcacagctatgaaaaacaaaaacaaaaacaaaaacaaaaaaaaaccctttcttccacttaaggagaggagagaaaagaatggggaggagtttgttttgcatattggatacctgctcaggcacagcagaatataaaattggtc

SEQ ID NO: 164552 - DNA, 641 bp, Homo sapiens
tcccatattgaaaagagacttgactccttttcaatggatcctacctccttctgcaagaaatttctgtacttccctaaatcttatgaccttacctggcatgacgtatatgtcatcctctcctctaccctcaccctggaggacagggaacacatctttattggcacccaggcccatgagaacaccctccaacaaaaagatgctactcacaacccaatagrgaccctagctgtccccagaactgaccccaattggaattgtcaggcaacttctgtagacagacagaaaccaggccatatcatatcatgccttctagctggcatatataatatcgcccctgatcttttcctctcctgccttccaaaggtcacaactaaatatgccaccttaagccctaataacaataagggcaaaatcgacctccatttacactttatctcccagtcagccccagacatttgaaaaaaaacattaaaaaatgaaggatggccctcaaacctcccaaagagacttaatcaaagtggcctttaaggtctttaagaatagagaggaagaaccaaaaacctcaaacctaaagaaggaccaggcgaaataccaaatgctggtggctgccactcaacagggttcccaaggcatacagaatt

SEQ ID NO: 164553 - DNA, 532 bp, Homo sapiens
aatatgttacttaacagctgaaaagtttccaaaataaaaagtgatccaacaaatgactacgctttrcctttattgcttcccttgaataatgttaaaggtgtttgcagaaaagaactacagtgctgttgcattcaatttaccattttatatgcctcatactatagtatttatacttatttgaagttgttgcccattcaacaaatatagagtgaaccttttcatgggactcagactggtcactcattcagcaatgaagccaaaaggaccctgggatgagtaaattcagcctcagaccctcagaataggaaagagtaaagaactactgggtaatgtggtctggattttttaaaaataaaaatttcttgccagctaggaatttccagtaaaactgggggacataaaattaaaatacaacaagctattagagagaatttttagatagcacacagaaaaggaaagatggatacaggatgatgtgaaagaaataaggcccaaagcatgactggaaatgggataaggtacgaggacagac

SEQ ID NO: 164554 - DNA, 597 bp, Homo sapiens
cctctctggaagaaccaggccactctgggaaagtttggggttctgagccttgctcagggcttcagcgtcgtttctgtgagtgtcttcttggtgaagctcaagctgcctttcgcatttgccctgctctgaattccaccccctgccaccacatgcatggaggcaaaggtaatgaagggaaatgtgatttgtgtctgggatggatctcctcctgattcatcccagtgtggttttctcacggtggacagagttggcttgcctgcacatcccctctaactcaggaagtccttggctagtgccagggctcagaggagtttgggggagcccgtggattctgatcttgcagcatttctagctctggggccaccgggttcttgactccactctccggttctaacttgaatccctgccccagcctcccgctctcagcacagagcaccttctccatgtcattcccctgcttcaaagccttcctggtcagtgtcttcaattcygaacaacttttgcatacgtgtcaaaacgacccatgtgttgcacactgatcagaaaatatcagcgatggctcctatccccgcaacaggaaatgttacactgagcact

SEQ ID NO: 164555 - DNA, 512 bp, Homo sapiens
ttcccacagcactgggagctgtcctctgccagcttagttttttttctcacttgttttaatggttcacacacccactccatgtctgtctgattttcaggccacaatgcccaagtgtgaccccagaaactccttggtctcactgtctcacaaggtcaggtgaagaggaaagagtagctacctgttagaaagggtatcctctttcctttaccccttctccttgtctactttttcttccattagttcttccatttaaaactcattttcaaaagctcccaaattgytacttggcagcagatggggcactgaaaagaggaatgacaggaaaggtggagcccatctgattgacttttcctccttcattgcaactttctcagggttctctgcattacacatttcaaaaggaaagttctgggcaccatccttggtcatggtgggaatttaattgacttggactcaggtggcactggagccaactggaagccaccaagctctgttctctctccagttcctca

SEQ ID NO: 164556 - DNA, 529 bp, Homo sapiens
taaagtgggaggtaaagaggggattgatcaatgtgggggagtaacagagtgagaggggaatttctctgcccttttggacaaggaaaaataattagtcatcccccctctgcccacttcgtaacatacatacatgtgtgttacaccacaaatgggtaaaaaaataataacactaaagtcgaagtttccaccagattsgtaaagtagctgtgaagaattttaaatggttttgagtaaagtttccaaggaaaggagagacataccctcacagtagtttttctccagaaggactttgggcccgtttacaatctccctctttcaacttctcaacaaaaatatcagtttgaagtctgatcaggcacctgcagtagagtgtccttgcagatggtcccaggatacacagcagcctgtccaagggtttatgtgtttattctctacttcgttctcctcacaaatcatacatttgtgatgtttctcctcataaatcatacattctctacttcgttctcctttgtatctgagaataacgttc

SEQ ID NO: 164557 - DNA, 562 bp, Homo sapiens
cttcctaacattcaataaagccagcattacttttgataccaaagccagaaaacaaaattacaagaaaactacagaccaatattccttatgaatattgacacaaaagtgcctaacaaagtastagcaaaccaaatttggcaacatattaaaaaaaatacgctatgaccaatggggtttattcttggaatgtaagaattgttcaacatatgacactaaatcaatgtaatatgccacattaatagcatgaagagaaaaaaaaccccacatggtcatctgaattgatgaagaaaaaccatttgacaaaattcaacacccatttatgatttttttaaaatgcccaaaaaataaggagtaggaagaaattttcccaacatagtagagtccatatatgaaagtgcaccaccagtatcataatctatggtgaaagactgaaagcttttagcctaagatcaggaacaaaacacgggttcccatttttggccgtatgttcaacacagtactggaagttctaactgaagcaattaggcaagaaaaagaaggaagaaaggaaagcagtaataaa

SEQ ID NO: 164558 - DNA, 572 bp, Homo sapiens
ttcttctcctaggtatatgcccaaaagaattgaaagcagggactggaagagatatttgtacattcatgttcatagcagcctcgtttataatagtcaaaaggtgaaagcaacccaagtccatcaacagatcaatagataaacaaaaattatggtggatgcatacgatggaacattattcagcctccaaaaggaaagaaattctaacacatgccacaacatagatgaactttgagaacattatgctaattgaaatgagccagtcacaaaggacaaagactatatgattccatttatatgaggtacctggaggagtcaaatgcagatagaaagttgaaagggggttaagaggaggcagaatggggagttagtgttcaatgggtacagaaagctgcctcaggcttacttcaccagatcataaaatttttaacttaawtctacttgagtcaccctcttcccacttggacgtccctgttcgcagggctgttcacagctgtgggtcatcggaccaggcaggagccttgtggtctgcatgtgtcacggtgaagccctccttcatcctgcccacagggccc

SEQ ID NO: 164559 - DNA, 572 bp, Homo sapiens
ttcttctcctaggtatatgcccaaaagaattgaaagcagggactggaagagatatttgtacattcatgttcatagcagcctcgtttataatagtcaaaaggtgaaagcaacccaagtccatcaacagatcaatagataaacaaaaattatggtggatgcatacgatggaacattattcagcctccaaaaggaaagaaattctaacacatgccacaacatagatgaactttgagaacattatgctaattgaaatgagccagtcacaaaggacaaagactatatgattccatttatatgaggtacctggaggagtcaaatgcagatagaaagttgaaagggggttaagaggaggcagaatggggagttagtgttcaatgggtacagaaagctgcctcaggcttacttcaccagatcataaaatttttaacttaaatctayttgagtcaccctcttcccacttggacgtccctgttcgcagggctgttcacagctgtgggtcatcggaccaggcaggagccttgtggtctgcatgtgtcacggtgaagccctccttcatcctgcccacagggccc

SEQ ID NO: 164560 - DNA, 475 bp, Homo sapiens
ctcaccctgtagggagtgtctggtgaaggggaggtagaaagttataattgcatttctgaagggctaagtaggaagtggggagcagggagaaatagagaaaagagaaaagaagagaaataataataataacaactcattcactatctcttagaaaaagggggttactcagttacacctacacatctatttcgagatttcttcttcagcaaagyattccttgaccacacgccaggctctgccttaactgaatgtttctctggctggtgggacccgaggaccccacctcttccaaacaccctacctatgtggagatgcctcctggggactccagctttgtcttcacagcggggcatcctttggctggtgctaggggagtaggtgccagggcaggtagagtaggtgatttttactgcagaagggcaggcaggcactgaaaatgaaggaagaccttccaagcatggttcctacagcagca

SEQ ID NO: 164561 - DNA, 465 bp, Homo sapiens
atagatgaactcaccctgtagggagtgtctggtgaaggggaggtagaaagttataattgcatttctgaagggctaagtaggaagtggggagcagggagaaatagagaaaagagaaaagaagagaaataataataataacaactcattcactatctcttagaaaaagggggttactcagttacacctacacatctatttcgagatttcttcttcagcaaagcattccytgaccacacgccaggctctgccttaactgaatgtttctctggctggtgggacccgaggaccccacctcttccaaacaccctacctatgtggagatgcctcctggggactccagctttgtcttcacagcggggcatcctttggctggtgctaggggagtaggtgccagggcaggtagagtaggtgatttttactgcagaagggcaggcaggcactgaaaatgaaggaagaccttccaag

SEQ ID NO: 164562 - DNA, 335 bp, Homo sapiens
ttggaccgctttgagacctttgctggaaatgggaatatcttcacatataaactagacagaagcattctcagaaacttcttcgtgatgtgtgcattctacycccaaatttgaatcttccttttcatgaagcagttttgaaacactctatttgtgcaatctacaatgggataattggaacgctttgatgcccatggtagaaaaggaaatatcctcatataaaaactagacagaaggattcacagaaaatgctttgtgatgtgtgcattcaaatcacggagttgaatctttcttttgttagagcagttttgaaacactgtttctgtggaatctgccag

SEQ ID NO: 164563 - DNA, 568 bp, Homo sapiens
atggagatgagtagggatggcatactgaaacaatagaggtggaatttaagaattgaaggctgacttcctgtgtgtgattgagtgaaaggaaggaaagtaaggtcatcttggatattggatggcagcagttgctactccctaaggcagaggccttaggggttaagcacatatgggttcagtgtggactaagttggggactgagaagataatcttacataagtgcattgctagaaatttagattttctattaatctatgtaagttatgtaaattaaatttagcctaactcttgcctagtgagcaaacagactgtttcagagtgtgaatttttttctattaagttaaagaagtgcattgtatcatgatctgaaagttgaataatcaaatgtgaagartgatcatttgactagccttaaaagtaagttttaagttgtaaaattaatataatgatattatagagaacttggaaaatgtaagaaaagccactcatgaatgactgctcttaagcatccaccacttcataataacctacttcctgcttcggtttttggaatggagggcatagataa

SEQ ID NO: 164564 - DNA, 475 bp, Homo sapiens
cttagaactgatatgtctaaagataatatatatcactcatctattaatgaaaccttacaaaataagacattaaaaatttttcaataaaaaccccagttcattagctttaacagtggcactgctccaactaagaggtaagacagtaacactgtctcaactaaaagataagacagctcaattcaagatgatacaacacaaattatggacaattttatctgatttgcttgctcctctggtcagcttagtcagcttatccttttatattgagaacaaaaaaaaaaaaatcacaccaaagatacctggccaactaacactaagaaaataaaatasataccccccaaacagtatattcatgccattatattacaaagtactgattgacatgccactaaatagacacaatgaacaagcatttattggctagctccaaaaagaacaccttggctgtgtgataccaatctatggccatagttac

SEQ ID NO: 164565 - DNA, 560 bp, Homo sapiens
gatagagactggcccaaaaagccaaaatatttactatctgaaattgtacagaaaatgtttgccaacatctgttagaatcacaaaatcactcaaaatatttctttgctaaatcacatttcaaaagttgccctgtaggtttatgctttcatacgtccttgtcactggaaaatccctcatcatatggttgtgttctgcatttcactgtctaaaactttgaggagaaactctgagaagaagccactcaattccaaatctcattctgtagcaaaaactgttawgtaaaattcccatacatctttacttttatgaattttaaaacgacatctcataaacttgaccttcaagaaatatattcaaggtttcaggcaataaaatatcaaactttgcaaaatattatttaacttgttttaagattagggaaagggataagatatactattttgagaacgactgtgtaccaggcattgtgctagagactacattcatttattgttgttctccttttatatcttttatattttttatagataaagaaactgaggttcaagattgaacgactt

SEQ ID NO: 164566 - DNA, 560 bp, Homo sapiens
gatagagactggcccaaaaagccaaaatatttactatctgaaattgtacagaaaatgtttgccaacatctgttagaatcacaaaatcactcaaaatatttctttgctaaatcacatttcaaaagttgccctgtaggtttatgctttcatacgtccttgtcactggaaaatccctcatcatatggttgtgttctgcatttcactgtctaaaactttgaggagaaactctgagaagaagccactcaattccaaatctcattctgtagcaaaaactgttaagtaaaattcccatacayctttacttttatgaattttaaaacgacatctcataaacttgaccttcaagaaatatattcaaggtttcaggcaataaaatatcaaactttgcaaaatattatttaacttgttttaagattagggaaagggataagatatactattttgagaacgactgtgtaccaggcattgtgctagagactacattcatttattgttgttctccttttatatcttttatattttttatagataaagaaactgaggttcaagattgaacgactt

SEQ ID NO: 164567 - DNA, 560 bp, Homo sapiens
gatagagactggcccaaaaagccaaaatatttactatctgaaattgtacagaaaatgtttgccaacatctgttagaatcacaaaatcactcaaaatatttctttgctaaatcacatttcaaaagttgccctgtaggtttatgctttcatacgtccttgtcactggaaaatccctcatcatatggttgtgttctgcatttcactgtctaaaactttgaggagaaactctgagaagaagccactcaattccaaatctcattctgtagcaaaaactgttaagtaaaattcccatacatctttacttttatgaattttaaaaygacatctcataaacttgaccttcaagaaatatattcaaggtttcaggcaataaaatatcaaactttgcaaaatattatttaacttgttttaagattagggaaagggataagatatactattttgagaacgactgtgtaccaggcattgtgctagagactacattcatttattgttgttctccttttatatcttttatattttttatagataaagaaactgaggttcaagattgaacgactt

SEQ ID NO: 164568 - DNA, 625 bp, Homo sapiens
atgataaagagtcacattactcatcagytgcaccgagagataaaatcaagacttgcagggcatggactattttttggtccaaagaagaagcccgtcaatgtaccctagcttcactgccactatggaaagaaggacccattctctcattttagaagaaaaaaattgaaagggggaaaaaaaacaaatggcaggtgagtgcaacacctgtttctatttcccagtccatctgtgtgagcttcccatgtgttaccgttttaatctgccgaagcataatcagaacatgtccctatgtcaaaaaatactgagagtgaatattcaaatacaaaatgtcgaaataacagaaataggattggggtttgatactttttagactacatttatttccttattttgtgcagcataatctgtagtcttaaaaagcaatgtttattatttttaaaagtaaatttagaatcataacaaagtttagttccacgttaaaattatttcatgtcactgatactttaaaatcatatccctctgcttatatggtgctattttcacccaaaaacaaagttaaattaatatgcaaataattgcatgctgggaaagacagaggtactaataataatcacattgtcagtgc

SEQ ID NO: 164569 - DNA, 483 bp, Homo sapiens
aaaatggaaatcctatcctcaacacaccaaatatgtataatttgtgatgctctgtctacatctttggtgtccagtatggtagtcatgaatcatatgtggctatttaaattcaaaatacagttaattaaaattaagaaatttgacattcagtttctcattctcactagctacatttcaagtgctcaatagtcttattataaggctagtggttaccgtattaaacattacagtcctagaacatttccttcattggagaaagttctattggacagtactggtaaagtagtttttggctattggatattactaggytagtagtttatgaaactaaaaagttcaggtttctgtgtcccaaaaccctagggaatctagcaaatttcaatttaaacattatgtaattggttctccattgcttccctgagcccaggactaaaaaatctttggcagctttcctttcctagttgagattatagccaagaatgg

SEQ ID NO: 164570 - DNA, 606 bp, Homo sapiens
gaggacagcatagtaaggagagtgttttcagcacagtaaaagtagcagataaaggcccttcatccttccattattattatcattgtttgatttggaaaaggaggtatgccagaagaactctgagcctcttaaaaatctttcacaaaagtctcacccagcaacttctgcttccatttcactgttctaaagtatgtcaaatgaccacttctagatcaaaggagtctagaaatgaaataaagaaaatctagatggagtttagctcaatcaacacactacaaaaaaaaaaagtaattcacaatgaaaacaaaaatttatgtgcagacattccattgcaggaatttttaaaatacaaaaatctggaaaaaaaacaaaatatccaatgataataaaacaattaaatgaattatggcatatacatacaaaggaaaacaagcaacctcattatatttatgaagcgaaatgctgtagaaaaatcttatgacataatgttaagtgaaataaagcagtasgcattgtaatacaaaatggtagatctccctagatagcggaaatatgggtgatttccaatattttagctatacaaatctatattttccaatattttta

SEQ ID NO: 164571 - DNA, 679 bp, Homo sapiens
attatggatttaaatggcacatgaaagattcattcccacacacactgggctaagaacttcacatatatgatctcattttctccttacaactctgtaaagtaagwcctatccatattttagagttgaaaaaccagtaagtacagagaaattaaatcacttatttaaatcatatgccaattagtggtagagctgggattcaaactcagatttagagtgttgggacccagctaaacaagttgggttcaagccagagttatagctctattccagtccaagaactatcatccatgtaaacatgacaagagttagggagaggaggctgaaggtttcatccatgccataaaaggcaccaaaatagaatagttagagcctactcactggtaaaaggaaacagtctattctacctccctgtcttggtctagattgactcagtttggaaggagcagaaattattggtgccaggacttggtgactacagctgagcagaaatcaactaaaatccaagataataagaatcttaaataactgaatgggacagtctattgactggaatcttaggagaataggggaactctaagaatagacagaaactaagtgaaaactgaacaaaggctatagatcaaaatcctgtactctacagcttcataacaaattacaccaaaattttacaccaaacgta

SEQ ID NO: 164572 - DNA, 495 bp, Homo sapiens
atccctgttacacttatttcattttgtaagtgtatattttggctgattatttggttaatgttggtcaccatcactgggctgtgagctcctggagagcaaaattatatcctcaattcttagaatagtatttagcactttccagtaacttaatacgattttattttatttagtggatgaacgaatggaatttcaggttctgattgctctctactctttcttaggatggggattctccgccagcacatgccatcaatacttccttttctaaagtctcatattttgggccttttttttttttttcaatctcttgctttccctcctcttcttgccatctccytgtcccctccccttttttttcttcccagtctccaattatgctgatgtcttcaggactgggtttctcccttgtcacaaaactctactttgaccatcttttactttcaggaaaaatttccaaggtctttcatgatcttaagcctgattgcttctgttgtc

SEQ ID NO: 164573 - DNA, 581 bp, Homo sapiens
catgtgcacacattctttgggtagatgacttttacatccattgtttagacaagaaaggtagcaaggttggaaaagcctggtaacaataaaaatgctaggaagatgaagattaagtaccaccagttttgcaaaaggtaacttgtaccatttatatcctgaggaagtgattttgtatgagagagttggaagggaatattgtgaagacacagcaagtacggagttatgatagggtataatgttccagaagggcctgtggagagtggggatgaggtgaggagtcaggagggtaggagagtatatcagtgatactgattccacggtgatgttctataacaatctcaaaacctcattagcatacaacaagtgtttattgctcacrtacctaagacagttttctaggggatgtattgatcttggttgggttctctcacatgtctgggatttggctggcttttcagtcatctaaggtgacttggactggcatgactagggcaacttgtggcatgtgtgttctacacatctctcatcattctgcaggttatcccaggtatgttcttatggcaatggaagagaaaaaaaag

SEQ ID NO: 164574 - DNA, 581 bp, Homo sapiens
catgtgcacacattctttgggtagatgacttttacatccattgtttagacaagaaaggtagcaaggttggaaaagcctggtaacaataaaaatgctaggaagatgaagattaagtaccaccagttttgcaaaaggtaacttgtaccatttatatcctgaggaagtgattttgtatgagagagttggaagggaatattgtgaagacacagcaagtacggagttatgatagggtataatgttccagaagggcctgtggagagtggggatgaggtgaggagtcaggagggtaggagagtatatcagtgatactgattccacggtgatgttctataacaatctcaaaacctcattagcatacaacaagtgtttattgctcacatacctaagacagttttctaggggatgtattgatcttggttgggttctctcacatgtctgggatttggctggcttttcagtcatctaaggtgacttggactggyatgactagggcaacttgtggcatgtgtgttctacacatctctcatcattctgcaggttatcccaggtatgttcttatggcaatggaagagaaaaaaaag

SEQ ID NO: 164575 - DNA, 588 bp, Homo sapiens
ttcaagtttttgtgttgtcctttgttttggaaatgatgttgctattgttgctttcctcaacttctgccacaggggtccataataaaaagtgaatgggttcaaagagaaacaatggctaaagggtctcctgtcacttaggcagaattattattgtctctgcagctattgcccttcasagttctaacacagcaccaaatccttggtaatacaagggcttgaatgaagaatagaaaatgtgtccacagagttagtttttacttgcattgaatctatagttgactatttacattcaaaaatatatatttatttctacaaaaaaagtgttactagaaaaatgtggagcttcaatattcaaacctaagtatgtttccaggtctcagaatattgtaataaaaagttagtgtctaagcacattttttctagtcaaccataaagttataaatgacccttgtaggccttaggatatattgattctcgtgttgcattaataatttgctaattgacacactagtgtgcatttagttataaaagggtacgtgtgtgcgtcaatgtgtgtgtgtgtgtgtgtgtatgtgcgtgaaattgctg

SEQ ID NO: 164576 - DNA, 588 bp, Homo sapiens
ttcaagtttttgtgttgtcctttgttttggaaatgatgttgctattgttgctttcctcaacttctgccacaggggtccataataaaaagtgaatgggttcaaagagaaacaatggctaaagggtctcctgtcacttaggcagaattattattgtctctgcagctattgcccttcagagttctaacacagcaccaaatccttggtaatacaagggcttgaatgaagaatagaaaatgtgtccacagagttagtttttacttgcattgaatctatagttgactatttacattcaaaaatatatmtttatttctacaaaaaaagtgttactagaaaaatgtggagcttcaatattcaaacctaagtatgtttccaggtctcagaatattgtaataaaaagttagtgtctaagcacattttttctagtcaaccataaagttataaatgacccttgtaggccttaggatatattgattctcgtgttgcattaataatttgctaattgacacactagtgtgcatttagttataaaagggtacgtgtgtgcgtcaatgtgtgtgtgtgtgtgtgtgtatgtgcgtgaaattgctg

SEQ ID NO: 164577 - DNA, 528 bp, Homo sapiens
aggaggtgactccctttctatgtctgttcccagcttccagtgccatccccttccactattgacaccacaccctcatttccattgtcccaagttgggggttggcagaatttgcttactccctcagagtccacacagaaggttatatttccagggtttctgcagctacccagggacccactcttttcctgtgcttgccaagaatggattggcctggaggtatgtttgaaaggggtctggtggtgagataactcagggccacagattccctgggcagggcatttacccgctaagggggcagaatgagtatgacacctaccatctaagtttaagcytaaggagaatgtggtcatgtttgtgcaagctgtccacccagttctctgttcctgggaagttcccaaactgccactgacagcattgctcaaagttgtgagggcaaagggtttcctcagcaattttgcagtattcagattgtttcagggcataggggaggagagaagcacccctatctaacccctccacagggttcca

SEQ ID NO: 164578 - DNA, 581 bp, Homo sapiens
aacctaattactgaattgcttaacatattcatcttcccccagctgttatttttattgtctgagtatctccaaataaggataggtaatctgactaaataatggttaattaataacatgctaaaattggtacatttttggaaaagactcttaaaatacaaaccatcaaacaaagcataatagtctcatctggcaagaaataatttcatctcgcaaagcaattgacattttcagaattattttggaaactgatttgttagatttatgttttggagaatttgtttcctcataatagttgtaaaataaattcattttataattcagagtatgaaagcaagttcaagttcagaattttatttgtcaccctaaaccatttttccaaacctaagctttgctttttttcttttgatttgtaaagaaagtcaaaaattatcttcaaaaatgtatacaaaataacaagtktcaatatttgcctccaacctaaagagttgtgagagtagctaagttcgagaaactttcatttaaactaatataatatgaatatatgttcaaaaataattatcagtaaatataattggctaaca

SEQ ID NO: 164579 - DNA, 561 bp, Homo sapiens
aaaattcataaatatacgaggtaatgcatgaggtaattagtattatttagctattccatgtgtacatatttcaaaacatcacattatataccasaaatatatatatctttaattaattaaaatattcagtttaagtcaagtgtaattcttggatcccagtctgaacttacgtctctcatataccctttcattctatactagccctttcttttgtctgctccaaaactaaattcagctgaggcttcactgttgctatatagctcattggtcatggaggcctcgttctaactgaactgctatacacaagacagtgaaaatcttacacaaaacatagcacaaccaatcaatattgtatgattgaacttggacaacaagtggatgatacagggaaagtagcgataacaatggcaagctagttttttatttcattaaatgtattgctttgtaaaacgaaaaagaatttccacgaagaaagaattatatattatttcatccatttgtctcaggcattaaaacccacaacctcccaagattaaaccaggaagaaaatgaaaacctgac

SEQ ID NO: 164580 - DNA, 563 bp, Homo sapiens
aaaggctcttggaactgatatacaacctcagtaaagtttcaggatataaaatcaatgtacaaaaattagtagcatttctatacatcaataatagtctagctgagagccaaatcaagagcacaattctatttacaatagtcacaacaaaaagataaaatatctaagaatagagctaaccaaggaggtgacagatctctacaaggaaaactagaagaccctgctgaaagaaatcagagacaacacaaataaatttaaaaacattccatgctgatttggaagaatcagtatcatgaaaatggccatattgcccaaagcattktacagattcaatatccttatacatataccaacatcatttttcatataattagaaaaaatctatcctaaaatttgtatggcaccaaaaaagagctcaaatagcaaaagcaattctaatcaaaaaaacaaacaaacaaaacaaacaaacaaaaacaaagccagaggcgttgcattactaaacttcaaactataccataaggccacagtaaccaaaacaacatgatactggtacaaaaatagacacc

SEQ ID NO: 164581 - DNA, 635 bp, Homo sapiens
aaaaacaaaacaaacaaatgaacaagtaaatgtatatgattagttagaaatgacaaacaaataaatgtatatgattagttagaaatgatgaaagtagaaccttatgtgaagtctcagagtaaaattactataaacatgttgtatcactgtgtatgccaggttactttgcactttgtagcatcatgaaatgaataaaatattttgactcatttttcatacaaagtatgggatttgagcaaaataatatctaaggtttttttattacatatttatttaataacacattcattaattcataatttcctgaggacctactatgcaagaaactatattaaaaatttgatatgaaacgtaaataatttgtcctcagtcccttagtcactaacaactgactgtgggtaagtcgtgtaaagacagataattttctcccattgcaataaaagtggtaagaaataaaagcgttaataatcccatggaatatcattgtaaataatcataaacaatttgacaratctatatgtatgtagtgattttgaagatggattatggtgtggatcttattttccattaatagaaacattaaattgtatgcttttacactagtaagttatatcagtaccctagctacgaatcac

SEQ ID NO: 164582 - DNA, 586 bp, Homo sapiens
gaaaatttccaccttcaaatctttgaccagtttgttttgtacaattcactcaatctattctgtttcacttaaatcatatgtgttcctgctaaatamctttcctttttgaaaattgttgactgtggattttgtgttttcactacaaaaaaggataagtatgtgaagtaatgaacgtgttaattagcttgactgagccattccaaaatgtatacatatttcaaaccatcatgttgtacacaatatgtacactttttgtctgaaaatttaaaaatgaatgttgaaaattccagaatttttaattgctgtatgatttgcccttcctattaattattgcacataattcaatactctaatcatctttaaatatgcccatttcttggtttcaggaagaacaaaaatttctgaattttcctgtatgatgatatttgaatgtatttgtggaagaaacttttagtgtttccccagttgtatcactgaatgtcagggatcaacaccgcctcatttatcctcatccatggggttttactgctaacaaaatggggataaatccatttccatttcccaaattccatagtgaaggcttact

SEQ ID NO: 164583 - DNA, 586 bp, Homo sapiens
gaaaatttccaccttcaaatctttgaccagtttgttttgtacaattcactcaatctattctgtttcacttaaatcatatgtgttcctgctaaatacctttcctttttgaaaattgttgactgtggattttgtgttttcactacaaaaaaggataagtatgtgaagtaatgaacgtgttaattagcttgactgagccattccaaaatgtatacatatttcaaaccatcatgttgtacacaatatgtacamtttttgtctgaaaatttaaaaatgaatgttgaaaattccagaatttttaattgctgtatgatttgcccttcctattaattattgcacataattcaatactctaatcatctttaaatatgcccatttcttggtttcaggaagaacaaaaatttctgaattttcctgtatgatgatatttgaatgtatttgtggaagaaacttttagtgtttccccagttgtatcactgaatgtcagggatcaacaccgcctcatttatcctcatccatggggttttactgctaacaaaatggggataaatccatttccatttcccaaattccatagtgaaggcttact

SEQ ID NO: 164584 - DNA, 606 bp, Homo sapiens
caatcaaagtgtctatcaatgggcaacgaatataataaaagattaaaagatgatgtacatccattaggaaaaaataattttaggaaaagtttagggaaattaattatggaaaattatgaattataattatgaatgtattattgtgtatattttggaggaggatttaaatatttgcaatgttcttcgatttgaggagacatgttccattaccagtattttaatactcaattttccaatataaacttgaaaaaatgtttattctcctatacttttkgttatattttgtctcatttcttcaaatacagttacttaaataagtaatattctagtacatttaagttttttttttcagattgcttttttacaacactttacttttaccataatatataactcagataatggttgccagatcacccaaatatgcaagagaaaatggaagtctggatttcatgtcaaatgtcttatttttaaagagtatcaacttagtcaactataaaacagtgtctgagccaatacaactttttcttcaggacatgctttctcctcacttgtaaaggggttgtaatggagaattaggtaagagtctataatgagctatgttat

SEQ ID NO: 164585 - DNA, 606 bp, Homo sapiens
caatcaaagtgtctatcaatgggcaacgaatataataaaagattaaaagatgatgtacatccattaggaaaaaataattttaggaaaagtttagggaaattaattatggaaaattatgaattataattatgaatgtattattgtgtatattttggaggaggatttaaatatttgcaatgttcttcgatttgaggagacatgttccattaccagtattttaatactcaattttccaatataaacttgaaaaaatgtttattctcctatactttttgttatattttgtctcatttcttcaaatacagttacttaaataagtaatattctagtacatttaagttttttttttcagattgcttttttacaacactttacttttaccataatatataactcagataatggttgccagatcacccaaatatgcaagagaaaatggaagtctggatttcatgtcaaatgtcttatttttaaagagtatcracttagtcaactataaaacagtgtctgagccaatacaactttttcttcaggacatgctttctcctcacttgtaaaggggttgtaatggagaattaggtaagagtctataatgagctatgttat

SEQ ID NO: 164586 - DNA, 579 bp, Homo sapiens
ttggctttcatgaaaatgaatgtgtttttaatatttcttataaattctcataagggggatatttcttgatagttaytgtacccagtgttaatgatactattttatttgagaccgttttattgtaagaagaagattcactcttttctttttttgttgttacattaattatttttggcaactaaaagaggcagtcatctcacaaagtctaggaaagggagtatgtcttctagattgtgacccctcaaatggacccctcaagtgattttgggtgtccttcctgctgccccactttgtgagggcatctggttccagacccagtccctcctaatctgatttccatttacctgttgagcttggaacatctgttttggaattgccagaatatcctgaattattcacaaaagtgttcttgagggggaagcattaatagagctccctggagagccatgacttctttcttccaaaggtctctctttaaaaaaaaaataatttaattaattttaagtaccgggatacatgctcaggatgtgcagattttgttacataggtaaatgtgtgtcatggttgtttgctgcacct

SEQ ID NO: 164587 - DNA, 579 bp, Homo sapiens
ttggctttcatgaaaatgaatgtgtttttaatatttcttataaattctcataagggggatatttcttgatagttactgtacccwgtgttaatgatactattttatttgagaccgttttattgtaagaagaagattcactcttttctttttttgttgttacattaattatttttggcaactaaaagaggcagtcatctcacaaagtctaggaaagggagtatgtcttctagattgtgacccctcaaatggacccctcaagtgattttgggtgtccttcctgctgccccactttgtgagggcatctggttccagacccagtccctcctaatctgatttccatttacctgttgagcttggaacatctgttttggaattgccagaatatcctgaattattcacaaaagtgttcttgagggggaagcattaatagagctccctggagagccatgacttctttcttccaaaggtctctctttaaaaaaaaaataatttaattaattttaagtaccgggatacatgctcaggatgtgcagattttgttacataggtaaatgtgtgtcatggttgtttgctgcacct

SEQ ID NO: 164588 - DNA, 579 bp, Homo sapiens
ttggctttcatgaaaatgaatgtgtttttaatatttcttataaattctcataagggggatatttcttgatagttactgtacccagtgttaatgatactattttatttgagaccgttttattgtaagaagaagattcactcttttctttttttgttgttacattaattatttttggcaactaaaagaggcagtcatctcacaaagtctaggaaagggrgtatgtcttctagattgtgacccctcaaatggacccctcaagtgattttgggtgtccttcctgctgccccactttgtgagggcatctggttccagacccagtccctcctaatctgatttccatttacctgttgagcttggaacatctgttttggaattgccagaatatcctgaattattcacaaaagtgttcttgagggggaagcattaatagagctccctggagagccatgacttctttcttccaaaggtctctctttaaaaaaaaaataatttaattaattttaagtaccgggatacatgctcaggatgtgcagattttgttacataggtaaatgtgtgtcatggttgtttgctgcacct

SEQ ID NO: 164589 - DNA, 572 bp, Homo sapiens
acactgtgtgttaaggccacgtgaagagaacctatagagaaacagaaacccttagactactggaagacagccaatgagcccgactaaaagagaaaatttaagtcccagacacgtgacccaagctgagccattttgagctacatacatgtctgaagcatgtgagtgaaaaagccatttggacattgtaacatcagcatatcactcccctatgacatcatgagaaatgatgaargagtagttcttttaagcccttacattttaggatgatttgttacacagccacatgtaatcagaatatttctattccctttactgtctttgcatgttaaagaataatataggatttatttttcacaactaataatacatggggccctctccaatcctgatattctgtttttctctagcagttctggcctctactcagtctttcaaattgagacttactaaaagacaggttagtataaattccaagaaaataactcttcctctgttagtggcttcaagtctttttttctttaaagaagggttttatatgattatctggaagcattggctattctttcttgaag

SEQ ID NO: 164590 - DNA, 572 bp, Homo sapiens
acactgtgtgttaaggccacgtgaagagaacctatagagaaacagaaacccttagactactggaagacagccaatgagcccgactaaaagagaaaatttaagtcccagacacgtgacccaagctgagccattttgagctacatacatgtctgaagcatgtgagtgaaaaagccatttggacattgtaacatcagcatatcactcccctatgacatcatgagaaatgatgaaagagtagttcttttaagcccttacattttaggatgatttgttacacagccacatktaatcagaatatttctattccctttactgtctttgcatgttaaagaataatataggatttatttttcacaactaataatacatggggccctctccaatcctgatattctgtttttctctagcagttctggcctctactcagtctttcaaattgagacttactaaaagacaggttagtataaattccaagaaaataactcttcctctgttagtggcttcaagtctttttttctttaaagaagggttttatatgattatctggaagcattggctattctttcttgaag

SEQ ID NO: 164591 - DNA, 579 bp, Homo sapiens
gacatttaagtctgcagaagctgtgcccacagctgccccttcccccaggtgctctgtcccagggagatgggggttttatttatcagaccctgaatggggctgctaactttttatcagagatgccctacccagagaagagaaatctggcaatctggccacagcaaccttgctgagccacagtggactccacccagttggaacttcccagtggctgtttacaccgtgagcataaaaccgcctactcaagcctcagtgatggtggacgcccctccccccaccaagcggggggcatctcaggttgatctcagactgctgctgtgctggcagtgagaatttcaagccagtggatcttagtttgctgggctccattgtgggtgggacctaccgagccagaccacttggctccctggtttcagcacccctttccaggggagtgaatggttctgtcttgctggcagcgttccaggcaccactggggtatggaaaaaaataactcctgcagctagttcrgtgtctgcccaaatggcagcccagttttgtgcttaaaaccggggccctgttggggtaggcaccacaggg

SEQ ID NO: 164592 - DNA, 542 bp, Homo sapiens
taccacattcttttgattactataacattgtagtaagttttggagtcagagaatataagaccatcccctttttaattttattttttcaagattgttttggctaatagatgccccttacaattcaacataaattttaggattgcttttatgaaaaaagctattggaatatgataaagttgttttaaatgtactttgggtaattttgatatcttactattaagttttcctaaatatgaaaaggagatgtatttcmatttagtcagatcttatttaattatgttcagcattgtttcatagttttcagtttacaagtcttttacctccttggttaaatttatttctaaatgttttattcctttggatgcttcagcaaagtgaattatcttattaatttcctttctatatgttaatttctagtatatagaaacacacgtgtttttgagtgtagaccttttttattaagtctagaagtttagttttcttgtggattatttggggaaatccacacacagtgtcatttcctttttaaatataaatcattt

SEQ ID NO: 164593 - DNA, 646 bp, Homo sapiens
cgggcacagtggctcacccctataatcccagtactttgggaggccagtgcaggcaaatcacctgaggtcaggagtttgagaccagtttggccaacatggcaaaaatccatctctactaaaaaaaccacaaaaattagccggtcatcatggcaggtgctccggccatgtgaggttctggcttcccattcactttccgccataactaggattcctgaggactctccagaagctgagctgatgctgccatacttctggtggaactgtgagccaataaaacttcttttctttgtaaattacccagtctcaggtatttctttrtatcaatgtaagaatagactaatacagcatccaggttcacagtacttgctctcccaggccctgtaaatactgtttttgtgtttgtgccataccatatcaaaccccagctttccataaagttaggtgagatacagtgccctgtgcagcatatgttccttattcccagtgtaaaaataaattcagactgaatgatgaagaagtattttaagagagaactcaactgtatttgagaagaaagtttggtgtcccaagtaaagtccattttttttctattggccacctgtaggaaagaaaaataatagtcttgaaagtgatattatgtacataa

SEQ ID NO: 164594 - DNA, 459 bp, Homo sapiens
tatattaagatatattatttatttaacttatttaaaaacttatttatgttttgtctgttgttaaatatgttttcatgataatggtactttattaagattttttatatgataaaataaaaactataattttactatttttgacaaagatacttttgcattgtaaatgaaattttaaacatttagtgcatagataagtagactgcttatgtaaaaaaaatcagtggaatctacaaaaatactagaattaataaggaatttagaaaataacagcaaactaagtgaataaacaaaattcaactgtatttctatataatagctatgaaaaacyggaaaatcaaattgcaaaagcaattatattcaaaatagcataagagtagagccaagatatctgtctagatgcagccaggaatagctcctcccactgagagaccagactatcaagaagacgggtacacttgt

SEQ ID NO: 164595 - DNA, 602 bp, Homo sapiens
aagtttttttttcggagactaagagcacttagagggatctagcactggctctgctgctcaccatgtcaccttgggcaagttactgtaagcatcagttgcctcatctattagaaaaaaataatacaactagaccaaatgtgtaggaggaatattttcatatctaaaaattcagtgatttttaatacactaataaaatatccaggccaggaagaaaaactgaacttctgttacaagaccgatgtggcaggcatggcaatagtgggaagcttcatgaaaaggtagtaagaatgacggcagcttacctcaagccctgagaaaaagcaaatgtgcacagagctaaggtacagattatatattcatgtcctggcaaaagagaaagaaaggtacagaaaagaaatgggagccaggaaccaccacaagacatcccatstgcttgggttcatcccagcccccttacctccacaccatcccacccctcctgggctggcatttttccactctacatgtcctaccatgcacataatgtttcagggaatcaaactcctctaaaatacacaaagcctaaaagatagtcatgtttgcattgggggcaacctggatat

SEQ ID NO: 164596 - DNA, 602 bp, Homo sapiens
aagtttttttttcggagactaagagcacttagagggatctagcactggctctgctgctcaccatgtcaccttgggcaagttactgtaagcatcagttgcctcatctattagaaaaaaataatacaactagaccaaatgtgtaggaggaatattttcatatctaaaaattcagtgatttttaatacactaataaaatatccaggccaggaagaaaaactgaacttctgttacaagaccgatgtggcaggcatggcaatagtgggaagcttcatgaaaaggtagtaagaatgacggcagcttacctcaagccctgagaaaaagcaaatgtgcacagagctaaggtacagattatatattcatgtcctggcaaaagagaaagaaaggtacagaaaagaaatgggagccaggaaccaccacaagacatcccatgtgcttgggttcatcccagcccccttmcctccacaccatcccacccctcctgggctggcatttttccactctacatgtcctaccatgcacataatgtttcagggaatcaaactcctctaaaatacacaaagcctaaaagatagtcatgtttgcattgggggcaacctggatat

SEQ ID NO: 164597 - DNA, 458 bp, Homo sapiens
ggcgaaaccctatctctacaaaaagtgaaaaagctggacatgctggcatttgccagtggtcgtagccactgaggaggctgaggtgggaggatcacttgagcctaagaggtcaaggctgcagtgagctttgatcatgccactgcactcyaccctgttcatcagagtgagatcctgtctcaaaaaaaaaaaaaaagatttgtcaagtagttaaacaatagtattaaccatctggatttggtgatgtttatgtgggttgtcagcttttttaattaataatttgttgtgacatctttcttcatttgaaataaactttcactctcttactaaattgtatttttaattttgtactctttcttctctgttgtcataagtccatactggcattgctgagatattgacattctgcctggccaacagtcttcgcaggttactactgtatcctactcacccacattctg

SEQ ID NO: 164598 - DNA, 458 bp, Homo sapiens
ggcgaaaccctatctctacaaaaagtgaaaaagctggacatgctggcatttgccagtggtcgtagccactgaggaggctgaggtgggaggatcacttgagcctaagaggtcaaggctgcagtgagctttgatcatgccactgcactccaccctgttcatcagagtgagatcctgtctcaaaaaaaaaaaaaaagatttgtcaagtagttaaacaatagtattaaccatctggatttggtgatgtttatgtgggttgtcagcttttttaattaataatttgttgtgacatctttcttcatttgaaataaactttcactctcttactaaattgtatttttaattttgtactctttyttctctgttgtcataagtccatactggcattgctgagatattgacattctgcctggccaacagtcttcgcaggttactactgtatcctactcacccacattctg

SEQ ID NO: 164599 - DNA, 636 bp, Homo sapiens
ttcctatcattgtgaattgtttactctttatcccttcctgaaaactggaatcagtgagataatttgtttttttctgtttatccctctctgttgctgcaacatgatatttcctaaggataacagagggggcatttggtaagagaacaaaaagaagggaagggagagtttttaggaataatatcaaatggaagacaagctaagaggtggtctgtcttagcaatgtgaaagatcttaccacctcataggcactccatccatggaatgagaccgctccatcagccctatccaatgaggaatcagatagaaatgactacttgctttggaagcctgggacaaataaagtgtggggcctaaactaaaataatctagcagccatggaaaatgcttaaatccaaagggaaggtttttttgttcccctctgctgtatagagtaatatataaacttaaactgttatttctatgagagatggaagaactcttatctgtgagtagccagtgaggatgactaattgcacccatgcccctgagggatctatatgagttgcaagayatgactctgaccaggactgtgttgtacattcttgtgggcactatttgtgtgattgatcagctaatgtaagattgcttaattatgtc

SEQ ID NO: 164600 - DNA, 435 bp, Homo sapiens
agagttgcctgggtgacagagttgagaccttgtctcaaaatgaaaaagaaaaatacaactactggtcatgacatgcaaggcaagcacttgctgcctttaacaaaatgacaccaaggtgtccatctcacaaaaggcagcagggtgaaggagacactgttcagcattaytaatatgccagctcagatgacgcagacccacccacccatagctcatgtgtctatacagccttatggaaagtgaggtgttacagcccttgctcaccacactgctacaagtgataatcctatccccagttctatattaaattacattctacatacagaagcttacattacattttaagacttgctcttgcagttcctttaacctaaaggatctttgcaccaatggtcttatctgtacaaatacagataaactctgcagtaatatgaattc

SEQ ID NO: 164601 - DNA, 436 bp, Homo sapiens
cagagttgcctgggtgacagagttgagaccttgtctcaaaatgaaaaagaaaaatacaactactggtcatgacatgcaaggcaagcacttgctgcctttaacaaaatgacaccaaggtgtccatctcacaaaaggcagcagggtgaaggagacactgttcagcattactaatatgccagctcagatgacgcagacccacccacccatagctcatgtgtctatacagccttatggaaagtgaggtgttacagcccttgctcaccacactgctacaagtgataatcctatccccagttctatattaaattacattctacatacagaagcttacattacattttaagacttgctcttgcagttcctttaacctaaaggatctttgcmccaatggtcttatctgtacaaatacagataaactctgcagtaatatgaattc

SEQ ID NO: 164602 - DNA, 621 bp, Homo sapiens
tactcatttacaagctacaacccattgtctttattcttttcatatgttttgaaactcttagaaattctcagaggaacaaagtcatataagtgtaaaaccatgatgatagagtattgctatttcccactactattaagtctactatagtggtcttcatgagtcaagaaagggacggtgccatttttctttgcatggaaattttcaaaacatcagggaaggggtggtttagacaatgtctcaaaatttctttttcaggagctacgacttaacaatgttgtagcgaaggggaaagaagaaggggtgggtatagggagtgagtgaatctatatgacaaatcttgtagtacaagtgtttgtggttaacygagaaacgcattatgagtcaagcctttggaaagaggtgagtaattaaagacaaatgctatgacataatcatttacacgcagcagaaagattttagattaaatctggcctgacccactgctcggcaagtgttatcatggattcttgagaggtattcatttatttactttctaatttggcccatatgtttttttgaaaacaaagaagtttatatttcccataggaactagcctcagtctagtgatggttaagaaggttg

SEQ ID NO: 164603 - DNA, 322 bp, Homo sapiens
actatgtacgtgatcctgcattcagaaatgtgtattttcaaagcagcatcctatctgggaatccatttaactcaccttactcattccagtcccactaccctgccttgactaaacaggcctgtgaacagtaatacccacccgtggacttccgttctgccatcccaaatcccggagacagtgggtgctaggtcagcccctgggtgctgggsagaatgagtgcctcaggaaggtgctggggtggggagggcggtgccaggggagggtgagggagtgcaggggggagaagggatggatggagggtcccttcgcctcccaggaaggg

SEQ ID NO: 164604 - DNA, 642 bp, Homo sapiens
gggtaggcatttctggccataaccattggcatctgtattagtccgttctcacattgctatgaagaaatacccaaaactgggtaatttataaaggaaagaggtgtaactggctcacagttccacattgttggggaagcctcagaaaacttgcaatcataatggaagacaaaggagaagcatgcaccttctttacagggtgtcaggacagagtgagtgcaagcaggggaaatgacagatgcttataaaaccatcagaccttgtgagactcactcactatcatgagaacagcatggcggaaatcgcccccatgattcaattatcttcacctggccccccttgatacatggggattatggggattacaattcaaggtgagatttggrtggggacacagagccaagtcatatcagcatcatttggttgtcttttctcattcattttgagattttttttttgccttttccaacaactttaattctttatactcgatatttgcattctgaatcagatatattatacatatcatctaatttacccatttaaagtatacagtttaattgattttagtaaattcatgaacttgtccctccatcatcacgatcaacattataacatttttgttaccactaaaagagaccctac

SEQ ID NO: 164605 - DNA, 531 bp, Homo sapiens
taaatcttgggcagagaggaaaattgaatggactcaccatacacaaccagagagaccacatggctctgcttctcctttgaaatgggattggtaaggatgacagtgtaatttcctgtgtctctttcactcacttccataatcgtcagtacatgccccgctttaattgtgtgattggactcaaggggtattccatttttatacctatgaaaaaaaattctcaggaattagtatagtcaaaggatttgctctcacacgaaatgatgctttgcatttatttccagtagttaccattttatttctgggggtgggtaaccaaggtacttcgcagggattytgacacgctcccccaccgtggcttccaccagagattccatgccacttccaaaagcaacaaaaggtttttctggaagaaaataaaaaaaaaaaaaggtcaacttactgtaaatggtcatttgatttagtttttcatttcaagtgaaacgtcaaagaccttgagggtctgagtagctgcagttccaagatttcctgtac

SEQ ID NO: 164606 - DNA, 546 bp, Homo sapiens
gggataagaaccagaaaagtaccatggcatagattcctcaccatgggtcactctacagcaagataactgaattctctgtcaactaaatgtgaagagctatgaggtgttgaaaaagcatgagagaaagaaaaattgtccactatgctagggtcttaataaatatcaagacctagaaaataccagctttaaaaaagtaattgatgttgggcaggcwcccaagctttctaagtcatatcaactaagaaaaaatgactccctaggcctaaactggcattgaccttgctgggcaaataagagagtatgaacaaataggacgaagtatgagacggaataaatagagagagtataagtaaatacccagtgcaaacatccagtgcattgaatctgaggatcccaatatgaacaaatgcaggcaaaatgaataagtgactgcacatgttctcacacaccacacagatgtgcaaaataagttactgacataactggtcaatatcatggtttttaagtcaataatatggtttttaaaaaactggaaactaagttata

SEQ ID NO: 164607 - DNA, 546 bp, Homo sapiens
gggataagaaccagaaaagtaccatggcatagattcctcaccatgggtcactctacagcaagataactgaattctctgtcaactaaatgtgaagagctatgaggtgttgaaaaagcatgagagaaagaaaaattgtccactatgctagggtcttaataaatatcaagacctagaaaataccagctttaaaaaagtaattgatgttgggcaggctcccaagctttctaagtcatatcaactaagaaaaaatgactccctargcctaaactggcattgaccttgctgggcaaataagagagtatgaacaaataggacgaagtatgagacggaataaatagagagagtataagtaaatacccagtgcaaacatccagtgcattgaatctgaggatcccaatatgaacaaatgcaggcaaaatgaataagtgactgcacatgttctcacacaccacacagatgtgcaaaataagttactgacataactggtcaatatcatggtttttaagtcaataatatggtttttaaaaaactggaaactaagttata

SEQ ID NO: 164608 - DNA, 641 bp, Homo sapiens
attcacactgccatccaaatgagaaaaaaaccattatttgggcacattcttgtgagaaaacaaatggcagtaaaaatgattctcaataaactgtgcccactcggctaccaaaatcagaaactcttgaaggtctctcataatttattgccacagatcacattctagacacactttcctgtgtaacaaatattttaaaaaagaaaaggtatgtccttcattcataggaagctgagacwatgccatactattctagagacacgtttacaacaaaaatctattcaacaaggctctcaataacttcaaattcatatttgtagaccaacatagttttttgttttttgtttttgctccattaaatgtcattcgttttcattggcaagcttgagctggactcttcagaaagttctaaagaaataactgtaagaggtacacatgctactactcaataaaaagcccttctatgttcaaatcccataaccaatattaattaatttgtgcactgttacccttccagctcaaagacgggaaggaaaaacaacagtgcctctgtctctagaatttgatggcaccaattacagcccaatccaattaagcaagtaatgcactccaaaagggcaagttcaccattatattcagggcga

SEQ ID NO: 164609 - DNA, 641 bp, Homo sapiens
attcacactgccatccaaatgagaaaaaaaccattatttgggcacattcttgtgagaaaacaaatggcagtaaaaatgattctcaataaactgtgcccactcggctaccaaaatcagaaactcttgaaggtctctcataatttattgccacagatcacattctagacacactttcctgtgtaacaaatattttaaaaaagaaaaggtatgtccttcattcataggaagctgagactatgccatactattctagagacacgtttacaacaaaaatctattcaacaaggctctcaataacttcaaattcatatttgtagaccaacatagttttttgttttttgtttttgctccattaaatgtcattcgttttcattggcaagcttgagctggactcttcagaaagttctaaagaaataactgtaagaggtacayatgctactactcaataaaaagcccttctatgttcaaatcccataaccaatattaattaatttgtgcactgttacccttccagctcaaagacgggaaggaaaaacaacagtgcctctgtctctagaatttgatggcaccaattacagcccaatccaattaagcaagtaatgcactccaaaagggcaagttcaccattatattcagggcga

SEQ ID NO: 164610 - DNA, 593 bp, Homo sapiens
atattgtctctctgactttgtttctggagaatatgaaaataataccttacataaatttctgtgatttcaatcatagaattaccagcattttttaaagcattaccttttgtacagccactgtgtaacagctttgagagcattacgtcattttatctcaaattctatcactcccgcccacccaagaggcagacatggaaattgcagctccrttttacagatgtgaacactgcaactcagagacattaagtttcttggccaaagtcatgacattagtaagtggcaaagccaggctacaaattcaggtaaacctgacaccaaagtctgtgctctaaaccaaaacactctgggttctgttcaaagtgaactaaattaggtctaaatacaaccccatatttagtcacctggcacaatcatgatgctatatcaaatcagaggttgcaaactgatgactcctattcctgggcttccagcctttctgcaaagcgctgaagatctggcagcacagggcccatgctgcaccagcaggcacaattgcctcagctggggctggacagtgccagctcatttctggcatgcaggcactcaggtcccaa

SEQ ID NO: 164611 - DNA, 593 bp, Homo sapiens
atattgtctctctgactttgtttctggagaatatgaaaataataccttacataaatttctgtgatttcaatcatagaattaccagcattttttaaagcattaccttttgtacagccactgtgtaacagctttgagagcattacgtcattttatctcaaattctatcactcccgcccacccaagaggcagacatggaaattgcagctccattttacagatgtgaacactgcaactcagagacattaagtttcttggccaaagtcatgacattagtaagtggcaaagccaggctacaaatycaggtaaacctgacaccaaagtctgtgctctaaaccaaaacactctgggttctgttcaaagtgaactaaattaggtctaaatacaaccccatatttagtcacctggcacaatcatgatgctatatcaaatcagaggttgcaaactgatgactcctattcctgggcttccagcctttctgcaaagcgctgaagatctggcagcacagggcccatgctgcaccagcaggcacaattgcctcagctggggctggacagtgccagctcatttctggcatgcaggcactcaggtcccaa

SEQ ID NO: 164612 - DNA, 616 bp, Homo sapiens
cccggtgacagatgtgtggcactagctctgctcactggggaaaataatctgtctgacacagggctaaagtcaacctctgtttgccattcacggtctcagcaatctcatttctctctgtgttgattaccactgcrtatctaagcctttcaagttttctctttccctcaggacctagagggtccctggagggtaaagacagtttgcaaagtcagtgtgattcatgttttagtttctgaaaagagaaatttggcatccatagagctgcagataagaaacgggatgtgtagtgtgaagacaaaagaggcagaagggacacctagtcttcacaaaacagagatacagctgaacataataaggttggacaggtagaggatttgcacagaaacattggctatctaaacactatgtggttgtcataaatacatttgggaaggaagagaaggaataatatgatttctcttcctaacataccttggaaaccagccagtaaggaaacagtctcatcactgagatatttttctttcttcaacaccatgaaaattaatgaaatattataacattttatttatctaggctataaatttgtgtattgatagattcttctttcctggtgata

SEQ ID NO: 164613 - DNA, 616 bp, Homo sapiens
cccggtgacagatgtgtggcactagctctgctcactggggaaaataatctgtctgacacagggctaaagtcaacctctgtttgccattcacggtctcagcaatctcatttctctctgtgttgattaccactgcatatctaagcctttcaagttttctctttccctcaggacctagagggtccctggagggtaaagacrgtttgcaaagtcagtgtgattcatgttttagtttctgaaaagagaaatttggcatccatagagctgcagataagaaacgggatgtgtagtgtgaagacaaaagaggcagaagggacacctagtcttcacaaaacagagatacagctgaacataataaggttggacaggtagaggatttgcacagaaacattggctatctaaacactatgtggttgtcataaatacatttgggaaggaagagaaggaataatatgatttctcttcctaacataccttggaaaccagccagtaaggaaacagtctcatcactgagatatttttctttcttcaacaccatgaaaattaatgaaatattataacattttatttatctaggctataaatttgtgtattgatagattcttctttcctggtgata

SEQ ID NO: 164614 - DNA, 616 bp, Homo sapiens
cccggtgacagatgtgtggcactagctctgctcactggggaaaataatctgtctgacacagggctaaagtcaacctctgtttgccattcacggtctcagcaatctcatttctctctgtgttgattaccactgcatatctaagcctttcaagttttctctttccctcaggacctagagggtccctggagggtaaagacagtytgcaaagtcagtgtgattcatgttttagtttctgaaaagagaaatttggcatccatagagctgcagataagaaacgggatgtgtagtgtgaagacaaaagaggcagaagggacacctagtcttcacaaaacagagatacagctgaacataataaggttggacaggtagaggatttgcacagaaacattggctatctaaacactatgtggttgtcataaatacatttgggaaggaagagaaggaataatatgatttctcttcctaacataccttggaaaccagccagtaaggaaacagtctcatcactgagatatttttctttcttcaacaccatgaaaattaatgaaatattataacattttatttatctaggctataaatttgtgtattgatagattcttctttcctggtgata

SEQ ID NO: 164615 - DNA, 616 bp, Homo sapiens
cccggtgacagatgtgtggcactagctctgctcactggggaaaataatctgtctgacacagggctaaagtcaacctctgtttgccattcacggtctcagcaatctcatttctctctgtgttgattaccactgcatatctaagcctttcaagttttctctttccctcaggacctagagggtccctggagggtaaagacagtttgcaaagtcagtgtgattcatgttttagtttctgaaaagagaaatttggcatccatagagctgcagataagaaacgggatgtgtagtgtgaagacaaaagaggcagaagggacacctagtcttcacaaaacagagatacagctgaacataataaggttggacaggtagaggatttgcacagaaacattggctatctaaacactatgtggttgtcataaatacatttgggaaggaagagaaggaataatatgatttctcttcctaacataycttggaaaccagccagtaaggaaacagtctcatcactgagatatttttctttcttcaacaccatgaaaattaatgaaatattataacattttatttatctaggctataaatttgtgtattgatagattcttctttcctggtgata

SEQ ID NO: 164616 - DNA, 516 bp, Homo sapiens
actatttggtttaattttaaaaataattccacagaataggacacttttattatcccaattttccagatgaggaaatttggcttaaaatgataaagtatcttgcycaaggttaaccattagtaagtagcagagcaatagcatgtcaaaaaaatggaggaaagaaagaagatacctaggaaatctacacatttgtctattctattattgcatgaccagactgtgtttatatttaagtaaggctatgattccttttttagaatattcaccaagcaaatgcttgatgagaagatatagattgtattctttgatgtaaagcatgctaaaacatgagaaataattagaattatggaaatcatttttcaggatcaacacattctagtaacactgagctccaaggaatactcgggtttggttttgttttgttttgttttgttttgttttgttttgttttgttttccctaggagcataaatccctcttttgatgagacagagccctatggcggtgactttcttgg

SEQ ID NO: 164617 - DNA, 508 bp, Homo sapiens
tagttataacaggttcacagacatttctggggctacatttcatgggaacagtgaagaaaaggggctggaatgttcatctcctattttctttccagaaagactttgctgcatattcttctagtggctacttgatgatctggcctctaactaacatgtgttagggagctaattgggcagaaaaacrgtagtgttcaggcagtctgagtagaaacttaacacatccttagcctttcctctggctcaattcagtgataaatccaggattacccattcttcctggaaggagtttgtccatgcactaaatgtcacaacttctatatctcttacccaagggattgtatcctttattatctagctctgggaatcaatgagactttgcattcctgaaactttctaggccacagaaaacaaagacatataatgggctgatttctagtagctatttctccagtatcagagggtgcagactgaaagcaagcacaggcatttgccacagagactctcaaac

SEQ ID NO: 164618 - DNA, 472 bp, Homo sapiens
aaggatcgtaagagactactattaacacaaataaatttgacaatccagaatgaatggatgaattccttgaaacatataacctaccaagattgaatcacaaagaaatcagaaatctgaacagatggataacaatcaaggagattgaattaggaatcatatgtctcccatcaagaaaaaggccaggactagatggtttcatggctaaactctaccaagcatttaaagaagaactaataccaatagttctcaaactgtttcaaaaaattgaggaggaagggatacatccaaactgattttatgaggctagtattaccttgatataaaagccagaaaaagacactaccagaaaagaaaactacaggccaatattactgatgaacatagatccaaaaatcttcracaaaatactagcaagccatatgctattgtaccttagaaggatcattcactatgatcaagttggatttatcct

SEQ ID NO: 164619 - DNA, 534 bp, Homo sapiens
tggcacccctggacttcatagttaagtgaaccaacagttcctatttttttgctttggctggttggaattgggtttgtatcactggcgaatgatgaatacrctgtcttcattcaaatactggtgtgaccaggtccagagaaggaaagcagatgttcagctgtgatatctgggacatagggtctgataggaccagaaacgcagtattggaggttgagaacatgaagtacagtcagagcataaaccaaccatccctatcctgaacttgcagaagatattgttggtctatcacactgttttttcctccagagtcaggagaagccattgcaaccttgttcttcttaacatagagcttcagggagtcactgtcattgatttgaggttgtttgtacattttccactctggaattaatacctaaagagtgtgatgcatttgtccaggaagagtcaatttgcttggacgttaacgcaatcttatgggaatttcttccttgtggattcttgcagatgactgcatggttagtttatcaaaactgc

SEQ ID NO: 164620 - DNA, 574 bp, Homo sapiens
gttgagaaccactgattcaacactaataaatctcaaataaataaatacataagaaagttaaaacttaaaaataaaatgatacatatccataaattccctaagaaaaggaacaatatatctagtgcatgcgtaatacttttaaaacatctaaaatgctggtgtttgcatagataaatcataattaccttgctattagaaagcaaagtaatgaattagtagagattgcttggcaatctgtgatctgtgctcaaggagcaggcctctggcactgcagcaggatactgggtacataacgtggggtgaaacctcatggcatgccgctgtcacagttacatgctgggggsagaagttctgtatttccaagtgtggttgtggagaatcttttcaatgcctcttcaagatgctaataatcaagattaatctttaatggttaatggattcctgactgaagagaaggcactggattgtataatctctgaagggctctcacagttatatgagttccatctcagaggtgggacaacatcaaagaatcaattaccatgctgccccataagacttgttgtcacaagcc

SEQ ID NO: 164621 - DNA, 581 bp, Homo sapiens
tattatgatgatactgttggatgcagaaaaaactatttcagaagaagaatgaaaatcttgtcatcaattatttggaagtttagagtaaacgattatgtaagccacactaaasttgtctttcatcttacaatataatgagagagacagacacacatactcaaataaacctgttataaggcatgatatcctttatgtcacaacagatattcttggaccgtggggaatataattgtcattgattagctgtctctttaacatccatttccccctgcttcctagaaaaatatttagaattttttgagtaatagtcccttttctattttaattatgtagtttggtgttattgagcctattcttaattgcaaaggtggactctgacataggctatcagatccttcctgcttctggtaattggtttagggataaggcaatgagatttaagatgtgcttaggtcaaaggatcaaaggatcttcccttttatttctcaagagacactgtctttctgtggacagtgtggggtgagaatgtgtagtcatgttttttttttctattatgaggacagcctgaaggcagaattgag

SEQ ID NO: 164622 - DNA, 581 bp, Homo sapiens
tattatgatgatactgttggatgcagaaaaaactatttcagaagaagaatgaaaatcttgtcatcaattatttggaagtttagagtaaacgattatgtaagccacactaaacttgtctttcatcttacaatataatgagagagacagacacacatactcaaataaacctgttataaggcatgatatcctttatgtcacaacagatattcttggaccgtggggaatataattgtcattgattagctgtctctttaacatccatttccccctgcttcctagaaaaatatttagaattttttgagkaatagtcccttttctattttaattatgtagtttggtgttattgagcctattcttaattgcaaaggtggactctgacataggctatcagatccttcctgcttctggtaattggtttagggataaggcaatgagatttaagatgtgcttaggtcaaaggatcaaaggatcttcccttttatttctcaagagacactgtctttctgtggacagtgtggggtgagaatgtgtagtcatgttttttttttctattatgaggacagcctgaaggcagaattgag

SEQ ID NO: 164623 - DNA, 534 bp, Homo sapiens
tggcacccctggacttcatagttaagtgaaccaacagttcctatttttttgctttggctggttggaattgggtttgtatcactggcgaatgatgaatacgctgtcttcattcaaatactggtgtgaccaggtccagagaaggaaagcagatgttcagctgtgatatctgggacatagggtctgataggaccagaaacgcagtattggaggttgagaacatgaagtacagtcagagcataaaccaaccatccctatcctgaacttgcagaagatattgttggtctatcacactgttttttcctccagagtcaggagaagccattgcaaccttgttcttcttaacatagarcttcagggagtcactgtcattgatttgaggttgtttgtacattttccactctggaattaatacctaaagagtgtgatgcatttgtccaggaagagtcaatttgcttggacgttaacgcaatcttatgggaatttcttccttgtggattcttgcagatgactgcatggttagtttatcaaaactgc

SEQ ID NO: 164624 - DNA, 625 bp, Homo sapiens
ataggggctgctctggctgtcttctctattctgggctctcacatcaacttactatttcctggggctactcttcttctcagccctgtgaattgctctgtcatcttcatccttcttttttttttttttttttttttttttttgagacagagtttcactcttgttacccaggctggagtgcaatggtgcaatctcagctcactgtgacctccgcctcccaggttcaagtgattcccctgcctcagcctcccamgtagctgggattacaggcataggcaccacgcccggctaattttgtatttttagtagagacggggtttctccatgttggtcaggctggtcttgaactcccgacctcaggtgatccacccacctctgcctcccaaagtgctgggattacaggcatgagcaccaagccttgccatcttcatccttctttatgccatgtgctgtacatggtgctacacagttgtgtgttctaacccttccagggtgttctcagataagttcccaaagtcttactgggtgggttggattggaggtggggcgggggctgaaagagggtcatgacaggttagaatgtctgaaagatgtaaagacagtccttttttgggctttagccgataac

SEQ ID NO: 164625 - DNA, 576 bp, Homo sapiens
tgttggacacattcaaggcaggcctggctttgtggtgacatagccttctttttcttgaacatacaaatatagcttaagttaaatgaataaatctcacarggagtaaaataaacttagatgtttaaagaaggtagataatgagaaacaaagggtatgctcatgatctcccaagtcgcaatagttgtaagtatggatgggctgtgaaactgagccaacatctggtgaggtagtcataggctctggtaagttgaaaataaatgaacatggaaagaaaaatacagtaaacatgacaaagttgtcaatgcaaacatgtaatcaataaatggtcatatttaaaaatataacagcccctagaaaagagagttgatgtcttttataatattttttatttgtaaaagtaatactttcttggtttgaaaaaaattatagaaatatatgaagcaaaaagtacatgttctcatccctctgcctctgtgcctcaatcatttccccaaggtaggtatttttttggtgtgtacccttctagatattttctgcaaaattttctattatgcatgtatgtctccatgtatctct

SEQ ID NO: 164626 - DNA, 576 bp, Homo sapiens
tgttggacacattcaaggcaggcctggctttgtggtgacatagccttctttttcttgaacatacaaatatagcttaagttaaatgaataaatctcacaaggagtaaaataaacttagatgtttaaagaaggtagataatgagaaacaaagggtatgctcatgatctcccaagkcgcaatagttgtaagtatggatgggctgtgaaactgagccaacatctggtgaggtagtcataggctctggtaagttgaaaataaatgaacatggaaagaaaaatacagtaaacatgacaaagttgtcaatgcaaacatgtaatcaataaatggtcatatttaaaaatataacagcccctagaaaagagagttgatgtcttttataatattttttatttgtaaaagtaatactttcttggtttgaaaaaaattatagaaatatatgaagcaaaaagtacatgttctcatccctctgcctctgtgcctcaatcatttccccaaggtaggtatttttttggtgtgtacccttctagatattttctgcaaaattttctattatgcatgtatgtctccatgtatctct

SEQ ID NO: 164627 - DNA, 562 bp, Homo sapiens
ggagatggtaagttcagctacacactaagaagataacaggcagctatttactagccagaaagataagggaatgagtttgattcctcattaaaagcttcatggtttaagtcttaaaaaaaaaaaaaagccttgggtctttgcttattaagttacataaacaaggtgaagtgtcatggrgggttgttgggggaggaatggaaactcttggtgtgacctataattagaaaatttccaaacagagaataaaaacagagactgtatgccacttcctgaccccactcacccatacaggctaagccattggtgggagacagataagaaaacaccaaggaaggaaacttgagccaggctgcttgttcgctctgatgacgactcagcctgggatgggaggattgaatattcccttacagttgaaacgatcctgaaggcatcttaagaaggaatagcattacttccataaaccacaatcaaccaataacatgagggtattccatgctgtccctctataaggaccttccatactgtgttgctaatgaaatagctggagatagttaattaatta

SEQ ID NO: 164628 - DNA, 562 bp, Homo sapiens
ggagatggtaagttcagctacacactaagaagataacaggcagctatttactagccagaaagataagggaatgagtttgattcctcattaaaagcttcatggtttaagtcttaaaaaaaaaaaaaagccttgggtctttgcttattaagttacataaacaaggtgaagtgtcatggagggttgttgggggaggaatggaaactcttggtgtgacctataattagaaaatttccaaacagagaataaaaacagagactgtatgccacttcctgaccccactcacccatacaggctaagccattggtgggagacagataagaaaacaccaaggaaggaaacttgagccaggctgcttgttcgctctgatgacgactcagcctgggatgggaggattgaatattcccttacagttgaaacgatcctgaaggcatcttaagaaggaatagcattacttccataaaccacaatcaaccaataacatkagggtattccatgctgtccctctataaggaccttccatactgtgttgctaatgaaatagctggagatagttaattaatta

SEQ ID NO: 164629 - DNA, 568 bp, Homo sapiens
gaggagccagggcttgcccttggccgtcttcctaggggctctttctaacatgtgagaccttgcagctggatccagctgactttgctttgctgcaccacaggctgtgacccatttcttcaccaccaggatgatattcttttgaggttgcgcccttgagcaaatagctccagtacatctgaatcttggcttgtgcctgatgtgcttatgtggcytgaatgcaggttttctttttccctcatgagagaggattttccaaaaggagtttcaaaaataatctgtggtggatactgaacatgtgctcagcagctaagtgaaaggacaatgatagtgtagcaggaaatggcagtggagtgttaggaatgttgagctttggagtcaggttgcctgagctaaaatctctgctctgcctcttactagcggtgtgaccttggccaagatacttgactttctaaatctgtttgtctgcaaaatggcgataataatgaagtcaccccatagagttgtgaggattcaatgtgataatgcaaatagagaccttggaagagtacctagcttatcataagtattt

SEQ ID NO: 164630 - DNA, 568 bp, Homo sapiens
gaggagccagggcttgcccttggccgtcttcctaggggctctttctaacatgtgagaccttgcagctggatccagctgactttgctttgctgcaccacaggctgtgacccatttcttcaccaccaggatgatattcttttgaggttgcgcccttgagcaaatagctccagtacatctgaatcttggcttgtgcctgatgtgcttatgtggcctgaatgcaggttttctttttcyctcatgagagaggattttccaaaaggagtttcaaaaataatctgtggtggatactgaacatgtgctcagcagctaagtgaaaggacaatgatagtgtagcaggaaatggcagtggagtgttaggaatgttgagctttggagtcaggttgcctgagctaaaatctctgctctgcctcttactagcggtgtgaccttggccaagatacttgactttctaaatctgtttgtctgcaaaatggcgataataatgaagtcaccccatagagttgtgaggattcaatgtgataatgcaaatagagaccttggaagagtacctagcttatcataagtattt

SEQ ID NO: 164631 - DNA, 591 bp, Homo sapiens
tctctctgggaaaaggtagtgactgaaaagcaagagataggccgggcgcagkggcgcatgcttgtaatcccagcactttgggaggccgaggtgggcgaatcacctgaggtctggggttcgtgaccagcctgactaacatgttatgatgaaaccccatctctactaaatataaaaaaatagccaggcatggtggcacatgcctgtaatctgagctacttgggaggctgagacaggagaatcgcttgtaccttggaggcggaggttgcagtgagccgggatcgcgccattgcactccagcctgggcaacaagagtgaaactccgtatcaaaaaaaaaaataaaataaagcaaagaaaagcaaaagatgatcgtgtttcattgatcagttccttttgaaaagtcataaggctattatttgtgcatttactagatgtgtacaatatctcaataaaaagtaattaaactattttttttaaagatccaacaagggaaaaaacaacaggtgccccactgaaataaatcaaatgaagtcatctcttcctgatgtatgtcctaaagcctaaaccctcctggtcttcaaattataccaccc

SEQ ID NO: 164632 - DNA, 591 bp, Homo sapiens
tctctctgggaaaaggtagtgactgaaaagcaagagataggccgggcgcaggggcgcatgcttgtaatcccagcactttgggaggccgaggtgggcgaatcacctgaggtctggggttcgtgaccagcctgactaacatgttatgatgaaaccccatctctactaaatataaaaaaatagccaggcatggtggcacatgcctgtaatctgagctacttgggaggctgagacaggagaatcgcttgtaccttggaggcggaggttgcagtgagccgggatcgcgccattgcactccagcctgggcaacaagagtgaaactccgtatcaaaaaaaaaaataaaataaagcaaagaaaagcaaaagatgatcgtgtttcattgatcagttccttttgaaaagtcataaggctattatttgtgcatttactagatgtgtacaatatctcaataaaaagtaattaaactattttttttaaagatccaacaagggaaaaaacaacaggtgccccactgaaataaatcaaatgaagtcatctcttcctgatgtawgtcctaaagcctaaaccctcctggtcttcaaattataccaccc

SEQ ID NO: 164633 - DNA, 652 bp, Homo sapiens
gcagcactatttatgttagctcaaaactagaacctaaccaaatgcctatccacagaaaaaatgagtcaattctgtgatttcacataatggaatattatagagcaaacaaaccacaaatacgtcccaaaaaataaatgaatcttactacataaagttgaaacatggcaatcggacacaaaagagtgcatacgatattatttcattcatacaaaagcaggtaaaattaacctatggtgttaaaagtcaggaaagtaacagcgactggagaggggaggagagggcyttttaagagctgaaaatattctatttgttgatctggatgctggatatatgggtgtattcagtttgagataattcatcatgctgtatacttatgaactataaactcttctataaatgccaaacttcaataaaaagtattaagattttgtgtaggcagaaagcacagaaacagagcaatgaggcatgaatttggtattagagaagcaaatatctgtcactggagaaatgactgcatccaacctctttaaaggacttaaggaagtaaatattttattgctaataggattccttatcataagtcaaataatgaaaaaaggaaagactgctaaatatcttggaatggattgaagaaactccaaagtaacaacag

SEQ ID NO: 164634 - DNA, 652 bp, Homo sapiens
gcagcactatttatgttagctcaaaactagaacctaaccaaatgcctatccacagaaaaaatgagtcaattctgtgatttcacataatggaatattatagagcaaacaaaccacaaatacgtcccaaaaaataaatgaatcttactacataaagttgaaacatggcaatcggacacaaaagagtgcatacgatattatttcattcatacaaaagcaggtaaaattaacctatggtgttaaaagtcaggaaagtaacagcgactggagaggggaggagagggctttttaagagctgaaaatattctatttgttgatctggatgctggatataygggtgtattcagtttgagataattcatcatgctgtatacttatgaactataaactcttctataaatgccaaacttcaataaaaagtattaagattttgtgtaggcagaaagcacagaaacagagcaatgaggcatgaatttggtattagagaagcaaatatctgtcactggagaaatgactgcatccaacctctttaaaggacttaaggaagtaaatattttattgctaataggattccttatcataagtcaaataatgaaaaaaggaaagactgctaaatatcttggaatggattgaagaaactccaaagtaacaacag

SEQ ID NO: 164635 - DNA, 403 bp, Homo sapiens
tctttctctataaacatctcagttgtgctgttgaaaggaatgtcggcacagtcatccccacgaacaggcatatccaagtagaataaaataaagcatctacacgaagtcattttcagaagattgaaatcacacttttgtgttctgagaataacctgtggcgtaaaccagaacaccaccttcttagccgggcaacaccgtttggcccatcracaggaagtctgccaaagccaagggtgggctcatacaacacattatgaacaagaaatgttgaaatgattcacaatgactgagccacccacccacctgggggatcccgtgacaccgacaactcaggtaatgaaatcacatgggcttggggaacagagaactgggttcaaatcctggttcctccacttcttagagc

SEQ ID NO: 164636 - DNA, 512 bp, Homo sapiens
ggggaagacgaccgacagcaaacacccgagtgggcagggacaccacacagatgcagccacgaagacggcagggagacggacgccagacaggacggtgctgccgcacgggaccagcgcgaggcaggacttactcatcgctttacacacagccatacaataatcctcagactcaaaattgttcctgttgccgccgcagccaccatatataaagcgcacgcactttcccttggagaggtcgaagtaccaacgaggcatcacggcccggcagggccccgtcatcgcctcctgggagcagacagctgtgtgaaaatggtcagagtgtcagcaggacagaggcagtgacgtcaaatgcttcaaaatgctacaggcyggcgagctgggggatgggctgggggaggcctgagactggacggagcctggaggcccggtggccgaaagctccagctcaggccagccttgctgaggacaagttgcttccccacagagtagagacatttaggaactgggataaa

SEQ ID NO: 164637 - DNA, 217 bp, Homo sapiens
gcaggaagcaagaaggcaaagtcaccaaacagaaggggctaaggaaccaagaggtcagggtgcaggaagggtcatctacgtggatactgaaatcactaagaactgmcagcagctgaagacgtggggaagagaggcagtaaacccagggctaacccattcttcctggaatgaagcaagtgacttgggagtttgtagatggtggcaacgaggggtagta

SEQ ID NO: 164638 - DNA, 521 bp, Homo sapiens
cttactctaccctgctgctgtagtcaagtacctgggagtcctcccttctctttcctttctctacttctccagataatcaccaagtcctgtaattcaaattttaatgtcccctrtcaattccctcctccctttccccccatagcagttccagtaccttacaccctctcttttacctctccttctccatctctcccacatcacacaatataaagaaaaatctttttttttttttaatagcacagtccaccttagccttggaggacacctactctgttgagtgaatgctttggtcagccccacctggggacatgccagaataacccagatgctcactggattgctatcaaaggaaggcagctcaactaactgcagggctttttctcggccaccctgcctatgctgcgggagggaaatgaattacttggaacaatggaggagataccaagggatcaaagcaaaagagtgagaaaaaatagatgaaccaatcctggaagtagagctgagaaacaagcattaggaag

SEQ ID NO: 164639 - DNA, 521 bp, Homo sapiens
cttactctaccctgctgctgtagtcaagtacctgggagtcctcccttctctttcctttctctacttctccagataatcaccaagtcctgtaattcaaattttaatgtcccctatcaattccctcctccctttccccccatagcagttccagtaccttacaccctctcttttacctctccttctccatctctcccacatcacacaatataaagaaaaatctttttttttttttaatagcacagtccaccttagccttggaggacacctactctgttgagtgaatgctttggtcagccccacctggggacatgccagaataacccagatgctcactggattgctatcaaaggaaggcagctcaactaactgcagggctttttctcggccaccctgcctatgctgcgggagggaaatgaattacttggaacamtggaggagataccaagggatcaaagcaaaagagtgagaaaaaatagatgaaccaatcctggaagtagagctgagaaacaagcattaggaag

SEQ ID NO: 164640 - DNA, 405 bp, Homo sapiens
cttggtggaaatgccccctagacttctgtcccctggcacttagtaggattcaatgtttttgcgattggattaacttgaaaagcacttccgaaaggtacttcttaagtagaaaagatgctgcctccctgtggggataaatttggccatcaytcgggaaaatccattttatgtttttatacctgtgaccatatgacatgttatgttcttggaagttagtattatactgtatctgtgggagaggcttgcccttttgtggggaaatgccttagatgagcctcttgccagggcacgcacatacaccaaaaagactacaaacaccgtgatgcaattaaaggtgacaaataagtacagatcactgctggtcactgtgctgggtgatggggacaccaggatgactgagttgca

SEQ ID NO: 164641 - DNA, 523 bp, Homo sapiens
gtttttgggtgggagcacttattaggattttccatggcccagagagactgtaccgactctgtcctccttccctggttatgcctctgtgcttaccaagcagccttccgaggactcatgtggtcttgcagatacactgataggaaggagktaagctggctggagaatttgagtacattacttcaggcctcggaaagaataactccctgagtaaattaataaaccggcattctagtttctcagtctctggaaactttggcttatgtgaactatcccctgagactggttaatttggaggggacagacagaactgtgttttagaagctgctcagccgagatcagatcttcgctgatgatggctctgccgggccatgactgtgttgtagggcttgtcttaggaactgcaagtgggccagctaatcacagttttatgatgagctacttgatttctggttccgtttggtacgccccattttatgcagagctaaggcactttcacaggctgggtttcgtactcacaaagctt

SEQ ID NO: 164642 - DNA, 545 bp, Homo sapiens
cctttgcaacttccgtgggaattgtcctggcgtgggaaacgcccccgcgctctttggcacttagggtgtgagtgttgcgccccttgccgcagcgctcagggcagcatcccgctcgaggatgcagggttctcaccaagcagtgagggggactcacgcgccgccggggaggcgagccaggctccgagaagggagcaggctcgagccgctgggttttcgcaagccttggggcctctggccgcccttccatgcctccrggcgcgggcggctcagcaggtccccggcttcgggaagttttgtgcgcggatcgctggtggggagggcgcgcgggccagtggctgagcttgcagcgaagtttccgtgaaggaaactgcatgtgcctttggaggcgactcgggactgctgtagggtggactgggtgtctatggagttgcgggtcagagcgagtagggtgggtcctttcctgggacaggactgggaactggggctcgaagtaggggaggaaagagcacagaggaagccaggctgcatagggtgacttgcttttt

SEQ ID NO: 164643 - DNA, 545 bp, Homo sapiens
cctttgcaacttccgtgggaattgtcctggcgtgggaaacgcccccgcgctctttggcacttagggtgtgagtgttgcgccccttgccgcagcgctcagggcagcatcccgctcgaggatgcagggttctcaccaagcagtgagggggactcacgcgccgccggggaggcgagccaggctccgagaagggagcaggctcgagccgctgggttttcgcaagccttggggcctctggccgcccttccatgcctccaggcgcgggcggctcagcaggtccccggcttcgggaagttttgtgcgcggatcgctggtggggagggcgcgcgggccagtggctgagcttgcagcgaagtttccgtgaaggaaactgcatgtgcctttggaggcgactcgggactgctgtagggtggactgggtgtctatggagttgcgggtcagagcgagtagggtgggtcctttcctgggacaggactgggaaytggggctcgaagtaggggaggaaagagcacagaggaagccaggctgcatagggtgacttgcttttt

SEQ ID NO: 164644 - DNA, 637 bp, Homo sapiens
tgtggtcaggtcagagtctgctcacacctgtggggctccttagccaccaaagtgtccactgcagctcccggctccaggtagacctggacaaccactcagcctcagggaaaaccatccagaggctgccctgtctgtctcctgggcaaactctctcttgctcaccttttctttctctctttttcatgctggttctaaattatgctaactggttaaagacagcctgggttgttttctgaacaccacctcgaggtacaaggrtagggtgttcactctgacaataaccaggtgagagggaggtgctccctgtgtgctgtagtgggaacagcccgggccccttcccctaggactccttccctgcttgtggagggttcctgcccgaggatctcccacacctcctcctcatcccaggtacccagaactgcacatgtgctcccttactcacccaaccaaagccagtccttggggtatcacacgtaggggaaaagataactggaatgtaaagggtgtggttccagacccagctctgccacctacgagctgcatgacctcccagaatctcagtcccttccactgtgagacagggctgcaccggtggaaaaagtgctaacctagtcaatgcattcacaagtcggtgaaa

SEQ ID NO: 164645 - DNA, 345 bp, Homo sapiens
aatacgtgtaatatagaaatggtgtctacattggtgaaccacctgttgtaaccttgaaaataaagaagccaattcrgaattattaacatgtttgatagtagcagtttctatatttttagtggcatgtacaacataagcagaatcagagacaatatttaaaggtttggggaaatcctgtaaggcagtaattacagcaattaaccctgccttctgagcagaggtataagggttagaaataagcttgtctgtaggacccacataaccagcatttccattactggagctctccgtgaacactgtaacggcctcaggaataggctgatctttggtcaatcgagggaccac

SEQ ID NO: 164646 - DNA, 345 bp, Homo sapiens
aatacgtgtaatatagaaatggtgtctacattggtgaaccacctgttgtaaccttgaaaataaagaagccaattcggaattattarcatgtttgatagtagcagtttctatatttttagtggcatgtacaacataagcagaatcagagacaatatttaaaggtttggggaaatcctgtaaggcagtaattacagcaattaaccctgccttctgagcagaggtataagggttagaaataagcttgtctgtaggacccacataaccagcatttccattactggagctctccgtgaacactgtaacggcctcaggaataggctgatctttggtcaatcgagggaccac

SEQ ID NO: 164647 - DNA, 585 bp, Homo sapiens
aaaaaaattggaacacaaaagcatgtgctgtctataagaaatcaacactaaatataaagtcaaagataagttaaaatgaaacagatgtaaaaaggtatatatgatgaaaatactaatcaaaagaaacctggagtatctatgttaatatcagaacaaggaataaaacccaggataaagaggtacatttcataataaaaagatcacttcctcaaaaagatataatagctttcaatgtgtgtcacataacagttttaaagtacaggaagcaaaaacatacagaagtgaaaggagaaatagataaatccataattagagttagaggtttcaacacccctctcttagtaattgatagaagtagactaaaaattcaacaaaaatacagaakacttgaacaacactatcaatcatcttgagctcattgatatttatagaacatatcaccccactcagtatcttctactcagagaacttacagtgtactctgaccataacagaatgaaattagaagtcaacaacataaagttatctgaatcaaaatatgttgaaattaaataaaattcttctaaataattaaggggtcaaata

SEQ ID NO: 164648 - DNA, 542 bp, Homo sapiens
ttgtgggaaggcaaaatgatataacctcctggggataagaatttaacaatrtctagcaaacttctcagaaagtaagacttctatattcacgtcaaaggaactcaggagccaacttgaatagtttcctgctagccaaggaaggggcaatttgagaaccattaaggaaagtaactacagttgattgaaacacattaaattagtttaaatctatgaattcactacaatatttgttttaaaaaaatttcattgattaccctgggaaatcaactcattcttttaaaaactgttaataaaaagaaagagtcaagcatttattctacttttcctacacaaactgatgagggaaagttgatgaacaaaagtttccctttcagtagtatttcagctaacaaacaaaaacagacatgagaaaactaggttatgctcattttgcattttctaaggaattaaatataaagaatgaccattaagggctactcacatcacaagacaactagacgtcacatcccctctgatggaaggacatggttctacctataatg

SEQ ID NO: 164649 - DNA, 593 bp, Homo sapiens
gcataagcaccatagtactgaaaattcctagacacctcagctttgattctacacagcttgccttcacttttgcctgtagttgtacggtggcagcgtagctttagggtctgtttgtgttgcatatgtcartcttttgtccatctgtgttggcgtggtcttcctttcctttgtctgggttgaaatcatgtttatttgtgtaactgtcattttcataggtcgatttctatgtctcattttctttttgtatctatttccctatctccctctctccccatttttctctttcctttatattttctattcacctttgttttccccttctcttttcatactaaataactgaaaattctgtgagtaaaaattaaagtttaatttttgctgctcttaattttttatgtagattaaaaaatgaatcattttatatttctccaaaaggttcttcctcaagtaaaattgctttttacatattggaaccttgattgattatttatttgtttatttgagatagggtcttactctgtcgcccaggctggagtgcagtggcgcaattttggcccactgcaacctctgcctcttgggctcaagggattcta

SEQ ID NO: 164650 - DNA, 187 bp, Homo sapiens
taaatataaattaagcactcagattttaaacatttaagcccctcaaagaaagcagagtatataagaaaaagaacttyttttcaagtattttctattgatctcttcctaccttaaacatcaacaaagctatattaaaatcctatttttgggtgagtactttattcaaaggcccagagactataacctt

SEQ ID NO: 164651 - DNA, 605 bp, Homo sapiens
ttcaatttagatatattgcataggatgtgccaacaatcacttttataaccattccatgactttgtttgggtaatcccttttaatggtgaacttcaggtcacaacagtaactatcagttcaactacaccaaggtttccgaagacaatggcttctccacccaagcaggttgtatataaattccaaatagaacctggcatcaccctgaaggaattctaacttcacactgttggggaaatttaccaagatggcttcagagtagactaactttacacagcacattaaaaaaaaaaagacatttattcagcgtcacgatcagactattacatttagcaatcaacagcatgggtgcaaaaaaaaaaaatctacattaaaacsctttgttggaatgctttacactttccacagaacagaaactaaaataacctgttatacaattagtcacaaacacagtcctcgagttttttgcccatacacatgagtatttgtctaaaacatgtcttctttgtagcagctaggccctgccaccactgtgcttggctgagttcacaaatctgttgtaacctgtggcttccctgtcacttctctggctctcctctcctgctaag

SEQ ID NO: 164652 - DNA, 605 bp, Homo sapiens
ttcaatttagatatattgcataggatgtgccaacaatcacttttataaccattccatgactttgtttgggtaatcccttttaatggtgaacttcaggtcacaacagtaactatcagttcaactacaccaaggtttccgaagacaatggcttctccacccaagcaggttgtatataaattccaaatagaacctggcatcaccctgaaggaattctaacttcacactgttggggaaatttaccaagatggcttcagagtagactaactttacacagcacattaaaaaaaaaaagacatttattcagcgtcacgatcagactattacatttagcaatcaacagcatgggtgcaaaaaaaaaaaatctacattaaaacgctttgttggaatgctttacactttccacagaacagaaactaaaataacctgttatacaattagtcacaaayacagtcctcgagttttttgcccatacacatgagtatttgtctaaaacatgtcttctttgtagcagctaggccctgccaccactgtgcttggctgagttcacaaatctgttgtaacctgtggcttccctgtcacttctctggctctcctctcctgctaag

SEQ ID NO: 164653 - DNA, 605 bp, Homo sapiens
ttcaatttagatatattgcataggatgtgccaacaatcacttttataaccattccatgactttgtttgggtaatcccttttaatggtgaacttcaggtcacaacagtaactatcagttcaactacaccaaggtttccgaagacaatggcttctccacccaagcaggttgtatataaattccaaatagaacctggcatcaccctgaaggaattctaacttcacactgttggggaaatttaccaagatggcttcagagtagactaactttacacagcacattaaaaaaaaaaagacatttattcagcgtcacgatcagactattacatttagcaatcaacagcatgggtgcaaaaaaaaaaaatctacattaaaacgctttgttggaatgctttacactttccacagaacagaaactaaaataacctgttatacaattagtcacaaacacagtcctcgagttttttgcccatacacatgagtatttgtctaaaacatgtcttctttgtagcagctaggccctgccaccactgtgcttggctgagttcacaaatctgttgtaacctgtrgcttccctgtcacttctctggctctcctctcctgctaag

SEQ ID NO: 164654 - DNA, 404 bp, Homo sapiens
atttttaccataggcataacacacaatatttacaatcatgttttgmtaaattatttaagtcaatattctttaatttatatatcatattcctttggttcccaattttctcatgctccttgtgtatttgaaattccaacataaagtaaacatagtgtggtgcataaaacaagagaagtttcaatatggcgtgtgcccctccaaactgattgagcacaattctcttcatcttcaccacttagattggcgatcagtaatagatgctaatactaacattaagattatgttcaaactacctgctgtttacaatttttatatatatacagcctattggcgatcagtaatagatgctaatactaacgttaagattatgttcaaactacctgctgtttacaatctttatatat

SEQ ID NO: 164655 - DNA, 444 bp, Homo sapiens
ctttcctaattctcagaccaacaagtagtgttttcccattcgtattgcttatcataaaatgagagagtcttctgtccatcatctttattgaaagttgaaccactgtaagcaaaaataccaaggagaggtctgatcccrctattgaaataaaaagaaccatgagggccctgcagaattcaactggaccttggggattactcactgaagaaggttttctattttgaatgtttattgtcttcctaccccagtctccccaacaagaaagacttggggtggaaggtgacatataacagcaaagtaagaactgtttgcatttttccttcttggtttgtaaaagacttgttcccaaattgtcctcaaaggtacataaatacatacatatgatatttgtatatatataaacacatatgtatagtaatatccttcatttaccttggggtgaga

SEQ ID NO: 164656 - DNA, 447 bp, Homo sapiens
ctttcctaattctcagaccaacaagtagtgttttcccattcgtattgcttatcataaaatgagagagtcttctgtccatcatctttattgaaagttgaaccactgtaagcaaaaataccaaggagaggtctgatcccgctattgaaataaaaagaaccatgaggrccctgcagaattcaactggaccttggggattactcactgaagaaggttttctattttgaatgtttattgtcttcctaccccagtctccccaacaagaaagacttggggtggaaggtgacatataacagcaaagtaagaactgtttgcatttttccttcttggtttgtaaaagacttgttcccaaattgtcctcaaaggtacataaatacatacatatgatatttgtatatatataaacacatatgtatagtaatatccttcatttaccttggggtgagactt

SEQ ID NO: 164657 - DNA, 546 bp, Homo sapiens
tctggctatcagcttctgtattgttttatcacgatcttagtttctttgcattggttacaacatgctcctttagctcagcaaagttcattattaccctccttctgaagcctacttttgtcaattcagttatctcagcctcagcccagttctgtgcccttgctggagggtgttgtagtcatttggaggagaggcattctggctttttgagttttcagtgtttttgcattgattctttctcatctttgtgggcttatctgccttcgatctttgaggttgctggcctttgaatggggtttttgtggagtcttttttgttgatgttgttgttgttttctgtttgtttgtttgttttacttttaataaccaggccactctaccaaagggctgctgtggtttactgggggtctgctcgagaccctagttgcctcagtttttcccatacctggaagtatcaccagtgaaggrtacaaaacagcaaagatggcaaccagctccttcctctggaagctccatcccaggggagtactgacctgttgcctgccccaac

SEQ ID NO: 164658 - DNA, 420 bp, Homo sapiens
tctagactgggagcatctttgcctcactggatttagtaaytgcaggtaagcaggacattttgaagtttctcctatgaatgagttgttgaaaggttatgaggatggctgagatccaagaaaaccaactagataccgctcacctcggtggccgacctattcctggctactactagcctggctctgcttacagcgtgacactatgtgttgtgtgtccctgggaatgaggagcatcagtgaggagcagacatgattcctgtcctctggataccatagttcagccagtgaaggcaaacctgaagcttcggttccacagcctgtgctgcttggtgaagactaaggacaggagtctcgatccacaatagctgcctctccaggtgttttattagaggcatgtggatcatgtcctgcacatcagttctc

SEQ ID NO: 164659 - DNA, 420 bp, Homo sapiens
tctagactgggagcatctttgcctcactggatttagtaattgcaggtaagcaggacattttgaagtttctcctatgaatgagttgttgaaaggttatgaggatggctgagatccaagaaaaccaactagataccgctcacctcggtggccgacstattcctggctactactagcctggctctgcttacagcgtgacactatgtgttgtgtgtccctgggaatgaggagcatcagtgaggagcagacatgattcctgtcctctggataccatagttcagccagtgaaggcaaacctgaagcttcggttccacagcctgtgctgcttggtgaagactaaggacaggagtctcgatccacaatagctgcctctccaggtgttttattagaggcatgtggatcatgtcctgcacatcagttctc

SEQ ID NO: 164660 - DNA, 539 bp, Homo sapiens
ataaatttatgaataaatgtacaaactatcaaataagctaaagaaatagtccacattgttggggaaaggggttaccatgaaacagaccctagcagtcacttacaaatacagttcatcttcattatttgtggatcccatatttgcaaatttgcttacttgctaaaatgtctttgtaatccccaaatacttgtggagctttcaaggtgacttatggatatacacatagtagtgaaaaatatgtcactccttgcccaagtcccaaggtgaccctcagccttgtctcagccctcatacaaagatgaccagaggacagagacagcagagggcagtgcagcgtagtgcaagaagctctggctctggggccatctggacgagtctgaatcttaactctggcacctgttagtagagaggcctcaggcaaatcgcttaacacttctgtacttcctttattttttgtaagtaargaaaattcaatctaccaggatgagttgtttttaggaattaattttgtaatctgtgtgagatatgtatatatgtat

SEQ ID NO: 164661 - DNA, 539 bp, Homo sapiens
atagactgtctccagtggtgcagattgaggctaatatgaaaaatgtccttgttagaaagttgggtcaggaacattcaaggcagcactgagtgttggacaggacacattaattccttacatgtctcaggtgttccttcagtgtgcagatgtcatgtagcagtaaggtgtaggatgccatttttgattgtggcctttggagaccatattcagggctaggtataactagtcakgaagcatggtggcagagcatcaacctgaacacatgccccctgagctttagggaaacagtgtctacctggaagtttttgactgcctagagtatatgatattggaaactcagaatagtaaaaagaggcagcctgccttgtatcaacagaactgccctgtatgtggcagctgctataggctatgatgagatgtatgagatgtatgtcctaccctcagatgctgagacctcaggaaacagtggctaaaagctaaaatttccattccctgggataatattttgtctccactgggctcagcttccatgcaaaatg

SEQ ID NO: 164662 - DNA, 633 bp, Homo sapiens
tgttcacaaaatgaagaaagaaacttacaaataggaaagttaagcattttttcctgttgcttgtattttttwaataaattttctaatcagtaatgatttacaggtctcctgcagagttacataaaaaccacctagaagacttttttaagatgcaaagtctttgataacacttctccccaatcctgattcagtagataggaactaagacctagaataacgcattttttagaagatatttaggtgattctaatgcaagttgcattggactatactttaacatacagtgtcctagagtgattaggtaattatgacatggtaagtgaaaatggaaaaaactgaagtcagtcatttatttcttcattcaacagacatggatagcactttgttggtcattaaggacaaataaaacaaggtccccaaggagtccacactctaatgaatgaactgcctgaaactctgtcagttattatggcttattagttaatctctctcaacatgatattcaataataatccctatttcactcattaaaaacttgaaggttatggaagatgaatgtttccagcacactaaagcaatctggcccccatattaactttgtaagatcctttcatataaaccttatttattcga

SEQ ID NO: 164663 - DNA, 633 bp, Homo sapiens
tgttcacaaaatgaagaaagaaacttacaaataggaaagttaagcattttttcctgttgcttgtattttttaaataaattttctaatcagtaatgatttrcaggtctcctgcagagttacataaaaaccacctagaagacttttttaagatgcaaagtctttgataacacttctccccaatcctgattcagtagataggaactaagacctagaataacgcattttttagaagatatttaggtgattctaatgcaagttgcattggactatactttaacatacagtgtcctagagtgattaggtaattatgacatggtaagtgaaaatggaaaaaactgaagtcagtcatttatttcttcattcaacagacatggatagcactttgttggtcattaaggacaaataaaacaaggtccccaaggagtccacactctaatgaatgaactgcctgaaactctgtcagttattatggcttattagttaatctctctcaacatgatattcaataataatccctatttcactcattaaaaacttgaaggttatggaagatgaatgtttccagcacactaaagcaatctggcccccatattaactttgtaagatcctttcatataaaccttatttattcga

SEQ ID NO: 164664 - DNA, 633 bp, Homo sapiens
tgttcacaaaatgaagaaagaaacttacaaataggaaagttaagcattttttcctgttgcttgtattttttaaataaattttctaatcagtaatgatttacaggtctcctgcagagttacataaaaaccacctagaagacttttttaagatgcaaagtctttgataacacttctccccaatcctgattcagtagataggaactaagacctagaataacgcattttttagaagatatttaggtgattctawtgcaagttgcattggactatactttaacatacagtgtcctagagtgattaggtaattatgacatggtaagtgaaaatggaaaaaactgaagtcagtcatttatttcttcattcaacagacatggatagcactttgttggtcattaaggacaaataaaacaaggtccccaaggagtccacactctaatgaatgaactgcctgaaactctgtcagttattatggcttattagttaatctctctcaacatgatattcaataataatccctatttcactcattaaaaacttgaaggttatggaagatgaatgtttccagcacactaaagcaatctggcccccatattaactttgtaagatcctttcatataaaccttatttattcga

SEQ ID NO: 164665 - DNA, 634 bp, Homo sapiens
aaacaaatatataatatgtcagatggtgctaaatgctaaaaggaaaacaatggtattttatataggaaggccaggaaatacatctccgagcaggtgagaagtgtgtagagacatgaatgcagttagaaggaaagtcgtctggtgggaaatggcagtaaaatgtaaaagcgctaaggtagcaacatgcttsatgtatttcaggaatagaaatgaggtgagagaagtagtgaagatgagggccaggtcacagagggatttgaaaaagagaggaattatgcacagctgcaatgtattagtctgggcaatggtagcggggagttgccatttactgagaagaataagtaaccaagagtacaattttagaggagagaactcaagagttcatttgggcacatgtcaagtttgagatgcctactagacatgttaggtagaaatattaaatcaagagttgaataaaagtctggatttcaggggatagataaggctaaagataaaaatgtgtcctaatgtcttattttatttcatccagtgtatgactttaaataccacctatatcaataaataaataaatgtgtttaaagtcacatactagatgaaatgaaataagaagtgaatgtggacagaaaaggaagaa

SEQ ID NO: 164666 - DNA, 514 bp, Homo sapiens
ggactacattgcagctcccactcagatggacagagcagcctgtggagactcacatcatgaactttttctcccatraataccacaggaacatacaaggaaagccgagagaatccacggatcctttgacggaagcagattgctcctgcagggccttagagacagtccaaaaactgtgagtgcccaaagtataaaagtgtgaaaggagtatcatgtgcgcatgaacacacaccctcacgggggagcctgaaggtccagatttggccttatttggagctgagacaatttaggagaactcagtgaaatacaggggtagaagaatcagtgagaagagacatgtgggctctctcagtccccagggatgctatttctgactttgtcttgcagaagtcctataggagggctgccggaggaactggaaaaagaccacacagaaagaaaacttccaattgaactttgtaacaattttgaccaaacatagtatcctggacaaaactcagtctggtatgcagacata

SEQ ID NO: 164667 - DNA, 360 bp, Homo sapiens
tgaacagcagcccttgagtcccagatcttccctgtgacatagtctatacccaaatgaaaaagaatcagaaaaagaattctggtaatatgaccaaaaawagttttttaacagccccaaaagatcacactaactctccagcaatggactgaaatcaagaagaaatccctgagttgccagaaaaagatttcagaaggtcaattagtaagctaatcaaggaggcataagagaagggtgaagcccaacttgatgaaataaaaaaaaaagatacaagatacaaagggaaaaatcttcagtagaatagatagcataaataaaaaaacaatcacaactactagaaataaggaacacacttagagaaat

SEQ ID NO: 164668 - DNA, 619 bp, Homo sapiens
cagtgtatactgcttgggtgaggggtgcactaaaatctcacaaatcaycactaaagaacttattcatgtaacaaaacaccacttgttcctcaaaacctatggaaatagaaaattgaaaaaaaagttttaagtgcattattggaacacagaggtggagatataaaaggtttgatcctaccatatttcaatttgataggtttttagaccttattgttttaaaatataaatattttgacttcaaatttataaatttattttttcaaagccacattaacataaatatttctacttttgataaagagtctcattttgtcactcatgttggagtgcagtgttgcacacacggctcactgcagctttgacctcctgggctcaagtgatcctcctgcctcaaccttccatgtagctggtaccataagtgtggaccaccatgccccccatgtttgattttttgtagagatgggatcccattttgttgcacaggctgttctccaactcgtgggctcaagcaattctcttgccttagtctctcagagtgcttggattataggtgtgagccactatatctggtcatgaatttttaataggaaattaatttcaagaatagccatttagccat

SEQ ID NO: 164669 - DNA, 619 bp, Homo sapiens
cagtgtatactgcttgggtgaggggtgcactaaaatctcacaaatcatcactaaagaacttattcatgtaacaaaacaccacttgttcctcaaaacctatggaaatagaaaattgaaaaaaaagttttaagtgcattattggaacacagaggtggagatataaaaggtttgatcctaccatatttcaatttgataggtttttagaccttattgttttaaaatataaatattttgacttcaaatttataaatttattttttcaaagccacattaacataaatatttctacttttgataaagagtctcattttgtcactcatgttggagtgcagtgttgcacacacggctcacygcagctttgacctcctgggctcaagtgatcctcctgcctcaaccttccatgtagctggtaccataagtgtggaccaccatgccccccatgtttgattttttgtagagatgggatcccattttgttgcacaggctgttctccaactcgtgggctcaagcaattctcttgccttagtctctcagagtgcttggattataggtgtgagccactatatctggtcatgaatttttaataggaaattaatttcaagaatagccatttagccat

SEQ ID NO: 164670 - DNA, 619 bp, Homo sapiens
cagtgtatactgcttgggtgaggggtgcactaaaatctcacaaatcatcactaaagaacttattcatgtaacaaaacaccacttgttcctcaaaacctatggaaatagaaaattgaaaaaaaagttttaagtgcattattggaacacagaggtggagatataaaaggtttgatcctaccatatttcaatttgataggtttttagaccttattgttttaaaatataaatattttgacttcaaatttataaatttattttttcaaagccacattaacataaatatttctacttttgataaagagtctcattttgtcactcatgttggagtgcagtgttgcacacacggctcactgcagctttgacctcctgggctcaagtgwtcctcctgcctcaaccttccatgtagctggtaccataagtgtggaccaccatgccccccatgtttgattttttgtagagatgggatcccattttgttgcacaggctgttctccaactcgtgggctcaagcaattctcttgccttagtctctcagagtgcttggattataggtgtgagccactatatctggtcatgaatttttaataggaaattaatttcaagaatagccatttagccat

SEQ ID NO: 164671 - DNA, 499 bp, Homo sapiens
atcccactttcaatagtgggcagaatatccagactgaagatcagtaagaaaattgaagacttgagcaacacaataaaccacatggacctaatagacatttaaaacatctcatccaactgcagcagaataaaattcttctcaagtatgcagtaatctttctttaggakagatcacaggatgagtcataaaataaatcttaataaaattagtaaaatcacaccaaatatgttttctgaccacaatggaataaaattataaattaatagcagtatgaaaactaaaaaaatcacaaatgtatggaaatggttaagtatttttggttataaatatttctattttgtgagttcattctgttacaaataactgtgcatttgaatattccttaacaagtgttgtgtcaaatgtgataaaattactcctgataagcatttctaaatctaaagtacgttttaagtttgtatttaatcagtgtttattttaatatatgttatgtatgtaa

SEQ ID NO: 164672 - DNA, 545 bp, Homo sapiens
taggcatattgtgtgatgctgaaatttggagtttattccatcacccagatactgagcatagtacacaacagttagtttttcaacccttgtgtccctcccttactgctctactgagactgtgtttttaaaattataactgtaaggaaaatctgacatagttggttccatcttgcttctgacctcccaactgtccttgatcattcctgggcataggccaacctaactgtggaaagaagttagtttatagtttaacatgaaaggaaagatgatattagttcttccctaaaactaacccccttcttgcctgggactgaacaccatttttgtaagattaatgaaaggctataacaataggattatgggagaaacctgaactctgctaaggtacaggtgtagtttttataattccttactctttaggagtcatgtggccagaggtcacaagatttgtgacttccacaattgctcttayagataacatcactattgtagaatctaagattgtttatttgaagatatatttcaggctgattccacccagactc

SEQ ID NO: 164673 - DNA, 496 bp, Homo sapiens
gtgggaatgaagataaaagataaaagttaggcctggcaatagccaacctcttggatgccccttttcttccttttcttccattatagaataaatagccctcatattgttaagtggggcagcacttttcttagccttaaattggagatagttattttatgagtacctaaaagacgtagtgataagagtaaggataaacaaagatttaatttcagcagctccatcacarcactatacataataccttacattttaaaagtgcttagcatcctacaaaaaaattaaaatgtgtgggtattgtatatacagtgattcacacacaatgttcatcatttgaagtctggaaataaactccatcttaaccttaaattgttattatctcttcacagttgaaatgccagttgaaggcatgcagaaatttaaagtaactgatttaacaacctcagacaaagagaacatgtctgaaagtttttctccacgtttgacttgacctgagaga

SEQ ID NO: 164674 - DNA, 605 bp, Homo sapiens
ttttgaaaaaatcctatattaataaacattttgaaatatgctgtctacttaggtaggaatgtggacctcctgaccatggactatatggcttttaattaactgctgtttccaattctttttagagtttcagtcagaattagttattctgagcctaaaaaataaaatgaagacacaaatttctcttaaaccctattaaagggtyttcttttaaggcagacaaaacaagtcttcttaagacagccttatggtaattgatccagagtcatttagtttatttcaacaattattccagcacacattttttttaactattggctaaacataaattgttaacatgatagaaaacagtcaccaaggggagtacttacaaaccagaacacagtagtgatggtcacagaaagagacttttttaaaaatcaaaattaagaatgtctctaaaactcttcattgatcttataatttagaaaaaatgaagtatatgtgagagatgactcatgggctggataggaaagttgtggacactgggcagaggtagggaaacaatctcagggaagaggaatattgggtagaaaaaataaaatcccttttaactttttaaaagttat

SEQ ID NO: 164675 - DNA, 304 bp, Homo sapiens
aatccctttccacagatcagcagaatttaccatcaattttacttaaaaaatttatttaaatttaaaacacatttcaaaacaaatgcaggtcccacttttcacttttctaatacctagtttgaccagatttgctgagtagctaaaaaaaaaaaaaaaaaaaaamcctgaaaggagggagactatggccatataaaatttaaagcttatttaacacattttattatctcaaaaaaaaaccctggttccaaaaagacctatagagccagagccatgtcacatgccattaggtttccttagacaataa

SEQ ID NO: 164676 - DNA, 304 bp, Homo sapiens
aatccctttccacagatcagcagaatttaccatcaattttacttaaaaaatttatttaaatttaaaacacatttcaaaacaaatgcaggtcccacttttcacttttctaatacctagtttgaccagatttgctgagtagctaaaaaaaaaaaaaaaaaaaaaccctgaaaggagggagactatggccatataaaatttaaagcttatttaacacattttattatctcaraaaaaaaccctggttccaaaaagacctatagagccagagccatgtcacatgccattaggtttccttagacaataa

SEQ ID NO: 164677 - DNA, 630 bp, Homo sapiens
taacgtttagaatacctcgtgagttgaatacccaaaagtaaactatcccttcccaccatgaagcatagatctttaatatatacttacagaattttcaacataaaaccccaaattcttcttgtcagttttcagttaaccactgtcatatgagaaaagaagtcaaaggagagaggcccgctggtagaagtgagtactagaacatgcctacaactacactcgggagactgcttgcttccctacaaccattttggaagctctgatttttttatttgagttcagtgcaaagttaaagggactgtattagaagattctttgtgaattgttctgcagactgggcctttctgttttctccgcacttgaacaagaagtcatgttgaccccaattttttaaaagagcagaaaaaatgaaactactcatcraaaacttatgccacaaaatttgggtcacacattagttaagtgggaggtacaataccaattacttcattgttcctgtcaaggaagccatgagtctatcctgcaaaaataaaaaaaatttaaaaagcgaagtaaggcagcattcttgacaggaacaattccctcaccattacccccgcccccgcaaaaaaaatgtctggtgagatcaaaaca

SEQ ID NO: 164678 - DNA, 646 bp, Homo sapiens
atgcactcacactcttcctcagtgcccccaggattgctggacactgaaacatggttcatatcaggctctacccacctccctcctacacacacacaccttggccacccagaagaaagaaggaatttccttgactaaataatcagattttatttctctaaaggaaattagaatagggaagacacgtatttctacgtggtaaatcsaatcacccaggggatgcacaataactgggggttagtccattctttagcatgatccaagacaataaatcaggcactcttacttgatgctgtaaatgatttctccctctcaccgaggctcaacagcagcaagctggacatattctcactttgatggcagtgatattactaataatgtaacttataggtgtcaagaactgtatgttatttaatcctcgcaacatccaaataaaataagcattattctgattttacagatgaagagatttaattcttgttcaaaatcacataactaaaaagtattaaaaatcagaattcaaattaagcacagggcacttgagggcttaccaactctactacactgataatgtaatgattccatctctaagtcaccatcaccaaaaggaaagaataggataagaaagaagtatggaacatgtcatgtt

SEQ ID NO: 164679 - DNA, 444 bp, Homo sapiens
ctgaattcatctgtgttctacttttctgtatggcttttttcccaagtagatgtaaagaataaacattattttgtctgaaaaaaaatcggtcccagtgcatatattctaataaatggaagtagattgcatcggaaatatggttgatgcataacagaaaatcatttaaaaatcatttctgcttgtattggtaattatacttaataaaccttttgaaaaagtaaaatgaactttgacctaaattactaagaaactgtaagacttagcaagcctaggktttctaagcaaatgaataaaatattaacaaacatgatcacatgtttctgttgctgagacagaagatgttgattgtgaatataaccacttgagaggtgtaagcaattatatactaagccttgtatttcagtcatcctgagaaagggtgtcattatcttggcagtttaaagc

SEQ ID NO: 164680 - DNA, 611 bp, Homo sapiens
gttaaaacatacagatttctggatccattctcggtgtggttggatgggtttgacaaaggacccaggagcataggagcatacgctttttaataaycttcctagattattctgaaacataaggcccacaggttacatttttattaagatcattgtaaaaggagagatcagatttcccgaggaattcgtcctttatatgcttaaagggtcctaagatatcctgaagggtccagacacctatatctatggaagtagtattttctacttatcaatacatggcttgttcaaggcactgacaacctgtttctcattctacatgtcctgacaacttcctgatttccactgcatgttagggatctggagattgactctcacttaccgatgttattctttaagaataaagcccagaattatccttggtgtcctggatacattacatcagccagtgggtatattcactttggcagggcagtgaatttttattgacacaatcaaagaatacattgtttgtcttctttagtggagtcatgttttcagcttttattgatctgatagtcagaaccttcacatccttcatatatttctcaactgaaattgtgtcatccaatcacctg

SEQ ID NO: 164681 - DNA, 602 bp, Homo sapiens
aagcttattatatagtaagacagacacaaaaatcatgcaaatataaataatgtaaggaaatgaataatattgggaaaggaaagaagtacagaatctctctggcaacttccagtgcttcctttgtgctaatattccaattggaacagtgcaggggtaaatgtcaatcaacaatagaaagccattccaagctccaaagaccaaaaccttcctgatgctaaggcctgaagaatgaagggatgaacctgctgaagaatggactaaagagagataagtgggactggccttcagtcatctcctggggtgttacttgttggtaaagtgtcctcttggatctggaaacagaagaatgggcgatgtggggagacggtttttaaaccacatttaattccttaccctttcaagctgtggaaattttcagtagttgctattcattcatttattcatttactgaagcaacttttactgcaggtccaatacatgttggggtatatatggtgaatcatatataattcatgccctaacagacayagaaagcgataattgtgtcttatttttatatttgtacctatatagctaaataattaaaattttcattcaaaatg

SEQ ID NO: 164682 - DNA, 516 bp, Homo sapiens
gcacttatcgaacaatattccccctcagtaagtgtatctccaccttattctttactatatggtgtcttagagtggaaatatgatataatttattaacccaccaccttcatggtttattttaaggtwtatatcatttttggaattataaacaatgctacaatgagcatctttgtgtacctttgcaaatgtaatccatagaagagatttcttgagtagaatggatgtactagcttaaaaatattatgtaagttctttaaaacacacacacacacacacatttccattgaatatataagtgcaatcaaattgtacacccctcatcctctctcctctgctcatatccacactcttaactaccacattacgtctccatgctagtaacatgttccatctccagtctgttgctaagcttgggtatatagagtataatataattcactgttactttgactcatgattccttgctcatcagctatattaaaccactttccatatgtttattggccacttagtttt

SEQ ID NO: 164683 - DNA, 516 bp, Homo sapiens
gcacttatcgaacaatattccccctcagtaagtgtatctccaccttattctttactatatggtgtcttagagtggaaatatgatataatttattaacccaccaccttcatggtttattttaaggtatatatcatttttggaattataaacaatgctacaatgagcatctttgtgtacctttgcaaatgtaatccmtagaagagatttcttgagtagaatggatgtactagcttaaaaatattatgtaagttctttaaaacacacacacacacacacatttccattgaatatataagtgcaatcaaattgtacacccctcatcctctctcctctgctcatatccacactcttaactaccacattacgtctccatgctagtaacatgttccatctccagtctgttgctaagcttgggtatatagagtataatataattcactgttactttgactcatgattccttgctcatcagctatattaaaccactttccatatgtttattggccacttagtttt

SEQ ID NO: 164684 - DNA, 614 bp, Homo sapiens
aatgttcttcagcatttagcagtgagatactgtgaattataataaaaggatccccaagttcttcattaaacataatctacaaaacaaaattacacacacaaaaaagtgtacataattacatgaacacagatagcatagagggaatatataggattctggtgattcaacagttattttggatactatttattacaagaaatttgaaaataaaaaggcctttacataaagactgcaagtttagataatgttccctgaggayagaacttttaagaaaatatttatttgtataagaaaaaaactgatcattagtcttggctaccttgcttcctctcagtttctagatattgtatatgagtgtgcatgtgtgtatgcctttttcctgttttttgtttgttatttattctctggaagtttacaaaggcaagagtcaaaaacattgaagaataaatcaccaaaacatgttttttctcaaaaacaaaagagcctattagcatttaagaataagttaacaaactctatttaaaataatcctaaagtgttttttgaaaagcaaaaaagcatcatataaaaacacacaaaatcttgtctaagcatcatacagaaacacacaaaat

SEQ ID NO: 164685 - DNA, 614 bp, Homo sapiens
aatgttcttcagcatttagcagtgagatactgtgaattataataaaaggatccccaagttcttcattaaacataatctacaaaacaaaattacacacacaaaaaagtgtacataattacatgaacacagatagcatagagggaatatataggattctggtgattcaacagttattttggatactatttattacaagaaatttgaaaataaaaaggcctttacataaagactgcaagtttagataatgttccctgaggacagaacttttaagaaaatatttatttgtataagaaaaaaactgatcattagtcttggctaccttgcttcctctcagtttctagatattgtatatgagtgtgcatgtgtgtatgcctttttcctgttttttgtttgttatttattctctggaagtttacaaaggcaagagtcaaaaacattgaagaataaaycaccaaaacatgttttttctcaaaaacaaaagagcctattagcatttaagaataagttaacaaactctatttaaaataatcctaaagtgttttttgaaaagcaaaaaagcatcatataaaaacacacaaaatcttgtctaagcatcatacagaaacacacaaaat

SEQ ID NO: 164686 - DNA, 577 bp, Homo sapiens
tcattatccatcgaaggacacttagggtaattccatatcttggttacagtgaatgatgctttaatcgacaggaggtgcagacacatattgaagatcctggttgggtgcagtggctcatgcctgtaatcctagcactttgggaggccaaggtgggcagaacgcatgagcccaggagttccagaccagcctaggcaatatgacaaaatcccatctctacaagawattcaaaaactagctgggcatggtggcacacgcgtatagtcccaactacttgggaggctgaggtgggaggattgcttgagctcatgaggtcaaggctgcagtgagccatgattgcaccactacactcaagcatggggacagatgagatcttgtctcaaaaaaaaaattctgatttcaattcctttggatatatacccagaagtggaattgctggattatatcatagttctattttttaacattttgaaaaaaatcttcatacagtttttcatcatggctgtactaatttacatacaaaccaacaatgtatcagggttcccttttctccacattctcgccaacacttatcttttga

SEQ ID NO: 164687 - DNA, 564 bp, Homo sapiens
gtgcctcaggaacccagctggaatcaggtgtgaggagaaataactgagattgcagccagcacggaaagctgctttgtaagagtctggcagtttttcaaaaggttaacagttaccatataacccagtaattyctcacctaggtatatatccaagagtaataaaaacctgtacacacatgtttatagtaaccaaaaagtataaacaaaccaaacagccatcaactgaccaatgaataaataaaatgtggcttatccatacagtggaatattgtatagcaataaatgatgctacaacatggataaaccttgaaaacattatgctaagtgaaagaagccagtcataataggctacagatggtaggattccatttatatgaaaaggcagatctcgctgggcatggtggctcatgcctataatcctagcacttggggaggctgaggagggcagatcattagagaccagcctgggcagcatggcaaaaccccacttctaccacaaaaataacaaatattagccaggtatggtggcacatgactgaggtcggaggatcacctgagcccagga

SEQ ID NO: 164688 - DNA, 384 bp, Homo sapiens
aatgagcttcaaagtggatatatccccagaacctccagaaacayggtgtgctcaccgtgttgctatctggattttagccctgtgacagggaaaccagctaagcctgccagatttttgacctacagaattacaagataatacatttatatcatattaagccccgaaatttgacataatttgttgcagcagcaatagaaaactaaataccatggaaaactgatgaaacccaaaaaagtccgtggttttaataatataccaatgttaccgtcttacttttagaaaatatgccaaatcattatgtaagatgttaacaccagtgtaaactgggtgaattgtttacaggagctctctgtatgatgcaactttctgtaaatccaaatttct

SEQ ID NO: 164689 - DNA, 599 bp, Homo sapiens
gatctgtaagctgatgttttctaccaaatttggaaaggtttcacctatgatttcctcaaatatatttaagctcctttctttctctcttcttctgggaccscggttacatatatattgaattgcttggtagtgcttcaatggtctttgaagatctatttctccataaaacaaaataaagtattgacacatgttacaacatagacagaccctgaaaactggggagtgaaagaacccaggcataaaaggccacatagtgtattaatttatttaaatgaaacgtccttaataggcaagtttatagagacagaaagtggagcagtaggggatggagggaggagggaagaggtataggactgctaatggttatagggttctttttagggtgatgacaatgttctggattagatagtgatgatggtttcacaaccttgtgaacatactaaaatccactaactatacactttgaaaaccatgaattttatggtatgtaaattatttctattttagaaaagggggagggaggaaaagattccaacaaaagagaccaagaaatagagaggtagagaaagaactaggaggtaatcagaagagagaaaaca

SEQ ID NO: 164690 - DNA, 568 bp, Homo sapiens
tggcaccataaaaaaaatctgaatgtagtgacatgacaaaaaatatcactagctttctagaaatggtccttaaccaaaatagacactcagaaaaaagacacaaagaattcaaagcatggattgcaaggaagctcaacaagatctaagacaaaattgaaaatcaatacaaagaaacttctaaagcaatccaagaaatgaaggaagagataaacatctttaaaagaaatcagtacaaacttctggaattgaaaaactcacttatggawtttccaaatacaattgaaagctttatcaacagactgaactgagcagaagaaagaattccagaacttgaaggccagtctttcaaactagtccagctagacaaaaataaagaaaaaagaattttaaaaaaatgaacaaagtctctgagaaatatgaaatcatgtaaagtaaccaaccctattaactactggcattccagagaagaaacactaaacaaactgaaaaacatgtttgagggaataattcagaaaatttccctaatcctgctagagaggtagacattcaggtataagaaatccagaac

SEQ ID NO: 164691 - DNA, 568 bp, Homo sapiens
tggcaccataaaaaaaatctgaatgtagtgacatgacaaaaaatatcactagctttctagaaatggtccttaaccaaaatagacactcagaaaaaagacacaaagaattcaaagcatggattgcaaggaagctcaacaagatctaagacaaaattgaaaatcaatacaaagaaacttctaaagcaatccaagaaatgaaggaagagataaacatctttaaaagaaatcagtacaaacttctggaattgaaaaactcacttatggaatttccaaatacaattgaaagctttatcaacagactgaactgagcagaagaaagaattccagaacttgaaggccagtctttcaaactagtccagctagacaaaaataaagaaaaaagaattttaaaaaaatgaacaaagtctctgagaaatatgaaatcatgtaaagtaaccaaccctatkaactactggcattccagagaagaaacactaaacaaactgaaaaacatgtttgagggaataattcagaaaatttccctaatcctgctagagaggtagacattcaggtataagaaatccagaac

SEQ ID NO: 164692 - DNA, 547 bp, Homo sapiens
gaaaaagctctttctactcttaccctatatacagacctcccacctctaggttatctttatcacattatgtttttttcattcacagtttttattaaacttcacaattacaatgtttgtgtcactcattttatttgtttcttccagtataatgtgagtttcatgaggttagggaccttgttggtcctatgtatctctatattctcttggcctgcagttattagcacatgctagatgtacaatagtagatagatgaatgatgagaattctacttagtatcaataacattcctgggtttaggatcctacaagtatactctatctttcagttaaattctaagsacaaatcaatcaagatatgggaaggaaccaattacactaagaaaatgactagaagtaccttgaatttcttcttttggggaaaacttgataggaaagaaaggtttcttttctaaagattgggatagattgctcacttttgctgtgacttagaacaaagcaccatttttaacttagtctccaatttccttatctgtaaaatcacaaggttg

SEQ ID NO: 164693 - DNA, 642 bp, Homo sapiens
ttttattaaacttcacaattacaatgtttgtgtcactcattttatttgtttcttccagtataatgtgagtttcatgaggttagggaccttgttggtcctatgtatctctatattctcttggcctgcagttattagcacatgctagatgtacaatagtagatagatgaatgatgagaattctacttagtatcaataacattcctgggtttaggatcctacaagtatactctatctttcagttaaattctaaggacaaatcaatcaagatatgggaaggaaccaattacactaagaaaatgactagaagtaccttgaatttcttcttttggggaaaacttgataggaaagaaaggtttcttttctaaagattgggatagattgctcacttttgcygtgacttagaacaaagcaccatttttaacttagtctccaatttccttatctgtaaaatcacaaggttgaatcaggtgacctcacagtgtcttccaccctctacccccgtttttggagtctcacaatgcacccttattaccaattagagagaaaactactttaactttggaacataaaattgattccaaacgccacgtaatgaaagaataaatatgaaacaccaggatactactttaacagaatcttttt

SEQ ID NO: 164694 - DNA, 581 bp, Homo sapiens
tttgggattacaggtgtgagccgctgtgccckgcctgccttaaatttttaaaatttcatgatgaaatgcccaaagggatataatataataatagataattgatatcagggataagattaattcttggctgctttgctactctttggaaagggagagtatgtcgctattactaatgatatttcagggtcaaaattacagctattgctagccaaatatttttgacatagaaggagctatctgaagtagaggaaagcctagggccttgttctaccttcaactctgctcctaactagctgtgtgaactcagccaaaacctttccgcctctgagccttggtttctccaattgtcaaattatggtattagataagctttaagtcttgaatctaaatataacatgtatcacttaaaccatagcattaagccagacaaacctaaaatatcagcactattctatgcattactttattaaaacaattcacaatttgggttcaggggaacttgtgtataaatgtcagacctgccacattttagtctttactaagtcaggtagatgagctaaagctcagtttttctcaagttg

SEQ ID NO: 164695 - DNA, 588 bp, Homo sapiens
ctttgccaaaacacgtttttgccagaagtgccagcacatcatggttgtgtgtttgttaaaattgaacaggatcccagagagccctggagagggtcacagaccacctggtagatggtcacttgattttccacagcaggaagaaaacacagtgtgccccacaaagctgckcttccctaggagcctccagcatccacccaaagtccccccaaaccgaactgggatctgccccagggatggctttttgctgatgaatgactcagcccaagagactcaataagagatctcctaatgtccacaccttcccagacctcatgctgctcccactccatgccctacccaaaggggagagccatcagtgcatttttatctgcagttcatagtcagttgtcaatcatcaaactggctttccttctcttcttagctaatttcaataatatgtaaagcaaccattccctcccctcacacatatgctgtgagatttagttgacttctccagttaacagcagtccttttcttcgaagcaaattttcttctgtattagatcttgattagaagcaattaataatgggttcaaatttgccaagagga

SEQ ID NO: 164696 - DNA, 588 bp, Homo sapiens
ctttgccaaaacacgtttttgccagaagtgccagcacatcatggttgtgtgtttgttaaaattgaacaggatcccagagagccctggagagggtcacagaccacctggtagatggtcacttgattttccacagcaggaagaaaacacagtgtgccccacaaagctgcgcttccctaggagcctccagcatccacccaaagtccccccaaacygaactgggatctgccccagggatggctttttgctgatgaatgactcagcccaagagactcaataagagatctcctaatgtccacaccttcccagacctcatgctgctcccactccatgccctacccaaaggggagagccatcagtgcatttttatctgcagttcatagtcagttgtcaatcatcaaactggctttccttctcttcttagctaatttcaataatatgtaaagcaaccattccctcccctcacacatatgctgtgagatttagttgacttctccagttaacagcagtccttttcttcgaagcaaattttcttctgtattagatcttgattagaagcaattaataatgggttcaaatttgccaagagga

SEQ ID NO: 164697 - DNA, 588 bp, Homo sapiens
tcctaaattcctggcctgccaagaagggactgtccttttaccagatcagtttcctgggagcattttgcagacatttgttctacctatgaagttaggcctatttactgatatgcttatcatatcagaaaaaatgagattgattttcaaataacatattgcaggtttgcccttggttatacaatcaatttgtctaattatattctagtttaaaaataaaaatraggagacagctttttgttaagcttatgcaaataattacattgccatgcaatgtaaaaaagactcaggaaaatagttgattctgaattttgatatgtcaaagggaaaaagatatctttttttattttttagatgaagactcgctctgtcacccaggctggagtgcagtggtgccatcttggctcactgcaacttatgcttcccaggttcaagagattctcctgcccagtctcccgagtagctgggactacaggtgtgtgtcattacgactggctaatttttgtatttttagtagagatggggtttcatcttattggccaggcttgtcttgaactcctcacctcaagtgatccaccttcctaggcctcc

SEQ ID NO: 164698 - DNA, 588 bp, Homo sapiens
tcctaaattcctggcctgccaagaagggactgtccttttaccagatcagtttcctgggagcattttgcagacatttgttctacctatgaagttaggcctatttactgatatgcttatcatatcagaaaaaatgagattgattttcaaataacatattgcaggtttgcccttggttatacaatcaatttgtctaattatattctagtttaaaaataaaaataaggagacagctttttgttragcttatgcaaataattacattgccatgcaatgtaaaaaagactcaggaaaatagttgattctgaattttgatatgtcaaagggaaaaagatatctttttttattttttagatgaagactcgctctgtcacccaggctggagtgcagtggtgccatcttggctcactgcaacttatgcttcccaggttcaagagattctcctgcccagtctcccgagtagctgggactacaggtgtgtgtcattacgactggctaatttttgtatttttagtagagatggggtttcatcttattggccaggcttgtcttgaactcctcacctcaagtgatccaccttcctaggcctcc

SEQ ID NO: 164699 - DNA, 653 bp, Homo sapiens
tctagtttaactagcgttagaaatcaagaatcctctctctgcttaggtcctggtcattatagcattttcttgattacatagtttaaaccaaagcatagcattgctttatttctcccttttccatggaaaaataaacatatgtaaattttccatttgaaattccataaacacaggctgacacacaccacaaaccatctctttataattcctagacagccttgtttccttcaggtgagataataagaaatagaaatttaagaagtctttcatgmcacggttggttctctttcttatttattaaattatttgctccatctggcactaggaatccagaggtgaataagacactgtccttggatccagttaaagctgtaaatgtgcagtgtttgacatctgtaggggtgtaacaggtgaactaggtaggccatcattaaaggtatgcactcttagcataccaggtagcccttatgagtggggagggtgtaattgctacagaagcaatgccagataacatttcctatgtgtttattttgtatcagttaagtacatctttatatttactatcaatttcatttttataaaagaaactattttatagaaaatgggtagtagttctcagagatgataagcaacatggctgacatcacagagct

SEQ ID NO: 164700 - DNA, 653 bp, Homo sapiens
tctagtttaactagcgttagaaatcaagaatcctctctctgcttaggtcctggtcattatagcattttcttgattacatagtttaaaccaaagcatagcattgctttatttctcccttttccatggaaaaataaacatatgtaaattttccatttgaaattccataaacacaggctgacacacaccacaaaccatctctttataattcctagacagccttgtttccttcaggtgagataataagaaatagaaatttaagaagtctttcatgacacggttggttctctttcttatttattaaattatttgctccatctggcactaggaatccagaggtgaataagacactgtccttggatccagttaaagctgtaaatgtgcagtgtttgacatctgtagkggtgtaacaggtgaactaggtaggccatcattaaaggtatgcactcttagcataccaggtagcccttatgagtggggagggtgtaattgctacagaagcaatgccagataacatttcctatgtgtttattttgtatcagttaagtacatctttatatttactatcaatttcatttttataaaagaaactattttatagaaaatgggtagtagttctcagagatgataagcaacatggctgacatcacagagct

SEQ ID NO: 164701 - DNA, 551 bp, Homo sapiens
aaggctaatcactttcacagttcctcctttcagagcttccttagctattcttgcttatttatttttctataagaatgttgttaccacttgcctacctccagaaaaataaaagcttattttaaaaactatgattgcattatatttataactaaactcagggagaactcacatcattatgatgttgaaatgtcctattcaagaacaaggaaggtcttttgcttaggaattcattaaaatttgtattagaattttaaattaattagaactctaagtccagttgaattaacatggtatgattaaacccaagggtatcatattagaggaattatgatcaccatgtggacacatatgcacatcatattctctcccaaatgcaagtttacagaatacacacaaactctaatgtatttcctttgaacaggakcttgtagaagaacttaaaattgcccattgagctataaacatttaactttccttccaaaatgaaataaaaataacacaggaggcatgaccttttgcaaaatatgtgatttgaaaagctcattaaaaat

SEQ ID NO: 164702 - DNA, 585 bp, Homo sapiens
tcaaaatgtttccagtttggcggttaaaaataaagtaattttgaacattcacatacatttttgtgtgtagacatgattttcatttcactacgtaagagtggaatttcttgggtatatgtttagtgcatgtgtgtataaaaaactgccaaactgtctgccacaatggaagtaacattgtgcactctcactagtgagttgttaaagttctaggtgctctgcataatcactgtcatttggtattgtcattttcttttaaaattttagtcatttggatatgtgtctggcattatctaattgtgatttaatttgcacyttccatctatctaccttttttttttttttttttttttgacagcgtctcactccattgcccaggctggagtgcagtggtgcaatctccggctcactgcaacctccgtttcctggcttcaaacgattatcatgcctcagcctcatgagaagctgggattaaatttgcacttttgtaatgacaaattacattaagtattgtttcatgatttcaaattttcattttggaataatgtgagacttacggaaaatttctaaaatcttttaaagaataaa

SEQ ID NO: 164703 - DNA, 380 bp, Homo sapiens
ctggaagatctttctagaaacaaatgtgattttgtcacttcccttctaaaatccttcaaaaagctttactttggttttagagtaaaatctaagcttcttagcagggattaaaatcctttttatgatcagttgtctctcttctctcaaagtacccaatatttttccatgtattttcatggctattttcttcaaataatatgcaaactttctgaaggatcacgcttgtattttaattgttgtatttccagcagttagaatggctcttgtcctgtgtggtattcaattaatcyttgttgcacaaatggatctccctctgttttttttcttccagaagcattcgtaaggtgtgttgaactaaagtgatttcctgggctactgcc

SEQ ID NO: 164704 - DNA, 432 bp, Homo sapiens
ttgtgaatccacttatgtaataagatgcttgaaacaaggcttartctccagtaaatgctcagtaagttttacctaatattattattattgttaatgttgttgaaacctaatctgttctctcaggcctaattaaaatcctagctgattatatatgggtttagcactcatatagatatttaacatctgactactacattttatagcttctcattacagaaacaccacataaacagtaatcctgcctctgcaaatccagatgttgaaatcttggtgtatcagagtgcacagaaagtatttgataccttgaatgctgatctgattaatatggatgaattcccacatgtttaagagattgtacttttatcagtatttttcctttatataggtcctgtttttgatattactttgtttttaccacattgatttttttgg

SEQ ID NO: 164705 - DNA, 604 bp, Homo sapiens
gtgatttgatcctcattattggttgtattattggtgggtggggaagaaatgaagaacaaaccaagagaggggcacatgttgatttgcaaagtaaaggcatcagcactggcttcaagcaaggggaagcctggaaagtactaacctctagaagacagtaatggctcactcctgcaggtgcatattcatgtggttttcaagtacatcaacttccatagcctcatcctgacaactatgggagtcctacasctttttatccaagactgtgaccctggcatagtagacttgttgggactaaaaaatcaatcctcttagagctcttctaattctgtaggttgattcttaactttttctggactttggtaggtaaaagtctctcatatgttgcctaaggggccctctggctttcagcctttgtcgttagttgattaatcacacaagcctttcatttactttttccagtgcattagtgtcactcagcaggaatgatacaattccattccccaaatcttcttttagcttctagagcgagtacacatctccttctactagagaaaatgcttgggtaaatgctttatactttcactctaactcaaaacaatgccag

SEQ ID NO: 164706 - DNA, 604 bp, Homo sapiens
gtgatttgatcctcattattggttgtattattggtgggtggggaagaaatgaagaacaaaccaagagaggggcacatgttgatttgcaaagtaaaggcatcagcactggcttcaagcaaggggaagcctggaaagtactaacctctagaagacagtaatggctcactcctgcaggtgcatattcatgtggttttcaagtacatcaacttccatagcctcatcctgacaactatgggagtcctacacctttttatccaagactgtgaccctggcatagtagacttgttgggactaaaaaatcaatcctcttagagctcttctaattctgtaggttgattcttaactttttctggactttggtaggtaaaagtctctcatatgttgcctaagrggccctctggctttcagcctttgtcgttagttgattaatcacacaagcctttcatttactttttccagtgcattagtgtcactcagcaggaatgatacaattccattccccaaatcttcttttagcttctagagcgagtacacatctccttctactagagaaaatgcttgggtaaatgctttatactttcactctaactcaaaacaatgccag

SEQ ID NO: 164707 - DNA, 576 bp, Homo sapiens
gaaagttctggaggtttaatattcagcctggtaactagttattaataatgtattgtataattggaattagtaaaggaagttgattgtaagtgttctcagcatacatacaaaaactcataattatgtaaggtgataggtacattacttagcttgtttgtggtaatcattttacaatgtttcctgtatcaaaaaatcacattgtatacctgaaaatatacaatttttccttgtcaagaacagctcaataaagctgggggraaaacagaatgtgagtctagtcaataaattgataaacatatagtgtctctcaacgtgaatcagagagagattctgaagatggaaagataaataaagcataacctttggttgcaagaatcttgcatttaatgaggaatcttagaaaagtgaattcgttgaaggagagttcaaaggcatggaaattaattaatatcctattaaaagaaaaagttaaaagttgtttgaaaacattttcacctagtgaataaatgcgtaacgagaagaatagacaaatatgtaacaaaatataattgtattttattttgaaacttacaagcg

SEQ ID NO: 164708 - DNA, 601 bp, Homo sapiens
atagtttcaactatatcaaggactacaagcatattttctgaaccagttatggatttatgagtttaattaattatgttacttgctgattctatttttatgcattttaagtttaaaagatatataaacatatcaacatgataatcagggacaaaatagttaaatttgataaatgtgaactcatagtattgcmgaattagtaacatgactaaactgggtctacgcaatttctttctttctttttttttttttttttttcagatagggtcttgttctgtcaagatcgcagtggtgcgatcttggctcactgcaacctccaccttttgggttcaagtgatccaactgtctcagcttccctagtagctgggattacaagtgcaagtcaccacacccagccaattattgtaattttagtatagatggggtttcaccatgttggccaggctggtctcaaacttctggcctcacctgatctgcctaccttggcctcccaaagtactgggattataggcatgagctaccatacctggcctatgctaatattagaccaagagtttgatagtcttctctcacataatccaaatttaccctggttttgctatag

SEQ ID NO: 164709 - DNA, 583 bp, Homo sapiens
atatacactgcattttcttcatttattcattgatgggcatttatctgtcccattttatacagaagccaaattctatccttaatccaaggttagggagctaagatggtctaatttgtgtatgtgtgtgcattgaggaacattttaatgaggatatgaagaaagcagtattatgcttttttcatgtatatactattaaaataaaaacattcctaaaaatcctgtaaattgaatttatgcttcatgcatatgtgggtaagttttgacagtaatgtcaatttctgcattttgagtatgtatatartatatcaactaggattagttctggcaacacagaacagaaaaccaaatataataaaaataggaatttattctctcttgtataaataagtcagaggcatgtgggtgaaagctgatacagcagctgctgtcacctgtgccctgggctgctttttctatctgttcaactgccctaatgctgactttcaaatttaggaatacttcatgtatcagtaaggctgctggaggcccagacttctcatcattattttaggcagtatgaaggagaaagagggaaaggcaaaat

SEQ ID NO: 164710 - DNA, 486 bp, Homo sapiens
gtaaggtttattatgtaaatttaccttgttctgtctctgggctgagtctaagattgctgttaggcaaatggtgtaaggagagagcagagagcttttttttggcatctgctgttcctcagttgttttcagttcaaaatagttctcatgccaaagtggtgtattttggagtgagatatttgatcccttacactagtctgctccaagttctttacacrtattaactcactgaatccttacaacagtcctttgtgttaagtattttcattattcccacttgctaggtaagaaacctcacatggagggggttaaaataaaaattttagacaaattaaacaattgaattgaacacagaacaattcaagaattggacaacccccgaacaagaataggttcagtgacttaggcacattggcatggttggagagtatttatgaacagaaaaaggcaagtgatgtacaaaaaaaatgaaaggtccagaaacagtca

SEQ ID NO: 164711 - DNA, 411 bp, Homo sapiens
tctttacacgtattaactcactgaatccttacaacagtcctttgtgttaagtattttcattattcccacttgctaggtaagaaacctcacatggagggggttaaaataaaaattttagacaaattaaacaattgaattgaacacagaacaattcaagaattggacaacccccgaacaagaataggttcagtgacttaggcacattggcatggttggagagtatttatgaacagaaaaaggcaagtgatgtacaaaaaaaatgaaaggtccagaaacagtcagattggttactactccatgtttgccttatttgaacatggtttgaataacaattkgctgcctgtgagtgatatgtagttgaagtatggtggctgtgattagctgagacttggcttactgctataacagcag

SEQ ID NO: 164712 - DNA, 599 bp, Homo sapiens
aacaatggaggtctagtggacccattagattatccttctgggactaaaatgagggtaaaaaatgagatgaaagattgaggaacagctaattcaggaactatcagaagaaaataatctggtagaattgtgaaggagcatttgtactctcagtattaaattgcaggatgcaattcagggtcctagtgtggtctatacaacaccttacatttaagagtaagaygaagctttccacagtatcaagcattcacagtcatcatctcttattctactttcaattcaccctccactctagacatacctgcctctcagtgtgacaccccttcacaccatttttcatatgtctctctctctctctgtgtcacccgggctagttttctcacttcttttctggaaactgacatcaagttattcagccactgcttgttcctgcagctcattcaatctttcattcattcagctatgtaactgaatgtcatcatgtaactaagtccaccagccagtgcttattatgtgccaggtgcagaaagtactccttaacacatcatattttgtgtattctaacaatggcattataagatacatatttttatcccatttgt

SEQ ID NO: 164713 - DNA, 563 bp, Homo sapiens
aacttatctcttcacatccttatgttgagagagtgctgggagagtcttcagagcacattcctttgagctctggcccttagataacattatcgaaaatttgcctgttactgcctttgaaacgagtcagcctaacacaggcagcttgtttctttctctttttaatttctattttcttcctttctttaatttttctttttttcccacctcattgttgcttatttttaaaaattttagacattgtatyctgccttccaactttagaatattaatatttagcactgattcagcaacacacatattgttaatgcttcatcttgccaatatggacataccatcatgtacttgttaaatcaacatttagttctctaattattaagattacataaaatattcaagctgaatcaagcagtgaaccataattacattttttctgtacagctatatatttttcctaaggttaataattacttcaatatttatttgtttagttttctttatatctataactaacttatctttaaagtatctgccacaactctacagctcctctctatatggtcaca

SEQ ID NO: 164714 - DNA, 596 bp, Homo sapiens
tgttaagtatgtgatgctggttaaatatccagtcagaaatattgagtaggcagttgaaataagtctgaaactcagagtggaagccaggatacaaaaagaagctgagcagggaaaggggaggtggctttgagccttaaaaaaaaaaaaagaaatattcaagtatagaatacatccctaggagaggaattcctagggaatagaaggttgtagcagcgaacaagagaaacaaaattctgaccctcatgttattttctaatgacaatagccaaaattttttaggtttattaatgtgtaatttgtatacaaaaatctgcacatatttattgtatataattcsatggatttgaacatatgcatacacccatgaaaccattgatacaatcaaggtaataaatgtatctatctcctccagaagtttccttttgaataccctcctttttgtagtaagaacgcttaacttgtgagctactttcttaacaaatttttcactacaatatgatgttattaactatagatatcatgttgtacagaaaatctctagaattcattcattttccatcactgaaattttatactcatgtaaaaacaacacatat

SEQ ID NO: 164715 - DNA, 559 bp, Homo sapiens
ttattttatttcatttactatgatttatctgcaattaaaatagaatatgttttacaaaatcataatgatccaaatatgtcccgctacaggagttcgagaccaacttgggcaacataatgagaccctctctatacaaaaaattraaacattagctgggcttggtggcatgtgcctgtggttccagctactcaagaggctgaggtgggagggttgcttgagcccaggaactcgaggctgaagttagccataatgtactccagcctggatgacagagaaagaggctgtctccaaaaaaaaaaaaaggctctctctataatatttatttattaaaatgctaaaatgctaacttccattataggtcaagcatggtttagttgcagtatttcatttgtttattactgaaatctgtgggcatcttttgaaatgtttggtacatggagaaatcatgtgctgtgtttaattatttagtattcttgcattgttagtgaatctagacctctggacagctttaaattcatatgatgttagtgttggcattatataaatggtatacatttca

SEQ ID NO: 164716 - DNA, 559 bp, Homo sapiens
ttattttatttcatttactatgatttatctgcaattaaaatagaatatgttttacaaaatcataatgatccaaatatgtcccgctacaggagttcgagaccaacttgggcaacataatgagaccctctctatacaaaaaattgaaacattagctgggcttggtggcatgtgcctgtggttccagctactcaagaggctgaggtgggagggttgcttgagcccaggaactcgaggctgaagttagccataatgtactccagcctggatgacagagaaagaggctgtctccaaaaaaaaaaaaaggctctctctataatatttatttattaaaatgctaaaatgctaacttccattataggtcaagcatggtttagttgcagtatttcatttgtttattactgaaatctgtgggcatcttttgaaatgtttggtacatggagaaatcatgtgctgtgtttaattatttagtattcttgyattgttagtgaatctagacctctggacagctttaaattcatatgatgttagtgttggcattatataaatggtatacatttca

SEQ ID NO: 164717 - DNA, 541 bp, Homo sapiens
ggcatgggtcagagttgtgaggctactgttccaggccctagctcctggaaaacatttatagacacactgagccagaaggaaacctgctgcctggaagggaagaactcagtcttggcagcattcatcacctgctcactgaagagcccttgagccctgaataaccagctctggtattcaggtattacatcgaaggccttgggtgaacctctgagacttgctggcttcagagaaggctcagcacattttcaactgtggtggctacaggataagcctcctacttgagaaaagcagaaggaaaagtaaaggggaatttgctcgttttaagtaccagcatggccacaaggaatttgagcaccaagtgggcacttgagttctccatttccagaacttcactcttgaacaagatgtctgsacctgccctgagccagaggggagcccactgctctgacaggtgagtcccaggccaagcagcactcaccacaagctgattgaagagacctggagtcttacaggaatatctgtggtaggttggcagtactcc

SEQ ID NO: 164718 - DNA, 484 bp, Homo sapiens
aactcatttttgacaaaggtgccaagaacaaacactggagaaaagacagtttcttcaataaatgattctgggaaaactggatatccatattcaaaagaatgagactagacccctgtctttcacattatacaaaaatagaatcaaaatggactaaagacttaaatctaagatctcaaactgtgaaactrctacaagaaaagtttggggaaaatctccaggacatgggtttgggcaaagacttcttgagcaaccccacaaacacaagcatttgaagaaaatatggacaaatgggattgcatcaagttaaaaagcttctgtgcagcaaaggacacaatcaacaaagggaagagacaacccacagaacgggagaaaatatttgtatagtatccatctgacaagggattaataactggaatatataaggagctcaaagaactctcaaagaaactaataatccaatcaaaaatgggcaaaagatttgaat

SEQ ID NO: 164719 - DNA, 587 bp, Homo sapiens
gaggggagggataccccattctccataatgtgcttgtttcatattgcatgyctgtatcaaaacatcgcatgtacctcataaacatatacgcctaccatgtactcacaaaatttttttaaaaaagaataataaaactagtgggggctatgttatattatttaaataaatacacttaacgtggttagatttcaggggctgaagataaggaaggaaatgtaatttcatcatttttaggaaaaagttcaagaagaagcatgcacacacacatcatcatcatcatcatccacaatagcagaaatacactcagtaaaaacttttactggcaagacccacacctttgaaagtaaaaaggcactgaatatagaaggcattgttattttctggaaggaaaaaattttaaaaaaagaaaacaaaaatatggctactgtaatatatgcaggagaaatagttttattcttagaaagtcaaagacataaagaaattgatataacatatttgcctctccaaatatgtaacatacttgtctatgtctctagtttcaattttatttctgcatgccagacttatttttttccactaggaaagtt

SEQ ID NO: 164720 - DNA, 541 bp, Homo sapiens
ttctaatattgtaaaaacagactatatttttcaacctaacataattgcttttgtttaaaaactgaatgtgatctgcctatgttgatacttgaaattttttgatatttctgaaaactgtaccaatactaaccagaatgaggaaccagagagcttatcaggctggcctgtttaagatccatgttgttaattggaataaattacaatattaaaactgaatgagaccttagaagactttytttttgcagaggtagtttggttttacttataattattggaggtaatttaggcagtgtctatccttactacacattctaactgtagtaagaatcaggattgtccttactacacattctaactgtagtaagaatctaactgtagtaagaatccttactacatatcctaactgtagtaagaatccttactacatattctaactgtagtaagaatcagaactgtagcactgtggtactcttattcaggattaggagagaaatggcttaccgctcggtccttctcattagggcaggacattgtagaaagc

SEQ ID NO: 164721 - DNA, 380 bp, Homo sapiens
atgagggagagaattctttgatgccaagaactttgcatatagtccaaattctttttcaaggcaraacctattatgtattgccagagagtcttgaggtcagtaaggagatgcattggtgcaagttggctattgaatggagggaggataaaggtacaggagacgctacttatttactgtatttaatcaggatgcccagggaataaggcaggatgtctggagagggtcagtggcagtgcgtcaagagtagtggcacctggaccctgttgctattttggctattattgatccagggaactttgccaggctaaaaataggtcctgtcctcttttatttgccccacatcttacgtgtttgaataagaaaggcctgatcttagctac

SEQ ID NO: 164722 - DNA, 509 bp, Homo sapiens
ccaggtgactccgttcagccaagtcagtccttggagggggctgccactgagtctgctgacagcctcccagcagccagggcaaggaggccttcattcctcaaggaggatttgggcctcatgtactgccctcagagaggcactcaataaacattgacacatkggctgagaacacctctctccctcatgtcacagggtccctgatttgtgacttggacgcaggcagaataggtttggaactacagcatttgtttaaagaataataatgaaccaggctgcaaaagaccattttgtgaatgattgtatagcagccaccacaaactgctaaatgtatgggtttcagactttactgtaagagcatcttctgtaatgagagtgaaagccagtgcgcccaagccaattaatgattgtcggggagaaagtagtgacctgtacagtcagatacatagtctcatttcacatactctttccaaaagatttttattttcaggaacagagcccttgaagtaaga

SEQ ID NO: 164723 - DNA, 509 bp, Homo sapiens
ccaggtgactccgttcagccaagtcagtccttggagggggctgccactgagtctgctgacagcctcccagcagccagggcaaggaggccttcattcctcaaggaggatttgggcctcatgtactgccctcagagaggcactcaataaacattgacacatgggctgagaacacctctctccctcatgtcacagggtccctgatttgtgacttggacgcaggcagaataggtttggaactacagcatttgtttaaagaataataatgaaccaggctgcaaaagaccattttgtgaatgattgtatagcagccaccacaaactgctaaatgtatgggtttcagactttactgtaagagcatcttctgtaatgagagtraaagccagtgcgcccaagccaattaatgattgtcggggagaaagtagtgacctgtacagtcagatacatagtctcatttcacatactctttccaaaagatttttattttcaggaacagagcccttgaagtaaga

SEQ ID NO: 164724 - DNA, 442 bp, Homo sapiens
taattaaattgaaatgacagcagaggggaaaatttgaatgtacgaataacttcattttcctggctgctcttgaaaagcaagagtacaattttgaacaagagatcattttgtaaaaatacgaacatactcaatttttccttcttgcctggcgacagactcttgggctccctctcactaggcttttctcctttctctgctagccttcttttttcctaacaagtttgaagccccacaccatgtgtgctcaacagaggggaaaaataagcagtattgcttttcagatgtccctaggaaacctaatatgcatttgatgctcactgcactgaaatggaagytccttgtgcaattcagcacccccccagaccctgatcaggctcagacatctgcaatctttcagatggagagaatctatttccccccaccccactttggccttacatgg

SEQ ID NO: 164725 - DNA, 606 bp, Homo sapiens
ttcaacccagaatgttatacccagcaataacatctttcgactatgaaggtgaaataaagactttttcagcaaacaaaagctaagataaatcagttctggcaacctgaattataagaaatgttaagcaatgtttttcagacagaaggaatatgatacctcatacaaatatgaatctaaacaaagaaaggaagagtgctgaaaatgattgaaaatgagggcaaataataaagaaatattttcttacttttaatccctttatacaataatttattatctaaggcaaaaataataaccatgtattatggtatttagaacatacataggcattaagaataaaatgtgtagtaaaaaattgaacagatgctaggaggttaracctggaagtactcaattaggagactctcagactatacttgagattctataatacttttgaaggtaagaagtaatatattaaagatataaattgtaaaacttagagcaaccactaaaaagataaatattccattaatccaaaagaaggcaaaaaagactttgagaggaaaaaaagaatatataggacataaaaacaaatataatgatagatctaaatctaatcctatcaat

SEQ ID NO: 164726 - DNA, 494 bp, Homo sapiens
cttgccacacccactggctctcaggatgcaggtgagttcttcctggggagaagcaagctcgtgaacagctccacacactctgaccaccttctctgtgcctcaccatggaaaaggtcccactctggaagatgcactcagagccagaaaacttcctttcttttttgtgtgtgtgtttatcctttagggatacacaaagtagtgtcacacagagtttttaatcagaggcacttttttaattttgtacataatgtgtgcttttttgtcggctccagatgagagtccaaaggactgggcctggggcagaaataagtgacagacagcactgtaccagcatagcctgtagcctgaactgagcctctgccatcagggcaaacagacgtccaacaggcttatcatgttagctcatctggaaagcctgacaagtaaaatttgcagctgtcatccaagcagatcccttactccacactacttayggggacatataagttttatct

SEQ ID NO: 164727 - DNA, 563 bp, Homo sapiens
atgctttggccacctgaatgaagccttgcctgaagccatactttgaacttttccattacctgagccaataaatccttttattgtttaatccaatttaagttagttttcagttgattataacctaaagaaatctagctgatagacctatataaagctaactgctggatgcagtgacaagcacgctggcttaagacttcagagacctgagtgcaaggtctcactcttcccttaaatggcagcattagttagggaagtccctactscactctgaacccagcatctgcagaatgaagtagctggaatagaacaggattttccaaactctagtcaagcagaccaggctggtcaatgaaaacatgtctaccagtcctcagttttgaaagaaacataaggaatggctgtaagttttcataaagttacatgtattttatttaaaggactaccctttactgtaagactataaaagtataaggataatgtttattttatttgtattttatgctctcaattgatgaaagtagaaatcataaactttctatagttctttctgatttaagtcatcc

SEQ ID NO: 164728 - DNA, 563 bp, Homo sapiens
atgctttggccacctgaatgaagccttgcctgaagccatactttgaacttttccattacctgagccaataaatccttttattgtttaatccaatttaagttagttttcagttgattataacctaaagaaatctagctgatagacctatataaagctaactgctggatgcagtgacaagcacgctggcttaagacttcagagacctgagtgcaaggtctcactcttcccttaaatggcagcattagttagggaagtccctactccactctgaacccagcatctgcagaatgaagtagctggaatagaacaggattttccaaactctagtcaagcagaccaggctggtcaatgaaaacatgtctaccagtcctcagttttgaaagaaacataaggaatggctgtaagttttcataaagttacatgtattttatttaaaggactaccctttaytgtaagactataaaagtataaggataatgtttattttatttgtattttatgctctcaattgatgaaagtagaaatcataaactttctatagttctttctgatttaagtcatcc

SEQ ID NO: 164729 - DNA, 464 bp, Homo sapiens
ttcccgtgcccagttggtggatggatggagtgggtaatgagcaaatctctgtgcctgaaaatagcagtcctggttaaaaaaaaaaagagaagaggtccactggcccatatgctgggcaaatcgcccctgactcttccatataatggaagcccaatggcatataagtccttattgccttattgggtgctatctatcaggcacaggcaccagttgcatgagtaaaaataaatgcaaaggcatgctgcttgtatttttaaagtatttctaattttaaaagtaacatgtttattacagaaatttgaaaactacagaaaaacaaaaccaagaaaaatcacccatgatcttggaatctagggatcaacctattattgtcttgctatgtatgtttgtattattctccaagtgtttattataagcatttaaaaaaaatgtgaccytgtagactttgtagctttgattttttt

SEQ ID NO: 164730 - DNA, 572 bp, Homo sapiens
tattgaacctcaaacatttttgatgcagttgtagagttctctctgtcattttgcttagcacatgtaggtgatgaataggtgaataatatgttcaattgaactgacccatataatcagaccactgaatttagcattattaaattctcaaaatggtccatttttagaactctcttgaggagtaatagattcataacagaataataggaacaaaaataatttacctaattcaagaataagtttgtttctggatatgccaaagggttaatattcaatgaaccragagaccaaatagaagaaattaaaccacctaataaaaaatacgtaattaattaattcacagaatatgaaatacaaataatcaaactgatacgaaaaagggttcctctcattaaacaatgagatgtgagttcagttgtaatatatcctttttatctatcggattggtggcaatggaaaagaatccctgttattcagtgtaggtgtgcacttggcatttgcttacaggcactttcctgcactgttgggtgatgtaacatggagcctgctttcagaaagatcgttcacaaatatga

SEQ ID NO: 164731 - DNA, 534 bp, Homo sapiens
gcaaatgtactagaatagccaaaggcattttgaaaaagaataaagtaaaggattcttcttgcttgatttcaagacttaatataatgctataataatcaagacggttttatattagagaaaagacagacacatagataaattaaaatgtgttcaatcagatgtatacatatatagtcaytggaatttcaacaaaggttcaaaggcaagtcagtggagaaatgacagtcttttcaacaaatgataatggaataattggatatccataatgctaaatcacaccatgtataaaaattaattccaaatgaatcacagacctaaatgtaaagctgacgagtataaaatttatagaagaaagcatagaagaaaaacttttgtgaccttgggttaggcaaagatatcttagatatgaaacaaaagtacaatccattaaaaagtcaatcaatgggatttcaatgaaataaaatactttctgctctgtgcaagatactattaagacaatgaaaagacaagctgcaggccatgtttttacaaagg

SEQ ID NO: 164732 - DNA, 534 bp, Homo sapiens
gcaaatgtactagaatagccaaaggcattttgaaaaagaataaagtaaaggattcttcttgcttgatttcaagacttaatataatgctataataatcaagacggttttatattagagaaaagacagacacatagataaattaaaatgtgttcaatcagatgtatacatatatagtcattggaatttcaacaaaggttcaaaggcaagtcagtggagaaatgacagtcttttcaacaaatgataatggaataattggatatccataatgctaaatcacaccatgtataaaaattaattccaaatgaatcacagacctaaatgtaaagctgacgagtataaaatttatagaagaaagcatagaagaaaaacttttgtgaccttgggttaggcaaagatwtcttagatatgaaacaaaagtacaatccattaaaaagtcaatcaatgggatttcaatgaaataaaatactttctgctctgtgcaagatactattaagacaatgaaaagacaagctgcaggccatgtttttacaaagg

SEQ ID NO: 164733 - DNA, 585 bp, Homo sapiens
atggtgtctccagcttcactgatttttacttatgatggccttggctgttagggacttgtggtgatttctcatsaattttggaattttttttctatttctatggaaaatgaaattggaattttgatagagattgcatttaatctgtggatcagtttgggttggatggacatcttagcaatattgatttttccaatctacaaaaacaggatattttccatttttggtggcttctttagtttctttcatcaatgtttaatagttttaagtgtacaggtctttgacctccttggttaaatttactcctaagctttttttgtggctattataaatgggattgtcctcctcatttcttttttgaatagttcagtgttagtgtacagaaatgctaaaaactacacattggtctgggcaatgtttttttaggtttgaccccaaaagcataggcaacaaaagcaaaaatagacagatgagattgtgtcaaactaaaaagcttcttaacagcaaaggaaacaattaacagtgtgaatagacaatctacagattgagagaaaatgtttgtaagccatataccagaaaaagggtcag

SEQ ID NO: 164734 - DNA, 585 bp, Homo sapiens
atggtgtctccagcttcactgatttttacttatgatggccttggctgttagggacttgtggtgatttctcatcaattttggaattttttttctatttctayggaaaatgaaattggaattttgatagagattgcatttaatctgtggatcagtttgggttggatggacatcttagcaatattgatttttccaatctacaaaaacaggatattttccatttttggtggcttctttagtttctttcatcaatgtttaatagttttaagtgtacaggtctttgacctccttggttaaatttactcctaagctttttttgtggctattataaatgggattgtcctcctcatttcttttttgaatagttcagtgttagtgtacagaaatgctaaaaactacacattggtctgggcaatgtttttttaggtttgaccccaaaagcataggcaacaaaagcaaaaatagacagatgagattgtgtcaaactaaaaagcttcttaacagcaaaggaaacaattaacagtgtgaatagacaatctacagattgagagaaaatgtttgtaagccatataccagaaaaagggtcag

SEQ ID NO: 164735 - DNA, 585 bp, Homo sapiens
atggtgtctccagcttcactgatttttacttatgatggccttggctgttagggacttgtggtgatttctcatcaattttggaattttttttctatttctatggaaaatgaaattggaattttgatagagattgcatttaatctgtggatcagtttgggttggatggacatcttagcaatattgatttttccaatctacaaaaacaggatattttccatttttggtggcttctttagtttctttcatcaatgtttaatagttttaagtgtacaggtctttgacctccttsgttaaatttactcctaagctttttttgtggctattataaatgggattgtcctcctcatttcttttttgaatagttcagtgttagtgtacagaaatgctaaaaactacacattggtctgggcaatgtttttttaggtttgaccccaaaagcataggcaacaaaagcaaaaatagacagatgagattgtgtcaaactaaaaagcttcttaacagcaaaggaaacaattaacagtgtgaatagacaatctacagattgagagaaaatgtttgtaagccatataccagaaaaagggtcag

SEQ ID NO: 164736 - DNA, 619 bp, Homo sapiens
aatactatttggcattaaaaagaaggaaattctgtcatttgcaacatcatggatggaattggagaacattattctatatgaaataagccagacacagaaagacaaatactgcatgttctcacttatatgtggaatctgaaacaactgaactcatagaaacagagtagcatggtggtaacagaggctgaggtagagggaggaatggggaaatgatgtttgaagggtamaaaatctcacacaggaagaataaggactgtttctggagttctgttgcacatcatggtgaatatagttaataatagtgtattgtacatttcaaaactgctacaagaataaatctcaaatgctctcaccatgaaacatggtatttgaggtgatggattctgatatgatttggctgtgtccctgcccaaatctcatcttgaattgtagctcccataatttccatgtgtcatgggagggacccggtgggaggtaattgaatcatgggggtaggtctttcctgtgccgctcttgtgatagtgaatagccactatgtaagacgtccctttgctcttccttcgtcttctgccatgattgtgaggcctccccagccacgtggaaccgtgagtcaattaaa

SEQ ID NO: 164737 - DNA, 619 bp, Homo sapiens
aatactatttggcattaaaaagaaggaaattctgtcatttgcaacatcatggatggaattggagaacattattctatatgaaataagccagacacagaaagacaaatactgcatgttctcacttatatgtggaatctgaaacaactgaactcatagaaacagagtagcatggtggtaacagaggctgaggtagagggaggaatggggaaatgatgtttgaagggtacaaaatctcacacaggaagaataaggactgtttctggagttctgttgcacatcatggtgaatatagttaataatagtgtattgtacatttcaaaactgctacaagaataaatctcaaatgctctcaccatgaaacatggtatttgaggtgatggattctgatatgatttggctgtgtccctgcccaaatctcatcttgaattgtagctcccataatttccatgtgtcatgggagggacccggtgggaggtaattgaatcatgggggtaggtctttcctgtgccgctctygtgatagtgaatagccactatgtaagacgtccctttgctcttccttcgtcttctgccatgattgtgaggcctccccagccacgtggaaccgtgagtcaattaaa

SEQ ID NO: 164738 - DNA, 481 bp, Homo sapiens
tgggtgatacaggtacctacaacatgtcatgggagaatggaggaagacatacttccctttgagaaggacggcttaatggagaaagtgacatttaataagtcttttataactgaattggggttctccaaaggtatgggaggaggtggcttcaacactcagaggcttgctggtccccgaaccagcagcatcagtattgcctggtagaaggtgagaaaggcagaatcataggccctaccctagacccactgaacagaaactggcatttcagcaagatcctcaggtcatccgtaagcatactcagcttaagaagcacaattctagaccagacagtctcagccttgaaggatgttggaatcactccagaagcttaaaagaaaaaaaaaaaaagatgccttggtccttcttgcaaggattccaatataatttatgttaggcatggccatcagtagaaaaaaaaatgcraaatgaaacaaaacaaaat

SEQ ID NO: 164739 - DNA, 410 bp, Homo sapiens
gcaggaaccagtatatctttatgtaatagcatagaggtacactgtaaatggtagttattaatgttctaacccaaattagtagctaatctgaacctctggattcrgtaattggtagtacttacctcccactgtctcacagaatgcaacatttcatgggggaaacctgaccaaaactagcaatattgacaactgtagtgtgatgtgtcccctaccaggttacttaagagtgtatgtgtgttgcttggatcctgaatgctgggcagggagtcaaggccctggtgcccagctgaggagcagggatccctgagaacccaaacatcccagggcatacctgagaacatgtcaaagaaaacactgtcatcgtgcacacagagtaggcaaacagtcagaacattagctgaaaggcagct

SEQ ID NO: 164740 - DNA, 597 bp, Homo sapiens
gaacatgttgtttcataagacttatttgaagtctatgaagccttgtaagtcttctaaagccctttttccatagtggcaggaagctgtgtgttgcaaagttatgtgaacttgaatcctcaatgagcggaattggtttgaaacataagatttttttaagacacaatgttaaattgagttaaacttggtaaaacccatcctctctcccacaattgctatcctatattttggtgcatagcttttaacaataaagtaactgaggctacacagcagttattcttgaaatttctgtgctatatccggcaagctggatttctatagaggaagaaggagctgaggtcatttgctagctgtggccagtgaaatgcagtttaagttctagattttctcatttctagtcacatcctcycgggaagccactgtccgctgggtgtttagctaaaagaccctcctgcaaacttcccccagccttacaaaggggtgtgttgcctgtagaagcccacgcacactggcatctaccagacctgggttgaaatcctagcagcactacttcttgggagtcatgcaaagtagggaaggattactgcctagagagagaac

SEQ ID NO: 164741 - DNA, 479 bp, Homo sapiens
atttaagacttttcctaaataaaggggttctggtacatctggaagatgcattttttttctctctctcttctctaagagagaaactgggagtgggtgtagtggctcatgcctgtaatcccagcaattcaggaggccaaggtgggtggatcgcttgagcccacgagttcaagaccagcctggacaacatggcaagaccctgtctctacaaaacatacaaaaaattagccaggtgtggtggcacatgcctgtggtcccagctactcaggaagctgaggtgggaggatagattgagcccaggaggttgaggctgcagtgaacgtgattgcaccactgtactctggcctgggtgacaagagtgagaccctgtctcaaaaaaaaaattaaattaaattaaaaaaaggagagagatagggagagrgagagagagagagagagagagagagagagagagagagagagagagagagacactgaatgtg

SEQ ID NO: 164742 - DNA, 504 bp, Homo sapiens
gatccctgtaatgaaccctccttctctgagatcccttctgcttggggttgctctttcggctcttttctcaagagctacttctggtgccttctcctagccaagcgtttttcttactcactttccctgcaactcttgcagtggggtctctgttttcccttagcttcacctccatttccatgtttctctaaaaatctacagagacccaccaggcacagtggctcatgcctrtaatcccagcactttgggaggccaaggcgggcggatcacttgaggtcgggagttcgagaccagcctgaccaacatggagaaaccctgtctctgctaaaaatacaacattggccgggcatggtggcacatgcctgtaatcccatttactcgggaggctgagtcaggacaatcacttgaacctgggaggcggaggttgtggtgagctgagatcgtgccattgcactccagactgggcaacaagagtgaaactctgtctcaaaaaaaataaaataaaat

SEQ ID NO: 164743 - DNA, 314 bp, Homo sapiens
ctctggtgaaccacaagccctgatatatacatactgatgatctgagaatcacagggctgaggggaggagcatcttatactcatgtggatgaaggagtaaattatatggtgctagaaatcttgccactctagttctcaggtgtagcaggaatctattattccttctggctgccatgcatctaaacctcacctccatttggcartatctactttgtaggttttggtgggaggtacagacatctatcaacatagaagctaaaaatgctccaaactcactttcccaggcgccattgttggtcatgtgtgggtgtgtga

SEQ ID NO: 164744 - DNA, 519 bp, Homo sapiens
acaacttacatagagtaagtggtagaaaaatgtgtgttgcaaggaaaagaaaaaaatatatggcattactctggccccgatacagacacccatttttaaataaaaatctcttatttatctggtaaactgttgatgaaatggcaacacgartgatagatctcgattttctatctcatccattgaggatgtgtactcttttgttttattcatgcagacaatctgccagtcatcattcacattgcatctgctctataatatccaataggcattaaaaggcatcctgcacagtgaaacctcgaacaaaatagtgttactataaccaccatctggtctgatatgaagagagtgattatttacttatgccctaccagtctagaaatgcctggatctggcatggcgggggaggaatcagtgtaatattttatacagatcacacttagttaccgtgagcatgaaaacgttttggtcaacagtcttgaaggccaagaccagcatagtagtggcataatccattgagca

SEQ ID NO: 164745 - DNA, 524 bp, Homo sapiens
gcgggggaggaatcagtgtaatattttatacagatcacacttagttaccgtgagcatgaaaacgttttggtcaacagtcttgaaggccaagaccagcatagtagtggcataatccattgagcacaaaaggaacatataagaatttatatttgtcctttgtatcttataatcatcaatcactttatatgaatagacactggtgcctacatactckatatgttagatgatcatatgccatacatggaacatggggtagcaatttcaaaactcagaaaggctacaggcataactcttatttgtgagtttgtctttggtatatgaagacatatcactgtgcccaggtaggtgaatgcgtagattatattgtgtatttcacaaaatgaacaagagaattaaaaatattcttaaaatgaaatctcaaattgaagtagtcatgataatacaaacatgtacaaacagttggagaacagaagaactgatgcttccccattcttcagttatgagatggaaacaaggaaatttta

SEQ ID NO: 164746 - DNA, 514 bp, Homo sapiens
ggcatggcgggggaggaatcagtgtaatattttatacagatcacacttagttaccgtgagcatgaaaacgttttggtcaacagtcttgaaggccaagaccagcatagtagtggcataatccattgagcacaaaaggaacatataagaatttatatttgtcctttgtatcttataatcatcaatcactttatatgaatagacactggtgcctacatactctatatgttagatgatcatatgccatacatggaacatggggtagcaatttcaaaactcagaaaggctacaggcataactcttatttgtgagtttgtctttggtatatgaagacatatcactgtgcccaggtaggtgaatgcgtagattatattgtgtatttcacaaaatgaacaagagaattaaaaatattcttaaaatgaaatctcaaattgaagtagtcmtgataatacaaacatgtacaaacagttggagaacagaagaactgatgcttccccattcttcagttatgagatgg

SEQ ID NO: 164747 - DNA, 454 bp, Homo sapiens
cagggtctggcatgaaattagtgctcaataaaggtaggtattatcattgtattgagttgagtttgaatctcattttgaatacttgacctagaggaattcacagcctagtagttgaagtagaaaggaaattaaataattttatttaatattaatatttaattgaacatactctaaatacaaataaatataaacatatraataaaattctaaataaatagtaatgaggatatatataaagcatacacatctatgaatctatgcatatttatataaacataaatacatttaaatatttcatgtatttaattaatgtttacacaataactatataaatatacagacaaatataaattagagaaataaacatatatacatatataaagtataaataaaacataaatacataataaaaatgtaatataatttaaatttaaataacacattaaataatttg

SEQ ID NO: 164748 - DNA, 603 bp, Homo sapiens
accaccctggacatgcctggtaaggatcacaggcagatgtgatttcatctacacacagttcctcgttggtccyccctgagtgctccctgcaggggctttgtccttggccactggcctcacagtgcctcacactcaccctcaccctcctgtttcacactccttcaagaagcaaatggtagcgccttcaccaccccttgcgaatgggccaagtattgtgtctgatcctatacttccgcaattctctaaatgctgaattcctacctaattatttcttctctttcattctgtcagttccaaattaggggttccgtattgctttaggacttttcaccttggaattctatgccagaattgaaacaatccaggaacagccctttcacctctgtccctttaacattctcccgatgtttcatcttcaccattttcatggaaactcctcctctgtgtttgtgcccatctagacccaagagtcctgctcagtttcatcttaagcagtttaaatgacatcctgataaccgtgtcatggtttgtcttgtttccagaaggcatctttctcactggctgcccagggtgaggttccatttttctacttcttttttaata

SEQ ID NO: 164749 - DNA, 534 bp, Homo sapiens
ataagcttactgccctgggcaccaaagtaacctagaatatggagaagtagcttttggtgacatgcatctatttatatctctagcatttactaattaattaatttgtttaaaaaatacacattcagtaccattatatgtttggcattgtcatagatgttagaaaatcaaatataaaaaagaggtaatttcttcacaacacayggaaataagagtatctctaggaattgtctctagttgaaattgttttctcctacccacctctacgattcatcaatttagctttccttcactgtagtgacaggtgttttaatctcacctaacaatatgcctgattaagcttcaacatacacagagagaggcctgaaaaacataacttggtctctatgtctaagtttatgttgttagtaatagttataagagccacagcgatggcaccatggcgttaccttctctgaaggctttcccagctttcctagcaaagctcttttctcttccctctggttaaaaaataaataaaaaaaaaataaaggtttt

SEQ ID NO: 164750 - DNA, 600 bp, Homo sapiens
tacacatgtaaaattcaagctagtgttcttgggaaaattatcaaataactgcttttgctgattttttttaattgaattaggacatatattacaacatctgttttgtagttactataataaataatgtttcacttctcaagactgagttacagaaataattggttttaacatgagcycatttatttaatatggtctataaaatgttcaaaaattccaaataatatgactgcctaacaaaagaaccaatctgctaactggatgaggactcaagagctctgtctgagggctctacagaaacccatttacaaatactggaggaaggtctcagctgtctagtcctgatgtttgtttatccatccagcatagcttagggtgaaagtcttgtatttgtttctatggttataaacggtcccacccttctggacatttacattgaatcagtcagccagccagccagttgtgcgaaaaaagtctgggagtaattaaaatgagagttataaattttattttaatttttttgccattgtaccatttctctgtcagagtcttacacaaccaaaatatccaagacaagactaataatctgagaatggtgagaat

SEQ ID NO: 164751 - DNA, 600 bp, Homo sapiens
tacacatgtaaaattcaagctagtgttcttgggaaaattatcaaataactgcttttgctgattttttttaattgaattaggacatatattacaacatctgttttgtagttactataataaataatgtttcacttctcaagactgagttacagaaataattggttttaacatgagctcatttatttaatatggtctataaaatgttcaaaaattccaaataatatgactgcctaacaaaagaaccaatctgctaactggatgaggactcaagagctctgtctgagggctctacagaaacccatttacaaatactggaggaaggtctcagctgtctagtcctgatgtttgtttatccatccagcatagcttagggtgaaagtcttgtatttgtttctatggttataaacggtcccacccttctggacatttacattgaatcagtcagccagccagccagttgtgcgaaaaaagtctgggagtaattaaaatgagagttataaattttattttaatttttttgccattgtaccatttstctgtcagagtcttacacaaccaaaatatccaagacaagactaataatctgagaatggtgagaat

SEQ ID NO: 164752 - DNA, 607 bp, Homo sapiens
ctagatatatcagtaaaaaataatccagattgaaacaaggtaggagaaagaatgtacaatatgagacatggcaaaagattgaacacttgtgcagttggagttataagagaagaaagacaaatgtagcaggtgaaatatttaattagatagtgacagataattttccaaaaatgaacaaaagccacagactgcagactacctaagaacatcaagtaggataaatacaaagaaaaccacacctagataaatcagagtaaactactaaaaaccaaacaaaactcaaagacaaaaagacattcaaagcagccaaaagggagggggaagcactgttttcaaaagagcaaaagtaaccaaaaggatagaagccaaaagacaaagtaatgcattctttaaaatgttgaggtaataatcaccatcctagaattctrtacataatgataaaatttcttcaaaattgaagataaaataaaggcagtttcagaaaataaatgccctgagaatttattgccagcagatttgccatcaaagtaatgataaattttttcactcatgaaagaaattgaaaagaagacaaaaaattgaaacacattccatgttcacaaattgg

SEQ ID NO: 164753 - DNA, 580 bp, Homo sapiens
ggcttttggccacacactgaagactgcactgttggcttccctacttctgaggttttgggactcagactggcttccttgctcctcagcttgcagatggcctattgtgggacttcaccttgtgatcatgtgagtcaattcccctaataaactccccttcatataygcatgtatcctattagttttgtccctctagagaaccctgactaatacattcataaacactttagcacagatcagagggtctgccctaagacaccactgctctgatatttacactacaccactatgggaaccaagaggagtgactatatccatttggggcagttggcatagcattcccagagaaagtaatatttctgggttataagcagaggtctgccaagatggacaagtgggaagaagagcattccagctgaagagaatggaacacacaaaaacacagaaaaaggaaggttaagggcaagttgaaggatggagaaacaggttggatagccggagccaagggtagaggaggcaagacctgcagtaagtaggaatcctcaggccaggagaagcacctaagagtattaagggagataga

SEQ ID NO: 164754 - DNA, 580 bp, Homo sapiens
ggcttttggccacacactgaagactgcactgttggcttccctacttctgaggttttgggactcagactggcttccttgctcctcagcttgcagatggcctattgtgggacttcaccttgtgatcatgtgagtcaattcccctaataaactccccttcatatatgcatgtatcctattagttttgtccctctagagaaccctgactaatacattcataaacactttagcacagatcagagggtctgccctaagacaccactgctctgatatttacactacaccactatgggaaccaagaggagtgactatatccatttggggcagttggcatagcattcccagagaaagtaatatttctgggttataagcagaggtctgccaagatggacaagygggaagaagagcattccagctgaagagaatggaacacacaaaaacacagaaaaaggaaggttaagggcaagttgaaggatggagaaacaggttggatagccggagccaagggtagaggaggcaagacctgcagtaagtaggaatcctcaggccaggagaagcacctaagagtattaagggagataga

SEQ ID NO: 164755 - DNA, 371 bp, Homo sapiens
catggatgactcagctccaagccagtttgtcatattatgataattcatgggacagtaagcttggcaaaatttctcagcactaagacttcctctccacaagacagacacaacaactattccccctctggatgttcagtaaaagctgaattatgtcattcatttattcactcacaaagcatatgttctttatggagctctcagccgtacagcattaagggcagtaaagaatctaaagaaaataatgtccatgcttaatctcaagtagtttgttactgagctggaaataatcgaartatgcacacaaaaattgaatgaccatgcaagacaatgaagccaaaaatgcaagacactgaaagtgaaaagaaatataa

SEQ ID NO: 164756 - DNA, 371 bp, Homo sapiens
catggatgactcagctccaagccagtttgtcatattatgataattcatgggacagtaagcttggcaaaatttctcagcactaagacttcctctccacaagacagacacaacaactattccccctctggatgttcagtaaaagctgaattatgtcattcatttattcactcacaaagcatatgttctttatggagctctcagccgtacagcattaagggcagtaaagaatctaaagaaaataatgtccatgcttaatctcaagtagtttgttactgagctggaaataatcgaagtatgcacacaaaaattgaatgmccatgcaagacaatgaagccaaaaatgcaagacactgaaagtgaaaagaaatataa

SEQ ID NO: 164757 - DNA, 483 bp, Homo sapiens
catatcacagaaattaaaaatctcagtatatattttttttctttccttactaagttgagagtttcacattttcaattagaagaaacactttatggcttctctttggcattgccaaactgtcaacctcactactctgcactttgaagccattatttagtaaaataagggttacttgaacaaaagcactatcaggttactgagacagtgaacctgataactgacatgactgctaagcaactaatgggtgagttgtgtctatggcatggatataatgaataaagggatgattcatgtgccaagagggatgaagtgagactactgaagatttcattgctctactcagaatggcatgcaatttaaatcttatgaattgtttattaatggaatttttcatttactatttttatattgcaattgaccacasgaagctgaaaccatagagagcaaaactatgggaaaggacaagcttctgtacagacaaca

SEQ ID NO: 164758 - DNA, 583 bp, Homo sapiens
gaattccctaggtttggcttgtctgtgagacaatttttttttatatatgaaaaataatattattggttatgctttttcccctgcttttgtacctcaaatatatcttcccattccctcttggtatataaagtttctgctgagaagttcaccgttagtctgatgtgggctcatttataagtgattagatgctttcctctttggtggttttagaatttcctctttgtgattcactttagacagtttgactataatgtgccatggagaatatctttttgtattgtatcttattggggatccctgggccatctgtatcttgttgtctaaatatttctcaagacttgagaagtttttatctattattttgttaagtaggtttttgaatcactttctttcctcctcaccttaggtgtactgataattcatatatttggtcactttttggtatctcatatatcatgtctgctctgtttsttctttttttttaaaattctgattgaatcattttaaaggactggtcttcaatttctgagattctctcttcagcttggtgtagtctgttattgacgacttcaagtgtgttttg

SEQ ID NO: 164759 - DNA, 619 bp, Homo sapiens
aataaaaaatgtctaatattgagtattttcttcagctttcagaattattttgaattaacaaatacagactttaccatgaaatacaaaagaacttgtatcaatagatgctttctatatttttttcccgaagaatttatgtaatatttattagttgttaggtttcagaaattgtctctccctgccatcactatttaatacatgaggcatatgcccaacatcaaagaacatatttataaattattataacaacatgatatgaggtatttgggatgcacggaaaatattttctaaatttcagaagtttactttgttaacgtagaatagcatgatgtttaagcatgtaattactatcatcaagcaaacttgaagtttagtttcatcaccagtagccaaataaacatgggaaaattacttgggcaaagcattcctttaaactgagaatttattaaaacgatttgttcattggaatgtcttcagtttacatatgggaaacctcaartcgaatgacttaaataacaaatgcattatttaaaaagcatactgtccagaagcatgcaagccccacgcacacagaaaaacaccgttcctaggttctggacatctcaacatgtagttttgc

SEQ ID NO: 164760 - DNA, 379 bp, Homo sapiens
gagcacagaaaataaagagaggggtatgtgaaattaagtcaaggaagcaattaggggttgtggttagattggttacaactttctaggccatgataaggattttgaccctcattctgagagaattgggcagttgttacaggggtttaagacaagtgaatactatgctttaaaatgaactcattggtttctgagtgaaggatacaatttaagcggccaaagatagaagcaaagagtttagttaacaagctgtcacggaaatccgagttttcatggagatgttatgatggcaacaagtattagaaaagtagtagctacaagctaatgatggtaaaaactttaggggatggagraagaaggcccagtatagggcctggcccat

SEQ ID NO: 164761 - DNA, 442 bp, Homo sapiens
aaccagttgaagtagaggtttaaatagttaaagtcaaatccacctcagagtagggaaacaytatagaggcatagatgaactgagctttgtgatgcacaatgttataaattatccaaaatgatcaagtttatttttaatcctaatataaattattaaaagaatattaaaaatttatatttgaatagagcattctagtttacaaagtactttcctctataaaatcccatttgatctactcttgacgtttttaccagttaatgtcatagaaatttgcaagagtaacccacaaggcactttgtgaatgatatttaaagtgcaaagaccgatgtgcatagcaactacctcattgtctgtgaactgttcaatcttttatacactggaaggaccagttagattaaacactgactacctatgtttaatatttaccccttgaatcctatat

SEQ ID NO: 164762 - DNA, 595 bp, Homo sapiens
ttgcattgaaacattctaagtcaatgtttagtgttgaataactatctccaaaaataattgtaacagatcatcaatattcatttgattttttctagaaagaaagattgtctagaattacaagtgataaccaaattactctgaggtacttttctgataagttgcctttttattgcatttaatttaagcattaaattgttaacttaagccyttttaaaattatattttggtatatttaatttttttattatactttaagttctgggatacgtgtgcagaatgtgcaggtttgttacataggaatacacatgccttggtggtttgctgcaaccatcaaactgccatcaacattagatatttctcctaatgttatgcctcccctaaccctccaccccccaacaggcccaggtgtgtgatgttccccttcctgtatccatgtattctcattgttcaactctcacttataagtgagaacgtatggtgtttggttttctgttcctgtgttagtttgctgagagtgatggtttccagcttcattgatgtcccagctctcaggggaaccagcacctgatacttcaatgtagattcttttctattt

SEQ ID NO: 164763 - DNA, 595 bp, Homo sapiens
ttgcattgaaacattctaagtcaatgtttagtgttgaataactatctccaaaaataattgtaacagatcatcaatattcatttgattttttctagaaagaaagattgtctagaattacaagtgataaccaaattactctgaggtacttttctgataagttgcctttttattgcatttaatttaagcattaaattgttaacttaagcctttttaaaattatattttggtatatttaatttttttattatactttaagttctgggatacgtgtgcagaatgtgcaggtttgttacataggaatacacatgccttkgtggtttgctgcaaccatcaaactgccatcaacattagatatttctcctaatgttatgcctcccctaaccctccaccccccaacaggcccaggtgtgtgatgttccccttcctgtatccatgtattctcattgttcaactctcacttataagtgagaacgtatggtgtttggttttctgttcctgtgttagtttgctgagagtgatggtttccagcttcattgatgtcccagctctcaggggaaccagcacctgatacttcaatgtagattcttttctattt

SEQ ID NO: 164764 - DNA, 601 bp, Homo sapiens
  misc_feature (1)...(601): n = A,T,C or G
ttctaagtgtgtatatagtttagaaaacaaaggatgccagagaattacgaagtattaagtaccactcagagaaggagtatattcaatcagaaagctatagccactacaaaccaattgctttgtgattgctataaatttctcatttctataaagttcttagactctttcacgctacattccttatcaggccactagcacctaaacacttgtataaatgtgctgttcaaataatgtgctatgaaatgtataatccattacagaatccttagtggaagaattagaaacccttcttatggaaagaagtggcacatcaccttggctttgtttaagtaaatagaatatctgcaagtaaatgtaagaaggaataatattctagacctagaaaacagcatgaaaaatatagaaaattataaagagtatggtaaatcaaagaagagcaagatgtctgttctggcacaagtanagtgtatgactatgtaaaatggcaggtcattgtactagaaaataaatttaggtcctcacaggaataattttatactccctattaggaatttgtactttattccatcggaaatagawaccaagctttcatgcagttagg

SEQ ID NO: 164765 - DNA, 302 bp, Homo sapiens
tattttgttctttttgaggtggcttttgttgaagaagcaagtctactgtccatgaaatgattagggagcattgccaaacaaaataaaattaaatgctatattgtgtggcaaagacagtaattgtaaagtaattttgaagatgaggaaataagggaatattgaaataggaaagaatttttgtaggaggtgaaaactgaacaagacctggagaggttggcttggtcattcargaacaggctagacatatatgaatatctaggtggcaattctgtttattattgagacattgggataaacttttg

SEQ ID NO: 164766 - DNA, 558 bp, Homo sapiens
tttgtttctgagggagaacagaaagttttagaaacacattctctgattttgaatggaagaatacagaacaaaactagaaatcacagatttttcaaaattaatataacttctcagagtgacgacattgtacatgatgaagtatttatactttgatagactacacaaactaatgacaacatgacaacagtcatgtggaaatataaaaaaaagtaacactattttctttcattttcctaagagtagcagaagaaaactcagctatttccacttgactattcacttgggatgtaagggaatgtcccatcaacatatttgttctttttctggttttatgctgtctagctaattttggcatcaccttcttcaaaaaattagttgcggtcttatttcatttacttaattatccaatcccyctagcctcatctgctacttgatctcaattatttattacataattaaattcattttaaaacatttccattcctgccctccaatatagaaggaaagaagggtatcatatgtacttaataatgagaacatttagaagtctgacaaaac

SEQ ID NO: 164767 - DNA, 513 bp, Homo sapiens
tctatcatctaaaacaaccctggccagtaagttgaggctgaccttaaggtcagaactgaggtggcatcagtgccttccagaaccgaggtggcatcattgatcacttcagctaataaatcagagactaactttataacatcttttctaatccaattgctcttattatcataggataaccaccttcaaggtcctcataaataatgaatcagcttccctcccagtagctctcctaagtaagcatggtagcctcatattggcaagatctccttagtcatctaaaggctttatgacctataggtattgttatcttaaaccttttttcaaatgtatttatttrttttaaatcaacagacaaaattgtatgtatttgtcatgtacaagatgatgttttaaagtaagtatacactgtggaatggttaaatctagctatttataaaatgtattatctaacattattttgtgataagaacttttaacattcactgtcttagtattttccaagaatacaatata

SEQ ID NO: 164768 - DNA, 477 bp, Homo sapiens
taagcaggaaaaagtttctaatgaaacctcattattttgggaaacggttggctattatgctgccttcatatcaccaaggatttgttaagcccttyagtaaaataaaaagattggagtgcagaaaacagtaaatctacctaaaaagaacctgtttcaagttactttaaaaattgcttagcagcatcattttcataccaagggctacaacctgttcacaataattcttaacaattcatagaaacatatttataggattgtaagaaaatgttaacactttggttgttagatacatttgaaagaaatgcaatttaatgtctttaaaaaatgctgtttagtccagatttttaacatgctttgtctttaccatgccttccattatcttgtattaatgagcctttaattcgtttaaaaataaaaaacagtactttctaatatgactcctcaaaatgttgtaagtccccaaatatacaccctcag

SEQ ID NO: 164769 - DNA, 477 bp, Homo sapiens
taagcaggaaaaagtttctaatgaaacctcattattttgggaaacggttggctattatgctgccttcatatcaccaaggatttgttaagcccttcagtaaaataaaaagattggagtgcagaaaayagtaaatctacctaaaaagaacctgtttcaagttactttaaaaattgcttagcagcatcattttcataccaagggctacaacctgttcacaataattcttaacaattcatagaaacatatttataggattgtaagaaaatgttaacactttggttgttagatacatttgaaagaaatgcaatttaatgtctttaaaaaatgctgtttagtccagatttttaacatgctttgtctttaccatgccttccattatcttgtattaatgagcctttaattcgtttaaaaataaaaaacagtactttctaatatgactcctcaaaatgttgtaagtccccaaatatacaccctcag

SEQ ID NO: 164770 - DNA, 477 bp, Homo sapiens
taagcaggaaaaagtttctaatgaaacctcattattttgggaaacggttggctattatgctgccttcatatcaccaaggatttgttaagcccttcagtaaaataaaaagattggagtgcagaaaacagtaaatctacctaaaaagaacctgtttcaagttactttaaaaattgcttagcagcatcattttcataccaagggctacaacctgttcacartaattcttaacaattcatagaaacatatttataggattgtaagaaaatgttaacactttggttgttagatacatttgaaagaaatgcaatttaatgtctttaaaaaatgctgtttagtccagatttttaacatgctttgtctttaccatgccttccattatcttgtattaatgagcctttaattcgtttaaaaataaaaaacagtactttctaatatgactcctcaaaatgttgtaagtccccaaatatacaccctcag

SEQ ID NO: 164771 - DNA, 538 bp, Homo sapiens
atattccctacttaacagtttataaaccagatttatatgagaaatttgggaaaaaataaaaataatacaattctactccaagctactaacatataaaccaaaaggttaaaattacaaatgaatgctttctgagatacatttttgaaggttgtaagtgtatcctttttaaaaggaatcatgaatagtggctgtttttgtgtcttttctgtttgacacatcattcaggtcaatcctgtttttatacatagctgactttaatttcartgtttctctattgctatatatcacatagctatttatttgaaatagttggtttaatgtgctctgcactaataaagaatttatattatggatatttcaaaaagttgaattgcctttctatttgattctaatatgagtaacacatctaaatatgtatgtgccactatacctcaagcaaaattataacacaatgaatgtaaatgcagctgaaaattttgctgttttttctttcctgctcttgctatcctgcttctgtttgtaagatgtgattttatag

SEQ ID NO: 164772 - DNA, 582 bp, Homo sapiens
tcaagttttttttttttgcataaagactagtatcaaatagtttaagtaatcaaccatttattctttcaggctacatgatctttaaagtggtatgcactatccatactataaaataatacacagaaaatgtgaaaaaacttatgcattacatatttgtaaaactttgctcttaaaggaccagggaattaagaaaggtgtctaaatattggtaaaaatgacatgttaataagaaatagttttatctgtttaaacatgaaaaaaatcacatactacaaatgtatataagtagttacataatagtacttacattaatatatattcgygttgcagataaaaagagctgcaatgactaattgtaatattttttctttaatactctattagattacctcaaaagtaaaccagaattgttaaaaattgaatgaatatttatagcatacaagataagagcttggactttgttttgtagctgtcctgggttcaaatgagcatgggtgagttatttaacttctctaatcccagttacattcttttatactattcaaaaaaaaaaaaaaacaaataattgtaacaacaaacact

SEQ ID NO: 164773 - DNA, 622 bp, Homo sapiens
ttaaagtttgtcaccacatcccagtcttcatttctcactattattctccaggaaccatggctccttggagaaatggctgtttgtggtctgggacagagaaaatacaagatgagcctgcagcatcttgtagtgaygaaaagtaaagacgtgctttaaaaaaacaaggggacgggccaggcacagtggctcacgcccatcatcccagcactttaggaggccaaggcaggtggatcacttgaggtcaggagttcaagaccagcctagtctctttagtagagatggtgaaaccctgtctctactaaaaatacaaaaattagctgggtgtggtggcagacacctgtaacccagctacccgggaaactgaggcaggagaattgcttgaacctgggaggcagagtttgcagtgagccgagatcgcaccactgcactccagcctgggtgacagagcaagagtctgtctccaacaaacaaacaaacaaacaaacaaaaaaaaaaaaaaaaaaaggaagggacagcttatcacaggaatgcaaggcccaaaactcactatgattaaagctggaacaatttgagcaacaaaataaataacacagtgtaaggttaaaacccaaagtataaaata

SEQ ID NO: 164774 - DNA, 622 bp, Homo sapiens
ttaaagtttgtcaccacatcccagtcttcatttctcactattattctccaggaaccatggctccttggagaaatggctgtttgtggtctgggacagagaaaatacaagatgagcctgcagcatcttgtagtgacgaaaagtaaagacgtgctttaaaaaaacaaggggacgggccaggcacagtggctcacgcccatcatcccagcactttaggaggccaaggcaggtggatcacttgaggtcaggagttcaagaccagcctagtctctttagtagagatggtgaaaccctgtctctactaaaaatacaaaaattagctgggtgtggtggcagacacctgtaacccagctacccgggaaactgaggcaggagaattgcttgaacctgggaggcagagtttgcagtgagccgagatcgcaccactgcactccagcctgggtgacagagcaagastctgtctccaacaaacaaacaaacaaacaaacaaaaaaaaaaaaaaaaaaaggaagggacagcttatcacaggaatgcaaggcccaaaactcactatgattaaagctggaacaatttgagcaacaaaataaataacacagtgtaaggttaaaacccaaagtataaaata

SEQ ID NO: 164775 - DNA, 622 bp, Homo sapiens
ttaaagtttgtcaccacatcccagtcttcatttctcactattattctccaggaaccatggctccttggagaaatggctgtttgtggtctgggacagagaaaatacaagatgagcctgcagcatcttgtagtgacgaaaagtaaagacgtgctttaaaaaaacaaggggacgggccaggcacagtggctcacgcccatcatcccagcactttaggaggccaaggcaggtggatcacttgaggtcaggagttcaagaccagcctagtctctttagtagagatggtgaaaccctgtctctactaaaaatacaaaaattagctgggtgtggtggcagacacctgtaacccagctacccgggaaactgaggcaggagaattgcttgaacctgggaggcagagtttgcagtgagccgagatcgcaccactgcactccagcctgggtgacagagcaagagtctgtctcmaacaaacaaacaaacaaacaaacaaaaaaaaaaaaaaaaaaaggaagggacagcttatcacaggaatgcaaggcccaaaactcactatgattaaagctggaacaatttgagcaacaaaataaataacacagtgtaaggttaaaacccaaagtataaaata

SEQ ID NO: 164776 - DNA, 401 bp, Homo sapiens
ttctttctttggggtaggaagccagggaaggtagaaataactggataatgttggagaatgaccattgcaagacttcgctcctcacatcccaggtgcatattccaagaaaattctgattccccgggaaaattctccatgcttggcatagtgctggagccatgtgactttggaaaggtctgagggaggcatttaggcagagactcagctggggaaatcactggggggccctgcaccaacagacaggcrcccagagctgaggaggaatggcagcggggcctgctgagttaagcagaggccacagacatcaccttctggaggctccctctaccactgctccatgggcaagcctgctagatacccagaaacaagacaaaagtgctacactgcccaggatttacttt

SEQ ID NO: 164777 - DNA, 604 bp, Homo sapiens
tgtcttaaattagcagcaatcagtactatacaacccattttctatttactgcctcaagacggcaggaaatttttcaggctctccctctgcttcatctgcaataagaagctcacaaatttgttttgctttgttgcaaataacatgtatgctgagaggcatttttcctctctataactgtacagccatctaaatgggtcttttctggttttacaacttgaatatgttaacatgcacccctcagggtcccccttgtatcccagaaacagcacgcttgtaaaaccttattcatgtgatatccttaatagctgctgacatttattaagtgtttaagatgtgccaggcatagtgctaagtgtcttagaactcttccagcctgtaatccccgagcctccctgtgaaaatacaagcatcttaagaatgccccctactctggcatttaccttcagatgaccgatgaggaaagtgaggatcagaaacatgaacttatcctaggccagcccactagcaagtgatggaggcagcatttgractcagggctgcctgattccagacaaaaagcctccaaccataaagctatgctgccaattccacttggcccgggtga

SEQ ID NO: 164778 - DNA, 527 bp, Homo sapiens
ctgaaaacccttcattggtttttccaacacatgtagcataaawtccgaactccttactgtcaatttttcctgaaatgtacctttgcctggatcactcccctgctctgccttgcccactctgctcctgcactggtgacagttcagctttcaaacacaccacactcaatcccaccttgtggcctttgcacttgctgtttccttgcccgggaatgtctttcctccaagatatctgcatggccctcttgttcactccattcaggactctctgcaattgttgctttatctggggggacattcctgatcatcctaacaaaaataacacctcccatcacttgtgtcttcttaacgtatcttgccatacatacatacttagcatttaccatatactctctggatatatatatatatatatatatatatatatatatatatatatatatttagcatttttacattctctgaaaggccccagagcgcttagtgtatggcacaaataggtaaataatggtaataattattactattca

SEQ ID NO: 164779 - DNA, 527 bp, Homo sapiens
ctgaaaacccttcattggtttttccaacacatgtagcataaattccgaactccttactgtcaatttttcctgaaatgtacctttgcctggatcactcccctgctctgccttgcccactctgctcctgcactggtgacagttcagctttcaaacacaccacactcaatcccaccttgtggcctttgcacttgctgtttccttgcccgggaatgtctttcctccaagatatctgcatggccctcttgttcactccattcaggactctctgcaattgttgctttatctggggggacattcctgatcatcctaacaaaaataacacctyccatcacttgtgtcttcttaacgtatcttgccatacatacatacttagcatttaccatatactctctggatatatatatatatatatatatatatatatatatatatatatatatttagcatttttacattctctgaaaggccccagagcgcttagtgtatggcacaaataggtaaataatggtaataattattactattca

SEQ ID NO: 164780 - DNA, 626 bp, Homo sapiens
acctccacctcctccacagaaagggagctgttatacccattcatggtaccttgtgagatttatcacaatgggtatcaattaataattaacatctatcttccttgctggaggtaccagagggactagtctgccaatgaaccccaggcaccaagtccagcatatgccacataagacacgcatctcagagactttcttctgttggaagggagggaagaaaataggaagaaataaccacagttacactcccatcatgagccagacagttgtctrtgtgctttatgcagattagcacattaaattctcacaagagagttgtgattcttgcacagatgaaaaaaacaggctcagagagaccaagcaacctgcccaagatccccaggcagaggcatgattcaaaccaggcaggctggttccagagcctatgctcttggctcctagaagggaaaacagaagaaagggaagaagaggagagagggaagaagagaggaggttgctcacaatatcaggaggatgcatttttctgctgtctccagttcagtatctcacaagaccagcaagccttccagtctgggaagttataagaacatcattgtattactccattttcatactgctgtaaagaactg

SEQ ID NO: 164781 - DNA, 626 bp, Homo sapiens
acctccacctcctccacagaaagggagctgttatacccattcatggtaccttgtgagatttatcacaatgggtatcaattaataattaacatctatcttccttgctggaggtaccagagggactagtctgccaatgaaccccaggcaccaagtccagcatatgccacataagacacgcatctcagagactttcttctgttggaagggagggaagaaaataggaagaaataaccacagttacactcccatcatgagccagacagttgtctatgtgctttatgcagattagcacattaaattctcacaagagagttgtgattcttgcacagatgaaaaaaacaggctcagagagaccaagcaacctgcccaagatccccaggcagaggcatgattcaaaccaggcaggctggttccagagcctatgctcttggctcctagaagggaaaacagaagaaagggaagaagaggagagagggaagaagagaggaggttgctcacaatatcaggaggatgcayttttctgctgtctccagttcagtatctcacaagaccagcaagccttccagtctgggaagttataagaacatcattgtattactccattttcatactgctgtaaagaactg

SEQ ID NO: 164782 - DNA, 618 bp, Homo sapiens
atcccagctactcgggaggctgagtcaggagaatcacttgaacctgggaggcggagtttgcagtgggctgagatcatgccactgcactccagcctgggtgactgagcaagactccatctcaaaaaacaaaaacaaaayagtatccatatctaccatagcatgtctgagctctctgcaagtcaatgggaagttatccacaggacaggatttccttacttttacttgttaataagagaaatggaagggaatgggaaatcagaaaagcagaggcataccaatttttgccatttctcctcacatagaatttgttcctcatcttaaaggcttggacaggatgctgaaaagtataagagaatggggattacattcaggtaatcacaacagcaataataatagttatcatttattgaacctttacctccaaacagcatctaaagtaagcactatttataccttagcccactgaattcccaaactaattttgtagagtgggaacaaatgtgtttgcccattttatgggtaagacaactgaggctctgagaagtaaagtgatttgcctaagctaggaaaatgcagaagttaagaaatgaaagcattagaataatacccaagaagggg

SEQ ID NO: 164783 - DNA, 618 bp, Homo sapiens
atcccagctactcgggaggctgagtcaggagaatcacttgaacctgggaggcggagtttgcagtgggctgagatcatgccactgcactccagcctgggtgactgagcaagactccatctcaaaaaacaaaaacaaaatagtatccatatctaccatagcatgtctgagctctctgcaagtcaatgggaagttatccacaggacaggatttccttacttttayttgttaataagagaaatggaagggaatgggaaatcagaaaagcagaggcataccaatttttgccatttctcctcacatagaatttgttcctcatcttaaaggcttggacaggatgctgaaaagtataagagaatggggattacattcaggtaatcacaacagcaataataatagttatcatttattgaacctttacctccaaacagcatctaaagtaagcactatttataccttagcccactgaattcccaaactaattttgtagagtgggaacaaatgtgtttgcccattttatgggtaagacaactgaggctctgagaagtaaagtgatttgcctaagctaggaaaatgcagaagttaagaaatgaaagcattagaataatacccaagaagggg

SEQ ID NO: 164784 - DNA, 554 bp, Homo sapiens
ccttctgtgtctgtggatttgcctattctggacaatttatatcaatggagagtcatgcattgcatggtcttttattcatttatttattttttgagacggagtctcgctccgtcgcccaggctggagtgcagtggtgcgatctcggctcactgcaacctctgcctcctgggttaagtgattctcctgccttagcctccccagtagtggggattacaggcatgcgccaccacacctagctaatttttgtatttttagtagaggcagggttttgccatgttggtcaggctggtcttgaactcctgacctcaggtgatccacccgactcaacctcccaaagggctgggatcacaggcgtgagccaccatgcccggcctacgttgccttttgtgtctgcttctttcatttagcatattgttctccaggtttatccacctggcagtatgcgtccatacttcctattcatggctgawtactattccattggatgcatatgccacattttgtgcatccatttttcagttgattgatctttggattgtctgcaccttttagct

SEQ ID NO: 164785 - DNA, 556 bp, Homo sapiens
tattcttaacacttcctttaagaaaagggctatatctgttttttgaaagatgaccagaagtgacatggattggttgaaaatggcttgtaaagtaagcctaacatttatgatttattaccataaaaactgtaccaacagtacggttataacaaatacacttatttttggrttttattttcaagtaagataatgactttatcataaacctttgaaatcagtctttttacagtataaattcagattcattaatccacatagaatttttctcgatggtataattctgtatttgttaaaagtctttgcataagccccttgtcaagccaaatgctgttttccttttagtatccaattatctgaaacttaagaagagtgtgcaccgcccaatgggtgtgtgtatgtgctgctttgaacctatagttgagatccagagaattgggagtgacatcatctgtaacaataaaagagcctctcttggtaagcagaagacctatatataaaagtcaccatttaaggggtctgcagtccaattcatcagttgtctttagtttactcagca

SEQ ID NO: 164786 - DNA, 283 bp, Homo sapiens
tgtgtatatataatgtatactaatgtatccataaaataaagaggttgattccaaaagcttctcrtgaaaaccaacccaattagttagtattgcattctgtgtactatagtttggaatattaaaaatattttaaaatacctccattttgcttgtccttttagtgaagatgatacctgcaaaagacatggctaaagttatgattgtcatgttggcaatttgttttcttacaaaatcggatgggaaatctgttaagtaagtactgttttgccttggaattggattt

SEQ ID NO: 164787 - DNA, 590 bp, Homo sapiens
ctaataatgtcagccagaggtgaagcacgaggaccctaggacaggaggarcagagattaatgtcttggcattctctggtggtctcatctggacatatctccataagaggctccacaggtcattagaaaatatgaggaggttattacttgtggccacattcagactcatcttttcatagaactccatgcagaacatgctcagcacaagtgtcacaagtgtcatcactgtgatctcagccactagcttccccagggccatattggtctagatcctctggatccaagagatgtcaagacactgggaacaagtgaaaggacatgctagttctccctctccaactgcctgaggcaggtgaagcagaagttgtgtttgcagggcgtcaagcagggatctttgaatagtttaagttaaatgggacatgtcaattcttttttgtgtttttctgctatggccaccatttcaacatagctattctcagttttgtgctgctctagggtactacaattcttctcaactggattctggaattctcataaaggcatttttaagcctcataaagtctccctatatcattgttaaataaatgtttc

SEQ ID NO: 164788 - DNA, 526 bp, Homo sapiens
gaatactatcataaatacttggaatattaatcatttattatgtgctaagtcactttaagcattttgttcattgcctctaactataaacaagtttagggctggtgaaaggaagcagagaggaaagttttttctgacagatcaaaaggagcttggttggctgagtacagtggctcacgcctgtaatctcagcactttgggaggccgaggcgagtggatcacttgaccccaggaggyagagaccagcctgggcaatgtggtgaaactccgtctcttccaaaaatacaaaaattagcttggcatggtggcatgctcctgtggacccagctactcaggctgctgaggtaggaggatcccttgagccttggaggcagaggttgcagtgagctgagatcacaccactgcactccagcctgggtgacagattgagaccttgtctcaaaaaaattaataataataataataaggagctcagtaactcattgcacagaggggcttggagcaaaagaatgactcaaccattaagata

SEQ ID NO: 164789 - DNA, 514 bp, Homo sapiens
ttggaatattaatcatttattatgtgctaagtcactttaagcattttgttcattgcctctaactataaacaagtttagggctggtgaaaggaagcagagaggaaagttttttctgacagatcaaaaggagcttggttggctgagtacagtggctcacgcctgtaatctcagcactttgggaggccgaggcgagtggatcacttgaccccaggaggcagagaccagcctgggcaatgtggtgaaactccgtctcttccaaaaatacaaaaattagcttggcatggtggcatgctcctgtggacccagctactcaggctgctgaggtaggaggatcccttragccttggaggcagaggttgcagtgagctgagatcacaccactgcactccagcctgggtgacagattgagaccttgtctcaaaaaaattaataataataataataaggagctcagtaactcattgcacagaggggcttggagcaaaagaatgactcaaccattaagatagacact

SEQ ID NO: 164790 - DNA, 601 bp, Homo sapiens
acagatgtatacatgaaaggkagtgtattaaagatgctgactcacgcgatcacaaggtgaagtcccacaataggccttctgcaagctgaggagcaagaaagccagtccgagtcccaaaacctcaaaagtagggaagccgacagtgcagccttcagtctgtggccaaaggcccgagagcccctggcaaaccactggtgtaagcccaagagtccaaaagctgaagaacttggaatctgatgttcaagggcaggaagcatccagcacaggagagaaacgaaggctggaagactcagcaagtcagcttctcccaatttctcctgcctgctttcttctagctgtgctggcagctgattagatggcgcccacccaaattgaaggtgggtctgcctttcccagcccactgactcaaatgttaatctcctttggcaatacccttacagacaaacccaagatcaatactttgcatccttcaatccaatcaagttgatactcagtattaccatcacagcgcatttgtgtgtatgtgtgtacatgactgtttttgtgtgtgtgcacgtatgtgtgtgtggttgtgcatgcatgcttgtgtatgtgtgtgcag

SEQ ID NO: 164791 - DNA, 565 bp, Homo sapiens
tcacgcgatcacaaggtgaagtcccacaataggccttctgcaagctgaggagcaagaaagccagtccgagtcccaaaacctcaaaagtagggaagccgacagtgcagccttcagtctgtggccaaaggcccgagagcccctggcaaaccactggtgtaagcccaagagtccaaaagctgaagaacttggaatctgatgttcaagggcaggaagcatccagcacaggagagaaacgaaggctggaagactcagcaagtcagcttctcccaatttctcctgcctgctttcttctagctgtgctggcagctgattagatggcgcccacccaaaytgaaggtgggtctgcctttcccagcccactgactcaaatgttaatctcctttggcaatacccttacagacaaacccaagatcaatactttgcatccttcaatccaatcaagttgatactcagtattaccatcacagcgcatttgtgtgtatgtgtgtacatgactgtttttgtgtgtgtgcacgtatgtgtgtgtggttgtgcatgcatgcttgtgtatgtgtgtgcagggact

SEQ ID NO: 164792 - DNA, 604 bp, Homo sapiens
agatgtatacatgaaaggtagtgtattaaagatgctgactcacgcgatcacaaggtgaagtcccacaataggccttctgcaagctgaggagcaagaaagccagtccgagtcccaaaacctcaaaagtagggaagccgacagtgcagccttcagtctgtggccaaaggcccgagagcccctggcaaaccactggtgtaagcccaagagtccaaaagctgaagaacttggaatctgatgttcaagggcaggaagcatccagcacaggagagaaacgaaggctggaagactcagcaagtcagcttctcccaatttctcctgcctgctttcttctagctgtgctggcagctgattagatggcgcccacccaaattgaaggtgggtctgcctttcccagcccactgactcaaatgttaatctcctttggcaatacccttacagacaaacccaagatcaatactttgcatccttcaatccartcaagttgatactcagtattaccatcacagcgcatttgtgtgtatgtgtgtacatgactgtttttgtgtgtgtgcacgtatgtgtgtgtggttgtgcatgcatgcttgtgtatgtgtgtgcagggact

SEQ ID NO: 164793 - DNA, 402 bp, Homo sapiens
tcaaatgcatactatattccaggcactagtctcatttgattccctatttagcccttgcatatattccatacattacagtgtgttatcttcacacctaggtgatgaggtaggtcatttatctatttccatatatcgtatagataaagacatttcccaaagtcaaacaactaaccaraggttgagctgggatttgcatccagcacggcacatgttgttctttcatgggtatgcagcatgccctgctaagtaagacccattacaccatgtacatattgtacattaacagaaataaataatacagatatgtctgatgttctcctctgcactagaactcagaaaatgtgaaaatatcatcttggttttgcttctcatttgccatatggcattaacatatcacttaat

SEQ ID NO: 164794 - DNA, 611 bp, Homo sapiens
acaaacaaaccaaaacttttttcttttcagagcaacaggggaacagaagccaaagacggtgatgacaacgcatactatgtttcttttatttcatccatagcttttcggaccagaattctgctcttcccataaaggaagagtgaaaaaagttaaggttatgggtttacattttacatagataatattaacccttattaccataaactaaaatctcttactaatcaaaattatataaacaattattggaatcagactaagacagcaataaaaaagactcattttttaatcagaaaaagagtgatttagtggagcataattcatatctgttactgcacatataagaccaaatcatattcatatcaagttgattttttggaacaaatttattttttgatttattggctttatggatatgtatgtacatagatgtgtgtgtgagttaaccttttttcttttcttttctttctttttttttttctttttgaaacaaagtctcactcttttgcccaggctggagtgcaatggcgtgatctcagctcactgcarcctccgcctcctgggctcaagcgattctcctgactcagcctccagagtagctgagattacaggct

SEQ ID NO: 164795 - DNA, 569 bp, Homo sapiens
ccacatataaatgagattatgtagtattgtgccttgcttatttcacttagcataatgtccttcagattcatctatcttattgcagatgacagaatttcctttattttaaagactgaatggtactgtattgtgtgtatttaccacattttctgtattcattcatgctrtgaaagaatgaatattaatgacacataagtcaattccaactgagcttggcaactgtgactaatgatgcaatgaacatgggagtgcagttatctctttgatgtactaactttctttctttgtgatgtgtacccaatagtgagattattaaattatgttgttctatttttactttttaaaataacattcatattattttcctttatggctcacataatttatattcccactactagtgtgctagagatcccttttctccacatccttgccaacacttgtcatcttttgtctttttgaaattgtcattctaacaggtgtgaggtgatatctcattgtggtattaatttgcatttctctgatgattaatgatgttgagaattttttcatatacctattagctattt

SEQ ID NO: 164796 - DNA, 595 bp, Homo sapiens
cctatctctcaccatacataaaaatcaaatcaaaatggattaaaggkttaaatttaagccatcaaactatgaaactactagaataaaacttcgggaaaatgctccaggacattggtttagacaaaggattttgtgtaagacctcaaaagcacaggctaccaaagcaaaaatggacaaatgagattacatcaagctaaaaagcttttgcacagcaaacaatcaacaaagtgaagaaacaacccacagaataagagaaaatatttgcaaactatccatctgaaaaagagttaataaccagaatatataagaggctcaaacaactcaataacaaaacaacaacaaacaaacaaaaaacttacaaattgaaaaatgagcaaatgatttgaatataaatttttgcaaaaaaagacatacaaatggccatcaggatacttgatttggctgcaattagtattctttgctgtttccttccctctaacattcccatttaaagccagccttcagtagtttttcctacaactttagtattatttaaagtggccatatagatttttctggctttctagcctttacagtgtaagttgtcttatagctg

SEQ ID NO: 164797 - DNA, 628 bp, Homo sapiens
tgaacgggtgctctttaagccctatatgagtccctgaccctgggaccgcaccacagcttacaccccacccacatacccaagacactgagccacttaatgttttttaatttaagttgtcatacttctgggaatattttcatactgggctctccactcatgtattcatttgataaacgtttcttgagtgcctactatgtgctagtccctagtgacatgagagtgaggaaggcagwcacagggcctgctctcatgagccatatattctagttaatattctgagataactgcaaaataaagagaatctcttattttgcaagatgggagctacagagattgcaggtgaccaaactgcacctatcagggctgccatagatgtggataccattccctctgtcccactgaaaactgtttagtccaaagggtacctttcctacattcatgttttgtgtttattgactaacctactatgtgctgagtgctgtgcaaagagctttagctcccctaatcctaatttaaatcccatcaacaatctttgtaaatactataattgtccctatttcccagtgtggttgagtaacttgccccagagcacttctacgtatatttttacctgggtatttgtgtttgt

SEQ ID NO: 164798 - DNA, 607 bp, Homo sapiens
tatggagactagaatgtgaatgatggggcaaaaccccacccaaaatggttaaggcaaaatggaaatattttggcttatgtgcctgaacaatctagtgggagtagctctggctttgagctgagcttgatcagggctgtccaactgcatcttcaggacctggtttctcactctctcagatctgcttttggccatgttggtacctcattcaggcccatcctctcctcttaacagcaagatggatgctgcagtccaatggctgggtggacatctccaggactgcattcttaaccactgcaacagacttcctgcttagacagtatcctgagatgagttttgtgtggaaataataaagcaattgcctgtaagtttctgtacctcaatatgataatatttatattcagtagtctaaattcaccttcatatttgccccagcctccagctactatggcctctrtgggtatatgggttggtaggaactgaacctttttgaccaggcatcaatctacaaatggctcatcaaccgcaaatgtttccaacaacccctctcccaagagaaaacacatttagagccgttaaatgggaaaccaaggatctgtcaatgaactct

SEQ ID NO: 164799 - DNA, 542 bp, Homo sapiens
gttctcactctcgtagacaggaattaaaaataaagtctggcaaataacatttatcaagcaatgtcttctcatacatccccatctcaaagtttaatatgctctgatgtgtgtactcaaggtcttaatagaatcagagatggttaaataaaaatccagagaagaccaatatgtgtgtgtgtttgcacttgctttgattccttttgtggttggttcttccgtgtgtgtgtgtgtgtgtgtgtgtgtgtgtgtgtgtgtgtgctttgattccctttgagcttgagtcttctgaggatctgcaatgcaggctagagtgaaactgctggcaggcatttgatttttctcaactagtgacaagaaaaagacaagaggaggacacagccaaagggggcctgatggctaaatgtgtggtgagtggctccaagttttrtgagtcaaatactgtatttctgaatgaaatcaatttctaggttgcacaaatgttcatggcctatttacaaagaaaatagaaacctcaactgtgattctaaagctatcacttaact

SEQ ID NO: 164800 - DNA, 542 bp, Homo sapiens
gttctcactctcgtagacaggaattaaaaataaagtctggcaaataacatttatcaagcaatgtcttctcatacatccccatctcaaagtttaatatgctctgatgtgtgtactcaaggtcttaatagaatcagagatggttaaataaaaatccagagaagaccaatatgtgtgtgtgtttgcacttgctttgattccttttgtggttggttcttccgtgtgtgtgtgtgtgtgtgtgtgtgtgtgtgtgtgtgtgtgctttgattccctttgagcttgagtcttctgaggatctgcaatgcaggctagagtgaaactgctggcaggcatttgatttttctcaactagtgacaagaaaaagacaagaggaggacacagccaaagggggcctgatggctaaatgtgtggtgagtggctccaagttttatgagtcaaatactrtatttctgaatgaaatcaatttctaggttgcacaaatgttcatggcctatttacaaagaaaatagaaacctcaactgtgattctaaagctatcacttaact

SEQ ID NO: 164801 - DNA, 543 bp, Homo sapiens
ccagtgacaggaagggagaaagaaactaatatttgttgatacagacactgggctgggcatttagtataccacatcttaaattttcataataacaccgtgagtcagtggttttcagcgggcacaatttttcctccccctcctaggagacatttggaaacatctggcgggatttttggttgtcacaactgggagactgcaattggcatctagtaggcggagactagggatgctgctaaacatcctacagcatacagggcaactcaaacacaacaaagaactatctggtcccaaattccaatagtgccaaggcaaaaaaaaaccctgctttgagttaaagcctgttctctccactttgtatatcccctatgatgctcaaactgcatcgtattttagccacaggtgggttgtaacaacaatagtaatcacttttgttgcataggctgttacctatcccctgcctcaagccaaaaagtgtcartttccctcaatgatgacttatatgtgctcatgaatggtatctgggcatctcaagagacctgaaaa

SEQ ID NO: 164802 - DNA, 542 bp, Homo sapiens
ttgttgcaaatgataggatctcgttccttttatggctgaatagtgttccgttgtgtacatgtaccacattttctatatccattcatctgtttttttgttgttgttgtttacattttatttttccgtaagttattggggtacaggtggcatttgattacatgagtaagtctttaagctgaaattacctctgatttgatctgttctgtgtccctagtcctaaccatcgttgtgtccatttattaatttagcgacatattcactaaacttttaataaawgctgacatctcatgttgggcattgtgctatgcattttacaaatgacatcttttaatcccaatcttatatgataagtgttgttatccctattctaaggataaataatccgaggctcaaggagataacctaaagtcaaatgattagtaagaggttgagctgggattcatacttatgtttatttagtaacaaagataatgatatctgctatttgctagctgcttatgtgcccgacactgtaaagtctttccatatctcatcttattgta

SEQ ID NO: 164803 - DNA, 416 bp, Homo sapiens
gacttcaagccatgctatttcttgcagctctgactatgtttcaagttggaatatcaagcatctctgagccttcactacagcaattaagggctcataaagctattcttaggagtacaaaataaactgagatatatttgaggttgccagaaggttkccatgtggagaactgagtgctaaccactggaaaggtgacattaaagacagcaggtgtgcagaatgctgtggccataactctctccagctgagggcagaggccacaaaaaggaccctgctgaggggaggctgccaaggagctccacactctgccaagaggggcctgagttctggcgccatcagcaactgtcttgtctctgtgactcacatcttctcacataaaatgagtagttgaatgagttgattttgaatgttcatttctg

SEQ ID NO: 164804 - DNA, 588 bp, Homo sapiens
cgacagttcagaatggaaggctgttggccttgaagtcagaagttctggttcaagttacctatctgccactaacttactggatgaaccctgaaaacaaaagggaaccagcatttttctgccagatacctaagtgcatgatttcatttcaccttttcaacatcaccatgagggagacattattcccctccaattcacaaggagtgaaaattaatctcaggctagtgaactaacttactcaagggcacacagctggcrtgctgcaaatatagggtttaaaccctggaaactgacttatttcactgcatcctgctgtttctaaaatattatcctaatctccaagataaggggctgcctccacattaaaatctgctcatatcctacttatcaaccaaggagaagttcaatgctaccttctccatgttgctgcctctgttcctcccagctagaggtgacgtctctttaccctttatgtgccagagtttgtagcaagttatgagtaaaggagtctcatcattcccctctgcctcaaatacactagctctgttgaaagcattttctttctgcctaaaatggatgtaaattactagt

SEQ ID NO: 164805 - DNA, 588 bp, Homo sapiens
cgacagttcagaatggaaggctgttggccttgaagtcagaagttctggttcaagttacctatctgccactaacttactggatgaaccctgaaaacaaaagggaaccagcatttttctgccagatacctaagtgcatgatttcatttcaccttttcaacatcaccatgagggagacattattcccctccaattcacaaggagtgaaaattaatctcaggctagtgaactaacttactcaagggcacacagctggcgtgctgcaaatatagggtttaaaccctggaaactgacttatttcactgcatcctgctgtttctaaaatattatcctaatctccaagataaggggctgcctccacattaaaatctgctcatatcctacttatcaaccaaggagaagttcaatgctaccttctccatgttgctgcctctgttcctcccagctagaggtgacgtctctttaccctttatgtgccagagtttgtagcaagttatgagtaaaggagtctyatcattcccctctgcctcaaatacactagctctgttgaaagcattttctttctgcctaaaatggatgtaaattactagt

SEQ ID NO: 164806 - DNA, 634 bp, Homo sapiens
cctcctactcaagggagaatcagtctttttgtcctattcaggccttcaactggctggatgaggcccacctacattgaagagcacaatctgcctcactcactctgatagaaatgtcaatctcagcctaaaagaccctcataggcacccagaataacatttgttcaaatgtctgggcaccccatggcccaatcaagttaacatataaattaactatcacaataagcaagaatgctcccaaagtaaataaataataagaccagatactgaacaagttcatagaatctcaaatagcatagaaaaaaaaagccctcaactagacttatgtagtgagcttgaagcacttaaaagacaagaaaaaaataaaaatacagagagaaatagcaggtcaagtgcaaatagataaaaattgggctttaaaattggtgtcatggtcagtctccagcccctgtctgggtcaaatccagctgaaccaattaccagcaacagatcattaggcaaattactgaactcagtcctcagtttccttttttattaaaaaayagctaatgataactataatactaacatttacaagggtatttatgaggagtaaatgaatactgagttcctagaataatacttgcacaaaggaagt

SEQ ID NO: 164807 - DNA, 558 bp, Homo sapiens
atgccgggggattaatttggcttcttgcacagagattttgtgacccagagacaaagccttaggtatgatggaggcagaacagtagcatcttgaacagcactgattttaggctggggggcaaaggtataggacttcttcaggcyatggcagtgatgctaagatagtttgggtgcagggggttttagccttagtgtgtgggatccaggataacctgggcatagaggagagtagtctttcttaagaaaccagaaattatttctctattccttgagccgtgtatacattcatccatccacacactcatccattcagcagatagaataatgtttaaaggtcagagagaggcacagagatggggtcagttttccacttgttgtacattaactggtgggggcccagctatggaaaaatacatttactattgtcttttgctctgaatacctttgggataataatcctatacagaagtaaccacactccacagtgcaatagttgctgtaattgagatatacacaaagaggactgaatgactcatttcacccttagaagaacagaaat

SEQ ID NO: 164808 - DNA, 558 bp, Homo sapiens
atgccgggggattaatttggcttcttgcacagagattttgtgacccagagacaaagccttaggtatgatggaggcagaacagtagcatcttgaacagcactgattttaggctggggggcaaaggtataggacttcttcaggctatggcagtgatgctaagatagtttgggtgcagggggttttrgccttagtgtgtgggatccaggataacctgggcatagaggagagtagtctttcttaagaaaccagaaattatttctctattccttgagccgtgtatacattcatccatccacacactcatccattcagcagatagaataatgtttaaaggtcagagagaggcacagagatggggtcagttttccacttgttgtacattaactggtgggggcccagctatggaaaaatacatttactattgtcttttgctctgaatacctttgggataataatcctatacagaagtaaccacactccacagtgcaatagttgctgtaattgagatatacacaaagaggactgaatgactcatttcacccttagaagaacagaaat

SEQ ID NO: 164809 - DNA, 558 bp, Homo sapiens
atgccgggggattaatttggcttcttgcacagagattttgtgacccagagacaaagccttaggtatgatggaggcagaacagtagcatcttgaacagcactgattttaggctggggggcaaaggtataggacttcttcaggctatggcagtgatgctaagatagtttgggtgcagggggttttagccttagtgtgtgggatccaggataacctgggcatagaggagagtagtctttcttaagaaaccagaaattatttctctattccttgagccgtgtatacattcatccatccacacactcatccattcagcagatagaataatgtttaaaggtcagagagaggcacagagatggggtcagttttccacttgttgtacattaactggtgggggcccagctatggaaaaatacatttactattgtcttttgctctgaatacctttgggataataatcctwtacagaagtaaccacactccacagtgcaatagttgctgtaattgagatatacacaaagaggactgaatgactcatttcacccttagaagaacagaaat

SEQ ID NO: 164810 - DNA, 647 bp, Homo sapiens
tcttttttttttttctttttcaaggaaagaaatttagacttttagctagccctccgggttgatttccattgttcatgttgccawttaatttattctttaaaaaatactgtgtgtgccaaacacatctgagggctgcatctggctatcagctctcctgtttgtaaactctgagttagctcaaactctctcttcatgaagcctgccctcaggcttttaatttattctgctgtgcgtgctctataagtattgcactgaccaaactgcagagagtggattgtgacagggaacttttcaagtaggaagatcccctatgaggcttgcctgtggtccagatgagggaggacttgtgccaggctctgggctgagatgagccaataaacctgagcaattaggagaagagaaccctggggtggtatcttagtccattttatgttgctataatacagactgtgtaatttataaagaaaataaatttatttcttagtgtcctggaggctgggaagtccaaggtcaaggggccacatctggtaaaagccttcttgctgtgtcataacatggcagagggtaagaatgtgtatatcagctcaggtctctcttcctcttctaataaagtggcccccattatgggggtcacaccctgatgacct

SEQ ID NO: 164811 - DNA, 647 bp, Homo sapiens
tcttttttttttttctttttcaaggaaagaaatttagacttttagctagccctccgggttgatttccattgttcatgttgccatttaatttattctttaaaaaatactgtgtgtgccaaacacatctgagggctgcatctggctatcagctctcctgtttgtaaactctgagttagctcaamctctctcttcatgaagcctgccctcaggcttttaatttattctgctgtgcgtgctctataagtattgcactgaccaaactgcagagagtggattgtgacagggaacttttcaagtaggaagatcccctatgaggcttgcctgtggtccagatgagggaggacttgtgccaggctctgggctgagatgagccaataaacctgagcaattaggagaagagaaccctggggtggtatcttagtccattttatgttgctataatacagactgtgtaatttataaagaaaataaatttatttcttagtgtcctggaggctgggaagtccaaggtcaaggggccacatctggtaaaagccttcttgctgtgtcataacatggcagagggtaagaatgtgtatatcagctcaggtctctcttcctcttctaataaagtggcccccattatgggggtcacaccctgatgacct

SEQ ID NO: 164812 - DNA, 647 bp, Homo sapiens
tcttttttttttttctttttcaaggaaagaaatttagacttttagctagccctccgggttgatttccattgttcatgttgccatttaatttattctttaaaaaatactgtgtgtgccaaacacatctgagggctgcatctggctatcagctctcctgtttgtaaactctgagttagctcaaactctctcttcatgaagcctgccctcaggcttttaatttattctgctgtgcgtgctctataagtattgcactgaccaaactgcagagagtggattgtgacagggaacttttcaagtaggaagatcccctatgaggcttgcctgtggtccagatgagggaggacttgtgccaggctctgggctgagatgagccaataaacctgagcaattaggagaagagaaccctggggtggtatcttagtccattttmtgttgctataatacagactgtgtaatttataaagaaaataaatttatttcttagtgtcctggaggctgggaagtccaaggtcaaggggccacatctggtaaaagccttcttgctgtgtcataacatggcagagggtaagaatgtgtatatcagctcaggtctctcttcctcttctaataaagtggcccccattatgggggtcacaccctgatgacct

SEQ ID NO: 164813 - DNA, 520 bp, Homo sapiens
ctgccaccagttctgtgctaggcatcctggaggatatagacataataaataatttgtccctgctgtaagagaagttgtgctataataggcagcctgctatattttggagcagctctgttagaaatcgtttctaatgttgatccaaaaattcagctcaccgtgktttctgctcattggcctctccatagtctaataccttagtaagtaccagagggagaagatgcaagtgggaaggggagtttcctctcctctgcccctgctagtttctctacaaggcaagggagataccagtaaaatggtagccagtgacagtcaagatcataaatcctaccacatatgacagtgcacagtcaccatgcattgaaacatcgcataaatgcacctgggccttccttccatatttcctccgtgcatctggagcccactcagtattcagctattgtgattttctctcctttctttctcgtatccatatctgacaagcatgtcattttgttatcatgatcattgtaacaggcca

SEQ ID NO: 164814 - DNA, 520 bp, Homo sapiens
ctgccaccagttctgtgctaggcatcctggaggatatagacataataaataatttgtccctgctgtaagagaagttgtgctataataggcagcctgctatattttggagcagctctgttagaaatcgtttctaatgttgatccaaaaattcagctcaccgtgttttctgctcattggcctctccatagtctaataccttagtaagtaccagagggagaagatgcaagtgggaaggggagtttcctctcctctgcccctgctagtttctctacaaggcaagggagataccagtaaaatggtagccagtgacagtcaagatcataaatcctaccacatatgacagtgcacagtcaccatgcattgaaacatygcataaatgcacctgggccttccttccatatttcctccgtgcatctggagcccactcagtattcagctattgtgattttctctcctttctttctcgtatccatatctgacaagcatgtcattttgttatcatgatcattgtaacaggcca

SEQ ID NO: 164815 - DNA, 593 bp, Homo sapiens
ctgactttggtggacaggataattaatattaatatccaggcttcatgaattatgcacctgaaccaagacatttttcttctacctttcccatctcatacttcattgcacaggctcaatgagcctcagccactaacaaagaccctgcagaaaatgaagacaagatgcatccttaggatggcagaacatgtggctgtcccccaccaggcaccaaccactgccagaagacaggctaggtgcatgcatatgctagtatgcatttaatttccaagtgtggakctcagtcttcacaaaaaccccattgcatcattcaccacctattgattcagtgcctgaggttggaaacccctctggtggaagctttgttacacacttggtcaacagcttgttcacaaggtaacgggccgtgagcaagcacactgaagatgttactctaaagcaaaaagagaggaaagagtatgttttcctggtaaatataatgatgttactacaacatttcttcagcaagcaacaagatgagaggtagaggcaagttcctgtgtgggcaaaataattcccccatgtcccttgccaaagacacacatcctaataccatg

SEQ ID NO: 164816 - DNA, 514 bp, Homo sapiens
gggagggacactttttttccctaggaagggaaatttggttaagagaatgaaggaacagagaaaagaggagggagggaagaaccagcggtattgcctgaagctgacatgctatgtcaactgagtggcaggtgaaaggaatccctggctgatttggaggctaaactacttttatgagcagagctggcagatatgcaatttgaagtgatgtgcctgagaaagcagccttgatcgagctttccattcttacacaagtctttgttaaagtcaaccaacacaaatacagttttaatatgagcctattgtgtgtgagtgaatatgtgtatgggagkctgagtttccgatctaggttggccatgtagaaactgaaacaccatgtactagggggtgagatatctcataaagtgaggaatccagaaactaatgctggaggcagccatgagaaatgtaagcccctgggaatcatcaaaaatacaggataaaaccttgaacttctggtgactaggatgaaggccaa

SEQ ID NO: 164817 - DNA, 481 bp, Homo sapiens
tttttgaaacaattaataaaacaggccaatagttagattaacaaacaaggaaaaagagaagattcaaataaacatgatcagaaatgacaagggggatactactactgaccccatagaaatataaatgaccatcagataatattatgaacaccacacctctatgctcataaactagaaaatctagaagaaatagatatattcatggaaacatacaccctcccgagagtgmatcaggaagaaactgaatcccttaacagatcaataatgagcactgaaattgagtcagtaagaaatagcccactaaccaacaacataccaggaccagatggattcacagctgaattctaccagatgtacaaagagctggtaccattcctcttgaaactactccaaaaaattgaggaggagagacctctccctaactcattctttgaggctagcatcatcctgataccaaaagctggcagagacacacaaaaaa

SEQ ID NO: 164818 - DNA, 561 bp, Homo sapiens
tcatttatttatttaatcatttatttatatctgtatggacttatggatacttattttatactttgggttataatctaatactacttcattttgctgctcaaattattccagctttggccattgggagatctttcaggtgattgtgtttctttaatatataccatcagtgtggtaatgttttggttttgatccctttactttctggcacaagatactccagtcacatcctgtatatttcctgcccccatcctaggatcagccatttctccagggaaccctggttatttttattagacaatgctattagaaaccaagatctgggtgccaagtatgcttgttgctgttaaggtgtcattgtttttagaccctctcagctgacagagcaaggaaatgtatgtgtgtatactaaattgtatatatacacatttctataaacatttctatatgtaatcatctgtatctgtattaagctaaacatgagtttatattcatgtctccaactctaagctattaccaygtgtatccttctagctgcgttctctgcaaatccccactctaaca

SEQ ID NO: 164819 - DNA, 567 bp, Homo sapiens
gacacctcgtctctactaaaaatacaaaaattagccaggtgtggtggtgcacacctgtaatcccagctactcaggaggcygaggcaggagaatcacttgaacctgggaggcgaagtttgcattaagccagggttgcaccactgcactccagcctgggggacagagagaaactctgtctcacaaaacaaacaaacaaaaaaatatgaatgtgaccctcccaccaccaccacatggtcctaccttcctcacatctcacaccctcaagtggcacaaagagaagggggcttttattgctaaggaaaacttactgaaatggtctgggatgtggcacacatttaatataaaaatgtctgaagacgttttattcacaataatcagagtaaacaatggtagaaaacagtcatatctcacagttcacaccagactcacaaaagccccccagtggctccttcagcctgtctagacagcagtttccattacaagtgtcttatgctgtgacaaactatcacaatcatgaggatagctattggaaaacactgaaccactctacagacagccggtgttccc

SEQ ID NO: 164820 - DNA, 545 bp, Homo sapiens
gtaggaatattgatttgggtatttacattaagagaaacagtaaggcttttgttggttcttgtttgtttgtttgttttgagagagggtctccctctgtcacccaggctggagtgcaatggtgtgatcacagctcattgcaaactctgcctcctgggcgcaagcaatcgtcccacatcagcttcctgagtagctgggactataggcatgcaccaccatcctggctaattttttttttttttttttttttttttttttttttttggagcaaaagtctcactttgttgcccaccctggagggcagkggcatgcagtgtcagctcactgcagcctccaccccccaagttaaagcaattttaatgcctaaccctcctgagtagctggaattacaggcatgtgccactacgcccggctaattttttatttttagtaaaaacagggtttcaccatgtcggccaggctggtctcgaacccctgacctcaggtgatccgcccacttcagcttcccaaagggctggaattacagacatgagccactgtgctcggcc

SEQ ID NO: 164821 - DNA, 305 bp, Homo sapiens
atttggattacaaaaatgttagaaataaaattatgtttgtgaaaggatgggcatttaaaaagctctgggttatggttgtctgtggttgaaattataaaatgatagttccccccacacacayacagcatacacacacacacacacacacagacacacacatacacacacacaaatgtgggttattatggctgagtcattgaatttatttggaagaaccatcttcttttgcatgacagaatacagatggccataaactatttacccagacattttggggttgagggatgtaatcatcatttgaaaca

SEQ ID NO: 164822 - DNA, 305 bp, Homo sapiens
atttggattacaaaaatgttagaaataaaattatgtttgtgaaaggatgggcatttaaaaagctctgggttatggttgtctgtggttgaaattataaaatgatagttccccccacacacacacagcatacacacacacacacacacacakacacacacatacacacacacaaatgtgggttattatggctgagtcattgaatttatttggaagaaccatcttcttttgcatgacagaatacagatggccataaactatttacccagacattttggggttgagggatgtaatcatcatttgaaaca

SEQ ID NO: 164823 - DNA, 574 bp, Homo sapiens
tgcccatccctttccctgcaaagactttgttgtagcagcagttgttcactcttcaccagtggacacatttccaggccatcgggcatgtgctcacctagattaggagcctgaggtgcccctcccttcctgtgcacagatcttgatacagtggtgcactctctgctccatacccagatgtaactccagactttcagtgcacctgccccctggaataagagtttaagccaccttcccattccgcacacaaagaacttggtgcaacagcactccctctgctctactcccagatgtaactccaagcatttggcayacctactcccacggattaggagtttgagtcacccctgctttccctcttgtggtagcagtttctctgctcctgccctgggcttatctatatctggttttgttaccagtgggaggtatctgagttaccggcaacaaatccatacaggtctgcagcaacttcaattcttgcatcctcagaagaaagaatttgactgacggacataaagcagaaaaagagaccaaggcaagttccagagcaggagtggaagtttatttagaaaggctt

SEQ ID NO: 164824 - DNA, 616 bp, Homo sapiens
cctaggaaaaattgtaaacattggccttggcaaagaattgatgacttagacctcaaagccaaatgcaacaaaaacaaaaattgacaaatgggactgaaaaagcttctgcacaacattcagtggaggaaacagacaatatgcagaatgggagaaaatatgtgcaaastatgcatctgacaaaggattaatatccagaatctataacgaacttaaataaattgaccagaaaaaaaccaaataaccccattaaaaaatgggcaaaggacgtgaacagacatttctcaaaagatgacagacaactggccaacaaacatatgaaaaaatgttcaacatcactgatatggtttggctgtgtcctcaccgaaatctcaacttgaattttatctcccagaattcccacatgctgtgggaaggacccgggggtggtggggtaactgaatcatgggggtcagtctttcctatgctactcttatgatagtaaataagtctcatgagatctgatgggtttatcaggggtttccacttttgcttcctcctcatttttctcttgccactaccatgtaagaagtgcccttcaccacccaccacgattctgaggcctccccagccatgtgga

SEQ ID NO: 164825 - DNA, 616 bp, Homo sapiens
cctaggaaaaattgtaaacattggccttggcaaagaattgatgacttagacctcaaagccaaatgcaacaaaaacaaaaattgacaaatgggactgaaaaagcttctgcacaacattcagtggaggaaacagacaatatgcagaatgggagaaaatatgtgcaaactatgcatctgacaaaggattaatatccagaatctataacgaacttaaataaattgaccagaaaaaaaccaaataaccccattaaaaaatgggcaaaggacgtgaacagacatttctcaaaagatgacagacaactggccaacaaacrtatgaaaaaatgttcaacatcactgatatggtttggctgtgtcctcaccgaaatctcaacttgaattttatctcccagaattcccacatgctgtgggaaggacccgggggtggtggggtaactgaatcatgggggtcagtctttcctatgctactcttatgatagtaaataagtctcatgagatctgatgggtttatcaggggtttccacttttgcttcctcctcatttttctcttgccactaccatgtaagaagtgcccttcaccacccaccacgattctgaggcctccccagccatgtgga

SEQ ID NO: 164826 - DNA, 575 bp, Homo sapiens
tctgtctacatgattcactaggatgggacaactataaacttgcacctggtttctctaggtctcttccctgtgtgcctttttcctttgattttaattggagtacctttgctttaataaaccacagtataacagattttctaagttctatatgtccttctagtcactgaccctgaggatagttttggagaccctgacgctgtggaactaacaatctgagtcaagggaaattccaattattagagctgtcagcttaagaggccagaaacattttactgaatgcctgtsataaaagcaaggtactatgctatgcatttcacaagtaatctcatctaaacctcataataaaactacgagataggtattattatgcccaaattttagaagaggaaactagggatcagagaagtaaactgacttttaaaacctcatacagtcacaaagagaataaaatacctaggaatacagctaatcagggaagtgaaagatctctatctgatatcttctctgatttctatgagcagtgttttgtaattctcatctttcacctccggaggtgacacaaacaaatggaaaaa

SEQ ID NO: 164827 - DNA, 617 bp, Homo sapiens
gacatttcttgttttccaagtaattactgtgctagaattaacataattctttgttcttatacagttgcactggcgtatggaatttataaacaggatcttcccccattagatgagaaaccaagaaatgtagtatttattgatatgggacattctgcctatcaggtctyggtttgtgcttttaacaaaggaaaacttaaagtaagtaaacacatggtttgttatatttacatatgttaagaacacagactaaagaaccgtaatagctgggttcgaatcctggctctgccccttaaactatgacctcaagcaagttacttaatctccctaaatcttcagtttgtttatctgagaacaacagtagtaactacctcatataatttttcaggacaaaatgagttaatgtgtacaaaattcttggaaagcctggcatagggtagctgctataatatatattagctatttttattgttgtttctattgttaggttgttaagtcatctatcaggaagcataaattatttatccataaatgtaattacaggaagcattttctaaaatgattcccattgattttagaaacctttctatccaagcgttctaatcgtaattttacttctg

SEQ ID NO: 164828 - DNA, 622 bp, Homo sapiens
catgagattgcctcttttagctcattttctcctgtacttttaattgaacatgccaatattttaaaaaaagcactgttattaaattaatgtttccctctgtcataagctacaatattttcatgcttgcattaacatttacatttttttccatgaactgcccrggatttaggtagcctgcttccctaccagaatcaaaatttatatttcaaatattttacttgactgcttttcagaagtatagcttgtacaatgaataatggtgtgtttacattttgaagttattttttaaattttgttctgtgttctgtacataagtacccccaagaaaatgagatttttgtatacatttcaaaaatatggattttcagccttatctgaatgtcttgcaaaagattttaatggcatgtgttaatgtcagtttttttctttttaaataatttttcacctgtctgccccagataatgtcaattttgaggcaagaatcattattctataaaatttaatttcagtttcaaggtataagtgatccagaaaaaaattgtaagaaaacgtatggggagctaaattgaaaagtaaatatagcctaatgactacaaaaagaaagtagaaggtattggtagtt

SEQ ID NO: 164829 - DNA, 513 bp, Homo sapiens
gtgataatatctgctcatatggttatgtgagaattaagagaatggatataggtaaatgctttgaacaataattggcacatagtaaacattatgtaaattcttgtattttaattaccacatttaaatgtaatagcatggaataataacacagagcaagcacagaataacatcttcatcaaaataccatttaatgttatgattcaagaaaatgtttctgtgatttcagttataactacagaaaactacattcaatcaacaaacatttataggcactccatgtatacaagtcacaatacctgtctkggagaatgtatagtctattgaaaaaaaatcaatagaatatatagaattatgaataatactagcaaagaagagaataattacttctagataagagaggtgacttcttgaattaggacttgagggaaaacatttaatatctatttgtcttgcagaaatagacattcctgatatataggtatgtaagtctgttctccatatagtagccaaagt

SEQ ID NO: 164830 - DNA, 614 bp, Homo sapiens
ttccttggctgtcagcaccagaaatattctcatggaagccttggggattactaagagaaattatgtgactatcaagttctcagaatttataaactacagctgccttataaagaaaataaaggaatgcattttgggaacaaaaatatgacagactcataatttgtggtacttatcccatttaaaaatgtcaatatcaaaagcggaaactaataaagatctggtaagcctcactaataattgtatataaaataatgaattaaagttaggtaatccccaaagaagcaggcaggttgtttatttctctgttttctttataacacttgtaaaatttaattttttatggatacatctggaagtagctgctctaacttagctgttgagagcaaggatgatctgtatagccagsgtattgcaacatgctgacatggtctctctcattacatttatctttcactctacgtttattagcaaccaagtttttctttgttttatgcttgtaacaatttttgtgaccatcctaaattacctcatatttcttcaggtacacttaatttgttggtttgttgcacctttattttacggttgttttcattacatttcgggacttctaaggg

SEQ ID NO: 164831 - DNA, 547 bp, Homo sapiens
ctacacagtgatcatttttaagttttactgattgccttatgaccttacctctctcatggggccagaagaatgatggcgaaatacagtgattggcaggagcagctgtggagttgcttattgagtcatggtgggaccrttgcctttgctggggaagactcaggtatctctgatgtccaacattcaatgggagcaaatcttttccacaaatgccctgggaattctctatgtattacaatgcttttgtaataatctcataccctaaaagagactatgaaaaaagaataaatagaaagtaagaggtttaggagtgcctgttgacccaggtattaagaaaagttgatacagacatttgggtaaaattcaatcttctcatattgtcatttattcggcacatatttattgcaggtctactatgtgcaagacacatgtcaggttgtgggagatacaaagatctttgtgttgcaatcttagctctcaaggaatttcaactagccagtagtttggaagctaaatgggagctatttccaaagtaagcttgatatagtag

SEQ ID NO: 164832 - DNA, 417 bp, Homo sapiens
tgttccctaggttggaccttacttctacttgcttttgcattgccttcagtggaacttcctcctgtccaactcagatattcaagaatgcttacacatggaatccctgtccctttagatcagttattctcaaagtgtcatctgcagacctctggtggtctctgagatactttcaggccaaaataattttagtaataatactaaggtgttacttgtccttttcaccatgttgacatttgcatggatagtgcaaaaacaatggtggctgaaaccacttgcaccttagcccttagcattcaaggcggtgacacaaatgtaccaggggcctttgtgttccttactrtcatacatttggcttaaaaaacatgatgccagttttacataaggatatcctgatgaagcagttaaagtttgattttt

SEQ ID NO: 164833 - DNA, 606 bp, Homo sapiens
ttttcatgtgtttttaaatttggcttttactccctaactttggcatttgtattaactttgccattttcctttatacaggatacatgattttctccccacttctaattttctaaaccaaataacgatggtaaatagaatygtataaaattgatgaaatagactgaggataggatccatatactttcagtaatgtccagaagttttagtgaactttatttttaactgtattttgaccattcaaaagactgttgagagcttacttgtaagttctttaggtaactaattcttattagcatgttaatttctcagttaaaagttgtatgtccagtatacgaggtcaggagttcgagaccagcctggccaacatggcaaaaccccatctctactaaaaatacaaaaattagctgtgcgtggtggtgggagcctgccagctacttgggaggctgaggcaggagtattgcttgaacctgggaggcagaggttacagtgagcagagattgtgccattgcactccagcctgggcaacaagagcaagactccatttcaaaaaaaaaaaaaaatcaactaaaatttaggaaacccaaatagttctagttctgctctctt

SEQ ID NO: 164834 - DNA, 606 bp, Homo sapiens
ttttcatgtgtttttaaatttggcttttactccctaactttggcatttgtattaactttgccattttcctttatacaggatacatgattttctccccacttctaattttctaaaccaaataacgatggtaaatagaattgtataaaattgatgaaatagactgaggataggatccatatactttcagtaatgtccagaagttttagtgaactttatttttaactgtattttgaccattcaaaagactgttgagagcttacttgtaagttctttaggtaactaattcttattagcatgttaatttctcagttaaaagttgtatgtccagtatacgaggtcaggagttcgagaccagcctggccaacatggcaaaacccmatctctactaaaaatacaaaaattagctgtgcgtggtggtgggagcctgccagctacttgggaggctgaggcaggagtattgcttgaacctgggaggcagaggttacagtgagcagagattgtgccattgcactccagcctgggcaacaagagcaagactccatttcaaaaaaaaaaaaaaatcaactaaaatttaggaaacccaaatagttctagttctgctctctt

SEQ ID NO: 164835 - DNA, 649 bp, Homo sapiens
atttgtacttagttttctagcatcatgatggctgctttataacagctcatagcagttatattgcagcatcgtttctgcctgtggaatcactttggtatgaagattcttaagtatgcagccccacaaattagggctctcattcctgtcaaagatagttattactccaggaacctttccaaggttgctaccatgaatactttttacttttatggtgacttggtctctgagagtaaagacaattatccaaaagaaaacgtttttgtctggatatatcttggtgacaagaggaagaaaggtcatgatcttcaaaccaaaacccaacatgagaacaggttatgagcttgaattgaggtactgagtgtagaataaccaaaaattgtagtgtctgtttgaatttacacctgtcaccwgatttgaatacacagttttaactttattttcattatttagacacatgatttgtagaactgaatcccaaggactgaggttggtgtttaggatctggatagcaagccctctgaaaatggaattatgaacttatttccaagatcttagctactatcatcttgctctgcctcctctgaccattcctctggtattagttgaagaatacagacctacctaaggctttggtttaagatccagttgg

SEQ ID NO: 164836 - DNA, 547 bp, Homo sapiens
ttggaaagtacaaaaatcctgaggcatgagtgtacctggtgtgttcaaggttcaaggccagtgtggctggaggaaagggagaggaagagaacatgaagaagatgaagtcagataatgcaaggagctagttggcagattttgtggggtcttgtaggtcaatgaaaggactttggtttttccttttttgaaatgaaaagccatgggaagtttttaaacagtagactgaataacataatctgacttgagttttaactgggtagttttggctagcatattaagaataaactaaaggaagcaagaatgaaactagggaaatcaattaggagacagtagcaataatccaggtgagaatttgtgrtagcttagtccaggatgctaccagtggaggttgagaagacttggtcagatagtggatgtattttgaagtcagtgctgacagatcaggtgtggagtgtgagatggagagcagtcaacactgattcccaaaatttcaacttgagcaaatggaaaaatggagaatatctgtggtttcttctatttgtgtatc

SEQ ID NO: 164837 - DNA, 600 bp, Homo sapiens
agagagaagaagcaaagattaacaagttgaaataacaaaaacttttaattccacttcttagaattcaattatgtcatttgcagagagggtccatgtcttcctgctgttctttctttctttcttttctttttttctctctcgcaacatctgctgagacataagtctagaaaatctgtaaccacctgaaaccattcactggggcacaaatctattaggcctagrgtttcatatgagtgcagtgaagtgaagttatatttgagctctccatcatagaatttctattccacatggctgttctttctaccctcacactttcccctcaagaggtaaaaagtctctccattttcatacccactgttcgttttctccttggctttgtgccccatggggggtgccattaacatgtgtctaatgtggccatgcccccttgaacctgtgcagtgtcctagccctatggcccttccatacatagttaaaagaagaatggatcaattgacagaaaaaaaatggaagagagaaagaaaaattgcttctccacctcaaaatcttaaatcaaacatagccttgtacacgagacacagatacatttatatatattta

SEQ ID NO: 164838 - DNA, 407 bp, Homo sapiens
tcactggggcacaaatctattaggcctagagtttcatatgagtgcagtgaagtgaagttatatttgagctctccatcatagaatttctattccacatggctgttctttctaccctcacactttcccctcaagaggtaaaaagtctctccattttcatacccactgttcsttttctccttggctttgtgccccatggggggtgccattaacatgtgtctaatgtggccatgcccccttgaacctgtgcagtgtcctagccctatggcccttccatacatagttaaaagaagaatggatcaattgacagaaaaaaaatggaagagagaaagaaaaattgcttctccacctcaaaatcttaaatcaaacatagccttgtacacgagacacagatacatttatatatattt

SEQ ID NO: 164839 - DNA, 510 bp, Homo sapiens
catgcacttggttgattgactgatgggtggactgatgactcggctttgtctaataaagcatgagagaaatttgagtgattcttagaataattttartccctgatgaaaaaagagagatgctggaggtagattctcccctgacttgcctttcctggtttgggtgtcactgtggcagagagaggtgcttgaagatgaagcctaatgaaacttcaagggcaaatacggccaacaccaatacagagattctttagtcctcaaaggcattgtgaactattgaaccaagccagaaactatccacctccagactcaagggccttattcttaagccagttttagttcagtattgagctatttttgcaactgaaagcagatgtaaggatacagctctctccttctccaccaaagaatttttttgcattgacaaaagacctgtgtatttttaaaagttcatcatatttgagtgtcttacattatttacagggagctataatgtataaggtaactcataaa

SEQ ID NO: 164840 - DNA, 549 bp, Homo sapiens
ataattcaatatgttttttccacctcaaacatctgggcatatcaagtgcaaatagcatttggactgaatttatataatgtcttcagtaggccactttgctttccagatacagaagaatgaatatttcagaccatttgtgaaaagaaacctagcataggcttacattaggattactactatgaaaagctagtwatatatgaagagtacatgtaaatatgccaggccctctaagtactgtccttgagtgatctcagccaactctcaaataattctaaaaatattaatatttaatattagtaattttgagattttttaacttagcacatgtaataatgtaatgtttttattcaatatcataattaatgtttgtttccattctgcagatgaagcaactgaggcttggagagcttaagtaaactgggaagtttactcgtatggtaaatttttgaaaaactattcccaattttgccagtaaacatgagtgcacttcgtttggggttgagactgtcacagaacacatcaacacttatgtgaactgagttagaacat

SEQ ID NO: 164841 - DNA, 509 bp, Homo sapiens
tcaagtactgctcaccagcttcattaacttaatgtaatgtacataaaaggcaacttacctaccatgatwacaattaaatataaacattcagtatatttatctcaccctcaattctaagtagtctaaaacatgcctcatggtatgatacagcttcttgaaaatgtatgcgaaataatccctattgcatattacatgtggccagttatatataaacaaccacatatgagacagtgggccaataagattaaagtactatatttttactgtaccttttctatctttagatatgtgtagacacaaatacttaccattgtattatagtcatctacagtattcggcacagtaacatgctatacaggtttttagcctagacgcaataagctatactatagcttaagtgtgtagtaggctataccatcttggtttatgtgggtaccctgtatgatttttgcacaaggatgaagtcacctaaggacacatttcacagaatgtatccttgtcattaagtg

SEQ ID NO: 164842 - DNA, 509 bp, Homo sapiens
tcaagtactgctcaccagcttcattaacttaatgtaatgtacataaaaggcaacttacctaccatgattacaattaaatataaacattcagtatatttatctcaccctcaattctaagtagtctaaaacatgcctcatggtatgatacagcttcttgaaaatgtatgcgaaataatccctattgcatattacatgtggccagttatatataamcaaccacatatgagacagtgggccaataagattaaagtactatatttttactgtaccttttctatctttagatatgtgtagacacaaatacttaccattgtattatagtcatctacagtattcggcacagtaacatgctatacaggtttttagcctagacgcaataagctatactatagcttaagtgtgtagtaggctataccatcttggtttatgtgggtaccctgtatgatttttgcacaaggatgaagtcacctaaggacacatttcacagaatgtatccttgtcattaagtg

SEQ ID NO: 164843 - DNA, 635 bp, Homo sapiens
gctaaatatcctgtcaaggataggaaaaccttttttttttttttttttttttttcagtggagtcttgctctgtcgccaggctggagtgctggagtgcagttgcatgatctccactcactgcaacctctgcctcatgggttcaagcgattctcctgcctcagcctcccgagtagctgggactgcaagcacatgccaccacgcctggctaatttttgtagagacagggtttcaccatgttggccaggatggtctccatctcttgaccttgtgatctgcccacctcagcctcccaaatgctgggattacaggtgtgagccacagcgcccggcccaagaagacattttctaaccaaaatgccaatagttgctccagctaaraaatacgcgagctctccagaaaaaggaaaaagagccaagatgtgtacagtttgctaattttcatggtgtaaattctcgcattatggctaatttcaggcaaccaacctgaaattttttaaaaatggatataaagtatttttaaaaattcctttttttggtgtaaaattagggctcctaatgccaaaaaacatgtttgaaaaatatattatagtcacttttacttaaatcattaaaaagttagcatatataacaaattca

SEQ ID NO: 164844 - DNA, 635 bp, Homo sapiens
gaaaatgttatgttccttatttgctacagcagaagcataggtacgcaatcatctaaaaccatgtaagatatttttgatataygtttaaaagcatgatagccagattataggtctactctacagccctacaactattactttctcagcttccttgtatctaggggccccatgtagtcaggtattgtcaatgaaacataaccataactctattaggactttcagtaaagcgtttacttttctgtaaaaagaggaagatgttgctggctctatttttctgattacttcttcctccagggaacacaatgtgatacctgaatatagagcaatgatcttgtgtgaataagtcaacaagccaatactctaaaagtgtaaaccaaaaaacatagaaggaacacaggtctttgaagatacgatgaaattgttttccctgtcctggactacctacctccaaaattcttagctgagaccattaaaggtgttattgcttaagtcacaagtgttcaggtacactgtaacatgaagctgaaaatattgttatctaatatgaccattaagaaaaattaaaatatgattttaggccacacaccaaatataaatctagatataaaaatagagaaataaaattcaacattttc

SEQ ID NO: 164845 - DNA, 588 bp, Homo sapiens
acccaaatctgccaacattattatgctgaggccacacttgagcacagcagaaatgcctctgatgggtggctttggctcaagggctccccattggcttgaccaaaactttttacaaactacactgcagacactcatttcttcttttattcatgtgggtcagaacagcattgtgtattgtccaaagaattccccatctcctccagctcttttacacttgtcccttacaaatattttccccaatacatttcttgcatgtcaaattctatcttagtgtctgcttcttagaggacccgaactaactcagtgacttactgtcaataaacacaacgagaataaaaggttttatattaggtaagccactaccaagagtgtcaacagtgatcctcattggctctcgtggatacaatcatcattaatttcgtgaayttggataagaaataaaagctgaatatcctgacttgcattctaagttcaagggatatttccatattttaaaatggaaggaggttctatctaaccttcaattttaagtaaataatctgaaatgcggtgacatactaaaaggcagtatctagagaagaatatatc

SEQ ID NO: 164846 - DNA, 478 bp, Homo sapiens
caacctcagagaagcttattttcattgctggaaatgcaaagaaaatgtgctgcagaaacaatttatacacccttgctggcactgaattgcagctgcactggccgtgcatgatatggctgctgtcaatgaaggcagttgtatgcagagcactgctgggctgtcggctgcagccaccaaagggcatgttgcagtattttggtgatatctgaagatgcagacagatgttgggaagacaaagtgactacaytgagcaaaacccaagaacgaaggcaaaggtaaatatcatttaaataatggtagaaataaagaggttttaaaaatagtaaagcaattcttggtggaaagaattggggtctctgaaaattgttaatgtcttcttaattcttccctccatctacttagtatagctccaaattcttctcttctccccttcctccctcccttcatctctctctctcagacacatacataaacatat

SEQ ID NO: 164847 - DNA, 272 bp, Homo sapiens
tcttgctccacggtgaattttttactatggaaaattataaatccagggacaataagacttaagcatagaaatgcatgccttaggtgctgcacggttgaattcttatgtggattcatattttagcagatcatgccagtagcatcactgaatgaaaggagctatttatcactaacgtataaaccatttagacaccattccccacytcttttataaccaattattcacaaaatgtgctattattcttacacgatgaaatataagaaaagattttt

SEQ ID NO: 164848 - DNA, 487 bp, Homo sapiens
  misc_feature (1)...(487): n = A,T,C or G
nnnnnnnnnnnnnnnnnnnnnnnnnnnnnnnnnnnnnnnnnnctctgtctcaagaagaaaaaaaaaaaattactattatttttatatacatataataagtaaaataattactatagtcaagataatccacatatttgtctcctcatatagttatcttttctgtttcgtagttagaacacctgaagtttactctcttagtgaatttccagtgtacattaactatagtcattttgctgtactgtaggcaaaccttttcaattttgcctgaaaagtggatgtaagaaacaaagcattagacaaggtaaaatgaagaaacaaggaggaatattatttacaaaatattttaaggaattgtactacaaacaatacmatagttatggcttgagcagtcagttaatattcaagaaaataagatgcctattatcagaaaaaaaggcccttaatcttttctaggcagaaattcatttctgcatctcttttgtcaaga

SEQ ID NO: 164849 - DNA, 571 bp, Homo sapiens
tggctatcacaaataatgcagctataaacaataactcacaagtctttagacaaatgctttcacttctattgggtaaagacctagtattatagtggctaagtcatattgtatatatttaactttttaagaaacgagctattttcaaaagtarttttactattttacatttccaccagtagttttgattcacattgatgctgttacttgctatggtcagtcttttcaaatttaatccttctaccaggaatgtagtggcatttcattgtgtttttaatgtatactttccaaatatataatgatatggagcttcttgtcatatgattatttcatttgtctagcttctttcttgaattgtcaattcaaatattgtgcctatctaagcaaaaggactgtttcttattattgagttttggaagttctttatgagtgcaagatcttaatttttccccactttttgggttgattctttcctgaacagttcttttaaaagagcaggaatccttcattctgatgaaatttgatttatcgctgtttttctttaatggattgagcttttggtgttataactaag

SEQ ID NO: 164850 - DNA, 467 bp, Homo sapiens
aaatataaatagtgaacagattttcatggggattatagattgaaatctactggcacaaatgaatgaaagaagtgatgcttttggacaagcagataatagggaaaattcaaaaaccaaaggatagcctgaaactggatttaccagtgaatcattttattcctatttctgtgtcatatattatttaaaaagattatcaaacagtaaaaaatatttgtaaaatatttttgcatgactttgcaaggaaagcacggtgtcccaactattaagccatttgtttattcagcaaattgtgtagactcttttaatttttaaatctgttttgatacaatttgtcagaaaactaaagagayatcatttgaagttgaataaattattatgaaagcagaaaatagcatattactactgagaagtttgtaaaagcagtcatataattaatgacaaatgttattgctggagagaaagtaaat

SEQ ID NO: 164851 - DNA, 476 bp, Homo sapiens
tttccattgcttttactacacagatctctctacagtgttgtaatagtggccacccaaccagactgcackctaatttaattgcctaaactgtctgagctatgtcattcccttgcatattgtatcccatatcttgtaacttaagaaaggacattttttttctgaaagcgctcctctttctttttcatcagagcttttctctttattgcagattccctttacctcaatatatttcactcaaaatgtcctaatatatttcactcaaaaacaaaaaaaaaaatgcaaaagaaaacaaactcccttgactctataaaatacctttttgtctttctcctttaagaaaatatctcaaacggcttcaacttagtcaatggtcccattttctcccttttttattctctttccaactcactttcaacccatcacttgacaacattaccagtgactttcatatctttaagcctgactttgactttgaa

SEQ ID NO: 164852 - DNA, 481 bp, Homo sapiens
gtgttgtaatagtggccacccaaccagactgcacgctaatttaattgcctaaactgtctsagctatgtcattcccttgcatattgtatcccatatcttgtaacttaagaaaggacattttttttctgaaagcgctcctctttctttttcatcagagcttttctctttattgcagattccctttacctcaatatatttcactcaaaatgtcctaatatatttcactcaaaaacaaaaaaaaaaatgcaaaagaaaacaaactcccttgactctataaaatacctttttgtctttctcctttaagaaaatatctcaaacggcttcaacttagtcaatggtcccattttctcccttttttattctctttccaactcactttcaacccatcacttgacaacattaccagtgactttcatatctttaagcctgactttgactttgaacaaaacttgaaagaaataatcttttatttatcttctttt

SEQ ID NO: 164853 - DNA, 476 bp, Homo sapiens
tttccattgcttttactacacagatctctctacagtgttgtaatagtggccacccaaccagactgcacgctaatttaattgcctaaactgtctgagctatgtcattcccttgcatattgtatcccatatcttgtaacttaagaaaggacattttttttctgaaagcgctcctctttctttttcatcagagcttttctctttattgcagattccctttacctcaatatatttcactcaaaatgtcctaatatatttcactcaaaaacaaaaaaaaaaatgcaaaagaaarcaaactcccttgactctataaaatacctttttgtctttctcctttaagaaaatatctcaaacggcttcaacttagtcaatggtcccattttctcccttttttattctctttccaactcactttcaacccatcacttgacaacattaccagtgactttcatatctttaagcctgactttgactttgaa

SEQ ID NO: 164854 - DNA, 621 bp, Homo sapiens
aaacgtctgtatatatttattacagaggcaaccattgtagacctaactacattttcaagccatggttggttgaatccacagacacagaacctgtggatatagagggctgattgcattctatgattttttcctatatttacrtatctatgataaagtttaatttataaattggacatagaaagaaattaacaaaattaataatgagataggacaattataataatagagcaataaaagcttatatgaatttggtctctttctctctctcacaatatcttactattttcaaactgcagtcaactgcaaaaagtgaaactgtagatacaggggaacaactgtaaacagatagcaaataaacacaggaaaagatattcatcatcattagccactagggataggcaaactaaagttacaatgagatacccctatattacctgttagagatacctatcagaatggctaaaataaaaaatactgataataacaagtgctgtcaaggatgtagagcaatcatacctctagcatattgttgatgggaatgtgaaatgtagtgtctctggaaagcagttcagtatcttcttataaaattaaatatatacttaccatatgacccagaaattg

SEQ ID NO: 164855 - DNA, 621 bp, Homo sapiens
aaacgtctgtatatatttattacagaggcaaccattgtagacctaactacattttcaagccatggttggttgaatccacagacacagaacctgtggatatagagggctgattgcattctatgattttttcctatatttacgtatctatgataaagtttaatttataaattggacatagaaagaaattaacaaaattaataatgagataggacaattataataatagagcaataaaagcttatatgaatttggtctctttctctctctcacaatatcttactattttcaaactgcagtcaactgcaaaaagtgaaactgtagatacaggggaacaactgtaaacagatagcaaataaacacaggaaaagatattcatcatcattagccactagggataggcaaactaaagttacaatgagatacccctatattacctgttagagatacctatcagaatggctaaaataaaaaatactgataataacaagtgctgtcaaggatgtagagcaatcatacctctagcatattgytgatgggaatgtgaaatgtagtgtctctggaaagcagttcagtatcttcttataaaattaaatatatacttaccatatgacccagaaattg

SEQ ID NO: 164856 - DNA, 713 bp, Homo sapiens
tacagtggtgagttctatggggtttctttttgctgcatatacccagagatgggttgaaaaagccagaaactcagtgtattagtctgttttcatgctgctgataaagacatacccgagactgggcaatttacaaaagaaagaggtttaacggactcacacttctacatggttggsgaagcctcacaatcatggtggaaggcaaggaggagcaggtcatgtcttacatggatggcagcatgcaaagagaaagcttgtgcagggaaactcccccttatgaaaccatcaagatcttgtgagacttattcactatcacaagaacagcatgggaaagaccagcccctatgattcaattacctcccaccaggtccctcctataacacatggaaattgtgtgagctacaattcaagatgagatttgggtggggacacagccaaaccatatcaagcagtaaggtcaacagccacagaccaaaaacaaaaagtcccaatgaaaacttatttgttcaagccaaaggaccaggaaaaggacagcctagcaagacatgaaaactttgacaataactgtcctactctagccagacaccacagaaaactatgtcccaatctgcatccatatcagaagaggccaagtacagagctgaagttctatagtgaggcatcccagttttcctgctagagaggtatcagataaggttgaatggagatcctgaact

SEQ ID NO: 164857 - DNA, 713 bp, Homo sapiens
tacagtggtgagttctatggggtttctttttgctgcatatacccagagatgggttgaaaaagccagaaactcagtgtattagtctgttttcatgctgctgataaagacatacccgagactgggcaatttacaaaagaaagaggtttaacggactcacacttctacatggttggcgaagcctcacaatcatggtggaaggcaaggaggagcaggtcatgtcttacatggatggcagcatgcaaagagaaagcttgtgcagggaaactcccccttatgaaaccatcaagatcttgtgagacttattcactatcacaagaacagcatgggaaagaccagcccctatgattcaattacctcccaccaggtccctcctayaacacatggaaattgtgtgagctacaattcaagatgagatttgggtggggacacagccaaaccatatcaagcagtaaggtcaacagccacagaccaaaaacaaaaagtcccaatgaaaacttatttgttcaagccaaaggaccaggaaaaggacagcctagcaagacatgaaaactttgacaataactgtcctactctagccagacaccacagaaaactatgtcccaatctgcatccatatcagaagaggccaagtacagagctgaagttctatagtgaggcatcccagttttcctgctagagaggtatcagataaggttgaatggagatcctgaact

SEQ ID NO: 164858 - DNA, 507 bp, Homo sapiens
accaggcttcttggtaaatggtaaatatcatcttctcctgaaatgtttagatagcctgctcaaaattcagctgggccttgtcatacatttattaactagctttgctctcaattctaaagccctgcctgggactcaggtgatttcagtagaaggggttttatttcttttacattagaaaattctaatgtccaggtctcatcccatatcaactgaaatcraatgtctacaaaggaagtaaaacttgtcaaggttctccaggcgactcaaatgcatgggcagggttgagaactccttaaagtgatcttacttggccaaaactaagctgaaatttgtagagagatactgtcatttcatgcagaggtgactggtctgataaaactctgaaaacttttttctctgagaaatggttgaaggaagtgaatatgtttaaccttgggaaagaggttgagggggagactcaggtggggacatggaaactttcttcaaacatttgaagaggcctaagat

SEQ ID NO: 164859 - DNA, 668 bp, Homo sapiens
tatcactgctacaatattttgtttttctagaatgtaaaaccattcgtgtcccctctgtccatctgttttatatcttcctgacttttctccctatctcaaatgccttgccacactttaaccattgtgatgagtctcaaatctcatcagcagattttagtgactctaatttatctgcaagcctcatcttctgacatctccactattaaccttttgatgaccactctcccagttttacaccaacccactctgaaaggacatcttctcccattgcgtctttaacactttgttacatttggttrggtatctgtttttcctacttcatttgtgagacagacagtttgaaaatgtgaaatgtataatgttcatctctgtagatagatgaaaggacttggtgcacagtaggtgcttaataaatatttactgaaagaattattacatttttacaacttgtatgcatgacatacagagagaaactgtagagaaacttgagcacaaacaacacaatgactgggtaaacaactagtaccaggtgcatcttgtagccataattcaagtgggtaacacagatggcttcttatcagaaaaagaaaaggtgaagtagaaactttactcctaagagaacatacataacatactatggcagatagtatttttccaaaatatcatta

SEQ ID NO: 164860 - DNA, 451 bp, Homo sapiens
ggagaaaattttgataaggtggactttattaaaatttaaaacttctgtgaaagacactgtcaagagaatgagaagacaagccacagcctgggagaaaatatttgtaaaataaataaatataggacttatacccaacatataccaaaaaaagaaaacttcttaaaactcaacaataagaaaacaaacaacraaataagtgggcatctcaccaaagaagatatagatggcaaataaacatatgaaaatatgcataatatcatatagaattagacaatagcaaattaaaataagatactactacctatctattagaatagctaaaaccaaaaacactgacagcatcaaatgctgatgagaatgtgaagacacaggagccctcattcactgctggtgacgatgcaaaagggtccagccactttggaagacagttagtttcttacaaagctaaaca

SEQ ID NO: 164861 - DNA, 451 bp, Homo sapiens
ggagaaaattttgataaggtggactttattaaaatttaaaacttctgtgaaagacactgtcaagagaatgagaagacaagccacagcctgggagaaaatatttgtaaaataaataaatataggacttatacccaacatataccaaaaaaagaaaacttcttaaaactcaacaataagaaaacaaacaacaaaataagtgggcatctcaccaaagaagatatagatggcaaataaacatatgaaaatatgcataatatcatatagaattagacaatagcaaattaaaataagatactactacctatctattagaatagctaaaaccaaaaacactgacagcatcaaatgytgatgagaatgtgaagacacaggagccctcattcactgctggtgacgatgcaaaagggtccagccactttggaagacagttagtttcttacaaagctaaaca

SEQ ID NO: 164862 - DNA, 408 bp, Homo sapiens
ggaggaagagctgttgaggaatttttgcgggaacaggagttgtggtggccactctakgactgcaaggtaccccacaggacacacgggagacacacttcagactgagctgggggaacttgacattacaaaagtaaatgactcttctcagggagctttagagatttccaatggtaaggaaggatgagtacaaagaactaggaccagttgaacacacccagctgttcccaaaatgccacttgcactctctttctaaaaatgaagtgttaagtcacagagaggagaaaagagatgactgcctccctttttctgctatatatggaaccttcagtcatttgttgtaggtgagttgcaagcatttaaaggaattagttgaccttcgtgttttgcataaatactgatcacagagaa

SEQ ID NO: 164863 - DNA, 419 bp, Homo sapiens
aaagcagggtttgcaggaggaagagctgttgaggaatttttgcgggaacaggagttgtggtggccactctatgactgcaaggtaccccacaggacrcacgggagacacacttcagactgagctgggggaacttgacattacaaaagtaaatgactcttctcagggagctttagagatttccaatggtaaggaaggatgagtacaaagaactaggaccagttgaacacacccagctgttcccaaaatgccacttgcactctctttctaaaaatgaagtgttaagtcacagagaggagaaaagagatgactgcctccctttttctgctatatatggaaccttcagtcatttgttgtaggtgagttgcaagcatttaaaggaattagttgaccttcgtgttttgcataaatactgatcacag

SEQ ID NO: 164864 - DNA, 435 bp, Homo sapiens
agtaaagcagggtttgcaggaggaagagctgttgaggaatttttgcgggaacaggagttgtggtggccactctatgactgcaaggtaccccacaggacacacgggagacacacttcagactgagctgggggaacttgacattacaaaagtaaatgactcttctcagggagctttagagatttccaatggtaaggaaggatgagtacaaagaactaggaccagttgaacmcacccagctgttcccaaaatgccacttgcactctctttctaaaaatgaagtgttaagtcacagagaggagaaaagagatgactgcctccctttttctgctatatatggaaccttcagtcatttgttgtaggtgagttgcaagcatttaaaggaattagttgaccttcgtgttttgcataaatactgatcacagagaaactttagag

SEQ ID NO: 164865 - DNA, 619 bp, Homo sapiens
aagtatacttatttaaaccaatgaaaaagcacatttctgaaaggaagttagagataatctctgtgttttgtgaaaaggcattaataaaaatctgagagtagctaagaatttggaggaatttatgtaaaagcaatcagagtttttaacttatgggaaccaaataaaactataacctcttattgtgtttatagaagtgagaaagaatatttatttaactttattacgaggcaatacatattttcctgtatttctagatacagtttggaaaactatccttaatagtctgttttatatgccttatatttaaagtttgttttagtcatttttgaaagactattgctgctgcaaatagttgtgtgctttacattctaagcttcagtaaatgtctttgtttaaaagtatcagtctgacctgagcatccacttggagaaygtttttttgtgtgtggtctagggtgacaaaagaccacaaaaatgtgtggtctagatttttatcaactatataattaactttatgatccaagaccagctataggacaatctatatgtaaaaataaagtcttatttatggaaggaactattctaagggaaaaatacagggtcaaactgtatcttttatg

SEQ ID NO: 164866 - DNA, 587 bp, Homo sapiens
tatgtgtcttggggttgatcttctctggagtatcttaccaggattctctggatttcctgaatttgaatgttggcctgtcttgctaggttgggaaatttttcttggatgatatcctgcagtgtgttttccgacttggtcccattctccccatctctttcaggtacccctaatcagtcacaggtttgatctttttacataattccatagttctcagaggttttgttcattccttttcattctttytttcctctaatcttgccttcctgccttatttcagcaagatagtcttcgagctctgatatcctttcccctcttggtctatttgacttttgatacttatgtttgcattgtgaagttcttgtattgtgtttcagctccatcagatcatttatgttcctctctaaactggttattctggttaatggcccctgtaatgttttatcatggttcttagcttctttgcaataagttagaacatactcctttagctcagcaaggttttttattactgtcttctgaagcctacttctgtcagttcatccatctcagcctcataccagttctgtgcccttgctggagacatgctg

SEQ ID NO: 164867 - DNA, 604 bp, Homo sapiens
cctagtcttgctggcactggcagcaggaaaaatggccaaatggagccacagtgatggtggccacccctccctgcccccccagaacttggtcttcttaagcagtctccagcttgctgtgctggtcaggggggattccaagccagtgagttttagcttgtggagttccttgggagtggggcctgctgaatggggacacttggctccctggtttcagcctccttcccaggggtgtggacagatctcctgtgtcactggagttcccagagccagaatatgcagactcctgtgtctcagtgcctgactgagtggctgcccactcaagcaactgccatgagtctgcacagctctgtgcttgggacccaagttcctggtggtgttgggctcatgaagagacctcctgatccaaaggttgcaaagctctgtggggaaagcaaggttttcagggtggagtagcacaatccctcactacctgtcttggctgtgggagggagtttctgttgccccttgcagctcctgggtaagccctcactccactccrcttttcctcattctccatgggttgcaccaactgcctggtcagtccccatgagagaacctgggtacc

SEQ ID NO: 164868 - DNA, 585 bp, Homo sapiens
tatatttacttctccttactctccttcaacaaagcgccaaggggaaattaccttgtcttgcttgtggctgtgttcccagtgcacaaaatgatgcttaataagtatttgttgaatgaataaagaatgaacaaatgatgggacttactgctcaatcactttggcasaatctcaaggagcataacccaatataagacaacatgagaaataaaagaaatgcaggcatctaagctcttgagagatttcagactaatggagtggggagtgtggggaaaggaaagatagatgtagagtcagaatctctgtggcatgcttatagtttgacctgagttcaaaatgatgtgggtgcctccccaactgagaaatactactgtcatctaccatttgtctattgctttactgtgtacacactagagtgtttctgcacgctatttctttgatgatgtatgtgaaaattgatatgaaaagctgaacttacaaaatagaccaattaaagggtgactgtttgcattacagaagaattctttgtggtataaaaggattagctgtggggtttctttaaatagcatctcccctagtgcattaaag

SEQ ID NO: 164869 - DNA, 570 bp, Homo sapiens
agcccgagaacctggacccagttatatcaagcagatggtcccaagcaagacaacatcctttaatgaagaagcatttgcaattcatgagaattcatgatgtccatttctttccctctccaatgttctgcttgtcaggggtcccattgtgtggcctgggagcatgatgaattaggcaaaccccttctggtttgagacatrctcttgcactgatgaaaattaaaagtattatctcacagaagatcaagagattcagttctctagagtggagacttctgccctccctcctatcggcctggtgataaggctgagagtcatcatctgtgtcaccggcatttcccagtatgtgacttggctctgaagacccagagctgtgaaagaacttactttctcctccatttgattcctgcgtcattcaccttggggtcattttgatcctttgccaggatgatgggcaggttgagactcaggaaagactattatttgcaggcaaaatattctggctggataccagcaaggttggattccgcttttgatgtccagtatgacctagggcaaataacacacacacac

SEQ ID NO: 164870 - DNA, 566 bp, Homo sapiens
aagcctccatggaacctacttaggaagtaggaagaataagctagcggaggcagyagagtggaaggaggagaaatcacgtggtaagggtttgtaaattaggggctcctttcacgcacatccagaagatgtcttggaggtgctggggacaatggtgccatcggagtgtcaaggagaggagctgttctgggagaccacaggaagatgggcagttccttttagaccaggaggtgttagctgacagtagaccacgctgtgaaaacgttcagctggtccttgatgaacacaagccacgtgaactaaaccaactcatactctcagggtttgggggtgtcttagtctgtttgtgttgtctgagactgggtaattgataaagaaagagatttatgtagctcacagttctaaaggctgtaagaagcacggtgccagtatctgcttctggtgagggcttcaggaagcttccactcatggcagaagaggaaggggaaccggtgtgtcccatgatgagagatggagcaagagagagaaaagaagatgccaggctcttttcaacaagcaattctcttggg

SEQ ID NO: 164871 - DNA, 598 bp, Homo sapiens
caacttcttttattgtcacggcatctcctttcctcagtgcctacgtagctagtttccatgtatcctgatttcaacacacattttccagtccttaccatgactcacaccataattgttaactaaaacaaacacctcktcttttgtaacgtaagtttccaacaggaaaacaccaccagccatttttttccttgaatatatatcactcttagtccaagagtgagttccaaatttgctatatcagtggtttaatccaaccataaaccaaaagcaaacacaagtatgtgacgttgctcattgtatgctgtgcatacgcactttatatgctattaatactctgcctcatccaacttatgtctaatggttaaagagttctgtcagtcactacgtatcactcagagtggactaagttatgctgcagtaacaaatgacctccaaatcttactcagacaagttcatacctagcacagatctcctgaaggctctgctgcttgccttccacactctgggacccaggctggcggagccgccattactggaacagtgccaagttgtcatggcggcaaggggagagacagcatggtacatggcagaccaactc

SEQ ID NO: 164872 - DNA, 598 bp, Homo sapiens
caacttcttttattgtcacggcatctcctttcctcagtgcctacgtagctagtttccatgtatcctgatttcaacacacattttccagtccttaccatgactcacaccataattgttaactaaaacaaacacctcgtcttttgtaacgtaagtttccaacaggaaaacaccaccagccatttttttccttgaatatatatcactcttagtccaagagtgagttccaaatttgctatatcagtggtttaatccaaccataaaccaaaagcaaacacaagyatgtgacgttgctcattgtatgctgtgcatacgcactttatatgctattaatactctgcctcatccaacttatgtctaatggttaaagagttctgtcagtcactacgtatcactcagagtggactaagttatgctgcagtaacaaatgacctccaaatcttactcagacaagttcatacctagcacagatctcctgaaggctctgctgcttgccttccacactctgggacccaggctggcggagccgccattactggaacagtgccaagttgtcatggcggcaaggggagagacagcatggtacatggcagaccaactc

SEQ ID NO: 164873 - DNA, 510 bp, Homo sapiens
cagagtttgcagctagaagcggttcaagggatggaggactctctgggagctggagtggtacgctgcaaagaacctaaatatgccataacttcctttacttccctctccaagaatttccaattgctcttccagcctattctgcctgacaggttagaaagttttcaatagttttcaatagaggttcgtttacttgcattgaattatctcatgaaggtcagcttgattygggcacattaaagacagagtcggaagaacacatttccctaagttttattctaatgtacaacacatgtgatcatttgcgatggggtctaggcagacaaggcaggtaacagggagtccttccaaccaggggttggaacaaaggaggcttgatttggtgactcttgagacatttggctcactgctgtgatgctgtgagagattagctgtgcaatgtttgggctccttaaaaggaagtttatttaaaataaaacttacctgcacgtatgtaacactgtagacacagat

SEQ ID NO: 164874 - DNA, 438 bp, Homo sapiens
ctgctcatcatctttaaagagtttgtgggcaatcagatctactttagaacagttgccagtcttttggcccaaagaacaaacatggcatcatttgctgcattgtctacggattctaggcatctgcaaagcccgtgctgaatactgaaaatacaaaatgcagaacactatgcatgagaaaaaagtaataaaaaaagacagctcagagtgaaatgtttcttaggccgaatgtagaaaaagttgctgataaggaacatagtgggraaactagtcaggatttgcagtgccctggtgtcgggtatgggagccttgtctagtcttgtgtctaggcaaatgagtagcctctgagcactgggtgttttctgtggttttcctctttggggaaaatactctgggctcatctccacagttagaggggtcgtgttgcttaatgtaaacact

SEQ ID NO: 164875 - DNA, 507 bp, Homo sapiens
agtcccagtgattatttttaaagtgtcattgattgttttcccaattatcaaaataatatgcctttactcactaaagagaaaaaatatagaaaagtagaaaatatgatttagccatactcctattactactttgttcgtcttaacaagatagaggttataatgttctcacaactttatattatgctttttagtattgacattaaacagtagacccaaatcatgaaatattctttgagataaagtatgttagtggctctaatggaaaacagcttaaatttctaacaataaattatgtatgaaagaacattatgtagcagttaaaatgcttttctcgaagactattccataacataggactcccaaataatattaaatttttaaaagcataaaatataatgrtatgtatactataatccagatatactatcactgaacaaaaactttaagtgaatctctaattgtttaatagtatcacttaccagaagaagaattaacgggtagagggga

SEQ ID NO: 164876 - DNA, 438 bp, Homo sapiens
ggcgtttcatgatacagactaaaaaaataaaggttttggtctcaaatattgtttattttaatttagtgacagcaatgatgaagcagcctatttaagagataagatggtcatatggtttggatctgtgtccctgcacaaatctcaagtcaaattgtaatccacaatgttgggggtgggkcctggtgggaggtgattggatcgtgggggtagatccttcatgaatggtttagcaccgtcccttcggcgctgttctcaggatagtgaatgagttctctggagatctggttgtttaaaagtgtgtggcaccctcccccgttctctcttgcccctggacccttcatttaagatacctgctcctcctttgccttctgccatgattggaagcttcctgagggctccccagaagcagaagccattatgcttcctgtacagcctgta

SEQ ID NO: 164877 - DNA, 438 bp, Homo sapiens
ggcgtttcatgatacagactaaaaaaataaaggttttggtctcaaatattgtttattttaatttagtgacagcaatgatgaagcagcctatttaagagataagatggtcatatggtttggatctgtgtccctgcacaaatctcaagtcaaattgtaatccacaatgttgggggtggggcctggtgggaggtgattggatcgtgggggtagatccttcatgaatggtttagcaccgtcccttcggcgctgttctcaggatagtgaatgagttctctggagatctggttgtttaaaagtgtgtggcaccctcccccgttctctcttgcccctggacccttcatttaagatacctgctcctcctttgccttctgccatgattggaagcttcctragggctccccagaagcagaagccattatgcttcctgtacagcctgta

SEQ ID NO: 164878 - DNA, 638 bp, Homo sapiens
gatttcagacattggacaatggacagcacaggactctgagccatgagaaaagagaaacaaggtgagcccacctatttattagctatgtgacactgggtaaattacttaacctctctgtgcctcggttgcttcacttagaaataatagggaataataatagcacttccttctttggactgttgtgagcagtggtagcagcagggaattgcttggcaactccycgcccctgcccccacaagtcatcctaaataaacactccatctggatgacaatggtgtggttgatatgcaaacgcagctcgaggcaagtacctggatctcctttcctggcaacctacaacctgtaagcacctcgaatgtataacagaaatcctagggaagccatggggttatgagggctaagacaatgctacgtatttagaaggattagcagagtgtcggacacatagaaagtgtgcaatagatcttaactttttaaattgctacctcagagaagtagataaagtaaaagaaaaatatccttcctccccgcaaaggtgaactcctcagaagtagccactaaatagttcattaatagttgtatctttccagatttttcctattcatataccaacatgtgtattatttatattttatata

SEQ ID NO: 164879 - DNA, 638 bp, Homo sapiens
gatttcagacattggacaatggacagcacaggactctgagccatgagaaaagagaaacaaggtgagcccacctatttattagctatgtgacactgggtaaattacttaacctctctgtgcctcggttgcttcacttagaaataatagggaataataatagcacttccttctttggactgttgtgagcagtggtagcagcagggaattgcttggcaactcctcgcccctgcccccacaagtcatcctaaataaacactccatctggatracaatggtgtggttgatatgcaaacgcagctcgaggcaagtacctggatctcctttcctggcaacctacaacctgtaagcacctcgaatgtataacagaaatcctagggaagccatggggttatgagggctaagacaatgctacgtatttagaaggattagcagagtgtcggacacatagaaagtgtgcaatagatcttaactttttaaattgctacctcagagaagtagataaagtaaaagaaaaatatccttcctccccgcaaaggtgaactcctcagaagtagccactaaatagttcattaatagttgtatctttccagatttttcctattcatataccaacatgtgtattatttatattttatata

SEQ ID NO: 164880 - DNA, 638 bp, Homo sapiens
gatttcagacattggacaatggacagcacaggactctgagccatgagaaaagagaaacaaggtgagcccacctatttattagctatgtgacactgggtaaattacttaacctctctgtgcctcggttgcttcacttagaaataatagggaataataatagcacttccttctttggactgttgtgagcagtggtagcagcagggaattgcttggcaactcctcgcccctgcccccacaagtcatcctaaataaacactccatctggatgacaatggtgtggttgatatgcaaacgcagctcgaggcaagtacctggatctcctttcctggcaacctacaacctgtaagcacctcgaatgtataacagaaatcctagggaagccatggggttatgagggctaagacaatgctaygtatttagaaggattagcagagtgtcggacacatagaaagtgtgcaatagatcttaactttttaaattgctacctcagagaagtagataaagtaaaagaaaaatatccttcctccccgcaaaggtgaactcctcagaagtagccactaaatagttcattaatagttgtatctttccagatttttcctattcatataccaacatgtgtattatttatattttatata

SEQ ID NO: 164881 - DNA, 518 bp, Homo sapiens
cacatacaatgctttttaatgatagattcaccaaatattcttgtcttctcacttatccttgagtwtagtgagcagaggcatttcctttcattagagatctgcatcctcagtatttattcctgagttcagccaagatgacccatcagctaccctttctggcatggctgcttgtgagaagcttctggtcccacaacctgcttagaggcagaaacctaggtgaggagtatagttcttattgctgggggtgagagcccacccagatcctctttccgtgctggttgcaggatttctattcaatcctgtccttagaggagaaccgccttggactggactgggctgaaatgctgaaacgtctctccagcagcaggtctgacatctctggaactcattggttgcattctcaacaaacgtctgaggctggagtatttttgctttctgcttctgcaacacggaggaaggaaaagcctcttgtgggaaggaaactggccagctggggccaggcccagagccccagcctg

SEQ ID NO: 164882 - DNA, 518 bp, Homo sapiens
cacatacaatgctttttaatgatagattcaccaaatattcttgtcttctcacttatccttgagtttagtgagcagaggcatttcctttcattagagatctgcatyctcagtatttattcctgagttcagccaagatgacccatcagctaccctttctggcatggctgcttgtgagaagcttctggtcccacaacctgcttagaggcagaaacctaggtgaggagtatagttcttattgctgggggtgagagcccacccagatcctctttccgtgctggttgcaggatttctattcaatcctgtccttagaggagaaccgccttggactggactgggctgaaatgctgaaacgtctctccagcagcaggtctgacatctctggaactcattggttgcattctcaacaaacgtctgaggctggagtatttttgctttctgcttctgcaacacggaggaaggaaaagcctcttgtgggaaggaaactggccagctggggccaggcccagagccccagcctg

SEQ ID NO: 164883 - DNA, 518 bp, Homo sapiens
cacatacaatgctttttaatgatagattcaccaaatattcttgtcttctcacttatccttgagtttagtgagcagaggcatttcctttcattagagatctgcatcctcagtatttattcctgagttcagccaagatgacccatcagctaccctttctggcatggctgcttgtgagaagcttctggtcccacaacctgcttagaggcagaaacctaggtgaggagtatagttcttattgctgggggtgagagcccacccagatcctctttccgtgctggttgcaggatttctattcaatcctgtccttagaggagaaccgccttggactggactgggctgaaatgctgaaacgtctctccagcagcaggtctgacatctctggaactcattggttgcattctcaacaaacgtctgaggctggagtatttttgctttctgcttctgcarcacggaggaaggaaaagcctcttgtgggaaggaaactggccagctggggccaggcccagagccccagcctg

SEQ ID NO: 164884 - DNA, 518 bp, Homo sapiens
cacatacaatgctttttaatgatagattcaccaaatattcttgtcttctcacttatccttgagtttagtgagcagaggcatttcctttcattagagatctgcatcctcagtatttattcctgagttcagccaagatgacccatcagctaccctttctggcatggctgcttgtgagaagcttctggtcccacaacctgcttagaggcagaaacctaggtgaggagtatagttcttattgctgggggtgagagcccacccagatcctctttccgtgctggttgcaggatttctattcaatcctgtccttagaggagaaccgccttggactggactgggctgaaatgctgaaacgtctctccagcagcaggtctgacatctctggaactcattggttgcattctcaacaaacgtctgaggctggagtatttttgctttctgcttctgcaacayggaggaaggaaaagcctcttgtgggaaggaaactggccagctggggccaggcccagagccccagcctg

SEQ ID NO: 164885 - DNA, 547 bp, Homo sapiens
caaaatgtcttgcattcaaatacaaataaagctaccacagtttatttatatatatatatatatatatgtgtgtgtgtgtgtgtgtgtgtgtgtgtgtgtgcatatatatatacataaagattatttaagtagagcagagcctggtctgtctggcctgccaccaaaaatgccaagaatgtttagaatcacttttgaaataactcgtttagaacatttttaaataaaagtaagtcttgaaatgaaaacagcaatttttytcagtccccactccccttagtttatgatctttattttttctaaatctagaccgccaaagggctgctttcagaaccatccatttaaaaaggaaagtaatcccctcccccaataataatcctaaagatttttggcaaggatattttaacaagaaaacttgacagaaacaaaagtaggttttgttcaaaagtcagtaaaggagcagaggaaatagacataccatgaagtcggcaggaagtgaaagaaaagcaaattctgtttagccaggaataggaaaaaaaaaaaaagagta

SEQ ID NO: 164886 - DNA, 450 bp, Homo sapiens
ccaataacacaaagaaccacttgacttgaattcaaccgaaacaataaatctagaatttayattcattatgagacttcaaacaaaagttaacatgctgtaggttattatatgagctttgttgggcttgctccaaaatgaatagacagagcccaagagaatcaggtggttttcacatatgtcttacctgtgtagagaaccagaatttagctttagaattttgctgctggaaatatgttttttatacagggttagactatcccccaagcacccttatatctttctccttcctttcatcatcaaacatttaaatgtttgatcttggacttccaaacatttaagtgtttgataaggaaaggaaggagaaagatgtctttattttctcgtcaccactcattacttaccctcttgcaacctagctttagttcccatccctttaaataaattgctttc

SEQ ID NO: 164887 - DNA, 450 bp, Homo sapiens
ccaataacacaaagaaccacttgacttgaattcaaccgaaacaataaatctagaatttatattcattatgagacttcaaacaaaagttaacatgctgtaggttattatatgagctttgttgggcttgctccaaaatgaatagacagagcccaagagaatcaggtggttttcacatatgtcttacctgtgtagagaaccrgaatttagctttagaattttgctgctggaaatatgttttttatacagggttagactatcccccaagcacccttatatctttctccttcctttcatcatcaaacatttaaatgtttgatcttggacttccaaacatttaagtgtttgataaggaaaggaaggagaaagatgtctttattttctcgtcaccactcattacttaccctcttgcaacctagctttagttcccatccctttaaataaattgctttc

SEQ ID NO: 164888 - DNA, 544 bp, Homo sapiens
ggtacccttcccttgcataattttttcatgtcctgaatatggggcttttgtgcatagaaagaactacttacagtactggagtttttaattaatagtttataaaatttttttaaatgttaaatctattttattaagttttaaattttaacttacaaatcttgttttctatgtaaaactctattaaaattataataaatmgcttcactttttttggggttaattacttaactaactcaagttaaaaagactgaaagtccttaaacaaccagttctatttacaaatttaattcctcaaacatttaaagatgcatcaatacatttaacagattttattctctgttatagaactttgaatgcccaacagagcaagctgttgactctaacaaggagaaactttccaagaacttacaaaactcttgtaaatctatatgcattacatttgcaaacatagtaagacaaataataaacataaataaatgctttgaaaccttcaaacattatgtacatgttttaaaaattggccaggcatggtggcttatgctgt

SEQ ID NO: 164889 - DNA, 589 bp, Homo sapiens
gcacttagaagaatttacataacaaaacttactgaaataacccttattttccccatatatttaccttcccacagcttgctgcccctaaaagtctaaaccctttatccttctctacaaatttattgttctttgtgaagatgctatacaagcccccaaattctatccctccatttgaattactcatctctgagtttctcccrcatgtatatgcattgcacatgttaacactctctatttgttttcctcttgtttatctctcttttgtccattaaattttcaggtcgctaatcagagaacctaggagtgtagaggaagagttttgttttcctcccctataggagcaagagaagtatgagtacccgatagatacagtgtgaggtggaccattgagattatttaatccaataacccaggtaggcattagttctcccatttagctgatgtgactcagagagatggagcaacttattaaagtcaacagcttaaagtagctaggctaaattttcaatctaagtctgattcttggtcaaactcatcttactgtaccaagttattttagtttgattcagagatggcaaagaagtttcta

SEQ ID NO: 164890 - DNA, 417 bp, Homo sapiens
aagtagtggggaagatcagaggacagtgaagcattttatcagagtcaaggaggagaatttctatggcttcacataaaggaggcaacatttgaattggctcttgaagggacagtggaaaaraaattctcactgggggaatatggaagggaatgaaaaaagtgcatgaaagcagtctggttagggatctgtggtttagaaatatggtaaaccctgtaacaagacacccacaataagtgaagttagatagagggattggtattggctgttgtcctcattcagcctccattcttaaacaggggcaggctgagtttcttatactgggggtagaggggtgagaatggtttggggtggagcctggcctgggaaggggcaggtaacccccctctttggaagtgggaaggcaaagggtgtgttgcc

SEQ ID NO: 164891 - DNA, 501 bp, Homo sapiens
agtctccttgataaaacatagcaaaacatgacatttactttactccccaataagttcctcatctccatctgaaaccacctcagcctggacttcactgtccatatcactatcagcattttggtcacaactattcarcaagtctttaggaagttccaaactttccctcatctttctgtctttttctaagccctcaaaactgttcaaatctctgcccattacccagttttaaagtgtcaggtatctttatagcaatgccctactcctggtaccaattttctgtattagtctgttctcacattgctataaagaactacctgaggctgggtcatttatgaagcaaagaggtttaattgactcacagttccacaggctgtgcaagaatcatgactgggaggcctcaggaaatttttaatcatggtggaaagcaaaggggaagcaagcacaccttcactacttcacatcaaaagagagagtgaagggggaagtgctacacacttttaa

SEQ ID NO: 164892 - DNA, 510 bp, Homo sapiens
agtctccttgataaaacatagcaaaacatgacatttactttactccccaataagttcctcatctccatctgaaaccacctcagcctggacttcactgtccatatcactatcagcattttggtcacaactattcagcaagtctttaggaagttccaaactttccctcatctttctgtctttttctaagccctcaaaactgttcaaatctctgcccattacccagttttaaagtgtcaggtatctttatagcaatgccctactcctggtaccaattttctgtattagtctgttctcacattgctataaagaactacctgaggctgggtcatttatgaagcaaagaggtttaattgactcacagttccacaggctgtgcaagaatcatgrctgggaggcctcaggaaatttttaatcatggtggaaagcaaaggggaagcaagcacaccttcactacttcacatcaaaagagagagtgaagggggaagtgctacacacttttaaacaaccaga

SEQ ID NO: 164893 - DNA, 674 bp, Homo sapiens
aagaagtgcaaaggcattatttcagcatatgcaggatttgcaaagaacaagaagagatggttcctggacatgaataggaagagatgcctggacagcaggctattccttcacctgctatttcttctccttgactatggctctctctgtctctgtctttctcttttctgatttaaactatttaaacttttctgagttattctatttttcataactgtgcaaatataatatatttcttatattattgccttactccatctttacaatctttctctcttttttttttttttttgatacaggatcttgctctgtcacccaggctggagagcagtggtgcaaatacagttcactgcagcctcgacctcctgggcttaggcaatcctcctaccacattctctggagtagttgggaccaccagcaagtgctgccatacccagctaatttaaaaaaaaaawttatagagttggggtctccctattgttgcctaggctagtgtcaaactcctgggcttcagtcatcttcctgccatggcctcacaaacagctgggattacaggtttgagccaccatgcctggcccatctttacaatcttattttcatgttacagtactaataaaaattaagcaaagcaggatatgggataaagtagaatattctaactgtatagctgtggtttg

SEQ ID NO: 164894 - DNA, 674 bp, Homo sapiens
aagaagtgcaaaggcattatttcagcatatgcaggatttgcaaagaacaagaagagatggttcctggacatgaataggaagagatgcctggacagcaggctattccttcacctgctatttcttctccttgactatggctctctctgtctctgtctttctcttttctgatttaaactatttaaacttttctgagttattctatttttcataactgtgcaaatataatatatttcttatattattgccttactccatctttacaatctttctctcttttttttttttttttgatacaggatcttgctctgtcacccaggctggagagcagtggtgcaaatacagttcactgcagcctcgacctcctgggcttaggcaatcctcctaccacattctctggagtagttgggaccaccagcaagtgctgccatacccagctaatttaaaaaaaaaaattatagagttggggtctccctattgttgcctaggctagtgtcaaactcctgggcttcagtcatcttcctgccatggcctcacaaacagctkggattacaggtttgagccaccatgcctggcccatctttacaatcttattttcatgttacagtactaataaaaattaagcaaagcaggatatgggataaagtagaatattctaactgtatagctgtggtttg

SEQ ID NO: 164895 - DNA, 487 bp, Homo sapiens
taccatctagaaaactcagagtgcttttgtagcaaacttatttagaaatcatcaaatgcagcacttcaggaatttaaaaactgtgtctttacaaccattttagatggtaaataggtcattgatatggcatttaaatattgtccacactgtgagaaaccaattctattttcaattataattcaagtctaatttcaccaaggagaaaaatctcgatttcttcccactataactttagtattgccataagcctaacacacacacacacacaygcacacacgtgcacacacacttcaaaataataattatcagacttctaatgcttagcagttaactgtacctaaaaagattttagcaatttgggggtcattgaccaattttcttcttactgtttttttttcaaatttattattattttttaagttggcagatacatctatatgtgtagtaagcctcccacattcatgggttctgcatccatggactcaat

SEQ ID NO: 164896 - DNA, 523 bp, Homo sapiens
aatctgttagccatgttcccgagtctttgtggactcctaactcaggctatttctctttccacgtgaagtggaaaaccaaacataatcctcaaaatactgctcaccgggatgcttttgcttcacctcagtgcttcaatatcaccttgcaggaagagtactgtgcagcatttgtccagtttcacctgcttttgccataccaagcaaattggtaatgtcttttgttgtagtctttcaaacatagtttgtttttgttgtttctagtgctactgaggttttcttcacaaatattttatgtacttaaagtgtacagtataatgtttgatatatgtatacaytgtgaagtgattaccactatgaaactagttaatgtgtccatgatctcacatagttacttttatttgtgataagaacatttaagatatattctcttgcaaatttcatgtatcccatatgtattactaattaagatcaacatgctgtacatgagctcttcagaacttattcatactgcattccatactgc

SEQ ID NO: 164897 - DNA, 559 bp, Homo sapiens
accaaaaaaggagaatcataacaattcaattcatgaccccctctgagagaaccaagagcaaagaacatttacaaaattgtgtaggttgggttcccaaaaaagtcgtttctgctagattagtatgcaggatttgttggtgcatgctctagggaataacaactgtaacaaagcaatggatggagagagatattaacatgaacataattgaatcaaaggccagtattatagaaaattttgaggtaggggtggcctcaaagatgtcctaatcaaggtaaacagggtgaaactttgtacccttaattcaatcagtaacttgatgcaggcaaagataagctgggatgtagcatgcctgacaggtatggataagtttggtctcaaaataaggaaattattagattcagattgaaaggtattctgcaaagcaaatgrgagatgttcctcaaaatgttaatgtaataaaaagttaaagaagtactagaaagctgttcacgttaaaataaagcaaaatatcaactaaatttaatgtataactctagatttgatgctgaactccccaaaa

SEQ ID NO: 164898 - DNA, 523 bp, Homo sapiens
aatctgttagccatgttcccgagtctttgtggactcctaactcaggctatttctctttccacgtgaagtggaaaaccaaacataatcctcaaaatactgctcaccgggatgcttttgcttcacctcagtgcttcaatatcaccttgcaggaagagtactgtgcagcatttgtccagtttcacctgcttttgccataccaagcaaattggtaatgtcttttgttgtagtctttcaaacatagtttgtttttgttgtttctagtgctactgaggttttcttcacaaatattttatgtacttaaagtgtacagtataatgtttgatatatgtatacattgtgaagtgattaccactatgaaactagttaatgtgtccatgatctcacatagttacttttatttgtgataagaacatttaagatatattytcttgcaaatttcatgtatcccatatgtattactaattaagatcaacatgctgtacatgagctcttcagaacttattcatactgcattccatactgc

SEQ ID NO: 164899 - DNA, 501 bp, Homo sapiens
cttggaaacaatttaaatgtctaataatggatttagtactatagtaatctacatgataaaatgttatccctttctttcttctttctttctcttgttctttcccttcttcctctcttttctttttattttttctttctttctttctttttctttctctctttctttcttctttctttctctctctctctttcttctctctctttctgtctttctttcttcctttccctccctccctctttgtctctctctctccctcccttcttttcttccttcctccctttctttctttccttctttctttctttcctctcccytcccttccctttccctcccctcccctcccctcccctccccttccttcctgcttctttcttctctctcactttctcatcttcaatctactgaaagcaaagagatacccacaaaaaagacagacataattaataacctatcttaaaattgttttcctcagtgtgaaaaataagctgagattgcacttaa

SEQ ID NO: 164900 - DNA, 362 bp, Homo sapiens
tatcctttgtgattactaccatatatatgtctatgccacacccattctttctgattgcaatcactagatgacatcttagttgattctttgtattttatgaagtctttgatattttctctctaccacataattccaagcattggagtggatgatttcagtgttgatgataatgaacccaaaaccttagttctttctgctccttgacatccaagatttaaatgaagatttctttctatccaacctcaatcaccaaccctgtggcttttgttattattataatcagaaacaccaaactccaatacrttgctttctgtttacaggctgatatgatttggctctgtgttctcacccaaatctcaccc

SEQ ID NO: 164901 - DNA, 636 bp, Homo sapiens
tatcatgattcagggagttttcaaggttgccctatggtagccagaaacttgcagctcagaaattgcagatccctctctggttgctcctcagagggcatgcccagagtgtcctgaccaccagaattacttttggttttagccagcctctctttgactatctctttccttgatcttaccattaagcttcttactggtctgtgttattggtatcacagccagtggttatcctccccaaaatgcttacactgccattcccaaagtcccaactctgatctcattatattttatttaaaatttcgttctatattattaatataattaactaactctgccatatctagataaccaagcaataaactgtgtaagttttccaagattttctagattttctttacctccatatctaattaatgactagttcctgccaattttacctcttggatatgtttcagatctctcttcctccctagtcccactaccaccattctacctaagactatcataggtggtcttgatgcattcattcttggccacctttaaattmtctctccttcccactccattcagaacagctaatgtaaaatgtgaatcactataatcacaaaacctactaaacacattttaagggctttccct

SEQ ID NO: 164902 - DNA, 574 bp, Homo sapiens
catatgcatgcattctggggtgtgtgtgtgtgtgtgtgtgcacgtgtgtgtatgtwtgtgtgttctattgcatactatagtagaatgatctccagaatagattgcaaatatattttcattttcttttttgataaacagcagtatattataaatcccatttttcttctgtttttacttaatatgtctctgacatcaccccagtagtgcatagagatagttctcattcctttttaaagctgtgcagcattccataatgtgaatatataacactttattcaaaatttggggaaatagtaccttgtacatacataatttcacatgtttgccagtgtgtgttttagatacatgcctggaagtgaaattgcaggtagcctgcatatgttaattttgctaggtattaccaaaccagctatatccaagaatgattgctttctcaaagccttgccaaaagaatatggacattttaatgtagttttaactggtaattctcatattatgtgaaggtggagcatcttcttaagttagtgtctgtattagtctatcctcatgctgctaataaagacatacacaagac

SEQ ID NO: 164903 - DNA, 602 bp, Homo sapiens
tctgttctcacactccaaataaagacatacttgagactgagtaacttatagaggaaagaggtttaattgactcacagctccacatggctagggaggccttacagtcatggggaaaggcaaaggaggagcaaagggacttcctacatggcatcaggcaagagagcttgtgcaggggaactcccctttataaaaccatcagatcttgtgagacttattcacaatcatgagaacaacatgagaaagactcgcccacgtgattcaattacctccaaccagatatctcccatgacatgtgggaatcatggaagctgcaatttaatatgagatttgggtggggagacagccaaaccatatcagtgtccctttgtatttctttttctgtgaatttcagtaagaaattgctcagtgtaaagtcaaattcgctaaaatgacttaaaagctcctatctaacccagcctcattgacctcatcattcactctacttcagacacactggcatccttacggtgctttgaatacaacaaactcatgcacacctctgrgattttctcttcctgatctctccacctagtatacctttcccagatatctccgtgttgctc

SEQ ID NO: 164904 - DNA, 453 bp, Homo sapiens
cacttcccaacagtgtggctstgtagttgactaatctctctgattcccaacatccttgtcaataaagtgagaaaaacaatagtaactctctcatgcaatcactctggggattgaatgaaataacgaatataagatgcataatataatcaaagcatatcagaaaatgcaagtgaatgtaagttcttgttaatatgagtgctatcctggatactgtgattcaaagtctcaaatatgacagctgtcctttagacctagaagttagtaaattattgaggatttgaagaagagcgattttagaagtgtgctaagaacaagaaccaagttatgatggattggagagtgaaggaaaagacagaaatgcctgttgtcaaccttttcaaaatgtttggatgatacagggaaaaaggaattaaatggtaactatcaaaggaaatagattatataagcagagtt

SEQ ID NO: 164905 - DNA, 453 bp, Homo sapiens
cacttcccaacagtgtggctgtgtagttgactaatctctctgattcccaacatccttgtcaataaagtgagaaaaacaatagtaactctctcatgcaatcactcyggggattgaatgaaataacgaatataagatgcataatataatcaaagcatatcagaaaatgcaagtgaatgtaagttcttgttaatatgagtgctatcctggatactgtgattcaaagtctcaaatatgacagctgtcctttagacctagaagttagtaaattattgaggatttgaagaagagcgattttagaagtgtgctaagaacaagaaccaagttatgatggattggagagtgaaggaaaagacagaaatgcctgttgtcaaccttttcaaaatgtttggatgatacagggaaaaaggaattaaatggtaactatcaaaggaaatagattatataagcagagtt

SEQ ID NO: 164906 - DNA, 582 bp, Homo sapiens
tgcctgactggtcaattctgtaatctgacactggtctaccctcataccttgcttgcaccactgtaatagacayctcattaatctcctgcctctggtcatgccttattacagtcattcagccatagggtagccagaggtgtgtgtctaaaatgcaaatataattaaggtactcccttatttaagcccctttattgacttctcagaatctatgttggtgaactgtaacagctacctacttaggttctcttttaatcatgcagaatactaggccctacttcatagttactgattgaaaatttttggtgagactgggaaatctcttctggggtttggaaatttgcaatttgcatttgaactagaactctgcaaaactcttatgcctgacaaagattcagaatcactgaaagtagtaataaaaaagtcattaaatatgattactttgcttattcttctactattatgaactctttgctcaagccatgcttgattactcatattttctcatttcttttatgccttcttgcttttcacatgctatttcttctatcttgactgcccattcttatctttttaactggctaa

SEQ ID NO: 164907 - DNA, 525 bp, Homo sapiens
taaagtatatatatatatatatatataaaagaataagccagatacaaaagagtgaacgttgtatcgtttccttcctgtaagttaaatagattcaactaaactaccggcatggaaataaaagcagtgtttacctgtgcgtgtagtgcaggattgactacaggtgatcatraggtaatgctctgtggtgataaaaatattatggatctttcctggtgtatcagttacgttttgctgtggaacaaaccaccacaagaataagagacatccgtgtaattcaaccacttgtgcagggctcggttgggtggttctttggtcccctgtgagccgccttcagccaggaacatggctaaggtggcagtggccaagaaggctccacacaccggtctgccatttttgttggccattggcaaaggcactcctgtatgtgggctctctcctcctgttgtttgtcctgttttttttttacaggattcaggtacagaagcaggcttcttaagggctaggtctgaaactagcaaagtctta

SEQ ID NO: 164908 - DNA, 525 bp, Homo sapiens
taaagtatatatatatatatatatataaaagaataagccagatacaaaagagtgaacgttgtatcgtttccttcctgtaagttaaatagattcaactaaactaccggcatggaaataaaagcagtgtttacctgtgcgtgtagtgcaggattgactacaggtgatcatgaggtaatgctctgtggtgataaaaatattatggatctttcctggtgtatcagttacgttttgctgtggaacaaaccaccacaagaataagagacatccgtgtaattcaaccacttgtgcagggctcggttgggtggttctttggtcccctgtgagccgccttcagccaggaacatggctaaggtkgcagtggccaagaaggctccacacaccggtctgccatttttgttggccattggcaaaggcactcctgtatgtgggctctctcctcctgttgtttgtcctgttttttttttacaggattcaggtacagaagcaggcttcttaagggctaggtctgaaactagcaaagtctta

SEQ ID NO: 164909 - DNA, 525 bp, Homo sapiens
taaagtatatatatatatatatatataaaagaataagccagatacaaaagagtgaacgttgtatcgtttccttcctgtaagttaaatagattcaactaaactaccggcatggaaataaaagcagtgtttacctgtgcgtgtagtgcaggattgactacaggtgatcatgaggtaatgctctgtggtgataaaaatattatggatctttcctggtgtatcagttacgttttgctgtggaacaaaccaccacaagaataagagacatccgtgtaattcaaccacttgtgcagggctcggttgggtggttctttggtcccctgtgagccgccttcagccaggaacatggctaaggtggcagtggccaagaaggctccacacaccggtctgccatttttgttggccattggcaawggcactcctgtatgtgggctctctcctcctgttgtttgtcctgttttttttttacaggattcaggtacagaagcaggcttcttaagggctaggtctgaaactagcaaagtctta

SEQ ID NO: 164910 - DNA, 525 bp, Homo sapiens
taaagtatatatatatatatatatataaaagaataagccagatacaaaagagtgaacgttgtatcgtttccttcctgtaagttaaatagattcaactaaactaccggcatggaaataaaagcagtgtttacctgtgcgtgtagtgcaggattgactacaggtgatcatgaggtaatgctctgtggtgataaaaatattatggatctttcctggtgtatcagttacgttttgctgtggaacaaaccaccacaagaataagagacatccgtgtaattcaaccacttgtgcagggctcggttgggtggttctttggtcccctgtgagccgccttcagccaggaacatggctaaggtggcagtggccaagaaggctccacacaccggtctgccatttttgttggccattggcaaaggcactcctgtatgtgggctctctcctcctgttgtttgtcctgttttttttttacaggattcrggtacagaagcaggcttcttaagggctaggtctgaaactagcaaagtctta

SEQ ID NO: 164911 - DNA, 561 bp, Homo sapiens
taatagtacctccacatgagggctttggagagtcgattgtaaataaagcatttagcacaattaattagcatctacaatcaatattaactctaatcattggctattcatttatcatcatttayatacttacatttgaaaatgcatcttatcaaaaattcttaaaaatgccctggctggtttttggcactgaagcgctcattcatttaaaaacgtaagtggccatgaacaaatcaaatcacttcacctctctaacactaagtttcctcacctacaaaatgagaggatttgactagatgagggattctccatgactacaatggcaaattgtccacccaaaatgcataatgcctctgttcaaatatatatcctcttatacctcatagggatctcattactattatcttataccttctattaatcccattgatctaatccttggggaagattgatagtcctaagtctaaaagactaagaaaatgagcaagttgttttccaagtgacatcttccaggggagtgagaaatgattcatttcatcaatgattgtagatcctgcagccaaa

SEQ ID NO: 164912 - DNA, 561 bp, Homo sapiens
taatagtacctccacatgagggctttggagagtcgattgtaaataaagcatttagcacaattaattagcatctacaatcaatattaactctaatcattggctattcatttatcatcatttacatacttacatttgaaaatgcatcttatcaaaaattcttaaaaatgccctggctggtttttggcactgaagcgctcattcatttaaaaacgtaagtggccatgaacaaatmaaatcacttcacctctctaacactaagtttcctcacctacaaaatgagaggatttgactagatgagggattctccatgactacaatggcaaattgtccacccaaaatgcataatgcctctgttcaaatatatatcctcttatacctcatagggatctcattactattatcttataccttctattaatcccattgatctaatccttggggaagattgatagtcctaagtctaaaagactaagaaaatgagcaagttgttttccaagtgacatcttccaggggagtgagaaatgattcatttcatcaatgattgtagatcctgcagccaaa

SEQ ID NO: 164913 - DNA, 623 bp, Homo sapiens
tagttctgtagtggttttcacttacctatcctgtccctttttattcagcttgacacctgacccctgtggctggaatcctacaatcctrtactgctgtcgctccatcttctctgagggtgggtggagagaatggtcgagagaatggtctggctgtatagagtaaggaaggagaatgagggggctgctgctattttctcagttacaatttcattccaattttcaagcccaccccacattctggcctccagaggtaactggacaatcacatttctcttcatttcttcttcttgttgcaagaatctgcctgtttctgagtgtcatccctgtgcagaaagtgaggctctcctctctgctttggaggagcagcagccacgtgttcatcctccatgtttgaacacatcgcatttgctgacactgaatttctaattctctccatcttttgactgtatacttttgatattatttttactcttcttttcttggttttcaggaaagcagcagaaatgcatattttcaacccaccatatttaagcagaattcgctaacaacatctctacactcatcagctccattcctttgatcatggaaggaatgaataaacagagtttttgcagtgagtccca

SEQ ID NO: 164914 - DNA, 330 bp, Homo sapiens
aaccaggcaatttcttcaatactttgtttagaaatttcatccttcgtgatctgcacagcaaatcaccatagcacacatttatctacataacaaacctgaacatcctccacatgcacccctgaacttaaaataaaaattgggaaaaaaaagaaatttccttcatcaaatawccaattccattattcctaagttctacctttcaaaaaacacttgaatacaaacacaatttgccaaattatttgccactttatgagaatgattcttttgctacattgtccaataacatgtttctcatttctactggagactttatcaggatggctagtagtt

SEQ ID NO: 164915 - DNA, 542 bp, Homo sapiens
tgaaactttctctgtaactctcttctccttttccttatatctcaccagaaaaacctttgaaggtccattcctggcaatgtaaactttttctagtatgcacctcaaaactattctagcctctagttgtcacctagtttcaaagctacttccacaattttaggtatttgtttcaacagtacaatattcccaggactaattctatcttagtgcattctggctgattctatattggcgtacattgggtgrtctataaatcacagaaatgtattgcttgcagttgtgaagcctgagaagtccaagatcgaggcaccaggagatttggtgtcttgtatgaacctgcttcctagttcatagatgtcttcttactgtgtccttacatggtggatggggtgagggacatttctggatcttcttttataagggcactcatcccatttatgaggactccactctcatgacctaaccacttctcaaaggcccccatctccaaatagcatcccactgaggattaggtttcaacatgaatttgggggtcacacaaa

SEQ ID NO: 164916 - DNA, 542 bp, Homo sapiens
tgaaactttctctgtaactctcttctccttttccttatatctcaccagaaaaacctttgaaggtccattcctggcaatgtaaactttttctagtatgcacctcaaaactattctagcctctagttgtcacctagtttcaaagctacttccacaattttaggtatttgtttcaacagtacaatattcccaggactaattctatcttagtgcattctggctgattctatattggcgtacattgggtgatctataaatcacagaaatgtattgcttgcagttrtgaagcctgagaagtccaagatcgaggcaccaggagatttggtgtcttgtatgaacctgcttcctagttcatagatgtcttcttactgtgtccttacatggtggatggggtgagggacatttctggatcttcttttataagggcactcatcccatttatgaggactccactctcatgacctaaccacttctcaaaggcccccatctccaaatagcatcccactgaggattaggtttcaacatgaatttgggggtcacacaaa

SEQ ID NO: 164917 - DNA, 552 bp, Homo sapiens
agcctgttgctatcaggcaagccattgttcaggcctgggtgttcagggccacagcctggaaagagatgcagcttcctcacttcctgggcaattcactcggaatcgcattgcctctgtgaaaagaaaaacccagatcctggaaggggaaagccagctcctgcctkctttggccgcccacttagcttagggtgggcgtattctgatgagggggcaccatcaccctggcattgactcacgatcccagcaccaatgaatgcaggaaggcactgctctcctcctgtaactccatggtgcctgagatgacattcctttaataaacaaacaaacaaacaaacaaacaaacaaactccaaaatgtcatcctgatgctatcatatatttgatcttggtattctcttccaaaaaggatggggaaggcagggtgggatatatttcagcagccaccttggatttttagctttccttgctctgcctccaatgattagctgtgaggagccctcaaaatatattttaaaggacttcgtgtggctcacaggggcttctaacccagatc

SEQ ID NO: 164918 - DNA, 552 bp, Homo sapiens
agcctgttgctatcaggcaagccattgttcaggcctgggtgttcagggccacagcctggaaagagatgcagcttcctcacttcctgggcaattcactcggaatcgcattgcctctgtgaaaagaaaaacccagatcctggaaggggaaagccagctcctgcctgctttggccgcccacttmgcttagggtgggcgtattctgatgagggggcaccatcaccctggcattgactcacgatcccagcaccaatgaatgcaggaaggcactgctctcctcctgtaactccatggtgcctgagatgacattcctttaataaacaaacaaacaaacaaacaaacaaacaaactccaaaatgtcatcctgatgctatcatatatttgatcttggtattctcttccaaaaaggatggggaaggcagggtgggatatatttcagcagccaccttggatttttagctttccttgctctgcctccaatgattagctgtgaggagccctcaaaatatattttaaaggacttcgtgtggctcacaggggcttctaacccagatc

SEQ ID NO: 164919 - DNA, 552 bp, Homo sapiens
agcctgttgctatcaggcaagccattgttcaggcctgggtgttcagggccacagcctggaaagagatgcagcttcctcacttcctgggcaattcactcggaatcgcattgcctctgtgaaaagaaaaacccagatcctggaaggggaaagccagctcctgcctgctttggccgcccacttagcttagggtgggcgtattctgatgagggggcaccatcaccctggcattgactcacgatcccagcaccaatgaatgcaggaaggcactgctctcctcctgtaactccatggtgcctgagatgacattcctttaataaayaaacaaacaaacaaacaaacaaacaaactccaaaatgtcatcctgatgctatcatatatttgatcttggtattctcttccaaaaaggatggggaaggcagggtgggatatatttcagcagccaccttggatttttagctttccttgctctgcctccaatgattagctgtgaggagccctcaaaatatattttaaaggacttcgtgtggctcacaggggcttctaacccagatc

SEQ ID NO: 164920 - DNA, 601 bp, Homo sapiens
tttgtgtgtgacaaggaaggacagtggccatcctgctgggaccctgtggaaaatagacactggggaaaacctcccaaatgcaaagcgcagagtagaaatcgattgagtagacaccattctctcatctgtggtctctggccattccactgtttcacaggtaaagcagaagagtgatgagactaacatttcttgaacgcttactatgccctgcacttcgtatcattagcccctttaatccttacatccaccttctgaattaggctttctgaccccctttgaacagcagaggcagtgcaagctcagaaagggtaagtgagtttctcyaatcgcaaagctggaaaatggtaacattaggaatgaaaattaggcctggcatggtagctcacgctggtaatcccagcactttgggaggctgaagtggggggttcacttgagaccagaagttcaagaccatcttgggcaacatagggagatcccatctctaccaaaaaaaaaaaaaaattaaagttagctggacatggtggcccatgtctgtggccccagctactcaggaggctgagatcgcaggactgcttgagcctgggaggtggagacagcagtc

SEQ ID NO: 164921 - DNA, 589 bp, Homo sapiens
caaacaccagggtgagagcaagcatcagtacaggactgttctcttcaccagcttgctgtgacccactggactagtgcacttttttagctgctgttactcactgtgtaaaatctaatayagagagaaaattaaatctcacatgaaccaattctctcttgtgccttacacacacagctttcctatttactcattcctgctttatgaatatgcttcatagagaagcaaatcatcatctatcccaatgaggttgttttggtggttggaggtaggaaatataaagggtttaatggtgtcaaacacttagtagagccttcctaaattctggctctcattcatactatgccattattccttttaggaggataagtagtagttgtagttttgcaataatgagttgtctgacttctggttcagtcattttccagacacgctgcttcttattttttttaagactattaatctgcacagaaggggcagaaaaagtaacatcctgaaaccttggggaagcttgtgtaagctgatattcttgtagagggtcatcctgagagaatgaatcaggaagggaggctgcaaagaaatgcaaacacaa

SEQ ID NO: 164922 - DNA, 589 bp, Homo sapiens
caaacaccagggtgagagcaagcatcagtacaggactgttctcttcaccagcttgctgtgacccactggactagtgcacttttttagctgctgttactcactgtgtaaaatctaatacagagagaaaattaaatctcacatgaaccaattctctcttgtgcmttacacacacagctttcctatttactcattcctgctttatgaatatgcttcatagagaagcaaatcatcatctatcccaatgaggttgttttggtggttggaggtaggaaatataaagggtttaatggtgtcaaacacttagtagagccttcctaaattctggctctcattcatactatgccattattccttttaggaggataagtagtagttgtagttttgcaataatgagttgtctgacttctggttcagtcattttccagacacgctgcttcttattttttttaagactattaatctgcacagaaggggcagaaaaagtaacatcctgaaaccttggggaagcttgtgtaagctgatattcttgtagagggtcatcctgagagaatgaatcaggaagggaggctgcaaagaaatgcaaacacaa

SEQ ID NO: 164923 - DNA, 589 bp, Homo sapiens
caaacaccagggtgagagcaagcatcagtacaggactgttctcttcaccagcttgctgtgacccactggactagtgcacttttttagctgctgttactcactgtgtaaaatctaatacagagagaaaattaaatctcacatgaaccaattctctcttgtgccttacacacacagctttcctatttactcattcctgctttatgaatatgcttcatagagaagcaaatcatcatctatcccaatgmggttgttttggtggttggaggtaggaaatataaagggtttaatggtgtcaaacacttagtagagccttcctaaattctggctctcattcatactatgccattattccttttaggaggataagtagtagttgtagttttgcaataatgagttgtctgacttctggttcagtcattttccagacacgctgcttcttattttttttaagactattaatctgcacagaaggggcagaaaaagtaacatcctgaaaccttggggaagcttgtgtaagctgatattcttgtagagggtcatcctgagagaatgaatcaggaagggaggctgcaaagaaatgcaaacacaa

SEQ ID NO: 164924 - DNA, 512 bp, Homo sapiens
gtagggagctgggccaagagcaaaccccacctcagacacatcctcacatgcacagcccccacttcaamgagaagagtcctactgttatgtggctctcaggttagtcttccaggattgccttcttttgaaccagccttctctacctttctaccttctctaccttctaccttctgtactcttacacaccctgaaaaaagttcgacaccactgatctaaccccacccttttttggactgatgactcagctgaggccagagtttttatatggccctccccaggctatacagtgggttcactgtagagctggggtcctcatcccctgacagctgtgtttccactgcagagcatgacctgtcatcagtgaaagcttaaagagcaattacgaatcctcaagtcatatcatagagctcacagtggccttccccaggcccagagggccagggcatctcattccatcagccacttggccaggcacaatagttcaatggcagagagaactggtagaacaatag

SEQ ID NO: 164925 - DNA, 512 bp, Homo sapiens
gtagggagctgggccaagagcaaaccccacctcagacacatcctcacatgcacagcccccacttcaaagagaagagtcctactgttatgtggctctcaggttagtcttccaggattgccttcttttgaaccagccttctctacctttctaccttctctaccttctaccttctgtactcttacacaccctgaaaaaagttcgacaccactgatctarccccacccttttttggactgatgactcagctgaggccagagtttttatatggccctccccaggctatacagtgggttcactgtagagctggggtcctcatcccctgacagctgtgtttccactgcagagcatgacctgtcatcagtgaaagcttaaagagcaattacgaatcctcaagtcatatcatagagctcacagtggccttccccaggcccagagggccagggcatctcattccatcagccacttggccaggcacaatagttcaatggcagagagaactggtagaacaatag

SEQ ID NO: 164926 - DNA, 551 bp, Homo sapiens
tggcagcattccatctatgagttgattctatttcattttaaaatgctaagcagaaatgtacattcygtgctgttttataagttgctcatggttatcagggagacaaaagttcttagcaaaatgatcgctttgataatagatgtataagcagaaatgtcatcttccttccctatcaaggatacacggttgtagttgagtgtttcagtgataccactgttctgggatagcatctctgtggtccttttgagtttcttctctgggttgcaatctcacccttacacactgcattggaagtcaggaatgtaggtggacatagactcccttggaatttctcctattttttttttctgctgaggagaaaaatcttttccccaaaatcctcagtgggtctccccatacatctcattagtcagaatttggtttcatggccacctttagctgtcagagtgggaaagagaatgtctgactttctaagtctctgtattggggtataggcaagggaaaagaatataagtggtcaaccaataacagtggccacagttcccacggtg

SEQ ID NO: 164927 - DNA, 585 bp, Homo sapiens
taatgtagaaacagtgggagccttgagcttattttttctgcaactagacggtcccatctgggggtgatgggagataatgacagatcwtcaggtattagattctcagaaggtgcacgcaacctagatccctcaatgtgcagttcacaatagggttcacactcctatgagaatctaatgctgctgctgatctgacaggagatggagctcaggcagtaatgcaagcaatggggagtgcctgtaaatacaaatgaagttttgttcgcttgctggcctctacttcctgctaagcccttcattttttgctttttattctacccctgttaatttttttctcaaacctgtctatcctgtctctgtagtggatagttatagtggatagttactaattttttgcattctatcatttacttaacgaacggcagcattatttccctttaaggaatttcctctcccctgtttggtgcaagtctcggaggatgataaatcaatatattcttaccttctaacaaagatgtggaaaagatctctatgggcttcttatactgaagcgcttcatgtactgccttggtataaccaagagccagg

SEQ ID NO: 164928 - DNA, 585 bp, Homo sapiens
taatgtagaaacagtgggagccttgagcttattttttctgcaactagacggtcccatctgggggtgatgggagataatgacagatcatcaggtattagattctcagaaggtgcacgcaacctagatccctcaatgtgcagttcacaatagggttcacactcctatgagaatctaatgctgctgctgatctgacaggagatggagctcaggcagtaatgcaagcaatggggagtgcctgtaaatacaaatgaagttttgytcgcttgctggcctctacttcctgctaagcccttcattttttgctttttattctacccctgttaatttttttctcaaacctgtctatcctgtctctgtagtggatagttatagtggatagttactaattttttgcattctatcatttacttaacgaacggcagcattatttccctttaaggaatttcctctcccctgtttggtgcaagtctcggaggatgataaatcaatatattcttaccttctaacaaagatgtggaaaagatctctatgggcttcttatactgaagcgcttcatgtactgccttggtataaccaagagccagg

SEQ ID NO: 164929 - DNA, 526 bp, Homo sapiens
caattactagatttagcttcagagttgatagcctaacccagaattagtgaccactgttgattccccagatgatttttgtttgtttgtttttgtttttgtttttkttttttttgagatggagtctcgctctgtcttccaggctggaatgcaatggcgtgatcttggctcactgcaacctccacttcccaggttcaaacgattctcctaccccagcctcctgagtagctggaattataggtgcacaccacgacactcagctaatttttgtatttttagtagagacggggttttgccattttggccaggctagtctcaaactcctgacctcaggtgatcctcctgccttggcctcccaaagttttgggattacaggcatgagccactatgcctggccataaatttttaaaatacacctagaaaatatttttatttgagattagggaaatcaccatcggcgtttgtagagaattgatatatctgtcatacaagtgcgtaaatatgggcacctgatatacgtgataaaaac

SEQ ID NO: 164930 - DNA, 567 bp, Homo sapiens
acactgcaaatacagcaatgccattttttttctttaatgctttaatgcttttctttttttctttaaggatgaaatgtaatattctgttcttccagttcaaggtgcaattgtaaactttgcacccagctaatatttgaacaatatctgataatcaatattagttttccaggatcagcagaaaatttgttgctgtattaatagactttagtgaagagactactcttaatgagagaaaccattaggtagggatcaaaaggttaacagtgaacttragaatggtgttggtagatataatttggatgtcagaaaatttcatgtttctgcattctctacaattaaacagagacagaacattttaatctctaagtgacgttgggtaatttatttgatttttaaaactcaaaaacaataatctttaaaattttatatctcagtttcttcatctataaaatgaaatgagaatacccaccttttaaagttatgattttaaactagataatgcacacaaagcactcagctcagcatctggtgtgtacttctgtcagatgcgttttaaccagaacaact

SEQ ID NO: 164931 - DNA, 582 bp, Homo sapiens
tgaactgtgtcatgaggggtcacttcaaggacatctgtcatttcttttgtgatgcattccataatttttgttattttaaagttttggaacagcaagcctcctgccattgtgatttctttgttttaactctcccgagaaagccaaatgactgctattttcagaacaccagagcatggaaaagagtgttgtatgggtgaacctgactttcacaaggaaggaaaagtaaagtaaactgtggctttcagaagccatggcctttctttccctcagtgcaggaggctgtcagctgtcatgctgagagcagagtaaatggatactgaagcaacrctttccagggtttgtgcatgttcattaggggtcgatcatgagaggccttacagcagccattaccgaagccactctcaaatatcaaaactggggactgggattctgcaattgcagaaaaggataatcttggaaagaggcagaacagaagtaaagcgagtgggaggtaagatagggcagacattttagcctctaatcaagaacctccatttataatggcattttttcctgaaccttaatctgcccttggagggaaaa

SEQ ID NO: 164932 - DNA, 469 bp, Homo sapiens
tctctgtttggagcctcctgaggtatagagaagtgtggacccaccctgggttacctctggactggaaagtaaaagaaacgctgagaaccatgagagccccacatggcccaggagtttagaaggcctaagtgaagagagaaggtgtctgccctatatgtggagcagtcccaaggctggagtatggatggcgttgcccattacagcgaggtaagcatgggcaatcagggagaagctggtggtttgaccactcatgccactgacaggacaaggcacttcccaataggtcaagmgggcagagcaccaagcttgcaatgtctttgaaggactgtgcccgagagaactgcctgccaaggaaagaagaggatgggctgcccttccagcatgggagttgagggaggtggaaccaagagatcagctggacaggaagacatcaatcatgtcagggtggcccctgacaaatgcacccttg

SEQ ID NO: 164933 - DNA, 487 bp, Homo sapiens
ttttaaactatttgtgtctttatgcttaaaatagttttcttataggtaacatatacttgcatcttgcatgtcaactggattatttagatcacttactttcaatatgattattcatgtgtttaggttgaaatctatcatcttcctctttctcttctatttgtctcacctgttgtttcctttccccattttttgtcttctttttgattaaccgaatatttttcataatttcatttattgtcctttttgacataaaaaaactccttgtttcttcattttaagtggtttctttgttatcataatggtttatggcatatacctttcttttatygcaatttatgttgcgatattatgtcacttcacatatactataaaaaacttttgagagtatggctctatttctcttcccccagcctatgtctttgttatcatacattttacttttacacgttttaaatcccacattgtattattattatttttgtttaat

SEQ ID NO: 164934 - DNA, 506 bp, Homo sapiens
tagtctgttctcatgctgctaatagagagatacctgagactgggtaatttataacggaaagaggtttaattgactcacagttccacatggctggggaggcctcacagtcatggcagaargcaaaggaagagcaaagtcacgtcttacatggcagcaggcaagagggagcatgtgcaggggaattgtgtgcatcccatttataaaaccatcagatctcatgagacttattcactatcatgagaacagcatgggaaaggcccactaccatgattcaattacctcccactgggtccctcctatgacacatgggaattatgggagctacaattcaagatgagacttgggtggggacacagccaaaccatataattccacccctggctcctcccaaatctcatttcctcatatttccaaaccaatcatgccttttcaacagttcccccaatatcttaactcatttcagcattaactcaaaagtccacagttcacagcattaactcaaaagt

SEQ ID NO: 164935 - DNA, 685 bp, Homo sapiens
ccccatggctaaagagttgctgtggctactggcccccagaggatggtgcactctacaagtggctctggcctcaagatggtgctgtgcagcagcagcttggcttacaragaatggtttccgggtggagagtgagtctctcatgctcctaatctggggaatgcagtgagtgaattctgggagcttcctaaagtgggctcagggcttgaaagcactgtgggattctcttgttctaagggttgtaggtgttggcggtagcattgggggctactgggaatcttctgtttacctcttcacctacaatgagaagtcttttctggctccaggcagatcgtatctgggcagacgagagacggctgcagaggctgcatgcttctacactaccctcccggatttccaagcactacaggtgtatcttcactgccccgctgagttctcacttgcttgctttgacactccagtgaaattccagctgtttatttgttgtcttggttctttctagtgggagtgatgaatgccaggcatcgctagtgagtcatcttgctaacgtcactccaaattgtatatttttaaaatgtgtgattccgacaatcacccaaatttgtatgagtacgaattgaagatccctctaattgtataattcaatttcatgaaacatttattgtcaacccatctgtgggggaaaaaa

SEQ ID NO: 164936 - DNA, 685 bp, Homo sapiens
ccccatggctaaagagttgctgtggctactggcccccagaggatggtgcactctacaagtggctctggcctcaagatggtgctgtgcagcagcagcttggcttacagagaatggtttccgggtggagagtgagtctctcatgctcctaatctggggaatgcagtgagtgaattctgggagcttcctaaagtgggctcagggcttgaaagcactgtgggattctcttgttctaagggttgtaggtgttggcggtagcattgggggctactgggaatcttctgtttacctcttcacctacaatgagaagtcttttctggctccaggcagatcgtatctgggcagacgagasacggctgcagaggctgcatgcttctacactaccctcccggatttccaagcactacaggtgtatcttcactgccccgctgagttctcacttgcttgctttgacactccagtgaaattccagctgtttatttgttgtcttggttctttctagtgggagtgatgaatgccaggcatcgctagtgagtcatcttgctaacgtcactccaaattgtatatttttaaaatgtgtgattccgacaatcacccaaatttgtatgagtacgaattgaagatccctctaattgtataattcaatttcatgaaacatttattgtcaacccatctgtgggggaaaaaa

SEQ ID NO: 164937 - DNA, 179 bp, Homo sapiens
tttacatattatttttttgagtttttttaattgagatgttggcagagctgtattccttctgaaagttctaagagacaacctgtgcccttgcctcttacagcaggtagaggttacctgmacttcctggctcttgctcacttcctccatcttcaaaccatcatcctcttcaaatctctctc

SEQ ID NO: 164938 - DNA, 550 bp, Homo sapiens
aaaccttactgtcaaaggttaatatgtagatgaatacagaataatctaatactctaatggtggtgtttaaatcacttttaattctgataaagaatttaaaaaatgaaagtataaaaataaccatctaaaatatgttaatggataggcaatataaaaacacataatttggctgggcacagtggctcatgcctgtaatcccagcattttgggaggccgaggcaggtggatcacctgaggtcgggagttcgagaccagcctgagcaacatggagaaaccccrtctgtactaaaaatacaaaattagccagcttggtggcgcctgcctgtaatcccagctactcaggaggctgaagcaggagaattgcttcagccaggaggtggaggttgcagtgagccgagatggtgccattgcactccagcctgggcagcaagagtgaaaccctgtctcaaaaacaaacaaacaaacaaacaaaaacataatttgtgacatcagtaactaccaagagtgtgtggagaagtagaagtttacagtttctgtatgtgattaaagt

SEQ ID NO: 164939 - DNA, 568 bp, Homo sapiens
acatgtatacatatgtaacaaacctgcatgttgtgcacatgtaccctagaacttaaagtataattaaaaataaataaataaataaaaaattaaaaaaatattattgtagactagaaagaagtaattcatattacacagtgacaaaatgtttggaaatcactaacaatcttgtggaaaccaaactatwtaatgtgctaaataagtttgtggcttttggtgaagagttggagaaattactgatgtgaattgaatgcttctgattgcatttaatatgattaatcaagaaatggaactcacaagaggaactgatacatactaagcagggattaaagggaacacacactctggacttgaagagttgaaagatatggctgattttcatttacagttggggaaagataaaaccataaaggtctttaagcaacaaagtattattaaaacccagattattgtataggatcaaaaatagtgtgttgcaatcacagcctttgttaaaacgtctgaattgatttaactgtgaaaaaatatcactcagaacaaaaaaaaaaagcaaaaacaaaaactaaag

SEQ ID NO: 164940 - DNA, 593 bp, Homo sapiens
cagttagtacttttgatgaagagaacaaagataattgatacataaagagacatatctgtaatcatgtccatcgaatgtaagatataggtatttctgaagtagtaattttggtgatttttattttctttcttttactttcctgtgtttcattatttctgcttttgctattctcttttataatgaatatgaatcatttaaaaattaaatcacccttctaaaatgaattgactgctttggaaaggagtgaaacagccaagattatcaggaaagcctaggagctgcatgctggycctctcttcatgtctgggtgctcttccagtcagcaggggctcactagaggctctctctggacctcacattcaactgtgcaacaaatggctttgcctagttgatttcttaactaccttaaggctctgtgctctgtggttctaactagatatccagtgacttggagaattaaatcgtggttgaaataataaagagaaaatgcactctggaaattgtggaagacaaataatcaagattaaaaaatatattttggccgcctttcaaaatttatattattatattgattaaaagagaacatatgaatt

SEQ ID NO: 164941 - DNA, 593 bp, Homo sapiens
cagttagtacttttgatgaagagaacaaagataattgatacataaagagacatatctgtaatcatgtccatcgaatgtaagatataggtatttctgaagtagtaattttggtgatttttattttctttcttttactttcctgtgtttcattatttctgcttttgctattctcttttataatgaatatgaatcatttaaaaattaaatcacccttctaaaatgaattgactgctttggaaaggagtgaaacagccaagattatcaggaaagcctaggagctgcatgctggtcctctcttcatgtctgggtgctcttccagtcagcaggggctcactagaggctctctctggacctcacattcaactgtgcaacaaatggctttgcctagttgatttcttaactaccttaaggctctgtgctctgtggttctaactagatatccagtgacttggagaattaaatcgtggttgaaataataaagagaaaatgcactctggaaattgtggaagacaaataatcaagattaaaaaatatattttggccgcctttcaaamtttatattattatattgattaaaagagaacatatgaatt

SEQ ID NO: 164942 - DNA, 494 bp, Homo sapiens
aacaaaacaaaaccaaaaaaagccgggctcagtggctcatgcccgtaatctcagcactttgggaggctgaggtgaatcacctgaggccaggagtttaagaccagcctggggaacrtagtgagactccttctctatagaaaatttaaaaattagccaggtgtggtggtgcatgcctctagtcccagctactcaggaggtgggaggatatcttgagcctaggggtttgaggctgtagtgagctgtatttgtgccactgcactccagcccaggtgatagaatgagtctctgtctctaaagaaaagaagaaagaaattccaaatatttgcaaataaagtctgctttgcgccctccagaaccagtgaccagcatcccacactgctagtgagggctgtcctttttaagaccactgagagccagggaagggtagggcaggaagaaataaaaatgctacaaagcttcctaccactctaaagtgaccctttccttgattcagc

SEQ ID NO: 164943 - DNA, 585 bp, Homo sapiens
caagtagtggacacgtcttagaaataatttttgcatgttctacctaaaataggacccagaacaacaaaataagagcaattaaatagtaaatagtagcaagataatttaataattgagagataacacaaattaaaatggaacattaagaartgtaataatgatgcccactaataataatgacataggtactttcaaacatttaatatgagaatgtaaatgtacaaatgaatataagtgtgccattgaatacagttttcataatgccatacataagaaggcacctgtgtctgaagtaaatttatgtcaataacttatgaattatttccaaaacaaaacaattgaagaaaggataaaagaagaaaggcaggaaggaacaaagaaaggaaggagaaaagaaagcaaacgcatgttttgccttcatggctacgattatcctgtgcattcacacttttctacttaaaatttaagccatatattttctatgttagtataagacttcatgatcacttctattagctgtatattttgatactgggtagatgagatataggttgatgactttttaatttctcagtaactacaata

SEQ ID NO: 164944 - DNA, 585 bp, Homo sapiens
caagtagtggacacgtcttagaaataatttttgcatgttctacctaaaataggacccagaacaacaaaataagagcaattaaatagtaaatagtagcaagataatttaataattgagagataacacaaattaaaatggaacattaagaagtgtaataatgatgcccactaataataatgacataggtactttcaaacatttaatatgagaatgtaaatgtacaaatgaatataagtgtgccattgaatacagttttcataatgccatacataagaaggcacctgtgtctgaagtaaatttatgtcaataacttatgaattatttccaaaacaaaacaattgaagaaaggataaaagaagaaaggcaggaaggaacaaagaaaggaaggagaaaagaaagcaaaygcatgttttgccttcatggctacgattatcctgtgcattcacacttttctacttaaaatttaagccatatattttctatgttagtataagacttcatgatcacttctattagctgtatattttgatactgggtagatgagatataggttgatgactttttaatttctcagtaactacaata

SEQ ID NO: 164945 - DNA, 585 bp, Homo sapiens
caagtagtggacacgtcttagaaataatttttgcatgttctacctaaaataggacccagaacaacaaaataagagcaattaaatagtaaatagtagcaagataatttaataattgagagataacacaaattaaaatggaacattaagaagtgtaataatgatgcccactaataataatgacataggtactttcaaacatttaatatgagaatgtaaatgtacaaatgaatataagtgtgccattgaatacagttttcataatgccatacataagaaggcacctgtgtctgaagtaaatttatgtcaataacttatgaattatttccaaaacaaaacaattgaagaaaggataaaagaagaaaggcaggaaggaacaaagaaaggaaggagaaaagaaagcaaacgcatgttttgccttcatggctacgattatcctgtrcattcacacttttctacttaaaatttaagccatatattttctatgttagtataagacttcatgatcacttctattagctgtatattttgatactgggtagatgagatataggttgatgactttttaatttctcagtaactacaata

SEQ ID NO: 164946 - DNA, 580 bp, Homo sapiens
attgttcattttttaactgaagttttggttgttgttgagatgtttgagtgcctagcgtattctggatattaatacactactcggtgagtatttcgcaaatattttatcccattctgtagattgtcttttcactctgttgatttatttactgtacagaagttatttagtttgatataatctcatttttcatgtttgcttttgtttcctatgcttttgaggtcttacttataaaatcttttcaagacccatcttctgaagcatttctctaaggtcttcctccagtctctgttccattttgagttgatttttgtaaaagacaaaatgtgtacatctaatttcattattctgttcatgaatatccaattgtcctagcactagttattgaaaagacggtcctttcccaattagtgttttggcacttctgtcaaaaatcagttggctgtagctatgtagagtaatttctgtgttccctattctgttccatttgtctacatacttgtttttgtgctagtagcgtgttgtttactaaagatttgtaacatrttttcagatcttattgtgtgatgtctccagccttgtt

SEQ ID NO: 164947 - DNA, 371 bp, Homo sapiens
gttcttgagttttgttctgargtgcaattaagttacttggaaacagttggatgcctcagttattgctttgttaggcaggcccacagctgtgcttagaccagagatagttttgccccactacagagtcaaaaacatgagtgctctattcaatggaaacaggaactattctggcctgtgtgaactctgagtattgttccttctaatcttttcaggtttttttttttctttgtaatgtccttacaaggttgttgtgatcagtacttagctaaagacttgagggggacattctgagatcttcagaactctttctctacgtagctctatgtctcatactctgccctgcagatctttgccactttggcctttttgac

SEQ ID NO: 164948 - DNA, 371 bp, Homo sapiens
gttcttgagttttgttctgaggtgcaattaagttacttggaaacagttggatgcctcagttattgctttgttaggcaggcccacagctgtgcttagaccagagatagttttgccccactacagagtcaaaaacatgagtgctctattcaatggaaacaggaactattctggcctgtgtgaactctgagtattgttccttctaatcttttcargtttttttttttctttgtaatgtccttacaaggttgttgtgatcagtacttagctaaagacttgagggggacattctgagatcttcagaactctttctctacgtagctctatgtctcatactctgccctgcagatctttgccactttggcctttttgac

SEQ ID NO: 164949 - DNA, 588 bp, Homo sapiens
ccttagatttagatatataaatgtaaacaaaaataaacattctcaccaggcctaggtctcatgcccaccttgatgctaagagagcaagagacagccccacatgaacagaggcggggctttagggaggggggagtattccaaagaataatcaaggttctctcagtggaaaatgggaagagatgctgcacaggcaggagagaagaaacaacggatgcctcccaccgtccactgtgaagaacggctgattgctttaggttttacatggaacagcaatgtcactggttagttctgtggtcacagctgcctctgggaagtgtgttgttgacaaggtgcagtgatttaagaagtctttatgtcttcttgttaggcctgtcctggtgcctcaacttcttcgagtcactagtaacttagtcctgtgggttaaagcactgaccctttttagaaagctgctaatcccggggggagcgatgcattatacatctagctccagacgctgggggtctccagawgcaggcaggggtaactgcaacctatttttagtattttagaaaaatctgatatatctaatacaaacgaactacaatgtta

SEQ ID NO: 164950 - DNA, 411 bp, Homo sapiens
cttacttgatcttcccattattaaaggcgagtcctgcctacaaattaccaacgtggcttctgctggcctgaagagttatggtttttaatctcgagcagttaaaaacaaccaggggttttaaatgacaggccagacaaatgacaggccagtgaggcagaatgcttcccattctgcaaaagccaagagaaaaataacacagcataagcactgaccacattgtcatgttaagtggtaaaataacttcaattacaggtaaattacaggtaatgaataatttataacctggaaatgtctctgagctcagtgtgaagatagagaacactgcttcctgtgagcataatatggttttgcttattgatgttgaatcttgctaagatagcaatagttaaytaatccttagtcatagtgaaa

SEQ ID NO: 164951 - DNA, 384 bp, Homo sapiens
gtgttttcaagcttctccagataatcttagaaatgtaagtcgagaaagggaatcatacaaacatcatgtcttaatttgacttagtacctagtatgggtttaacataacactgtcataataatatggtttacacacatgcatacagacttaccatccattcattgattcactgggttcctgctatgtgccaggcatttcctagggcactaagaaaacagcagcaaacgaaraaggctgagttcccctccgggaggggtcttacaccgagcaatcccagaatgtcggctggcaagaaggggtgagtgaggaatatgctggaggcagaatggggcccctagcctagagtgcctatgagaagacccctgttgggccctgacaagggaa

SEQ ID NO: 164952 - DNA, 476 bp, Homo sapiens
atagagaatcatcgtttcacatccgtcaattcaatttggacagcaaatccatttaattaaaggtaaactgtggtttaaaggagatgcaaaaacatatacaattataaaacaacttcatttaaccaggaaacacttaattgactacaaactgggtaatgattttgaaaaatatgagactaaaagaaacacatactcgcagaytaaagcaaggagaaaaccatataacttttttctccaatcttattgaaggcttattcagtattttaaatactaagttctgcattttataacttagagtaatgaggtttcttatataaaacttcatatcatatgccaaccccaacctctgtaaactttattctgatagtattcctgcaaatacatacatacacaacatatttacacatgcacatttttgtttaaggctagctattcccccccccacacacacacacatttgcctgcgtgagtaacca

SEQ ID NO: 164953 - DNA, 443 bp, Homo sapiens
tggatcctccagccccaggcaatccaatgacctgagccccagcctacaccttgactgcaagcccatgagagacactgcaccagagcctcccacccaaaccatactgactcccggctctccaaaactgtgtaaggtcactaatatttgttattttaagctgtgagatttgggggtaattctgtacctctgacttaggctctaattctggcatccagttctggaggttccagagagaggtacttctagcctagaaacttaaaggtgtaggtcaaagttccttatagtccaggttctggaaacttctacccatgggktatttccccaagtatggtacaaaagatgattgtagatggtgtaaagatgagcatttattttcataacacttctgaatttagtttactatgtattggaaagtgctggttttccactttggaaaagtgatg

SEQ ID NO: 164954 - DNA, 558 bp, Homo sapiens
ggttataggctgtggtgggattcagttctgtgtgggtgtaggactgttttcttgtgggtgctcaaccaggtctggtccttagattctagagccactcatgctgtctggcttctcacccctttcaaagctggcagcagcaaatcaaaagctgtgagtctttttatcccctaccttcctcatctctcctgcttttctctttcactgaatctctctgattctagccacagaaatttctctgcttttaagggccaagtggtcagtttgggcttgtctggaaaatccagaaattgcatctacaaaaccccattaaagcagtacctagattagtgtttgtttggataaccagtgatgggaatctagggggacatctttagaatcctgccaaccttacctggctgtgaactacctgggagtgaggatcccctctcccccaagaagagaggaygggccacttgaggtctcagcccactgcaaggtcattgtggggtagagatcagaactggtggcagccccttaggcagctcagtcaccatccccaccccagccccttagttgtca

SEQ ID NO: 164955 - DNA, 588 bp, Homo sapiens
tggatttagagtcagatcgcacaggttaagggctcagacccacaagactgcacccatttcagacactaattccaagtagtaggttgtcacctatatgtcttactgattggctataaattggggttcccatgacccactctttgggtttggttaatttgctaggaaggctcacagaactcagagaaacacatttacaagcttatgagattaatagaggatgtgacaaaggacagagatgaaattcaggtaaagaggcgcaatagggtgaggtctggaagggtcgtgagtgcaggagctcctgtcatcagggagttggggtgcaccaccctcccagcacacagatgtgttcaaccctkaagctctctaaaccccatagttcaggtgttttatggaggcttcacccatcatgtaggtgtgatcaacaattaactcgataaccagctcctctccttttcccggaggttgaaagatggaggtgaacgttccaagcttctcattacggtgtggcctttctggtgatgatccccaatccaggagtccaccaagagtcacctcattggaacaaaagacgctcctactgcccaggaa

SEQ ID NO: 164956 - DNA, 588 bp, Homo sapiens
tggatttagagtcagatcgcacaggttaagggctcagacccacaagactgcacccatttcagacactaattccaagtagtaggttgtcacctatatgtcttactgattggctataaattggggttcccatgacccactctttgggtttggttaatttgctaggaaggctcacagaactcagagaaacacatttacaagcttatgagattaatagaggatgtgacaaaggacagagatgaaattcaggtaaagaggcgcaatagggtgaggtctggaagggtcgtgagtgcaggagctcctgtcatcagggagttggggtgcaccaccctcccagcacacagatgtgttcaaccctgaagctctctaaaccccatagttcaggtgttttatggaggcttcacccatcatgtaggtgtgatcaacaattaactcgataaccagctcctctccttttcccggaggttgaaagatggaggtgaacgttccaagcttctcattacggtgtggcctttctgrtgatgatccccaatccaggagtccaccaagagtcacctcattggaacaaaagacgctcctactgcccaggaa

SEQ ID NO: 164957 - DNA, 588 bp, Homo sapiens
tggatttagagtcagatcgcacaggttaagggctcagacccacaagactgcacccatttcagacactaattccaagtagtaggttgtcacctatatgtcttactgattggctataaattggggttcccatgacccactctttgggtttggttaatttgctaggaaggctcacagaactcagagaaacacatttacaagcttatgagattaatagaggatgtgacaaaggacagagatgaaattcaggtaaagaggcgcaatagggtgaggtctggaagggtcgtgagtgcaggagctcctgtcatcagggagttggggtgcaccaccctcccagcacacagatgtgttcaaccctgaagctctctaaaccccatagttcaggtgttttatggaggcttcacccatcatgtaggtgtgatcaacaattaactcgataaccagctcctctccttttcccggaggttgaaagatggaggtgaacgttccaagcttctcattacggtgtggcctttctggtgaygatccccaatccaggagtccaccaagagtcacctcattggaacaaaagacgctcctactgcccaggaa

SEQ ID NO: 164958 - DNA, 491 bp, Homo sapiens
gcagaaacagggaacagacagcagattggctatttcaaacttacttttcttgtgaaggttcaagcagaggggacttccttatgccactagaactggcctgtttggggatttgactatcacctctctctgtaacttcttggcatgctgaagatcttagtttccacttggtggtgttgaattggcaggagtgactccattttgtctggtccgctgggcctggtgcgggagcttagtccaaaccaatgaccttccataaattgtatctaacatgactaactacgacgtaaggaaaattgtctaggtagaggaagatcttttcttcttttaggtggcctctgtgttgttttaagaatggatccagaggccccaggctctgtacacaaattaagaagccwcacatttccaacctctcctagaactcaaatgaagacatttcagcatggattccctgaaaagaaggactagacacctcatcttggtagttcatttct

SEQ ID NO: 164959 - DNA, 573 bp, Homo sapiens
atttgtacactaagcctcagtgacacacaatttacccatgtaacaaacctgcacatatacccccagaacctaaaataaaagtagaagaaaaataaataaatagaaataacttatccatttgttccccaaaaaagaacttgggcatatttaaatactctattaacaatagcaatgtttgaactcaatrttcttttatttcattcaaagcatttaagaaaaactggaaaatatatacatatatttatgtagacactatatatgtgtatatatatttgtgtgtgtatataaatgtatacacatataacaagatatatacacatacaacaagataaaaaataatctgtgcttagtcttatatcacatattttgctgatggagtcctttgtgtcagtgtaacaatcattcataatgagtttttttgtattatatatacttaaactatgtgttaggaagtgtttaaacaatgccttgatacctattgaaaagacaaagtatgaaataaatctaaaggcttttctagaaaataatttttaagtagtgatattgtcataatgctaatgcctctgtactact

SEQ ID NO: 164960 - DNA, 573 bp, Homo sapiens
atttgtacactaagcctcagtgacacacaatttacccatgtaacaaacctgcacatatacccccagaacctaaaataaaagtagaagaaaaataaataaatagaaataacttatccatttgttccccaaaaaagaacttgggcatatttaaatactctattaacaatagcaatgtttgaactcaatattcttttatttcattcaaagcatttaagaaaaactggaaaatatatacatatatttatgtagacactatatatgtgtatatatatttgtgtgtgtatataaatgtatacacatataacaagatatatacacatacaacaagataaaaaataatctgtgcttagtcttatatcacatattttgctgatggagtcctttgtgtcagtgtaacaatcattcataatgagtttttttgtattatatatacttaaactatgtgttaggaagtgtttaaacaatgccttgatacctattgaaaagacaaagtatgaaataaatctaaaggcttttctagaaaataatttttaagtagtgatatwgtcataatgctaatgcctctgtactact

SEQ ID NO: 164961 - DNA, 565 bp, Homo sapiens
tcctggtttgcaatttttgaaaattattttaaaatttcctatgactctattaggaactctattggaagggggaggtgagtcaagcattcttgggcttctggtcataaccccataatgacaccaccaaaataactcctgtaaatcctaatacctgctttgcagcattttcaggattgaagaatattcaatcaactttaaactaggtgcagtggtgtgtgccygtagacccagctactcaggaggctgaggacaggagctgtagtgctctatgatcacacctgtgaatagccactgtgttctagcctgggcgacattgcaagaccacatgcaatggatattatttttggttccaggagcccttgcaaatatccattttttgttttttcattaaaaaacaaaaacaaacaaacaaacaaaatagagtgctcaatcaactttagtttccttcctcttttataactcaacttttagatatttcttatatgaaaaataaagtttacacacttttatatatgacacttaacgagaaaaaatataaaaattctattactcatttaattttcac

SEQ ID NO: 164962 - DNA, 586 bp, Homo sapiens
ctttctactttcctattgctccagtttggaataagaatgtctatcctctgcctgtcccatagttgtatttttgaagcacataacttgtttgatttcacaggctgacagctggtgagaaatttacctctggatgactcatgccttgagtctcacccatatctgacttgaatgatatttagatgaaactttggacttagactgtaaagttgatgctagrtaagtttagacttttggggttattgggatggaataaatgcatttttaatgtgagaagaacatgaatttgtgggggccgggggagtaatagtatggtttgaatatgtgtcctctccaaaatttatgttcaaacttaatcttcccctgtggtggtattaagaggaggggccttttgggaagtgattaagccaagaggactctgttctcatgaataaattaattctattataaaagaggcttcaaaaagaatttgcccctcttgctcttctgccttccaccctgtaaggatatggcgataaggcaccacgttggaagcagacagactgggccttcaccagacactgaacctgcctgtgccttgatactggac

SEQ ID NO: 164963 - DNA, 555 bp, Homo sapiens
gaaaattattacagccaaaaattcagattatgagaaggaaagatgagaaratcaaaaatatgtgtcaagttttgaagaaaagtggatcaaactggactggaataacttattcctcataaatgattaaaacaaacatgccaaacccacatttctctcttgagattcagtagtccctctcacttctgtttttctacaaaagtatacgtttaagttacaattatatttcattattcatagaaaatatacatatgctttttattttataaaattccttgagctgggaaactgtttttatgcaggttctgattgacatttattttatcagccttgtagaaggtgaaggattctaatttaagaaaagaggatatgatacaaatagagctattctaagttattttccccatctcatcattccatggcaatttagaaaagagtcatattatgatttctttcctttgcaaagttttaataatgataatgaccatgatgatgattatactaattttcccacttcctctagccatcagtatatcatatactatcacaattggcaaa

SEQ ID NO: 164964 - DNA, 586 bp, Homo sapiens
ctttctactttcctattgctccagtttggaataagaatgtctatcctctgcctgtcccatagttgtatttttgaagcacataacttgtttgatttcacaggctgacagctggtgagaaatttacctctggatgactcatgccttgagtctcacccatatctgacttgaatgatatttagatgaaactttggacttagactgtaaagttgatgctaggtaagtttagacttttggggttattgggatggaataaatgcrtttttaatgtgagaagaacatgaatttgtgggggccgggggagtaatagtatggtttgaatatgtgtcctctccaaaatttatgttcaaacttaatcttcccctgtggtggtattaagaggaggggccttttgggaagtgattaagccaagaggactctgttctcatgaataaattaattctattataaaagaggcttcaaaaagaatttgcccctcttgctcttctgccttccaccctgtaaggatatggcgataaggcaccacgttggaagcagacagactgggccttcaccagacactgaacctgcctgtgccttgatactggac

SEQ ID NO: 164965 - DNA, 565 bp, Homo sapiens
acttcacaaaattttggaaattaaacaacatgttttaaacaaccaatacatcaaggaagatatcacaagggaaatttttaaatatttagagatgaactagagatgaactgaaaggcatacaaagtggtatacaggcatacagagcagacatcagagactcaggaatgggggaggatgtgaggggaataaataatcaaaaattacatattgggtacaatgtacactacacaagtgacagacacaaaaawatctcagacttcaccactataaaatacactcatataacccaaaaccacttgtcctctaaaagctattgaaataaaaaatacatattagaaataataataaattaaaaattaaagtaatgagaaacttaaaaaaatgtagagattaatgagaataaaaatacaacatactgaaacttatgggacacagtgaaagcagtgctaagggaaaaatttacatatataaacaattacacattaataaataagaaagatctcaaatcaacaacccaacattgtgactgaaggactagaaaaataggaacaaactaaacccaaag

SEQ ID NO: 164966 - DNA, 507 bp, Homo sapiens
aaacaattacacattaataaataagaaagatctcaaatcaacaacccaacattgtgactgaaggactagaaaaataggaacaaactaaacccaaagctagcagaaggaaagaaatcataaagattaaattagacaggaataaaaaggagaataaaaactaatagaaaaaatttaatgaaaccagaaggtaattctttgaaaagatcaataaaatgaacaaatatttaaatacagtaggaaaaaagaagattcactgaaatcacaggtgaatgtggcaacaytactaccaattccacagaaataaaaagagttataaaagggaactgtgatcaattgtacgcaaacaaattggataatcaagatgaaatggacaaattcctagaaagacaaaacccaccaataccaaatcacaaggaaatggaaaacctgaatagacctgtaactagtaaggatattgaattggtaaccaaatatctcaagacaaataaaggccccaggccttatggc

SEQ ID NO: 164967 - DNA, 507 bp, Homo sapiens
aaacaattacacattaataaataagaaagatctcaaatcaacaacccaacattgtgactgaaggactagaaaaataggaacaaactaaacccaaagctagcagaaggaaagaaatcataaagattaaattagacaggaataaaaaggagaataaaaactaatagaaaaaatttaatgaaaccagaaggtaattctttgaaaagatcaataaaatgaacaaatatttaaatacagtaggaaaaaagaagattcactgaaatcacaggtgaatgtggcaacactactaccaattcyacagaaataaaaagagttataaaagggaactgtgatcaattgtacgcaaacaaattggataatcaagatgaaatggacaaattcctagaaagacaaaacccaccaataccaaatcacaaggaaatggaaaacctgaatagacctgtaactagtaaggatattgaattggtaaccaaatatctcaagacaaataaaggccccaggccttatggc

SEQ ID NO: 164968 - DNA, 586 bp, Homo sapiens
acagctattccttggctaaccagaagtcctgagtctgtccacataacaacttcactgctagcataaccagcattcaagaaagccagcacactaaacaaatctacaactaaggactctcacagagtctactgccacctccaccagaagaggtgytggtatccagggctgggagacctgaagatggatcatattacaggactcttcgcagactttcccagcaccaacccagaggccagtagccttgctgggtggctagacccagaagagcaataaaaatcactggagttggctctcaagaagccccatccctaggggaagggggagagcaccacatcaagggatcaccccaagggataaaataatttgaacagcagcccctgagttccagatttttccactgaaatagactacccaaataagaaggaatcagaaaagtaattctgataatatgacaaaacaagattctataacacccccaaaagaccacactagcttcccggcaatggatccaaccaaaaagaaatctctgaattgccagataaagaattcagaaggttgattattaagctactcaatgaaatacctg

SEQ ID NO: 164969 - DNA, 508 bp, Homo sapiens
ctgagggaattcaccactatgaagccagcactacaagaaatgctaaaaagagttctaaatcttgaaacaaaacctcaaaatatactaaaacaaaatctccttaaagcataaatctcacatgacctgtaaaacaataacacaataaagaatcacaaagtattcaggcaacaactaacataatgaataaaacagtgccttacatctcaatactaatgtcgaatgtaaatggcctaaatgctccacttaaaagatacagaatggcagaatggggaaaaagaaaatccaacaatcaagtatcttcaaagtatctgtcttcaaaagrctcatcaagcgcttaagactcacataagtgttaggtaaaggggtgaataacaacattccatgcaaatggaaaccaaaagcaagaaggagtagctattgttatataagacaaaacagactttaaagcaacaacagttaaaaaaagtcaaagagggacattacataataataaaaagagcagtccaac

SEQ ID NO: 164970 - DNA, 533 bp, Homo sapiens
cattctctaagatagaccatatgacaggccacaaaacaaatctcaataaatttaagaaaattgaaattatatcaagtatcctatcacaccacagtaaaattaaactggaaattaactccaaaaagaaccctcaaatctatatatatacatggaaattaaataacctgcttctgagttatcattgggtcaacaatgaaatcaagatggaaatttaaaaattctttgaactgaacaatattagtgacacaacttacaaaacctctgggatacagcaaaagcaatgctaagagaaaagtgcayagcattaaatgcctacatcaaaaagtctgaaaaagcacaaatagacaattaaaggtcacacctcaagaaactagaaaaacaagaataaaccaaacccaaacccagcaatagaaaagaaataacaaagatcaaagcagaactaaatgaaattgacataaatacaaaatataaataaaattaaaagttggttctttgaaaatataagtaaaattgatagaccattagccgtatta

SEQ ID NO: 164971 - DNA, 584 bp, Homo sapiens
aatcttgctggttcatacaacttctggtgacttttgccacttttcaatttcactttctccacttccataactgtgcttctgtttacctacaaataaactatctgtacccaggtcctgtctcctgatttactttgtgaggaacccaaaccaagataattgataatcttgactacagctgttttttttgtgagtgacggggaaaatgctaaatataagatgttcaaagagaggaagaacaaatatgtatactgacaattgcttcaaatgytttttatctgatgaggaaaagaggaatggaagggggaggttgtggcaatgttttttcctttttgttgatggaatatattgaagcaagttttatgatgatgagagctatctggcagctagagagtagtagatgtgaatatggtagcatgtgaaatttcttttttgaaataagtcttctgcagagagtaaagaattgggaaaatatattcagagaaagaggccaaggtgtaaaatagttttctagaagagtaagagagtaaatgactattgtactatgtagaattgctagccacttgaagttagcagtcagatttact

SEQ ID NO: 164972 - DNA, 632 bp, Homo sapiens
aaattaattctctaatactgaaaactttttgccatgagagatatttctcaaaaaattgtcaagggtggtgtacacaatattgtctgtaaagggccaagtaccgtgcccattacaaactaaaaaaaaaaaaaagttattcctcagttgtcaycagttttattgcttctttcttttagaagctgctttcagtcatcctttccattttctctgcctctatcttattctgagaggctgaaagatgattgaacaacttaagcttcaggtcctgtctgagtttcctattgctactgtaacaaactaccaaacatttagtggcttataacaacacacattcattttgtgttcaaaatcaaggtttagaccccaaatcaaggtacaggcaggaccgaattccttctgaagattctagaagacagtgtttctttgccttttccagtttctagaaaggccttctgcattccttggcttatggccccttcctctatcttcagtgagcatcattccaacctctgcttccattatcagattttctttttctgactctgattctcctgtattcttctttgtcttagaaaaactcttgtgattcccataagcccacctgaataatccaagatgatctccccatgtca

SEQ ID NO: 164973 - DNA, 636 bp, Homo sapiens
ttaaaagagatattttagctaatagatacatagttctcacttgcattgtatgcaacctgcattccctttgtagacagaaagtaaccattggccaaggccctattcctataggattattgatatagaaaaaaatgatacccctagatttctgctttcttcaggactccaccttcctctggtataatacaatttttttctgacctacagttgtttgatataaaatcttactatattttttgttttatttatttttggggggacttggcacatcactttagaataaagtacaatattactaaatagtcaactagaattataaaatattagcaatatttaccttctaacaaaacacaagctgaatgtattaactgattaccagttayattaggtaacagtttggaaaaaaatggcacagggcaagaagaaaaaatgaacaagtcttcaaaaattgttctaagaaactaaactactgtggctatcggctctgatgagaatggtgaaattgtttggagaggaaaccagacattgcaatgaaaaaataatctctattactaaaactaacttaaaaagccaatatctatatactgtttactgtgagctcaagtaagaactattccctatttcaaaactgtcagt

SEQ ID NO: 164974 - DNA, 636 bp, Homo sapiens
ttaaaagagatattttagctaatagatacatagttctcacttgcattgtatgcaacctgcattccctttgtagacagaaagtaaccattggccaaggccctattcctataggattattgatatagaaaaaaatgatacccctagatttctgctttcttcaggactccaccttcctctggtataatacaatttttttctgacctacagttgtttgatataaaatcttactatattttttgttttatttatttttggggggacttggcacatcactttagaataaagtacaatattactaaatagtcaactagaattataaaatattagcaatatttaccttctaacaaaacacaagctgaatgtattaactgattaccagttatattaggtaacagtttggaaaaaaatggcacagggcaagaagaaaaaatgaacaagtcttcaaaaattgttctaagaaactaaactactgtggctatcggctctgatgagaatggtgaaattgtttggagaggaaaccagacattgcaatgaaaaaataatctctattactaaaactaacttaaaaagccaatayctatatactgtttactgtgagctcaagtaagaactattccctatttcaaaactgtcagt

SEQ ID NO: 164975 - DNA, 564 bp, Homo sapiens
tctcctgtttataattgccttctttctactgactgtttttaattttttttttttttttgtaacaggaacaggttacctacccctacagcaaagcaagtaaccaattaactaaccactccaacctatatttgtcactaatgttatataactacaatttcttccaatttttcattgccaaagttctgctatcaaagtttgataactgtggcctccacaaacggcaaatgtcattttgaaaaccagctctgttgataaaagctcaaaataaaccgtttaacttccagagtgtttaatcgcaagaaaagtgttaagacagacctctccagtcttggagcctcattctatgtaaggcatggggtgaggttgatacagggtcagagtggcgataaaagtcagggatattagttgtccacaattactagcacctggcctattacagcctggcctgcctgactcccagttaaacaaacagccagaccaattttaacttccttatttttcttagtggtatcstgctgtaagaagtgaaaagggcaagacagtagttttagaggcagaaagtag

SEQ ID NO: 164976 - DNA, 520 bp, Homo sapiens
agtatattcagcaatttttttggtatgttgaaagacccttcctggatttataaagcattattgtgtgcattaattataaatattctatatccatataaaaacatcagataatagcattctagaatataatatttcaaatacactacctttttaagccttttattttgtgttttacacttgatcttcattttttacacattaccaagtattccatattaaattacataattatatatgaaaagaatttttatatttttcatgctcaaatgtggtcattatttataatttccatgtcagtttcctttaacaattttaatttacttcacacttttgttaataagaaaaataattttggggcatctatcatctaaagcaatgaatttgagaaaagaaagttagggagagtgataccaggggawgtaagaaaaaataatcaggagagtggctaaagagcagagaaaaaaaatcccaaaccaacaactattattttcaagggtgtatctgttttgagttaatgatt

SEQ ID NO: 164977 - DNA, 602 bp, Homo sapiens
atagtgtgtagattgggttcatgtagagtagacaggggagataaagttaaaattacaggttgggatcaaaacaagggattacatgaatgctagtatagtgagtttgaatttcaccttgtaagcaaatggaaggctttgagtaacatgatcgcaagcaggctgcagggtgaaatgggagtagaagatgaggggagatacaggggcccaatgtctagttagtaagacaactacactagttatcagggcctgtattagagagacagcaataaatgtggaaaacaaggactggataaaaaaggcattgcaaatgaagtattgatagacatgggaggccatggacaaagattatttaaatgaccatgacactcaaacaactyagacaaaaagaagaaaaaacgatgttcttggacaatttagaaatcattccctggaaaactaaatgatgagtctattgacaaacatagaagtagaacgtgtgcaatgcaataggaagagaatatttggccataaactagattgactttttttgagaaataaaaggaatcctagtatttgacagcatggatgattttatctgtgggtagatagaaaaatacattttt

SEQ ID NO: 164978 - DNA, 584 bp, Homo sapiens
tgctttcaatcacactgtatctattaccatatcaatcatcactctaaatgaatacagtgttatcattgacaaagacatcatttaagctgagaaagtaaagattctaaataacaaaataatgaaaagtaggttgttcactgcaggaaaatgaaaaatataccttaacaatctattcacaggatggtaaggacattggggagcagtatgaaaaacagcaacagcaataacaacaacaaaagctcacttactcacaaggaccttgaaatagatagtgattaatatcacactgttatttattaaagttaatacaactgagtattttacttggtatacagattaagatatagaattgaactgataaaaatgatttacatgcaggattaaaatattggcagctttatagagtgaaatgtcactattttgctgtaccttcaagttttacatttcctcctttgaatccctgtcagccttcatgaatagcagagagtttaatcaatgcttgaggtagcgayagcataacactgaatatttctcttgctaataatcaaaatggtgttaagtaagcatcataaagtaaaacgaca

SEQ ID NO: 164979 - DNA, 483 bp, Homo sapiens
ccattgtatatgcttaaatatgaagaggaagaaactttgataaaaccaaaatgtaattttttggatgagtaatatagagttgttaaaatcacacaaagttattacattgtaaattatatgtaaatataagttacacacacatatacatgtgtacacagcatgtatatgtgtgtatatatggtgtatatatttacacatatatagtatatgtgcttatagatacatatgtttttttcttaaagtcttaggcttttttctttttaaagataagtttttttaatttttaattttttctttgcattatgttttagaaacaaatattcatgtgcataytattaactactatgatataggaagaaagaacttagactttaaagatctcacttttgaaagcttacacaagttactatattcctaaaagatagaagggcatcagacactttcttcacttctaaaagtctccatttccacatctttaaaatt

SEQ ID NO: 164980 - DNA, 598 bp, Homo sapiens
tttgctttcatattagcatactggcacctatcgctttcccctgcactttattccattttcattttgtaatgttttcaggcatgttggaratatttctatttccacatcctcttccttcaatgagtcgataggtttttagtggtaattcgagtaaataaaagctttgccctctaaattgtgaattcagatgagatagagtagcattttagagaatttaatgagtgaaattaactaagtaaaagcaatgaaagggcttggttatgacacctgattaataggcttgtaatcagtaactaaaaggccagtgttggtgtacagaagctgaggatggggaacaggttttcccatgtggaatttacaaaataaaatcattgataagttcagtcaatatctggtaactacctttgctcaatgaacataggcatatttagggagtaaacatcgttgtcacaaattaggcatgaaaaagaactggctaatgtactgaagagttcagtttttgataaaatgggatgagtcagtgaatcattctaggtaaaatattttaaaagttaaagaaaatatacagaagaaatgaagagaggtcattgatggatat

SEQ ID NO: 164981 - DNA, 417 bp, Homo sapiens
ctaattgttggtaatgaagatacagttaatcttacaattttaataataggtggaggtctctgatttttctcacctttgccctttaagagatgatggctctgcctctcttcatattaccttaagtatatcatcttraagcaagccagatcctgttttccaaccaaaagtactcattgttcttttagttggggaaatgctagagagctgtatgagtttcctgtggctgctataacaaataccacaaactgggtggcttaacactgtataaatttattctctcacagtagttctagaggccagaaagccaaattcaaggtgtcagcagggccacataccccctgaaggtttaggtgacaatcagtcatttgcttttctagattcaggtgcccataggtgtagaataatacctaaaattaa

SEQ ID NO: 164982 - DNA, 492 bp, Homo sapiens
tactaaatgaggaaaaactgaaagtccttctaagatatggaacacaacaaggatgcccactttcgtaactgtcatccatgtagtactggaagtactagctaaaacagtcagacaagagaaagaaataaagggcaaccaattaaaacagaaaaagtcaaattcttcttgtttgcagatgatataatcttgtatttggaaaaacctaaagactccaccaaaaaactattagaattgataaacaaattcagtaaagttgcaggatacaatattaacatacaaaaatcagtagcatttctatataccaacagcaaacaatctgaaaaagaaatcaagaatgtaatcccatttacaacagctacaaataaaataaaatacctaggaataaacttagccaaagaagtgaaagatctctacaacgaaaactataaaacattaatgaaagaarttgaagaggacacacacaaaaatggaaagatattccatgtttatgga

SEQ ID NO: 164983 - DNA, 376 bp, Homo sapiens
tagtactatttctgctcagcagcagttatagtaatcaaccctctaattattcattatttacctatgatgggtataactttgaactcgatgttagagaagccatagggatgaatcaagcccctacagggatatccaatcttctggctttgctgggccacactgttttgggccacacttgcactgtacttttacagcactgtcacacctattatctcaatttttgctgggtttaaacagtttatctataccttgccatccaacttaatggcacaatttaacattattatactttraagcattattttgaattgaaaggaggttaacataacagtggtgtgagtttaagagaattttaataagggcttaaaaatcactt

SEQ ID NO: 164984 - DNA, 376 bp, Homo sapiens
tagtactatttctgctcagcagcagttatagtaatcaaccctctaattattcattatttacctatgatgggtataactttgaactcgatgttagagaagccatagggatgaatcaagcccctacagggatatccaatcttctggctttgctgggccacactgttttgggccacacttgcactgtacttttacagcactgtcacacctattatctcaatttttgctgggtttaaacagtttatctataccttgccatccaacttaatggcacaatttaacattattatactttaaagcattattttgaattgaaagraggttaacataacagtggtgtgagtttaagagaattttaataagggcttaaaaatcactt

SEQ ID NO: 164985 - DNA, 572 bp, Homo sapiens
aagcttttccgggaaaacaactaccttacccatccatctttgtatctccggcgcctagtacagtgcccagtgcctcgcaggcgttcaattaatgattgtagaagaaatggagaatgaatgaccttagttaagcaaagaatatatcaaactcaaaaatgtctgtttaaaaacctaagaccccagaaatmggctgcatgagttgggttaaagcattaaataggaccggaatgctggtaggtagagaaatctccacttgacttcttcaagtacatcctgaaaagtaccaacatcagtgtttcgatgcaacattgtccacatgcaggagtaaagacaacacttctcgtggtctcttcctaccacgagatcctgaaacccactccccaccccaaatccgggaaatctcactttggggatcccaggaccccaagttccctagatgaggctctcaccttcccattcgtgggaggctcctggatgtagatgttgctcatcttggtcagtacaaaggactctgctccttacgggggatgagagcggccggccggccactaaagctgtccgcctacgagtac

SEQ ID NO: 164986 - DNA, 582 bp, Homo sapiens
ttttcatccagtctgacaattttatcttttaaaagatacgttttgaccattttcatttaatagtattaatgatatgtttggattaaaatccaccatcttgctacctgttttctatgtactgtatgagttcttttttccttttgtttctcttttgctatcttatcttgggtaaattgagctttttaatggttccgttttatttccactatggacctgttatacccctatttttaattgttagtggtttccctagggtttgcaataaacatctttaattaatgagatttgtttttttttttttttttgagacagagtctcactctgtcactcaggctggagtgcagtggcatgatcttgcagsctctcactgcagcctccgcctcctgggttcaagcgattctcctgcctctgcctccagagtagctggattacaggcacacagcaccatgcccagctaatttttgtatttttagtagagatggggtttcaccatgttggccaggctgatcttgaactcctgacctcaagtgatccaaccaccttggcctcccaaagtgttggaattacaggtgtgagccacca

SEQ ID NO: 164987 - DNA, 558 bp, Homo sapiens
gcataaatgaaagaagccagacccaaaacgctatatatcatatgattccattcatatgacattctgcaaaagatgaaactataaggatggaaaacacatcaggggttatgagattcagaggatcaggagatggctattataaaggggatgcacaggacaatttttagggtaatggagctactctgtctgctactggagtgctagctacaagtatctctgtrtttgtcaaaacccatagaactgtacacattacaaagagttcatttttagtgcatgcaaattacaaaacctcaaccagtaggttggggaatcccaggatggaacacagactgtgacaagacactcactgaattacaaacatgacctccgtgagggggtgggaggaggagctggcctaagtaagttgggaaagcggtgttcttactggaaacacctgcagacaaagggagcgatgctctactcagcacatgcatgtcaagtgagagcaggctaatgattccgaagcttccacacaggtacactgggcttgaacaaacaagtgaaggcatgctgggtggt

SEQ ID NO: 164988 - DNA, 454 bp, Homo sapiens
gtgatcccaatgtgatccccaatgttggcagatctcccatgaatggcttggtgactcctcacagtaataagtgacttcgtgctgtcagtccacacgagaggtggttgttgaaaagagcctgacacccctcccctctctcttgctccctctgtggcatgtgacgcaccagctcccacttttccttccaccatgactgaaagcttcttgacatcctcaccagaaacagatgctggctccatgcttcttgcacagcctgcagaaccatgagccaaatgaacttttttctttataaattatccagcctcaggtattcttttatggcaatgcaaatagactaacatgatmtacaaatgggtgagtacacatacatatgtgtcctagctctgtccactaagagaggctagagcaacaactctccagtggccaggagaacacccagcgcccaggtcttggg

SEQ ID NO: 164989 - DNA, 331 bp, Homo sapiens
agaattcattaacttgaagatagatcatcagagagtatgcaagccaaagaacagagagaaaaataaatgaaaagtgaacagagcttcagagatatatgagacaccatcaagcacactagtttacacatcatgagaataccaggagagcagacagaagagaaggaaaaatattcaaataaataatgactgtaaaatttctaagttgaytgaaaaacaatatacatccaggaagctcaacaaactccaagtaggataaccacagacatccacaaagagtaaaatgtactatatctcaaatagtaaaagtgctggaggaaaaaaaagctgaaag

SEQ ID NO: 164990 - DNA, 494 bp, Homo sapiens
catggcagaaaacaagaatttgayctgacaagtataagagatttcacacaagttaatagaacttggaattatgaagccacttgaaaatagctttggactaaagattttctccatgacagttattcttatttcctggcatttgtgaaaatgcccagacagagcccagttacttctccatattgaagtgaagaattttatttctaatttttgcgtgtgcaacaggtgggggtggaggcagcaaagaggaattttatttaccattttctgagacctcctatgccactttgggtcatccaggaagcagatgcccatcagaataaaataagcagaagggaaatgtttgtgaagggtcctgggacagagcaggaatagacagggagaccttttaggaccccatgcagagctgagacctgtgcaaggaaagaggggaaaaaaggagaactgggtgggaggagatttagggtgcagtgaaactgataaactctgagccaggc

SEQ ID NO: 164991 - DNA, 613 bp, Homo sapiens
ctcctctaacaatagttagcatctactgagcacctactatgtgcctcacactgtgctaagcactttagttgtttttaaatgtccttcaatacttatttgaaataaggactgttctcactgcattttagagataaaattaaggcagagagagattaagcaacttgcccataatcaattcagctattgagtccaagacccggaatgaacccagtgcctctgtttgtaacctctgagctgtaaggggtggttcctcccttccaaagrctacgttgtccagcctgagatgaaagaaacacttcttgcaacattttccctggggctcactctaccatgatgaacttttctgtgattaggttgccagggtgtttgaaagagtatatgaaagaaaattaatgaattctctctcccagagttagagatgggtaagggtgaggtcagggtaagttttaataggagccaaataaaataaagataaaaacatgagcagtggcagaagccctcagaaaaggaacaaccaggaatcagcaatgtggcccaaatagcagcaaggccagtcagctggactcccggtgtactagggtgaaagggagattcagacagggggatgacatga

SEQ ID NO: 164992 - DNA, 566 bp, Homo sapiens
gcaaagacagatgtgtgacagggaagtttctttctgtatttctggactaagtcaggtagatgtgagaagtgatggaattgctaatcatgaaaatgtaaataactttaaacaaaaatgtttgttgctgtttgctgtccacacatttggaagtcacagtcattattccataggcacaattttgaggtctgatgtctttgaaaatattttcataaacaaaatgttggtgttaatttttaaagtggtattttaaaatgagtttaaagcagcattaatctgcagccacagtacaaaataatatgactatgtgtaaattaacacagtataagctgagttcacaggtttcaggatcaaatttttgaagatgaagcagtgagcactgaaattctgtttaagcagaatcttctgacactcccgtggtagctcctctttccttcttccaataatttgaatttaattatgacaatttgaatatttttcaaaataaggtctaccttcatctctgtaacaacagacatatggcttcatttaacttaaatygctatggtttcatttaacttaaattatta

SEQ ID NO: 164993 - DNA, 543 bp, Homo sapiens
aataataactaatggcaaaaaagaaatcacaatgacattagaaaatgttatgaaatgaatgataatgacaataaagacacaacacatcaaaatgtgtacagggcagctaaagcaggagttagaaatatttagccttaaatgtatttatcagaaaagaaggaaaactgacaattaattacttaagcttctcaagcagctacaataggaagtaagataaaacccaaagaaattaggagcaaaacagcatggataaaaacagcttcaatgaaaatatatatacacatacataaaatagaaaactatcaataatgtcaaatgtaggtttttgtaaagattaacaaaattgataaacccctagctggactgatcaagaaaaaaacaaagaaaatacaaattatcgagatcagaaatgagaaagagacatcaatacagactttaagccatcaaaaatataaataataccagtgggaattcactgaastactttaagcacctagcacactaccatggctcatagaagccattcatttagtcattgaatat

SEQ ID NO: 164994 - DNA, 579 bp, Homo sapiens
gcctctgttgttggcaggttggacatttgacagcagcattagcaagatcagcctttgtaagtgggaggcatcctgttggtaccatatatagtctccatccccaccactatgattaccccattcttgtgcccattgtgctggctctggcatggccaatgataggggtggctgatgtcaactggttgagtcatttttgtctctttgattttttattgtttttccatggtgagtgctctctggtaggtgttaacatgcaatacgaagattttcactcttcatgctccctcccatatgtycatttctctacccaagacttcttttttctgatctttctatctttctcctttctaaacctttgatcagctgactaagccatttgtcactgctcatgaaatctttgtgtatttgatcctctggctacttctcttgtcacataaagtagatgaccagattcactgcccaaagatctgttcattaagaggattccccctcaccactgtctacaagttcacctgtcagtgtgaaccatcagtcatttttggcttatgctcaaatccaaatcaactcatctatgaactg

SEQ ID NO: 164995 - DNA, 620 bp, Homo sapiens
cttaacttgattcataccctttggttaaggaagaaactaggaatttgagggacatgattaaaaacttcaattagggaccatttgtagcaygtatttattttctttttgtaattctgctatcatctctgggcatcttcttccagatgttttggctggtcaccttgactctaatggagtcttcagattattagaagatgcaagaggagagcccaaaagttcttgttcctaacccttggatatgcctgataaggccttgtgaatccaaataccacattccttctttccagccatgaagtacctgagagtggctctgcttgggcaggtcttggcattgggctgaaggtgatgtcctctattccctagaatggggtagggactgggagccgttacacatgacagtggactgagatgctttgtctgagttagttcttacatctcaattccaatatgtgtgtctgagttcatttgggcagctataacaaaatgccataaacttgttagcttataacaacagaaatttatttctctcagttctagagtctgggaagtccaagatcaaggggccagcagattcagcatctggtgaaggcctgctttctggttcatagatggtgccttct

SEQ ID NO: 164996 - DNA, 620 bp, Homo sapiens
cttaacttgattcataccctttggttaaggaagaaactaggaatttgagggacatgattaaaaacttcaattagggaccatttgtagcacgtatttattttctttttgtaattctgctatcatctctgggcatcttcttccagatgttttggctggtcaccttgactctaatggagtcttcagattattagaagatgcaagaggagagcccaaaagttcttgttcctaacccttggatatgcctgataaggccttgtgaatccaaataccacattccttctttccagccatgaagtacctgagagtggctctgcttgggcaggtcttkgcattgggctgaaggtgatgtcctctattccctagaatggggtagggactgggagccgttacacatgacagtggactgagatgctttgtctgagttagttcttacatctcaattccaatatgtgtgtctgagttcatttgggcagctataacaaaatgccataaacttgttagcttataacaacagaaatttatttctctcagttctagagtctgggaagtccaagatcaaggggccagcagattcagcatctggtgaaggcctgctttctggttcatagatggtgccttct

SEQ ID NO: 164997 - DNA, 340 bp, Homo sapiens
ctaccttccagaaagaagagaatggaaaaagaagggaacacctccttcctttaaggataatttccagagctgcaccatcatgtttactaatatcctactggccagagttttttcaaatggccacaactaattgccaggtagactggaaaaactgtagttkgtattctgggcaacgaggtgcccagtgaaaaagaggacaaatattgggaccactagcagtttctagcactttgactttttggctaatatacctgagataatactctctccacaaggagttaccacagcctgcccaaagtccaggatcacttgcagttttctgcattgaattggatgtgac

SEQ ID NO: 164998 - DNA, 340 bp, Homo sapiens
ctaccttccagaaagaagagaatggaaaaagaagggaacacctccttcctttaaggataatttccagagctgcaccatcatgtttactaatatcctactggccagagttttttcaaatggccacaactaattgccaggtagactggaaaaactgtagttggtattctgggcaacgaggtgcccagtgaaaaagaggacaaatattgggaccactagcagtttctagcactttgrctttttggctaatatacctgagataatactctctccacaaggagttaccacagcctgcccaaagtccaggatcacttgcagttttctgcattgaattggatgtgac

SEQ ID NO: 164999 - DNA, 600 bp, Homo sapiens
atgacatagaccttgaaaggattactccttttaatccttcatgtcaactttatggaggctaggaccagaagactagtggtggaggggataagaagtggtcatattctagatctgaatacaatagaattgttattagtaagcagctttcagctcaataaaagaaatgagtttctaatagagtttttgtcatctccaatgaagtaccaagcttcttgtacctggaagtaaccaggcagacacttgatatccctcactagagatagtataggagagtttcctatgttgggaggagtttatacccactgacctctaatattcttcaatggcctggggcttggctayacaagaaaatgcttgttataacttgatgactgatgatcgagttaggactaagggagcaaatagggttagatatagaaattgaaatggcttcatttctgtaataaatatgttaatggttattttagagatatatttatgacttgggcataggcatatctaagggtttgggggcaaagtggatgggggagtagtttcgcgttcgtgtcgctctccgtggtgctgaaacaccaatggttaagggataatgttctcctaact

SEQ ID NO: 165000 - DNA, 565 bp, Homo sapiens
ctacaaatctatttattattaatccagagagacactcttccagatctaaacactcaatctctcaaaggagccaagmcgtagtatgcataccctacagggcatccatttctccacacacctctctgtgctggcccgtcagtgttctccatgtcctctgttatcagggccaacagcctttgtctctttccattcagccgaccttacagcaaggcagtcagggcttccagaaggttctaagtgggtgagtgaaagacggttggttccttctctccaatcctttgacaggagatttacttcatctttacacagaaagaaaaaatattaaagagggtaggaaaccggctagtttaatttaggaagcacctcaagtaattaagcattgaaatgttgcttccctggtgcaatattctccagcacattttctttgattcagagctaataaaaatcaacaacaatgtgtttgggggaagggcagaggatgatgagtgatgagggaaaaggggatgtaaatgggtcgggagagaaggatgccagttattttagcctacaaaaaggatgcattgta

SEQ ID NO: 165001 - DNA, 444 bp, Homo sapiens
tgcctactaaaatattgaagcaaattatttgtattttctttgttccttaagactctcataattcttaaatgattgagaatctcaaagagtatrtgtttatattgattatattgatatttagtgtggtagaattatacaattgaaattttttcaaaatctatttttagtttagatttcacagccttaccactgttgatattatgggctagataatgctttgttgtgaggactgtcttgtgcattgcagagagtttagcagtattcatggcctctaccaactagatatcagtagtaacccatgacccaggttataacaacagaaaatattccttgagaacagtattgttaacagaattttttcattgaaaaataacttttctacaacaaaaagttgagtaaaaagtgcgtcatgtatttatattatttaaagtctctcatgttgag

SEQ ID NO: 165002 - DNA, 442 bp, Homo sapiens
ttgaagcaaattatttgtattttctttgttccttaagactctcataattcttaaatgattgagaatctcaaagagtatgtgtttatattgattatattgatatttastgtggtagaattatacaattgaaattttttcaaaatctatttttagtttagatttcacagccttaccactgttgatattatgggctagataatgctttgttgtgaggactgtcttgtgcattgcagagagtttagcagtattcatggcctctaccaactagatatcagtagtaacccatgacccaggttataacaacagaaaatattccttgagaacagtattgttaacagaattttttcattgaaaaataacttttctacaacaaaaagttgagtaaaaagtgcgtcatgtatttatattatttaaagtctctcatgttgagcttaataggaga

SEQ ID NO: 165003 - DNA, 449 bp, Homo sapiens
gcctactaaaatattgaagcaaattatttgtattttctttgttccttaagactctcataattcttaaatgattgagaatctcaaagagtatgtgtttatattgattatattgatatttagtgtggtagaattatacaattgaaattttttcaaaatctatttttagtttmgatttcacagccttaccactgttgatattatgggctagataatgctttgttgtgaggactgtcttgtgcattgcagagagtttagcagtattcatggcctctaccaactagatatcagtagtaacccatgacccaggttataacaacagaaaatattccttgagaacagtattgttaacagaattttttcattgaaaaataacttttctacaacaaaaagttgagtaaaaagtgcgtcatgtatttatattatttaaagtctctcatgttgagcttaat

SEQ ID NO: 165004 - DNA, 460 bp, Homo sapiens
gcctactaaaatattgaagcaaattatttgtattttctttgttccttaagactctcataattcttaaatgattgagaatctcaaagagtatgtgtttatattgattatattgatatttagtgtggtagaattatacaattgaaattttttcaaaatctatttttagtttagatttcacagccttaccactgttgatattatgggctagataatgctttgttgtgaggactgtcttgtgcattgcagagagtttagcagtattcatggcctctaccaactagatrtcagtagtaacccatgacccaggttataacaacagaaaatattccttgagaacagtattgttaacagaattttttcattgaaaaataacttttctacaacaaaaagttgagtaaaaagtgcgtcatgtatttatattatttaaagtctctcatgttgagcttaataggagacaaat

SEQ ID NO: 165005 - DNA, 441 bp, Homo sapiens
ttgaagcaaattatttgtattttctttgttccttaagactctcataattcttaaatgattgagaatctcaaagagtatgtgtttatattgattatattgatatttagtgtggtagaattatacaattgaaattttttcaaaatctatttttagtttagatttcacagccttaccactgttgatattatgggctagataatgctttgttgtgaggactgtcttgtgcattgcagagagtttagcagtattcatggcctctaccaactagataycagtagtaacccatgacccaggttataacaacagaaaatattccttgagaacagtattgttaacagaattttttcattgaaaaataacttttctacaacaaaaagttgagtaaaaagtgcgtcatgtatttatattatttaaagtctctcatgttgagcttaataggag

SEQ ID NO: 165006 - DNA, 442 bp, Homo sapiens
attgaagcaaattatttgtattttctttgttccttaagactctcataattcttaaatgattgagaatctcaaagagtatgtgtttatattgattatattgatatttagtgtggtagaattatacaattgaaattttttcaaaatctatttttagtttagatttcacagccttaccactgttgatattatgggctagataatgctttgttgtgaggactgtcttgtgcattgcagagagtttagcagtattcatggcctctaccaactagatatcmgtagtaacccatgacccaggttataacaacagaaaatattccttgagaacagtattgttaacagaattttttcattgaaaaataacttttctacaacaaaaagttgagtaaaaagtgcgtcatgtatttatattatttaaagtctctcatgttgagcttaataggag

SEQ ID NO: 165007 - DNA, 464 bp, Homo sapiens
tgtattgtgcctactaaaatattgaagcaaattatttgtattttctttgttccttaagactctcataattcttaaatgattgagaatctcaaagagtatgtgtttatattgattatattgatatttagtgtggtagaattatacaattgaaattttttcaaaatctatttttagtttagatttcacagccttaccactgttgatattatgggctagataatgctttgttgtgaggactgtcttgtgcattgcagagagtttagcagtattcatggcctctaccaactagatatcagtagtaacccatgacccaggttataacaacagaaaatattccttgagaacagtattgttaacagaattttttcattgaaaartaacttttctacaacaaaaagttgagtaaaaagtgcgtcatgtatttatattatttaaagtctctcatgttgagcttaataggagac

SEQ ID NO: 165008 - DNA, 445 bp, Homo sapiens
gtgcctactaaaatattgaagcaaattatttgtattttctttgttccttaagactctcataattcttaaatgattgagaatctcaaagagtatgtgtttatattgattatattgatatttagtgtggtagaattatacaattgaaattttttcaaaatctatttttagtttagatttcacagccttaccactgttgatattatgggctagataatgctttgttgtgaggactgtcttgtgcattgcagagagtttagcagtattcatggcctctaccaactagatatcagtagtaacccatgacccaggttataacaacagaaaatattccttgagaacagtattgttaacagaattttttcattgaaaaataacttytctacaacaaaaagttgagtaaaaagtgcgtcatgtatttatattatttaaagtctctcatgttgag

SEQ ID NO: 165009 - DNA, 306 bp, Homo sapiens
tcctccttctgttccacacaggtttccaccgtgcacattacgaagaamagaaatggaggtgggagtttaaataactattcctcctccattccatcgactcccagcaccagccaggaggaccctcagttcagtgttcctcccactgccaacacacccacccccgtttgcaagcggtccatgcgctggtccaacctgtttacatctgagaaagggagtgacccagacaaagagaggaaagccccggagaatcatgctgacaccatcgggagcggcagagccatccccattaaacagggcatgctctta

SEQ ID NO: 165010 - DNA, 306 bp, Homo sapiens
tcctccttctgttccacacaggtttccaccgtgcacattacgaagaacagaaatggaggtgggagtttaaataactattcctcctccattccaycgactcccagcaccagccaggaggaccctcagttcagtgttcctcccactgccaacacacccacccccgtttgcaagcggtccatgcgctggtccaacctgtttacatctgagaaagggagtgacccagacaaagagaggaaagccccggagaatcatgctgacaccatcgggagcggcagagccatccccattaaacagggcatgctctta

SEQ ID NO: 165011 - DNA, 433 bp, Homo sapiens
gaattctgccaagcagtgacttgattcatgaacactcactggatgctgacyctgttgctcttctgagtgctggggtagaggagaggagaggtggagcacagttcttgcttttatgagcttatgttctaggaagttcaaacaagtattttttcaggtagtatgaaatagcaggaagaggaagcaggctaaagggacacagagtgattgggggctattttaagtagaatgataaggaagagcctgtctagagagctatttgaacagtgacctgactgaagggacaacagaaagcagtgctgacattacaggtagcaggatgactgccaagacagaaacgcatttcatatgtgttcgaggaacaaacagcaaggtgaccagcatggggagagtgaagaatgagggaaaccttgaatgagaataaagcaattccatc

SEQ ID NO: 165012 - DNA, 433 bp, Homo sapiens
gaattctgccaagcagtgacttgattcatgaacactcactggatgctgactctgttkctcttctgagtgctggggtagaggagaggagaggtggagcacagttcttgcttttatgagcttatgttctaggaagttcaaacaagtattttttcaggtagtatgaaatagcaggaagaggaagcaggctaaagggacacagagtgattgggggctattttaagtagaatgataaggaagagcctgtctagagagctatttgaacagtgacctgactgaagggacaacagaaagcagtgctgacattacaggtagcaggatgactgccaagacagaaacgcatttcatatgtgttcgaggaacaaacagcaaggtgaccagcatggggagagtgaagaatgagggaaaccttgaatgagaataaagcaattccatc

SEQ ID NO: 165013 - DNA, 444 bp, Homo sapiens
actcactggatgctgactctgttgctcttctgagtgctggggtagaggagaggagaggtggagcacagttcttgcttttatgagcttatgttctaggaagttcaaacaagtattttttcaggtagtatgaaatagcaggaagaggaagcaggctaaagggacacagagtgattgggggctattttaagtagaatgataaggaagagcctgtctagagagctatttgaacagtgacctgactgaagggacaacagaaagcagtgctgacattacaggtagcaggatgactgccaagacagaaacgcatttcatatgtgttygaggaacaaacagcaaggtgaccagcatggggagagtgaagaatgagggaaaccttgaatgagaataaagcaattccatcttggatgctaatctgcaatattctgattaatcccagttccaaca

SEQ ID NO: 165014 - DNA, 433 bp, Homo sapiens
gaattctgccaagcagtgacttgattcatgaacactcactggatgctgactctgttgctcttctgagtgctggggtagaggagaggagaggtggagcacagttcttgcttttatgagcttatgttctaggaagttcaaacaagtattttttcaggtagtatgaaatagcaggaagaggaagcaggctaaagggacacagagtgattgggggctattttaagtagaatgataaggaagagcctgtctagagagctatttgaacagtgacctgactgaagggacaacagaaagcagtgctgacattacaggtagcaggatgactgccaagacagaaacgcatttcatatgtgttcgaggaacaarcagcaaggtgaccagcatggggagagtgaagaatgagggaaaccttgaatgagaataaagcaattccatc

SEQ ID NO: 165015 - DNA, 588 bp, Homo sapiens
ttggtgccaccttggtttgcctgttaccttcctgcccactcctttcctcccctgggaccacttgctgatgctgccgcaaagtctcgtctaaraaatggcaacattgtgccctaaatgtgctggctttcccttcccattgtactttgtaaagatcatgggtaatttttgtaaggacaaagtagtaaaaggacaaccaaaaaaatgctgaatggttacaacctcagtggcaaatataatgtctttttgatgaacattaatgatctagggtatacttcagggaaagtacagtattacaaggacttcgagagagaacattatgaccggcacctgtaattcttgcccatattcacaaaaactgaatgtcctcgtgtgctgacttctgcattgcattgctaatgttaagtaagagaatggatgggaaacaaatggtagcacttggggacatttttctttcttctctaaagaaaaaaatggcaaatggtggtgtgaatgcaacttgccacagaacataaaagcgtaagaattctggctgtttgaggtgaaaaaataagttgatttttctttaaattgtaaaaattagctccaggt

SEQ ID NO: 165016 - DNA, 588 bp, Homo sapiens
ttggtgccaccttggtttgcctgttaccttcctgcccactcctttcctcccctgggaccacttgctgatgctgccgcaaagtctcgtctaaaaaatggcaacattgtgccctaaatgtgctggctttcccttcccattgtactttgtaaagatcatgggtaatttttgtaaggacaaagtagtaaaaggacaaccaraaaaatgctgaatggttacaacctcagtggcaaatataatgtctttttgatgaacattaatgatctagggtatacttcagggaaagtacagtattacaaggacttcgagagagaacattatgaccggcacctgtaattcttgcccatattcacaaaaactgaatgtcctcgtgtgctgacttctgcattgcattgctaatgttaagtaagagaatggatgggaaacaaatggtagcacttggggacatttttctttcttctctaaagaaaaaaatggcaaatggtggtgtgaatgcaacttgccacagaacataaaagcgtaagaattctggctgtttgaggtgaaaaaataagttgatttttctttaaattgtaaaaattagctccaggt

SEQ ID NO: 165017 - DNA, 588 bp, Homo sapiens
ttggtgccaccttggtttgcctgttaccttcctgcccactcctttcctcccctgggaccacttgctgatgctgccgcaaagtctcgtctaaaaaatggcaacattgtgccctaaatgtgctggctttcccttcccattgtactttgtaaagatcatgggtaatttttgtaaggacaaagtagtaaaaggacaaccaaaaraatgctgaatggttacaacctcagtggcaaatataatgtctttttgatgaacattaatgatctagggtatacttcagggaaagtacagtattacaaggacttcgagagagaacattatgaccggcacctgtaattcttgcccatattcacaaaaactgaatgtcctcgtgtgctgacttctgcattgcattgctaatgttaagtaagagaatggatgggaaacaaatggtagcacttggggacatttttctttcttctctaaagaaaaaaatggcaaatggtggtgtgaatgcaacttgccacagaacataaaagcgtaagaattctggctgtttgaggtgaaaaaataagttgatttttctttaaattgtaaaaattagctccaggt

SEQ ID NO: 165018 - DNA, 588 bp, Homo sapiens
ttggtgccaccttggtttgcctgttaccttcctgcccactcctttcctcccctgggaccacttgctgatgctgccgcaaagtctcgtctaaaaaatggcaacattgtgccctaaatgtgctggctttcccttcccattgtactttgtaaagatcatgggtaatttttgtaaggacaaagtagtaaaaggacaaccaaaaaaatgctgaatggttacaacctcagtggcaratataatgtctttttgatgaacattaatgatctagggtatacttcagggaaagtacagtattacaaggacttcgagagagaacattatgaccggcacctgtaattcttgcccatattcacaaaaactgaatgtcctcgtgtgctgacttctgcattgcattgctaatgttaagtaagagaatggatgggaaacaaatggtagcacttggggacatttttctttcttctctaaagaaaaaaatggcaaatggtggtgtgaatgcaacttgccacagaacataaaagcgtaagaattctggctgtttgaggtgaaaaaataagttgatttttctttaaattgtaaaaattagctccaggt

SEQ ID NO: 165019 - DNA, 537 bp, Homo sapiens
gcaaggagttaagaagctttgtctattcagcagtcataattgaatgtgtagtttgcaagcctgccaaattgctaaacctagatttctcatattagataatgtgtaataaaagacagctgttgccagcatatgctgtgaattgcacaccagttcctcattcatgatttttggcgccatcactacaacccttagaaaaggctctgactggagggctgtctggggaacatagaccccactggtcagatccttgaataaggctgctcgccctagggaaagcggggcaggaaagactttttttttttttcaaagtgcaaaacccttgataagaccttagacacacttcatttcactttaggcaggtagtttggtgtgtgagctagtttcgaaccctgggaacattcctttccacatcgcctgagtctgacagcccggatcaaaaacaagcaggctttgtgtcaagacgtggcacgtgtcasagaatttgacggtacttaatttatttaaattgttttttgtttaagtgttagatgcttgaaa

SEQ ID NO: 165020 - DNA, 362 bp, Homo sapiens
ttggggctttctcatgctgcaaatggctgtttctctggttcactcaaagcagcatatgacagcatccaaagatgacactaagctcagtaaagggcaagactgctggtagccagctctgacctccccgtgaagyatggctactgtgtccataatacaggatgtgtgaggatcaaaggcacactattctgctagctaaagagatagcaaaccaccccccaaccctaaaagctccttccccaggtaaataaaagtatacgaggggaaaaaattaaaatacacttatctacagagtaagggttttgaaatattaatgtaatccctccttcaaaaattctaactagagtcatctggtcatttctgat

SEQ ID NO: 165021 - DNA, 362 bp, Homo sapiens
ttggggctttctcatgctgcaaatggctgtttctctggttcactcaaagcagcatatgacagcatccaaagatgacactaagctcagtaaagggcaagactgctggtagccagctctgacctccccgtgaagcatggctactgtgtycataatacaggatgtgtgaggatcaaaggcacactattctgctagctaaagagatagcaaaccaccccccaaccctaaaagctccttccccaggtaaataaaagtatacgaggggaaaaaattaaaatacacttatctacagagtaagggttttgaaatattaatgtaatccctccttcaaaaattctaactagagtcatctggtcatttctgat

SEQ ID NO: 165022 - DNA, 562 bp, Homo sapiens
actttgctcaagaatggcactagtttttagaaaaattttggagtggtgaagtcaaggaattttcaactgaagtagatcatgtgctcattgacagcagcaaaatggcatccrtgggggatcctaacatagaggcaccatttctccactcagggaaaggattaggcatagaaatgcaaacatcaagctttgcttggtacactattatttccttgctgaactccagatgataaggtaaccaactggccctgaaatcgtaagtgggtgaattcaactatcagatgctttactgtgataaaagtgtcaataatatctcagacttaggcagtgctttgtagtctacagagaactttcatctactttctctcactggatcttatcacttgattccttatgataggcaaagttaatatgcatattatcaagtccaggtctagctcagtccttgctgcatacattattcgtgcttaactacttatagaattgaagttgttgaatctacggtttcagataagaaaagaatgtttaatgatttctgcaaactcagccataccaggtgaaactg

SEQ ID NO: 165023 - DNA, 523 bp, Homo sapiens
cagcttgtattagtcatggttctccagagaaatagaactaagagtatatatatatatagatatttgagaggggatttgttaagggaattaactcacatgagtatggcagctgagaagtcccgcaacaagccatctgcaagctgagatgccagtgttgcaggactttttccttagttcagctaaagacgggggtccttatcacacggccatgaaaatttaggctcacagacaatttgaagggtgaatagaatgggatttattgggcagaaaggaaagaaaggaagaacagggactctccacaaggccagagtccctgctmctgtgcttcctgccttgcagtttgaatcctagcttccacccaggaagaggaggggccaggttcctccccgctgcaaacagcacgaacttctgtggctctgcccagtgcacattcctcccagtgagcaggctggttggagtttttccagggagcccttcccaccaggctgtcttattagcatggttcagtccaagtcaatgatga

SEQ ID NO: 165024 - DNA, 632 bp, Homo sapiens
aacttattatcttaatagtcgtcacaatttctcttagggagggaattctcttcatttgtaaatataagtttctgagcccctggggattgaatgctctgtgggcaatagtcaaggcttccaagaaaaatggctaaacttgtctgcctaggaaagraagtgttttggaatgtaatgagagagagagggacagagagacagagagacagagagagacagagagaaagggaagagagagagctctgaagaggccccgggaggcagaagatctcccctgtgtagggaggcaaccaatggacagttccctatgacccatgagagaaactaaggcacatattgaaatgaaaatgactactgtaaaatttgaatttgcctggtgttttgacatgctatatcccttcctccttgtccatctcttccccataaaaccaccatatcttaccacactcataccaaaagcatgggcaacaaaagaaaacatacataggagaggtggagtaagatggtagaatacaaagctccactgattgctttccctccccacatccccaccaaagacaccaagttaacaactatctacacagaaaaaaacaccttcatacaaaccaaaaatcaggtgaacactcacagtacct

SEQ ID NO: 165025 - DNA, 587 bp, Homo sapiens
ccatgctccctctgaaggctctgcggaagaatcctttcttgcttcttcctagttttgatggttgctgccaatccttggcattccctggcttgtggctgcaacactccaatytctgcctcaatcatcacatgaccttccttgtgtatctcctttgtgtctctgtgttcaaatatttcttccctttctcctgtagatataccagtcattggatttagggttctcttgatccagtatgatcttatctcaactggattatatcttcaaagaccttatttgaacgccttatttccataacggtcacatttccaagtaccaagggttaggacttaaacataccttcttgggggccacaatttaacctattatatcccactacacagtatatgccatgacagaacctctttcatgagaccaacatgaaatgtagagtgatatgattctttatgtgatcaatgagtatttgcagacaatgcagatgattcccctgagaatatcatggctccctcccttacttatttagatatctgttcaggctgggtgctgtggctcatgcctataatcccagcactttgggaggggaggaaggt

SEQ ID NO: 165026 - DNA, 622 bp, Homo sapiens
acaaaggcacctgtctcatagggctgatatgaacaaagaaggagatagtgcatataaagtagtacatgtgcagtaaacaggagctatcattgttgtttttattattatctttttgtgggcatagtttcttgtaaaccatttggggtactttctgcacacagaatgcaggatgatgaagagctacagtgttctctgattttttttttttttaaatcagtttctttgttctccacattacaaaaaagctacaactctgagctaggaattttgcaccaggtccacatagtagtatctgtaaattccagagctctaaagcaaattagaggaaacccttctccagctggggagtcctggagcttcttggtaggtgctggttaggctgataagttttgtgatatttcttaacaggctctctccagctgagcgagtgtgtgtaatgttttgttggaacatrtaacttaagcaaaattgtgaaataggctaagttggccttcagaaattattccatttttaaagttcatacccttaattcgtattgacaactctggacacttaagtcttttcttctttttctagatttgcttaacatattttcttttgggtacatacccagtaattggat

SEQ ID NO: 165027 - DNA, 601 bp, Homo sapiens
ttctatttgcataatagatctttctccaacctttactttgagcctaaatgtgttagcacatgtaagatgggtctcttggaatcagcaactagatgggtcttatttttttatccaacttgcaactctctgccttttaagtggagtcagtgtttagaccatttacattcaaacttaatgtgataagtaaggtttttatcacattgcgaagttattagctggttgctttgtagtttatgtggggtctgtgggttatgtgcttaagtgtgtttttatagcagcaggtatctttcttttgtttccacatttaaaagtcccttaagggtctctcataaggctggtctcatgctaatgaattcccttagcatttgcttaygtggaaaagattgtagtttagtttagtttatgaagcttagcttgtcaggatataaaattcttggttggaacttcttttctttaagaatgctgaaaataggcccccaatctctcctgtcttgtaaagttccttctgagaggtagactgttagcctggggttccctttgttggtaatctaacatttttctctagctgcatttaagattttttctttagtgttgaccttgg

SEQ ID NO: 165028 - DNA, 609 bp, Homo sapiens
aagtatgcagccaagcaccatggctcactcctgtaatcccagcacttttggaagctgaggcaggagcatcacttgacctcaataattcaagaccagtatgggcaacatagtgagaccctgtctctacaaaaaaaaaaaawaataattaaaaataattagctggacgtggtggtgcatgcttgtagtccctgttactcaggagactgaagcaggaagattgtgtgagcccaggaggttgaggctgtagagacttgtgattgtaccactgcactccagcctgtgtgacagagcaagactgtctcaaaaaataaaaagaaataaaaggtaagtgtgaaaagataaacaaaatatttaacacaatatctctgtttttgttatattatttaatttgcttcaatagccaacatagcataaatgacttttgtagtttgaaaagaaaaattcaagcaatagtctaaaagcacttttaaaccaattgaattggattggaaagcatagtgcttctcacttggtacgacagcaaagaatgggttgtttctgactgacagattttcagtttgtatttttggtttattttatttttagagtagaagttaaaggagaagaaaa

SEQ ID NO: 165029 - DNA, 632 bp, Homo sapiens
atgtccaaagcctaaaatatatctctggagattaattttcaatgcagatacagcagattagttctcaaattaaagaactaggatctattaattaacaggtaaaagcaactagcatagaactttaaggttctatgctagtgcataaggcacaaggatagaaatcattttgtttgagataatttgttgaatagatatggttggagcattcatttctttgttcattgaactaaatatttttgagtgcttagaatgttccaagctctctacccataataaggatataaaaatgagtaagtccaaatctggaaggccgagacgggtggatcacaaggtcaggagtccgagaccagcctggccaacatagtgaaaccccgtctctactaaaaatacaaaaattagccaggcatggtggtgcgcacctgtagtcccagctactcgagaggctgaggcaggagaatcacttgaatctgggaggcggagkttgtggtgagccaagatctcgccactgcactccagcctgggcaacagagtgaggctccatctcaaaaaaaaaataagttacatagtccagtgatgtaatgatgaagataggctcgaggcattatagaatcatcaagaagaggcaccagccc

SEQ ID NO: 165030 - DNA, 584 bp, Homo sapiens
cacttaagtctaaaacgaagaataaaaccccaggttccagaagagtaccagctgcaccctgctttgcttcctccccagcgacctggaaggcatgtacttacagcaaaagtcactaacaagctaatgacatctatgtcgcattttatatagctttagtctgctgcccaatattctagtcctttcaatccaaatctgtcaatttcacacacacaaaaaaagggctgaggttaagacagtaagaagacagaaattttgttcttaaattgatgcttggggcctgagctcaaaaagttatttcctgcacaattgatcaccccaccctggtcaacttgtcaggcaatagcactaatagaatgaagggaatgttcctggggcagcagtgggagcagaggcccatgaatgagaggatggtttagcattcactcaagattctcacggtatttttacatataggaaaggtgagcatgcagacaagactaaattcacagttaacatgtttagtcttgggtttgtgttctacattatagtcttaagaagctattctctttgcartttatatccctggaaaataataatgaatacct

SEQ ID NO: 165031 - DNA, 603 bp, Homo sapiens
tctgcgttaggagatattgccatgttcccacaaattgtctcagatgaaaatctaatacaattaaacagaaaaagtccagaaatcccacgatgtcaaatttcccgagctgtcagggattgcttctattttctttgacttcttttgtttgatccttgtcccagttcgatctctgggcttattcaaacctctcttttctccccacttctccatcaacactgactttcagtttattgccattttggggtctggggttcccagatgtgctctaccaaaataccagacctccagctagcatcgcgggtgagtgttctaaagaacgcttcccctctctgtggcacattgttaaacaaaatacagcatagtcatgggaaaaatttgcatttagattacyttattgaagcccagtgtcaataccaaggataatgaaaatgtaattgatcaagaggactcactgaagtaactaaagaggctaccctacacagaattcctgtttctaccttcagtgtcacagagggtgcgtttttttcctggcagtttttgaatacttcttttgtccttacctccactcatcaaggttttacaaatattcaggtttaacctcat

SEQ ID NO: 165032 - DNA, 580 bp, Homo sapiens
tgtgcgccaccatactcggttaatttttttgtatttttagtagagacggtttcaccatgttgccctgggtggtctcgtatgcttgaattcaggcgatccacctgccttggcctcccaaagtgcggggactacagacgtgagccaccgtgcccgaccagtagtgacatgcagtgatgaggccatataatgtaatgctctattaaaggactcctttttttagttaagaaatctascaatctgattttttatgtagttcactgaggaatctcaaattattattacctttggttccatgattatatttttgggcattacctgatatatgaaaaaactttatataaaaataatgttgtttatgatatcaaaattttagaaacaatgtctaatagagaagtggacataaccttttttttctacatgtttgtattttacatattttaggtgaacattactcttacagtggtaagcaagtagtcaacttgtataaaaaaagagcaaataatttttagcaatcttgagtcaccaataaactagaattttttatgcagtctgtaaataaatgatcataatttaatcattt

SEQ ID NO: 165033 - DNA, 580 bp, Homo sapiens
tgtgcgccaccatactcggttaatttttttgtatttttagtagagacggtttcaccatgttgccctgggtggtctcgtatgcttgaattcaggcgatccacctgccttggcctcccaaagtgcggggactacagacgtgagccaccgtgcccgaccagtagtgacatgcagtgatgaggccatataatgtaatgctctattaaaggactcctttttttagttaagaaatctaccaatctgattttttatgtagttcactgaggaatctcaaattattattacctttggttccatgattatatttttgggcattacctgatatatgaaaaaactttatataaaaataatgttgtttatratatcaaaattttagaaacaatgtctaatagagaagtggacataaccttttttttctacatgtttgtattttacatattttaggtgaacattactcttacagtggtaagcaagtagtcaacttgtataaaaaaagagcaaataatttttagcaatcttgagtcaccaataaactagaattttttatgcagtctgtaaataaatgatcataatttaatcattt

SEQ ID NO: 165034 - DNA, 442 bp, Homo sapiens
tcactgatatattccctagaagaatattcttcacctgaggtcaggagttcaagaccagcctgaccaacatggagaaaccccgtctttactaaaaatacaaaattarccaggtgtggtggcgcatgcctgtaatcccagctactcaggaggctgaggcaggagaatcacttgaaacaaggaggcagaggttgctgtgagcagagatcgcaccattgcactccagcctgggcaacaagagcgaaactccgactcagaaaataatatatatatattattttttattttccctttaacaccagtgaacacccatcctcagaggcttctcgttacactatagtctgtagctaagcccacagcttgacttcaaccataacacacctctctcattttccacgggtcctatagaaagttttaagttgtgttttcgcttactgttcctaag

SEQ ID NO: 165035 - DNA, 408 bp, Homo sapiens
tcactgatatattccctagaagaatattcttcacctgaggtcaggagttcaagaccagcctgaccaacatggagaaaccccgtctttactaaaaatacaaaattaaccaggtgtggtggcgcatgcctgtaatcccagctactcaggaggctgaggcaggagaatcacttgaaacaaggaggcagaggttgctgtgagcagagatcgcaccattgcactccagcctgggcaacaagagygaaactccgactcagaaaataatatatatatattattttttattttccctttaacaccagtgaacacccatcctcagaggcttctcgttacactatagtctgtagctaagcccacagcttgacttcaaccataacacacctctctcattttccacgggtcctatagaaa

SEQ ID NO: 165036 - DNA, 534 bp, Homo sapiens
tgttcctgaacgggactgtggttggcaaaactattattgctaagatcatgatcacaaagaatatacagttttaaggggaaaatgtatgccataaaaatattatatgcatttttaactcagtaaattaaaggagacgtcgtctgcttttgaaacaaaccagatttgctggcatccatacctgctctggtattttccctgagtcacctttatcaattcttcaaggaraaatttctgagcttctcaggttagcatcatgttatcagactatagctctatttaatgcttttgaatcagccctttctgccttgaaatttactgtttctttgacttatgctttcctctgtttcctgtctcagcaaatgcctgtgtaacacccaggctttttacaaggtatctaaatacttaagtattgaacgagacaggagggagtctgatcttgaagacatctgcaaagaaggtgggacaacaaacagagttcttcattaactgcgtttccgctgagctgagcaagtcggccacgaagggaacagaaca

SEQ ID NO: 165037 - DNA, 580 bp, Homo sapiens
caaaatatttttaagagcggcatttttagaatcaaccttgcaaatggccttttagaagtctccactgtgtaaaataaatatgaaatgtattccttcaattcaggcctaagcccacccatataaggtggtaaagagttcccctttcaaatctctcaattttatatttgggtatgaacaattacgtatatgtatgcatctgcttggatgggtccactgagtatgtttaagttgtaggattttcccttgcttagtgcattatacttacaagaaaaatttgtactttcccagccaactaaataataaaaaaaatttaactcattttgggattttccctcactcacatacacactcgttcaacaagcacacacacatgtgcgaacacacacgttttagttgtactaaacttaatgtgaaattttagattagagtctcatttattggcaattctgggaaggggktttagcttaatcctcagttaatgaaacccttgctagtgaatttcctttgtcaacactgcatttaatgtatagtgcttcatacctgctagatcatcaaaacccacaaagtgattaggttcaac

SEQ ID NO: 165038 - DNA, 518 bp, Homo sapiens
gtaaagcatccaggcaagttttatccattttgttcataggataatttctattgtctatgagttacctccctaagtaagaaatgaacctagcaggtatgatttgtttccagtaaacaggctgttgttttaagtcactattcctgcatggaactcaattttctttccccataaaatgaggcagttgggcaagaacattccacctcactaatcacataaactttaaaaatgaagcctgaagaggaccttttggttctagaccttcatttaagaccctgggccacctcagttccagcaacggtccatatgcgtggccttattactrgggctttcagcttctaaaattctgtaatgtttacttctgttatactcagtaggaaaacattttaatcagggagaaaattggaaaaagagagataatttcaatgggctaaatttgaatgcaacgcaaggtggtaatagcaattcacattcacattcccatctcagaaatgttggaggccaggcatgtctcaaatttg

SEQ ID NO: 165039 - DNA, 598 bp, Homo sapiens
agttgatggccttgatgtttgagtcttggctaagcacaaaaagcacctcttttttgtgtaacaaatacaaatacagaggtgtgtgtatttgttatctttatttgctgtgtgactgtgtcagacagcttctcagttaaatgggaacttagacaagaacagttctttgaaggctcagataatttcttgaacaaaatgagagcttatttgttattcaaggtgttagatgggtgttctgcttgttactatggaaggaataacttttttgcttatagtttctaggtgctgctgggcttagtggctcacacctgaaatcccagcaatttgggaggccgaggtaggcaaataacctgaggtcgggagttcgagaccagcttgaccaacatggagaaatcccatctctactaaaaacacaaaaaattagcsgggcatgggggtgcgtgcctgtaatcccagctacttgcgaggctgaggcaggagaatctcttgaacctgacaggcagaggttgcggagagctgagatcacgccattatactctagcctgggcaacaagagtgaaattctgtctcaaaaaaaaaaagtatagtttctaggttctgc

SEQ ID NO: 165040 - DNA, 401 bp, Homo sapiens
aagcccacagagttttaaaaattggttgttttatttttcacttctaaaatttccattttgttctttatagcttcttttatgttgctggaactttctatttttcatttgcttcaaatgtgcttgcagttgcttgttgaagtatcttcatgatggctgctttaagatccgtgtcagataattttaacatctctgttatcccagtgtcgaagtattttgattgtcttttataattcaagttgagagttttttggatctttgtgtgatttttgatgraaacctgaatatttggggtattatgtgattagactcaggattttatttaaatcttctgttttagctagcctcctctgacactagcttggcaggaacgagggcaggagagcattgctgatgcattcctg

SEQ ID NO: 165041 - DNA, 617 bp, Homo sapiens
ctgtctgactagctcagaagattccaaggcagcaaaagagcacaggtaaggctaggttggcaagctctaggaaggcgaggtggtttctctacccatccctattgagttcccagcctcttgcagtttcctctgaccagtccacagacctggcccagtgcctggcacatagtaggtatttagttaatatttgctgaatgtgtaactcattgagtggatgaatgaatatctatatgagaaagaaaagtttggaaagatgaagaagaaataaaaggacaaacagagactatgaaagacaaaaagaatggcagagacagaaacttggaagcaagacagcaagacaaagtgatccaggagcctgacccaggctcctctgctctctgttctcagttgtagggatctaggcagagtgggaagaaaattctgttccaccaaagtgcagttggttggttttgaagccaccagagaatcctgagcatctctgccccaagattcttggaggagacctatccatcctgagtgtcaggaagaaggaccayacaagtacttgcctgggcctggctgagggtcccacccctgttcattgtaccacagtggcacctatgaactaccacccttag

SEQ ID NO: 165042 - DNA, 357 bp, Homo sapiens
tatgagtttcagccgggtgtggtggctcatgcctgtaatcccagcactttgggaggccaaggtgggctgatcacttgaggcsaggagtttgagaccaggctggccaatatggtgaaaccccgtctctactaaaaatataaaaattagccgggcgtggtagcacacgcctgtaattccagctacctaggagggtgaggcacaagaatcgcttgaacctgggaggtggaggttgcagtgagccgagatcacgccactgctctccagcctgggcaacagagcgagactctgtctcaaaaaaaaaaaaaaaaaaaaaaaaaggatcatttatgagtttgaaccatgttcttaggttgaaaa

SEQ ID NO: 165043 - DNA, 562 bp, Homo sapiens
tgaatgagcttgaaagtggattttttccctcagcctcctgataagagctcatccagataactgacttatggaattgtaagataatgtgtgttgttttaagcaattatgtttgtaataatttttacacagcattagaaatataatacagatattagaagtggagtgctattgtaactctgaaaatggagaaatggctttagaattgggcagtgggcagactgaaagaatttgaggatcatgatagaaaaagccccaattatcttggatggaccagcagacacatggatgttagtgactctgctagtgagggctcagaaggaagtgaaggagtgtggcatagactcttaaacccctttaaagaatacctaaataattgggaatcatatctctaccaatgattaatagaaacatgaactttgaaggtgttgctgctgagagcccagcaggaagggaggcrtgtgttataaagggaacccttgtatcactgtgacaggaagctcaacaaagtattatcctgcagttgtttagagagctgtacttgtaaatgacaggatgaaccctg

SEQ ID NO: 165044 - DNA, 571 bp, Homo sapiens
aactgatggggcttaggacccataacaccaaaatatgactgtaggagattagaatatgccactctaaaatatacccttctggcatcagaattaatttgatctgctcattttgagaaactgtaacattgaagctctaagaaattgcccttttataggggaaagttttatctatgaatgaaatttccattagtaaaagtgtctttctttctgcaccaggaagagaagtatgactaaatcattagagactcttatcaatggagaagaaaccaacttaaatatctatagcaaaacttactttccctggccatctcatctaaactgggtcttgcccacacccttctttctttttttcagaatacagtcagccctttgtatccatgggttccacatctttggattcmaccaacagcagagagaggaaaaaaaaagaagaaaaatatatctacataaaaatttctgtatatctatctatatataaattgcatacacactgaatatgtgcagactttttttcttattccctaatcaatacaatataactgctatttacatagtatttacattgtattag

SEQ ID NO: 165045 - DNA, 593 bp, Homo sapiens
tgacctcaggtgatccaccctcctcggcctcctaaactgctgggattacagacgtgagccatcgtgcctgacctattcattctttttttgtttctgttattattctattttataagtaccacagttcacttactcattctctggtcaagggatatttgggttatttttaaatttctaacaattatgaaaaaaaagccaccacaaacatttacacctaggtttttgaggaaatgacattttttgttttgggggttttttgttgttgttggtttggtttgtttctcttgaaaaaacacctaggagtagaacagttggatcatactgtgggtatayaactgtctaagtagctgacaaacgtgtttccaaagtaattgtaccattttctcacctcaccagttatgtatgagagttgcaggtgctccatcttcaatatttaacaccaggtattaatagccttgttaattaaatcattctagtggatgtgcagccgtaccttattgtgatttgcatttgcatttccctaaagactaatgatgctgagcatatttttatgtgtttaattacctaccatctgcgtttcttacttggtgaag

SEQ ID NO: 165046 - DNA, 617 bp, Homo sapiens
tttcctctttttaaatttatatttgctttattttactgagtaattttttagaaatgcattgtatgttctttattgcctattagctaacacattttagtgtgtgttttaaatggataatttaggtttgatagcatctatatccaacttatcayagtctttgtcaagtgatttttgtactacttcccacatggtatgagaaccttaaaaccatacaacttcatttcttgcctgctgcacttcttgctccagcctaaactttgttgataacacattttactttatgtgttacaaatgctgtccttatttttgctttaaacagtcaattgtttttacgtagaattaaataatacaagaaaaatatgtattatatttgctgacataattactatgtttggtgttctgcatacctttgcaaatgtccagatttcctatattatactgaatgtacctcggagcttactaatgctatattcatgttttcagtttttctctcaatacttaattgtataaggtttctattgctgtgtctttgagtacgctaactactttttttatacaatgtgaaatctattgttaatcatttccagggaattttatatcacaagctttgtaattgt

SEQ ID NO: 165047 - DNA, 617 bp, Homo sapiens
tttcctctttttaaatttatatttgctttattttactgagtaattttttagaaatgcattgtatgttctttattgcctattagctaacacattttagtgtgtgttttaaatggataatttaggtttgatagcatctatatccaacttatcatagtctttgtcaagtgatttttgtactacttcccrcatggtatgagaaccttaaaaccatacaacttcatttcttgcctgctgcacttcttgctccagcctaaactttgttgataacacattttactttatgtgttacaaatgctgtccttatttttgctttaaacagtcaattgtttttacgtagaattaaataatacaagaaaaatatgtattatatttgctgacataattactatgtttggtgttctgcatacctttgcaaatgtccagatttcctatattatactgaatgtacctcggagcttactaatgctatattcatgttttcagtttttctctcaatacttaattgtataaggtttctattgctgtgtctttgagtacgctaactactttttttatacaatgtgaaatctattgttaatcatttccagggaattttatatcacaagctttgtaattgt

SEQ ID NO: 165048 - DNA, 555 bp, Homo sapiens
ctgtcttcccttttgtaattcaggaatagcagaccagcaatttgacatcaacccagcctttaagtctgataagaaatatttacattctattctctctgaaggtagctacctggaggcttcatcagcaagataaaactttggtctccccaacatcttatcataacccagatattcctttctatttctaataactctttcaaccaatgccagtcagaaaatttttaaatttaactataacctggaatgcctacttcaagatgtcccacttctctggaccaaagcaatgtatagcttaagtgtatttgattgatgtctcatgtctccctaaaacatataaaaccaagtggtagcctaaccaccttgggcacaagttgtccagactgcctgaggatgtatcaygggccatggtcacttacatctggctcagaataaatcttttcaaatatttcacagagtttaacaacagatgtatgagagaaatttagcgcattatgcttcttcctttctcaaacccttcttatatcccaatattatttcattgcctttcttggttgg

SEQ ID NO: 165049 - DNA, 270 bp, Homo sapiens
taataagcgagggcatgaaggctgcgactggggccctcctggtcacagttggtctggggttgggggcaggaagccaaggtcgtttcctgcagatgtttctggcaggcgttcaccttctcctakcggatgcctaagaatgtatcaagggcctcctgagtcccagcaccgtgctaggccgggaagatgagtgtaggggtgagacctttgcttcttagggaccaaggagttaaatagggtgcgaattcagcggggctggagggggcgacgcaa

SEQ ID NO: 165050 - DNA, 583 bp, Homo sapiens
agatcttggctcactgcagcctctgcctccgaggttcaagttatcctcccacctcagcctcctcacgagtagctgggactacaggtgagcaccaccgcgcccggctaattttgaaggggggcaggttgtgtttcatcttgttttttcctttcttccagtggagacagggttttgccatcatgcccaggctggtctcgaactcctgggctcaagcaatgcaccggccttggcctcccaaactgctggaattgcaggcgtgagccaccgtgcccggcctgaagaataatttttaccattacagagttgtaagcttcagagaagataatacatggtaaagtgtttttttttatttttatttatttattttaagatggggtctcattctgtcacccgggctggagtgcagtggtgcgatctcaactcactgcaacctccgyctcccgggttcaagcgattctcccgcctcgacctccctagtagctggcatggcagtacaggcgcacaccaccatgcctggctaatttctgtatttttagtagaggcagggtttcaccatgttggccaggctggtatcaaactcctg

SEQ ID NO: 165051 - DNA, 586 bp, Homo sapiens
taattaaaaataaatgattatgcatttgatgtcttatttgtgtgatacattacatgaatamatttcttaacattgaaccatttctgcatttctgtgaattgcttttataatgtggggcagagtgaacagacttttttttaaataaaaagcaatgagcaagttgtgacatttttccattatgggtgagctcctggttaaaggagagaaatgtggtgagcatctatggagggcatttgtgagccaagtttgaggatatggcagctggctctgttttcagacccagactttaggtctgtgcccttccaggacatgagccacaaggatggtaaccatgttagaagcaggcacccaggatagcccaatccaccaactgctccttccatatgacctctattagaatggtcttggaggtaacagacaggattaaagtctgatggagggggagaggcactcagaagacagatcaggacactgggacagccatcctgtgacttgccccagtcacataggttttgagcccaggcagtctgcctgcaaagcctgagctctcagcctcactaccatattgccttgagggctgatctat

SEQ ID NO: 165052 - DNA, 609 bp, Homo sapiens
tctgttgaggtcttttgaccgttttaaaattaggttgtttgttttcttattgttgaattttaaggcttctttgtatattttgtacaaaacagtcctcttgcaaatattctrtcccaggctgaggcttatcttctcattttattgacagtgtctttcatagagcaaaggtttgaattttaatgaaatccaccttatcaattatttctctcatgacttgtgcctttggtgttgtatccaaaaagtcattaccatactcaaggttatttagattttctcctatgttattttctaggagtttatagtttgcattttacatttaggtctgggatccattttgagttcgtttgtgaagggtgtaaggtccgtgtccagattcacttttttctgcatgtggatgtccagttgttccagcacccttcattgaaaagactgcctttgttccattgtattgactttgctcctttgtcagagatgttgacgatgtttatgagggtctatttctgggccctctattctgttccatagatctgtttgtttattctttcaccaataacacgctattttgattatttcagctttatagtaagcctggaagccaagtagtgttag

SEQ ID NO: 165053 - DNA, 526 bp, Homo sapiens
ggtgattctgatataaacacacacaaacacacacacacaaacacacacacacacacacacacacacacacacacactcactcatcaagatccatgcccagatackatatttggcaacccctatctctgccactgggccgggggttatttatagtagaaggcaacaatatttccacatcatcacttcttcacctgctccacccataaggtcttgggagctgtaggtgaatagatgatttgccaggtgaagaggtggggcccaggactgcagcaggggcctgggatggtcatttcttggtaacgatctcatgtcaggggccaaggaagaaaagggaagtgttggcatccagcactttctgccaagacctgactccacacggatccctggatgcccttgagaggaggcctttgggagcttacaggttgagggaaggagctggggaacgttgagtggatcagtgaagaaagagagaaggctgagcttagggtgaaggtgcgagggtgctgggcaggggctctcagtcccc

SEQ ID NO: 165054 - DNA, 526 bp, Homo sapiens
ggtgattctgatataaacacacacaaacacacacacacaaacacacacacacacacacacacacacacacacacactcactcatcaagatccatgcccagatacgatatttggcaacccctatctctgccactgggccgggggttatttatagtagaaggcaacaatatttccacatcatcacttcttcacctgctccacccataaggtcttgggagctgtaggtgaatagatgatttgccaggtgaagaggtggggcccaggactgcagcaggggcctgggatggtcatttcttggtaacgatctcatgtcaggggccaaggaagaaaagggaagtgttggcatccagcactttctgccaagacctgactccacacggatccctggatgcccttgagaggaggcctttgggagcttacaggttgagggaaggagctggggaacgttgagtgsatcagtgaagaaagagagaaggctgagcttagggtgaaggtgcgagggtgctgggcaggggctctcagtcccc

SEQ ID NO: 165055 - DNA, 440 bp, Homo sapiens
atagtcagcactgattaaaccgcccggcactacacggggcagtgagttgactgcctgctcaggggaggtgaggggagcattcaaaggtggcttcatcgatgaggcaggacttgggctggatctgggggcctggcagaacctgacttgatgaagggagaagcagatacatccaggcacggggaccggggctccacggctctgggggaaaaagtgccaacrgcggtgtttcagacaccgtggcaggctgatggatggaccattggagggattaacaaatgacgaggacacagagaaggaaaggacggagaagaagaaagagcgctgatatggtttggctctgtgtctccgcccaaatctcatctcaaactgtcatccccacacgtcaagggaggaacctggtgggaggtgattggatcataggagcagtttcccccatgctg

SEQ ID NO: 165056 - DNA, 610 bp, Homo sapiens
ctctgcagctactcagtttgggttcaaaatctatctccactattcattagctatgtaactttgggtgagttacttaacctctctgtgcctcagtttcctcacatttgaaatggggataataatagtactttcttcatgcagttgttgagaggattaagtgagaaaattgttgtaatgtttagcataatgttgaacacataatcaatgttcaagtgagaattattactctaaaatggaatatattgatcctttgtttgtcatttgttacaaatgtactaagaatcaactgccctctggggtcggtggcgactgttaactgcaggctstaagttttgctgagcttcaaagattggggtagttttgcttatgagacaaagcagggaagagctgtactgctctgcataatagaaagggaagaatttggaagtggaggactcctggaaggcagagtgaggaggagagatggaaatgagagaggaagaggtaagagtgaaagaaaaacatgagcaagttccagaatatgatgcttccccaggaccctcaaaccttcagagaagcccactggaggcttggtgcaaatgtgattcttttggtctgatttctgcacccc

SEQ ID NO: 165057 - DNA, 610 bp, Homo sapiens
ctctgcagctactcagtttgggttcaaaatctatctccactattcattagctatgtaactttgggtgagttacttaacctctctgtgcctcagtttcctcacatttgaaatggggataataatagtactttcttcatgcagttgttgagaggattaagtgagaaaattgttgtaatgtttagcataatgttgaacacataatcaatgttcaagtgagaattattactctaaaatggaatatattgatcctttgtttgtcatttgttacaaatgtactaagaatcaactgccctctggggtcggtggcgactgttaactgcaggctctaagttttgctgagcttcaaagattggggtagttttgcttatgagacaaagcagggaagagctgwactgctctgcataatagaaagggaagaatttggaagtggaggactcctggaaggcagagtgaggaggagagatggaaatgagagaggaagaggtaagagtgaaagaaaaacatgagcaagttccagaatatgatgcttccccaggaccctcaaaccttcagagaagcccactggaggcttggtgcaaatgtgattcttttggtctgatttctgcacccc

SEQ ID NO: 165058 - DNA, 633 bp, Homo sapiens
gaaagatttgagatctatgtatctatttttgttaataagccactgtcccttctgtttctaatatttttctaattgctttgctttggttttcttaggtaaacaatattataatctgcaaatagtgacatttttctcttccacttcaatatttagaccaacaaagaggaaagcatgaccctcaagaggaagaacacatatttgccttgtgctagttttgtytcctttttgcacacaagtactatatgtacatagttcaaaatttttttaattaaactgacttgaaatgcaaccatctatcttaacatttgtattttctttttcgattattttctatgcaaatttatatgtgtatatattttaaaatatgaatttatagatataaaagtagacgttatttgtaacgtggattttaaactttctatattatgaaagcattttcaggaacataaatatatctataccatactttcatattgctgttatgtctttgaattgtaatttattcaattaagcttctattttaggacattgaaattgtctccaatttttagtattctaaatagacttacaatatacttcctttttagaatagtctaattactgtgtccttgccctgtcccagttaggataaat

SEQ ID NO: 165059 - DNA, 510 bp, Homo sapiens
attattttaaggtgcctattttatcattgcaacatctgagtcatctgtgggtctatttctgttgatcaccctatctcttgataatttttaaattgcttctttgtgtcttataatttctttttgaatattagacatggtgtatagaaaaatagcagagatggagataaatagtacttacaccttggggttggtgcagtggcatgtgcctgtaatcccagccactcaggaggctgaggcaggaggatagcttgagcccaggagttcaagatcagcctgggaaatacagaaaggccccatttctaatttaaaaaaggaaaaggaaaaaatagtactcacaccctgagatagggatgcctcttttttttttttttttttttttttttttaatgtgaggccattagtgtgtggcrgggggaaggggaggtaaggaaagtgttaagttaatctagtcaatagttgaactaagtttcagttttgttattgctacagttatctttaccatatcagagc

SEQ ID NO: 165060 - DNA, 451 bp, Homo sapiens
atggctagtggagacgtggtttgtaggaaaacataggagacaaggttaaaaaagcacaaagaactcacmacaaatggctcagaaaaagaaagtttggtgtcacatgggagctcagtcatacatggttaaggaattaatacacgtaaattcctagccatacacatacacataatctatcctcaaaggtatgtgcaaggctcttcctagcctttagatcaactcaaaaaggagaaactttgatataataaatttctcagggattatctggttgtgatctatttaatacaaatgagtctggactatgaaaaacacagttttccttgagtttagatttttagggccttctctctgtagggcattaaggcctcacagggtcatgatcattttataatctttaggaaaagagccaagcacattcctcagccaattttatatgcaggccttatagcag

SEQ ID NO: 165061 - DNA, 451 bp, Homo sapiens
atggctagtggagacgtggtttgtaggaaaacataggagacaaggttaaaaaagcacaaagaactcacaacaaatggctcagaaaaagaaagtttggtgtcayatgggagctcagtcatacatggttaaggaattaatacacgtaaattcctagccatacacatacacataatctatcctcaaaggtatgtgcaaggctcttcctagcctttagatcaactcaaaaaggagaaactttgatataataaatttctcagggattatctggttgtgatctatttaatacaaatgagtctggactatgaaaaacacagttttccttgagtttagatttttagggccttctctctgtagggcattaaggcctcacagggtcatgatcattttataatctttaggaaaagagccaagcacattcctcagccaattttatatgcaggccttatagcag

SEQ ID NO: 165062 - DNA, 435 bp, Homo sapiens
gcttaaatctgagcaccttctacagggttttccctacccatactgaatacaattttaatgaaaaaaatacagatgtayatttgaataggaatcatttggggtctaggttgccttttgcttagtcactttccaccaacaatatcctactagacacagaatcttcttatttcattattagaaacacttttgcattcagtttaccaggcttaacataaattaaaaaggaacaaggaatacaccagtgactacttagaatagatgccactataaattttctggccctagtactaatctaggtaatataatttgttggaagcatattattattcgagaagcaattatttcagctaagatgcaagacttctgtgacgagaatttcaccatgtcctttcacataaatgcacagtaaaagatttttgctgtgttctatggagc

SEQ ID NO: 165063 - DNA, 541 bp, Homo sapiens
ggagtgacaccagcatttccagttccctcaaatatgcctccgcagctctaggtctgatgctaggttgggaatgagggtgtagtgattgagcttgatgatggtttgactaacaagtaaatgaaacatgaacatcctttgaggaaagtggctaattataaacatattttgaaaacaagtgctaccatttattcagcatttactaggaccaagaattaagtagtttttatatatatcatcctaatctaattctaggcacctgtaagttcaaaccatgtgattgccctgagaagactaataatctattgcccttacaaactgtattttccaggtgctcaacagttatttygcggagaagctgtgggctggagaatgggaaggtggagaaggtaggctactaatgtgagcattccatttctcctacatggcttcaaacaattcagccctggccccaaacacacaactccattaggcaacataaaagccctacagttaagtgggtttgccgcacctcctagctagataagactgcaatcatctatat

SEQ ID NO: 165064 - DNA, 509 bp, Homo sapiens
gaattcttcctggtctctaaaaaaatatgccctaggttacttccagtaagccaacagcaaatcagaatggaatgtgtgagttgcagcaggactggcagctcatgcaggttaaatgtcctgttgtgcatttccctccatgtaccctcactgggttagtagggaagcccggactcgtcttcgaatctcaagccatgacctgtgctatttctgtagatttcatagctgctgtcaagaaaactttttattgaagcatcatgcyttttgtgaaactatagtcaagcccatgcccaaaagccatctaggtctagacctctgatgacattctgatgaggtggagcaggtgactgctaccgtggagattcctgttccactctcagcttcttctctccatctactgaccccctcctcctactatccccaccaggaaatagacagactccaagagctacagcttagttgtactgagaacctaacaggcattgtgcatgcttgtgatgcaccaacgaatg

SEQ ID NO: 165065 - DNA, 593 bp, Homo sapiens
tagatttcatagctgctgtcaagaaaactttttattgaagcatcatgctttttgtgaaactatagtcaagcccatgcccaaaagccatctaggtctagacctctgatgacattctgatgaggtggagcaggtgactgctaccgtggagattcctgttccactctcagcttcttctctccatctactgaccccctcctcctactatccccaccaggaaatagacagactccaagagctacagcttagttgtackgagaacctaacaggcattgtgcatgcttgtgatgcaccaacgaatgagacagaagtgtgccctccttagggagctcgaattctagtgatttaaaataagcctgcagtaagggctcgcatctctccacagcagccatcttacaaagcattgtaccttcaatttggttttctgtgtcgtttttttcttaattcgctcaataaaatttatttcaggtttctgctcaactgtcactttacaatggaaagttctccttctaaaaaatatccatctccaactaccaccactccacacccacctctctctaccttgctttatttgtctatacagcccttaccactac

SEQ ID NO: 165066 - DNA, 593 bp, Homo sapiens
tagatttcatagctgctgtcaagaaaactttttattgaagcatcatgctttttgtgaaactatagtcaagcccatgcccaaaagccatctaggtctagacctctgatgacattctgatgaggtggagcaggtgactgctaccgtggagattcctgttccactctcagcttcttctctccatctactgaccccctcctcctactatccccaccaggaaatagacagactccaagagctacagcttagttgtactgagaacctaacaggcattgtgcatgcttgtgatgcaccaacgaatgagacagaagtgtgccctccttagggagctcgaattctagtgatttaaaataagcctrcagtaagggctcgcatctctccacagcagccatcttacaaagcattgtaccttcaatttggttttctgtgtcgtttttttcttaattcgctcaataaaatttatttcaggtttctgctcaactgtcactttacaatggaaagttctccttctaaaaaatatccatctccaactaccaccactccacacccacctctctctaccttgctttatttgtctatacagcccttaccactac

SEQ ID NO: 165067 - DNA, 353 bp, Homo sapiens
actccgtttctacaaaattttttttaaaaaattagccaggcatgatggcatgcacctttggttccagctactcagaaggctaaggcaaaaggatcatttgagcccaggaggttgaggccgcagtgagctgtgttagygccactgcactccagcctgagagacagaaggagatcctgtctcacacaaacaaacttgtacacaattgcttatagtaactttatttgtaatagccaaaagacttggaaacggccaaaatgtcctataggtgaacagttaaacaaattgcagtagatccctgccatgaaataaaattcaggaataaaaaagaacaaaatactgctataaacagcaac

SEQ ID NO: 165068 - DNA, 568 bp, Homo sapiens
cggaaaataataagccaacagacgcaacacactaatgctcactgacagtcttaatttctttaataaataaaataacgaaaaagcaagtaaaaaaagactgataaaagaattaaaaagcaagtgatcacagagcagcgttgaaaagtctcaatagtgctttctcttattgccacatgactactcagggtggttaatatttctcagctattattactgttattattattcatcacactagctgacatttattgacctgggtcagggaaggcttcctgaatgaagggaaatggtagcagtgatgtgagcagttaattagtcagttgaaaggaatgtggaggtcaggatggggacagtggtggrtggagtatcctaagtgtggggaacatcgtgtgcaaaggctcagatgtaagagactgttatggttcctttccaacctgagcctggcagaatagctcacataaagaaagtcaagaagaagggccattttgccatcgacaagaaggtggccagaggatacaccatcaatatttagaggtgcatccatggagtgggattcaagtagtaggtc

SEQ ID NO: 165069 - DNA, 568 bp, Homo sapiens
cggaaaataataagccaacagacgcaacacactaatgctcactgacagtcttaatttctttaataaataaaataacgaaaaagcaagtaaaaaaagactgataaaagaattaaaaagcaagtgatcacagagcagcgttgaaaagtctcaatagtgctttctcttattgccacatgactactcagggtggttaatatttctcagctattattactgttattattattcatcacactagctgacatttattgacctgggtcagggaaggcttcctgaatgaagggaaatggtagcagtgatgtgagcagttaattagtcagttgaaaggaatgtggaggtcaggatggggacagtggtggatggagtatcctaagtgtggggaacatcgtgtgcaaagkctcagatgtaagagactgttatggttcctttccaacctgagcctggcagaatagctcacataaagaaagtcaagaagaagggccattttgccatcgacaagaaggtggccagaggatacaccatcaatatttagaggtgcatccatggagtgggattcaagtagtaggtc

SEQ ID NO: 165070 - DNA, 574 bp, Homo sapiens
gaattcaagaccggcctgggcaacatggcggaaccccgtttccmcacacacaaaaaaatacatatatatatatatatatatatatatatatatatttgctgggtgtggtggcacacatctgtagtcccagctacttgggaggctgagcactccagcctgggtgagaaagcaagaccctgggaaaaaaaaaaaaaaaaaaaaggaaagagagagagagaaagagagaaagaaaaagaaagaaagaaagaaagaaagaaaaaatgcaaagagccacttcttttaagctattctccaatagattaagagaatgagaaaaaaataagctgttaagctttttggaggtgatatagtttgaaagtgaagaaatatctactttcaatgctagatttcagctttacatttataagttcctcagaaattatctgaaagttttgtattcctgcacacttagaaggcatatgaaacaaaaaaggtaaagatagaaaaagctaccctgcttcaaaataatcagttctttctgtgggttaaaaactactaatatatttggcttatatatttggtgtatcaatacttt

SEQ ID NO: 165071 - DNA, 488 bp, Homo sapiens
aattaaatatgataccaaaagtacctgtcaaaatgcattgagtgtctcctatccagatattgagttaggtgctttacatgaagcatttcatgtaacagccagagaagttctgtcaagccggttttttttaatcattattttacaggtgagggaaccaacgctccaggaagataagtcaggttttcgaggtcacactgctagtgacygggaatcacgaggttataattcacatatttctaatctaaccttttctgatctaagaccctatgaaataccattgatctaaatcaaagggatatttgagcaaaaatactaacctaaaaccttaatgaaatctgactgatatggtttggctgtgtccccacccaaatcttatcttaaattgtagctcccacaattcccacatgtcatgggagggacccagtgtgaggtaattgaattacagggatgggtctttcccatgctgttcttgtgacagtgaataagtc

SEQ ID NO: 165072 - DNA, 607 bp, Homo sapiens
tttacataccaccattatagtgttataataatctgtgtttttctgcaaacttgatttccagtgagttttataccttcacataatgcgtttttttcttttttcttttttctttttttttttttgagatggagtctaactctgtttcccagcttggagtgcagtagtgcaatctaggctcactgtaacctccatctcccaggttgaagtgattctcatgtctcagcctcccaagtagctgggactataggtgtgtgccaccatacctggctaatttttatatttttagtggagatggtggttcaccatgtcagccaggctggtctcaaacttctgacctcaagtgatccacctaccttggcttcccaaagtgctgggattacaggtgtgagccmccacgcctggcctttcttcacaggatgtcctattgttcattaataaaccgttctttctgattgtagtgctctctttagcatttcttgtagaacaggtctggtgttgatgtaatcccacagctttttttttgtctgggaaagtctttatttccccttcatgtttgaggaatattttaaccaggtatactcttctaggttaaaaggttttttttcat

SEQ ID NO: 165073 - DNA, 617 bp, Homo sapiens
aagacatatgtaggaggatcacatacatgacaggtgatttgattatggaagcagagaagtgaggcaaagagagggatgagcgagagaaagagagagagagagagagaaggagagaagggcagaggcagaagtcagaaaaaagaaaagatgttatgtatctagatttgcagttggaaaaagaggacttgagccagggaatgcaggtagcatctataatctggaaaaggcaaggaaataaattagaccataaagccttctgaaggactgggccagctgacaccttgattttagccctytcaaatgacttatgtcagaattgtaaaataataaaatatgttgtttaaaaatcactgcttgtgctaatttgttacagcagcaatgaacaactaaaattgctgtcaattgtatctttcaatatttttgtgcttaaattttctaaatgtattatttgtattatgttttgttagtaaattttgagaaaaaataagtggtagcaaaattgaaccatctcccccttatgtgtgtgtatgtatacatttatgtgttgatatgcagctatacatacatacacagatacatatatgcatgcgtatatatgtgtgaatacatatattatg

SEQ ID NO: 165074 - DNA, 615 bp, Homo sapiens
ttaatttattgtctttgttgttttggcttaagcagcaattttcactttagctgaaacttacagttgaaagttggtcctaaatttaggctctttgctcggggccattggtgcaatcctgaaaaacatcaccacagtatttttttggaaattgttttttgccagcttgagagaattatgggctagtgtaagtttatagggtgagggaagtaaacagcaaaatataaaaagagaagcaatagcagaaggctaggggaaaactgggatgctactagcatgtctattttagtccttttacaaatcctgtatttgctcaaataatattgatattattactccctttcacacaagaaagtyaaagaatttcaataataattgcttgaatacagtctgctttcaccagtggacactgaactgttcctaaagaagaaggcctaaaaagaaaataaatctgaacataatttgcttgacctcatagccacccccctaataaggaccactgtaacagtgaaagcctgacaacagaaaaaaaggagcccaattacctctactttttataaagtagctagctacagaaaatcttccactcttaacatggaacaatccttcctcttttga

SEQ ID NO: 165075 - DNA, 634 bp, Homo sapiens
aatgatcattctgttttacatttgggaaatctccaactgctctccacagtgaataaactaatttacattcccaccaatggtgaataagcagtcccttttctctatagccttgccaacawctgtcattttttgactttttaaaaatagccaagacattggtgtgagatagtatctcattgtgattttgatttgcatttctctgacgattattgagatgttaagcattttttcataagtatgttggcaacttgtatgtatgtcttcctttgagaagtgtctgttcatgtcttttgcccattttttattggagttatttggtttttgcttgttgaattgtttaatttccctgtagattctggcctttgtcagatgatagtttgcaaatattttctcccattctgtaggttgtctacttaccctgttgatagtttcttttggtgtgcagaagttctttaatttacctaggtcctacttgtctatttttgtttttgttgcaattcctttttttagacaaaatattatttgccaaggtaaatatcaagaagagtatttcctagattgtcttcctggaattttatagtttaagaccttgcatttaaatctttgatcctttttgagttgatttttgtatgtg

SEQ ID NO: 165076 - DNA, 568 bp, Homo sapiens
tgattatttatacatttaacaaattcattgtgtttatatacaataagcaggacacaaatctatgagttgaagtattaaaactatttttaaaaactcaccaccgtttacacaaaataaaaaatatgtaaaagattattcttaagtgtataacaattctttttaraatattgtataaaaacatgtatgtattgttaattttttattaaaagctctcatcagggcaaaggtcaattttggcctcactaaggtcatgtatcataaatattatataaattgaacctcaattaattgattttcctaagtacagcatatgaaaaaaatattatctacttctatttattcaccaaaatccttgcttgtcaccttaatcctagagtgtaccaatatggattattgtactttacaaattatcagattgggaatgagcatatttagtttttgttcactcatccagtcaacaatttgttcatttaaagcatgttttgaatcctattttgtatgaggtaatttgctttgttttggagaacaaaatggaacagatatcactactgtcttgaaggagtttata

SEQ ID NO: 165077 - DNA, 568 bp, Homo sapiens
tgattatttatacatttaacaaattcattgtgtttatatacaataagcaggacacaaatctatgagttgaagtattaaaactatttttaaaaactcaccaccgtttacacaaaataaaaaatatgtaaaagattattcttaagtgtataacaattctttttagaatattgtataaaaacatgtatgtattgttaattttttattaaaagctctcatcagggcaaaggtcaattttggcctcactaaggtcatgtatcataaatattatataaattgaacctcaattaattgatttycctaagtacagcatatgaaaaaaatattatctacttctatttattcaccaaaatccttgcttgtcaccttaatcctagagtgtaccaatatggattattgtactttacaaattatcagattgggaatgagcatatttagtttttgttcactcatccagtcaacaatttgttcatttaaagcatgttttgaatcctattttgtatgaggtaatttgctttgttttggagaacaaaatggaacagatatcactactgtcttgaaggagtttata

SEQ ID NO: 165078 - DNA, 238 bp, Homo sapiens
agccaaaccatatcaccatacataagataaaccccagtgctataaataaccccaaaatgttgctgcccttcaaagttctctgatgtaggaactcctcatcatgctgcagagacacatcatgtagacttgtaagtcccttctctggttttccttattcccaggagkggttttgccttcctctctttcaagatagtggcccctgtggtgtatcttttgaaggtctcatcctgagggagct

SEQ ID NO: 165079 - DNA, 397 bp, Homo sapiens
gagacttattcactatcacaagaacaacatgggaaagacctacccccatgattcaattatcttccaccaggtccctcccacaatacgtgggaattatgggagttacgatatgagatttgagtggggacacagagtcaaaccatwtcagtatataaactccttttagcacaaattgcaaagtccttcatggttcaataacttcacgttcttctctcttttctccactcttctcatgcaacagtccagccccatggacatataatggtatcttccactttggaggctttatctacctaattctcctcattcttgaaaattcaatttaggcatccttctaggaagtcaccacgaattcttctgtccactctgacttgggtatccatcctctgagctgcca

SEQ ID NO: 165080 - DNA, 489 bp, Homo sapiens
ggagggacctggtgggaggtgattggatcataggggttgatttcccttattctgttctcatgttagtgagtgagttctcagaagagctgatggtttaaaagtttggcactaccctcctcaatctctctctcctgtcaccatgtgagacatgtcttgcttctccttcactttctgccatgattttaagtttcctgaggcctccccatccttgcagaactgtgaataaattaaacctcttttcttcataagttaaccagtctcaggtwgttctttatagcactgtgaaaacaaactaatacaattacctactgctattctttgcagtttccttagatgcaacatattggatatttgttgagtaatatttgcatatatgtaagcatgaagcattaaaaattggaaacgtccctttttatggctgcataatgttctgcagtgtatatgtactacattttctttatacagtcttatatggtttggctgtgcctc

SEQ ID NO: 165081 - DNA, 594 bp, Homo sapiens
cctcttcctgtacaccacaactgcttcctagatgagtttctagtatttagtctgataatgctacaaaccatttttaaaaccctacttgtcagaattgtgcttctaaaactgttttcaaagcttcaaagtcattctggagtttattaatgacttaaagagaaaatgaagcacaatgacatgatcaatamggatataaccccctttttattgcctgctcctcttctccttacatgaatggttatgctctcatgccctatgctgttctctctggcctaaatatgctcataatctgttctacctacctaatgcctatttgtcacacaagactgatctcgggtgacatttattttgttaaatatttttgactaatttccgtaagagtcattataggtatctattaaagcatgcattaaactacatttcaaatagtattttgtaaatgttttctacaacaaaactatcaattctttagggtgttagttttttgatgacttgtgactttgtccctgcttctccccagctcctcagtaagttcaacgttctcttcttgcaacactgaaagctgctgggacttctgagcagctgcctgcttta

SEQ ID NO: 165082 - DNA, 526 bp, Homo sapiens
tcctcacatgtaaaatggaaggatgaactagccaaatgtgtgaatccttttatgagggccttaatctcattaacaaaggagagaccctcatggcctcatcacctattaaagaccccatctcttagtactatcacactagtaacacctaattttggaggagacacattcaaactgtagcagcaagtgagggtagacctatcttagggcatagtttgggggacgaagagtgaatakaaataaggagtcagttttaaaagcatttgatttctagccaaacacagggtccagctacctattgacaattcctcttacatatttaataaatatctcaaatttaacctataccttcaaacaaacctaatcctaaattatatgattctccctataatatggaagactaatttcaaaatcagagaaaccttttgaaatttaacatatttaattgtattaaaaataaaacaacagaccaggcatcatgtctcatacctttaatcccagtactttgagtggctgaggtgggaggatc

SEQ ID NO: 165083 - DNA, 573 bp, Homo sapiens
gtcttgggcctgcaggtgcacagaggcaagaactgagatttgggcacctccagctagacttcagaggacgtatggaaatgtctgatgtccaggcagaagtctgctgcaaaggtggagtcctcatggataatctctactagggctatgcaaaggggaaatgtggagttggagctcccacacagagttcccactgatgcactacctagtggagttgtgagaagagggccaccatcttccagaccacagaatggtagatctgccaacagcttgcgccatgcgcctggaaaagccacaggcactcaacactggcccatraaagaagccacagagtctgtaccctgcagagtcacaagggcagagctgtccatggccttgggagcttacctcttacataagtgtgccctggatgtgagacatggagtcaaaggagctttattttagaagtgtaagatttaatgactgccctgctgtgttttgaacttccatagggcctgtagcacctctgttttggccaatttctccctttgggaatgggagcatttaccaagataccattgtatcttggaagtaact

SEQ ID NO: 165084 - DNA, 550 bp, Homo sapiens
acattcgactatatctacttactgatttatcatcatatrgaaaaattcttgaagggtgaatattctggatacagtcatgcaccacctaacaatattttgttcagactacatataccccataagattataatactgtatatttactgtagcttgtctatgtttagttacacaaataccattgtgttacaattgcccagagtatgtagtacagtaacatgatgcacaggtttgtaacttaggagcaacaggctatatcatatagcccaggtgtgtagtaggctataccatctgggtttgtgtaagtacactctgtgatgtttgtacagtaacaaaattgcctaatgacacatttctcagaacatatcctcattgctaagcaatgcttcactgtagaaattttctaaggcattattttgcaacaaactagatttgcttatgtatgaattaccctattaatattttttgaaagaaaatattggagatgaatacatttatgacacagatcaaagtgatggtttcacagttgtatacttatattcaaacatgttaa

SEQ ID NO: 165085 - DNA, 550 bp, Homo sapiens
acattcgactatatctacttactgatttatcatcatatggaaaaattcttgaagggtgaatattcyggatacagtcatgcaccacctaacaatattttgttcagactacatataccccataagattataatactgtatatttactgtagcttgtctatgtttagttacacaaataccattgtgttacaattgcccagagtatgtagtacagtaacatgatgcacaggtttgtaacttaggagcaacaggctatatcatatagcccaggtgtgtagtaggctataccatctgggtttgtgtaagtacactctgtgatgtttgtacagtaacaaaattgcctaatgacacatttctcagaacatatcctcattgctaagcaatgcttcactgtagaaattttctaaggcattattttgcaacaaactagatttgcttatgtatgaattaccctattaatattttttgaaagaaaatattggagatgaatacatttatgacacagatcaaagtgatggtttcacagttgtatacttatattcaaacatgttaa

SEQ ID NO: 165086 - DNA, 618 bp, Homo sapiens
tctatggcatacaataggtatctgagaatttgtttttctgattttgtcataaaacattcctgtatgaaatgcccaagaacgtgtggtttcttctgcaatttgaagcattgttttaatacagattagatatttaacatatatgaagtttagtgctagtcatattgataaattatttgaaaaactaactcccccattactaatttttgtgacttactttgatgaatcaaagtttatactttggtgaaattttttaatcaagttttagtatctgataaaaatatagtcaacataaattatgctttcctttgtacatgagaagacatcgtttttgataacatttcactacaaatgagttttattttatgaaataaatctcactttaggagcaatggttatttatataaacttccttcaaatgtgtgtgtgtgtgtgtrtatatatatatatatatatatatatatatatatatatcacatttttctactgccttgaaattcttaaataagtaaataattggttaatttacttttcatgattaagcaatatgcattccttttataataatgcatttagcaatattcaacttgggctatttattcaagttttggatttatagtc

SEQ ID NO: 165087 - DNA, 589 bp, Homo sapiens
atatggaatataaatccccttctcatcactccaatctcgatctcccttatcctgtcttatttttcttcatagcacataaagccatctgtcttggagctccagattaaaagttttaaaagatcagagatatttttttttcttactgttgtaacacagtgcctagaatgtggcaatcattaaatatttmttgaagaaatgaatcaatttgctataattaagataattatagtttttcaagagtcccttctgttatcatatctgtgtaaactgctattatgacaacaatttgaatttgtagcttataatgggctacataaaattagtaagactccaagactccaagaaacattaggtttgtgaactagcctttctaaaacatgtgaacattgcagaaacataatttgttatctctcagtaagttaatatctaccattactttctggaatagaatgtgttatctgcagtttcttggtgcacttcagaaacctcaaatctcattgggactcacctgcaacctatgttatgtctttgctagggtctgaaagttgtcactccaaaattcttatggggaaatcctaacccccaacat

SEQ ID NO: 165088 - DNA, 589 bp, Homo sapiens
atatggaatataaatccccttctcatcactccaatctcgatctcccttatcctgtcttatttttcttcatagcacataaagccatctgtcttggagctccagattaaaagttttaaaagatcagagatatttttttttcttactgttgtaacacagtgcctagaatgtggcaatcattaaatatttattgaagaaatgaatcaatttgctataattaagataattatagtttttcaagagtcccttctrttatcatatctgtgtaaactgctattatgacaacaatttgaatttgtagcttataatgggctacataaaattagtaagactccaagactccaagaaacattaggtttgtgaactagcctttctaaaacatgtgaacattgcagaaacataatttgttatctctcagtaagttaatatctaccattactttctggaatagaatgtgttatctgcagtttcttggtgcacttcagaaacctcaaatctcattgggactcacctgcaacctatgttatgtctttgctagggtctgaaagttgtcactccaaaattcttatggggaaatcctaacccccaacat

SEQ ID NO: 165089 - DNA, 593 bp, Homo sapiens
gcaatcattaaatatttattgaagaaatgaatcaatttgctataattaagataattatagtttttcaagagtcccttctgttatcatatctgtgtaaactgctattatgacaacaatttgaatttgtagcttataatgggctacataaaattagtaagactccaagactccaagaaacattaggtttgtgaactagcctttctaaaacatgtgaacattgcagaaacataatttgttatctctcagtaagttaatatctaccattactttctggaatagaatgtgttatctgcagtttcttggtgcacttcagaaacctcaaatctcattgggactcacctgcaacctatgttatgtctttgctagggtctgaaagttgtcactccaaaattcttatggggaaatcctaacccccaacatgatgctattaggaggtgaggccttgggaagcgattaggtaataaaggtacagtcytcatgaatggaattagttcccttataaaagaggcccaagtgagctgccttgcctcttccgtcatctgaggacacagttagaagttgccatctacgaacaaggaaatggccgttcacta

SEQ ID NO: 165090 - DNA, 586 bp, Homo sapiens
tttcaggacatttttctattctttttgagtatatcagaataggaggtttctatttttgtacttaactgtgtaagtacaaaagactacagtttatcatatgttccaacttgggaaattacagaatttccctaggggctcctcaggactccatgcacagaaaggcctgtcggaatctaaccctaacaaaactgaaatgctcaggttcctgggatgaacaagccaactaggacccccaatagaggttaacacaaacacacacacttacaaaacaaactgctgtttggttgaatcttctgtttataacaccgggaacaatgtctgttacatagtagatcctaaagaaatatttattaaaccaccacttatttagccaatgttgattgggaatcttctctatgctaggcactgygatagggtggagatattgaaaagtgatgaaaataatacaatgcttcatcattttcgtgaagactataatataactgttacaaaatgacaaatgctatagaaactctgtctacagatatcatatacacttatctaagcaagaagatatttgaaccaaaatttaaaggttgagtaggag

SEQ ID NO: 165091 - DNA, 638 bp, Homo sapiens
agacttccatgcagtggaggaactggcttcttcaaaaagaggaaggatgtctgtctccagtagcaagtgaggtttacagaagcttggaaatttggaattcttggccttatctatacctgccaaaatgtcctcatattctaaggtcctattcattccttaacagtgtgcttactttaacataagagttataaagcgtgaaacatttgacaatctaactctgtatctcttaatcttagattcagtctgaaactcccaattattgcaggagacaagggacatttttaaatttccatggaagtgcttaattatatgtccatcacttttaatttcttttttcttcatatacacacttcaacacccttctaagaagccaggtgactctataaatgtagtgaatactatttccaacataacagtggcatagtcacttgtactcgcagtatattgatctgaacctgtaccatattccatacaaccagttggttatttgattagtcataattgtattgcttaccatggatatcttgtgttcagtttycccccagcttgatggttatctctgagctcctttaataggtgaacagcctaatccaagaattctattgggagggtttatttcctagagacaatttcagtac

SEQ ID NO: 165092 - DNA, 592 bp, Homo sapiens
gatatgtttataggttttttttcttttcaaacctgaaaggtatttaaaagaaaacttgcaaattgtaatttttaatgcttagaatgtatttaatgtagtatataagaatctcttatgtataatgttcttaatattcttcatatttaaaatttttaacttattacactctttgcacttgtcaaaaactattttgcccaaaatcttaatagattataatttttgagttaataattgatagagtctggatatttgtccctgctgacatctcatgttgaattgtaatccccaatactggaggtggggcctggttgtgaagcaggatttttccctgacccctatgtggaactccaacagggtgcctttgttgctcagcccaccgctctcaacttcttgtgggaggcagcatgtgagccaggcaaaactggagtgccggagtgctagaatcagctggytgcttcggtgccagcgggatcaaactccactcactcagatctgctgcattccacccctcacaggagtgaccacacaggtgagtgaatgcaggagccagagcaagtgcttttgggtgctggcaggagtgaactccatgcag

SEQ ID NO: 165093 - DNA, 555 bp, Homo sapiens
cttctcaagatccaccttaatttgccttaagtcctgtagagagaaggggacctggaccttactggagccaagctcaccaggcacctgttggaggggtaagagtaagactggggcttgtcttgggtaaggattcctcagattgggcaagtgagagagaaactggatagggaagacagggtggtcctggaggsgcagggccagagggagttggctcctctgctggaggtggaggtgccactcagtttcatttctttagtttcttggaattgccccttgtagcctctcctgagatggcaaacaggagggctggatcaatcctacactgtcagcaaaggtctagactacccttcaagataaagaaatcctgcaaatatggggcctcagaccatttgccctcaggtttacagaaaacatcaactgcaggatggtatcaaactgaatggttccttcctgaggccaagacactccttcctgcagatcattatttggccaaatctttgtgcaaagggctaaaggcattttttctttacagcctgagggccaaagcagtcccag

SEQ ID NO: 165094 - DNA, 396 bp, Homo sapiens
ttcaacccaaagtttagaattgagtttgggccaaaaaggtttctcagggagtgcatagattcatttagattaagtcccagaggggccttgccaaatttgcagctattagccagtggagkcattcctccactgcttccctattataagcagaatgctgaagtagggaagaaaagcccgtttgcataaaaaacgtagaataaaaaataaataaataaaaaaacagcttaagtggggggaaaaagcctcttgctctatgaaaatggattcctttaattactctatcgttcctctggctctaaccaagctggatcccttggtcgggggagaaaagactatatgggcccatagcaggaggggacagtgagcaagaaacactggccaactgcatggagcccc

SEQ ID NO: 165095 - DNA, 396 bp, Homo sapiens
ttcaacccaaagtttagaattgagtttgggccaaaaaggtttctcagggagtgcatagattcatttagattaagtcccagaggggccttgccaaatttgcagctattagccagtggagtcattcctccactgcttccctattataagcagaatgctgaagtagggaagaaaagcccgtttgcataaaaaacgtagaataaaaaataaataaataaaaaaacagcttaagtggggggaaaaagcctcttgctctatgaaaatggrttcctttaattactctatcgttcctctggctctaaccaagctggatcccttggtcgggggagaaaagactatatgggcccatagcaggaggggacagtgagcaagaaacactggccaactgcatggagcccc

SEQ ID NO: 165096 - DNA, 475 bp, Homo sapiens
tttgaaaaataaatcacattgatagacaactagctaggttaacgtaggtaaaaagcatatgttgaaataagtgcaatcagaaacgacaaagaagacactacaactgatgctatagaaatataaaaaatccccagagaatactatgaacaactctatgcacacaaattagaaaatctagaggaaagggatacatttctggcaacacacagttcctcaagattgaatcaagaagatgccraaaacctgaatagacaaaaactctgaaattgaatcagtagcagaaacaaaacaaaaaccctaccaaccctcccccacaaaaggaaaaaaaaaaaaccctgggccagacagatacatggataaattctaccatacatagaaagaataactggtgtgaatactactgaaaatattccaaaaaaatcatggaatagtatcttcttcccatatcattctttgaagccaacatgagcctaac

SEQ ID NO: 165097 - DNA, 593 bp, Homo sapiens
caatattaccacacatcctatgcaatcaagaagttcactttaggcacatgaccagtaattactccagtgctagaactatccatgaaaaacagcaaacataatatgtagtaatgcaagcatgtatgtgagatttggctccacactaaatctggcttcatgcttagttatattaaagaataattgctaaactgccagtacatttccttacaatatttcatattttaacttaatcaagactaagagttttaactacgaaaagtttaattagacaaatttctccaattgtctgtcagattttaaataatattttgttatctaaactttttcaactttctattttctccatatgtgcataaagataggtacacagagaaacaggaaaaaccacatatgacttacacagactatccacaacatgtctgggctttccattcagtcccagattttttccttcttcttaaataactagtcattttatcctaggtcaaaaaattaaccatayaatgtcttttatcatataaaattatctttttttataaattttctctccaaaaatgcattttcatatacattactttcctcacatctctctc

SEQ ID NO: 165098 - DNA, 561 bp, Homo sapiens
tacatttaatatataacctactatttttagaatttaaaatgtgtcatatttcacttataaaattatgaatcactggattaaaattttatgtcaraagagtactttctgaaatattcactgagtcatacacattgacagattaatacattatgcttcattttaaaagacgaaaggaaaattagaaagaaaagacaaaggccaggaatggtggctcacgcctgtaatcacagcactttcggaagccgaggcaggtggatcacctgaggtcaggagttcaagatcagcctggccaacacggtgaaaccctatctctactaaaaatacaaaaaagtagcagggcctggtgatggatgcctgtaatcccagctactcaggaggctgaagcaggtgaataccttgaaccagaggggcagaggctgcagtgaactgagatcacaccactgcactccagcctgggcaacaagagtgaaactccatctcaaaaaataaataaataaatacatacatacatacatacatacatacatatatacatacatacatacataaaaagacagagtt

SEQ ID NO: 165099 - DNA, 501 bp, Homo sapiens
aggtctctgcttttctccaaaggtgattttgagaacttcagtatttaaaggggaaagagtggtattgggcatagaggatgaaatatttttaaagtatgggtagataagagacaaacagttgcattcttctgagtcgttgatctgcctttcactggatacacaatttacatctggggggtgcggcgggcagaggaayagtcacttatgacttagtctggctcagtgaatctgcatttttgcatcagaggaagcaatcagatatgcatttgtctcaggtgagcagagggatgacttagggttctgtcctttgtcccacacctgtgaagataagctatcaacttacgttgtcagggtaaaattcaacagaacgtttttagggtaaagatttggaggctcacaaggaatttcctagtgcgcaaattgtgagggaggtatgtagcctttttaaatctttgtagctatcttgtttaggaataaaatgggaggcaggtttgcctgatg

SEQ ID NO: 165100 - DNA, 501 bp, Homo sapiens
aggtctctgcttttctccaaaggtgattttgagaacttcagtatttaaaggggaaagagtggtattgggcatagaggatgaaatatttttaaagtatgggtagataagagacaaacagttgcattcttctgagtcgttgatctgcctttcactggatacacaatttacatctggggggtgcggcgggcagaggaatagtcacttatgacttagtctggctcagtgaatctgcatttttgcatcagaggaagcaatcagatatgcatttgtctcaggtgagcagagggatgacttagggttctgtcctttgtcccacacctgtgaagataagctatcaacttacgttgtcagggtaaaattcaacagaacgtttttagggtaaagatttggaggctcacaaggaatttcctagtgsgcaaattgtgagggaggtatgtagcctttttaaatctttgtagctatcttgtttaggaataaaatgggaggcaggtttgcctgatg

SEQ ID NO: 165101 - DNA, 660 bp, Homo sapiens
taagacaaatttaagcttgggcatgaaaatgatgtgccatactactttgtagtatctggttgtatgaaatatgctttttatttgttttagattatgaagataaaacattcaaaatgaatcttttgagaaatgattggagaaatattcaaagtgaaattgttggagaaaacgtgggaatctctgggaatatccatgatcaatcacagagataatgagtgtgaatacactctcccaccattaaaaggagttaacagttgccaggagccattactgagacaagattgaaagctaaaagcagctaccttaaaccacatgaagtactgctacttgtcaacccatctcctgccaacatcccaacaggttaaaaggcttccattttctcttagattgctttgaattcctggtcagactgctggagacacataggaggctgcaaggataaagtaaggaaaagtaagccagcaaggcagcatttctgtaagggaagagmagacggggaaggggaatggcaggtactgagtcaaccagttttctggatccaacttcacctgtcccattactctgcaggcaggaccatggtttttcctctttcagccaagtactaactctggcttctcaggggagtcttatttatagacctagaataagttgattacaggg

SEQ ID NO: 165102 - DNA, 658 bp, Homo sapiens
aatgatcttattctaagatttgatataagtaatgaccaatagctagagttggaaattaatactgatgggtaaaatacaatactatatttaaaatgagattgcgtaaaagacaaagaggtgaattttggattctaccacttagttggatgaatgtgccatggaccaattcagtgtacttggcttctcctagtacttaagttaagccttctgttcatcaataatggggttgggaaaggaaaaaagggagacagccatttagttacaaattagtgcttcttagaaaaatacatatgtaataaaggcagtatctcttcttaggaggttaaacaaagcttgtgcccatttctcatggtcaccatctttgatttattttgtgacatttcctttcccccaaatccctcaaatcttctcagtagtggcttagaagaaggatatgaaaaacaattagtctgtgccttctatcttgccactggatggcagtacacctacacccctgcatgcccttaaggagaaatctttctgtgagcacaatcytgacttgtccaattggagaagactggagattttagcagaaacacttgtttttatatttcttcctgagttgctatggtagaatgttaacatttacttcttcatatttatcctgtaacccaaaaga

SEQ ID NO: 165103 - DNA, 603 bp, Homo sapiens
taattccatttgtgtatttcaatatttctggtcttaatctttatcttctcccagaaattctagatatgtgatattcattagttctgtttatatctttagttctcctttttttggagaatagggtaatcttgcacttcccgaaatgtgatagrctacaaaagtggccacaaattatttatttccctctgtccaaatccctttgcaatgtgacttgcagatccttctattaagaggtagaatctatctccccatatcgactctgggcttggccatgtgacttgctttagccattgaaaccagagcaaatgtgactcaaactgagatttgaaaagtgtgcatggggacttcttctcttgcagcactttggatccctctgactgccaccatgtgaataagctagggctaggactggcctcttgatgatacttggcctcattgctctgtgttcctagctgacagtcagtgaatcctcagaaacagagctgccttgctgacaggcagctgaccacaaacacctgagtgagtccagtagaggccaacagaaatgtccagctgagcctagcacaaattttcattccacagaattatgagctaaatgattag

SEQ ID NO: 165104 - DNA, 577 bp, Homo sapiens
agcgagtgacagatgtcacggtacagagatctcagtgggtcgctgccctccaggagcttataaagaaaattttccttctgcagttttcagccggctacacccagtcccctgcaagtaattttcagtgaaaaaaacccgcatctttttcctagtccttgcaaatattctggctttccgagatctcttcgccttgaataccgaagtcactccgggatctctctctggacgtttggcagttattccagatgtagccgaatgaccggcttgccctttccctgcggagtgacaggaagacagcgaccccggaaagtttccagcacttaaaacrcaaagcgcagcctgaacccacaaggagccgacaactcttgcggcttccaccacccttctatcgcggagcctaaggaagctaaagcagtcgggtcagacccggccaccgggcagcgcatggttccgggcgcagggagcgacagactcagccccccagcggcgcggcgcagagaagttgcaggccagcctgcatacccaagtgcgggggggaagaaaaacaaacaaacaaaaaaaatcctttcttctggac

SEQ ID NO: 165105 - DNA, 577 bp, Homo sapiens
agcgagtgacagatgtcacggtacagagatctcagtgggtcgctgccctccaggagcttataaagaaaattttccttctgcagttttcagccggctacacccagtcccctgcaagtaattttcagtgaaaaaaacccgcatctttttcctagtccttgcaaatattctggctttccgagatctcttcgccttgaataccgaagtcactccgggatctctctctggacgtttggcagttattccagatgtagccgaatgaccggcttgccctttccctgcggagtgacaggaagacagcgaccccggaaagtttccagcacttaaaacgcaaagcgcagcctgaacccacaaggagccgacaactcttgcggcttccaccacccttctatcgcggagcctaaggaagctaaagcagtcsggtcagacccggccaccgggcagcgcatggttccgggcgcagggagcgacagactcagccccccagcggcgcggcgcagagaagttgcaggccagcctgcatacccaagtgcgggggggaagaaaaacaaacaaacaaaaaaaatcctttcttctggac

SEQ ID NO: 165106 - DNA, 609 bp, Homo sapiens
ttatgtctccttagtcactttcaattgggaacacttcgtcaaccttactatttcttgaccttgacatttttaaaagtacagggcagctattttgtagaatgtccctcaatttgaatttatctgttgctttctcatgattagattggttatgcattttggcaggaataccacttaagagatgttctgcccttcttagtacatcatatcttgagattcatgatgttggtgtgtaccaatgttggtgatgttagctttgaaaattttgttaagctggtattcctcatatgtatccctgaaagttrttatttatctcattgtaactaatatgcaatttgtggaaaaattattttggggaacagtatatttacatagtataatcaaagtttcacccacaagttttagcatcagttgatgattatctgacttcattccttctataattattagttgacattcagacataaggtaatctttcccatctccattatttactcagttgtttttatctgtatgaactcatggatttttaattttattcagtggttaaatccattgctgtcattattttgattcacaaattgtcccaggtttggccaatgggtgtctcat

SEQ ID NO: 165107 - DNA, 609 bp, Homo sapiens
ttatgtctccttagtcactttcaattgggaacacttcgtcaaccttactatttcttgaccttgacatttttaaaagtacagggcagctattttgtagaatgtccctcaatttgaatttatctgttgctttctcatgattagattggttatgcattttggcaggaataccacttaagagatgttctgcccttcttagtacatcatatcttgagattcatgatgttggtgtgtaccaatgttggtgatgttagctttgaaaattttgttaagctggtattcctcatatgtatccctgaaagttattatttatctcattgtaactaatatgcaatttgtggaaaaattattttggggaacagtatatttacatagtataatcaaartttcacccacaagttttagcatcagttgatgattatctgacttcattccttctataattattagttgacattcagacataaggtaatctttcccatctccattatttactcagttgtttttatctgtatgaactcatggatttttaattttattcagtggttaaatccattgctgtcattattttgattcacaaattgtcccaggtttggccaatgggtgtctcat

SEQ ID NO: 165108 - DNA, 668 bp, Homo sapiens
tcatacagctgggtgctcatctgagacaaagcttccagaggaaggatcaggcagcaatatttgctgttctgcaatatttgctgttccgcagcctccactggtgacacacgggcaatcagggtctggagtagacctccagcaaactccaacagacctgcagctgagggacctggctgttagaaggaaaactaacaaacagaaaggaatagcatcaacatcaacaaaaagcacatcaacaccaaaacctcatctgtaggtcaccatcatcaaagaccaagggtagataaaaccacaaagatggggagaaaccagagcagaaaaacttaaaattctaaaaaccagagtgccttttctcctccaaaggatcacagctccttgccagcaatagaacaaagctggacagagaatgactttgaggagttgacagaagtaggcttcagaaggtcagtaataacaacttctctgagctaaaggagcatgttctaacccattgcaaggaagctaaaaaccttgaaaaaagattagattaatggctaactagaataaacagtgtagagaagaccttaaatgacctgatggagctgaaaaccrtagcatgagaactacgtgatgcatgcacaagcttcactagcctaattgatcaagtggaagaaagggtatcagtgatt

SEQ ID NO: 165109 - DNA, 668 bp, Homo sapiens
tcatacagctgggtgctcatctgagacaaagcttccagaggaaggatcaggcagcaatatttgctgttctgcaatatttgctgttccgcagcctccactggtgacacacgggcaatcagggtctggagtagacctccagcaaactccaacagacctgcagctgagggacctggctgttagaaggaaaactaacaaacagaaaggaatagcatcaacatcaacaaaaagcacatcaacaccaaaacctcatctgtaggtcaccatcatcaaagaccaagggtagataaaaccacaaagatggggagaaaccagagcagaaaaacttaaaattctaaaaaccagagtgccttttctcctccaaaggatcacagctccttgccagcaatagaacaaagctggacagagaatgactttgaggagttgacagaagtaggcttcagaaggtcagtaataacaacttctctgagctaaaggagcatgttctaacccattgcaaggaagctaaaaaccttgaaaaaagattagattaatggctaactagaataaacagtgtagagaagaccttaaatgacctgatggagctgaaaaccgtagcatgagaactacgtgatgcawgcacaagcttcactagcctaattgatcaagtggaagaaagggtatcagtgatt

SEQ ID NO: 165110 - DNA, 484 bp, Homo sapiens
tttgcttaaggtttccgtctagaaaaagatagtaatgctactcaagcytaaagcagctccttctaactaaaagaatacctttgctaaaattctaaaagaagaagaaactgcagatgaagcagaagcatacgtagaaggaggaggagaaagtttggggagggaggaaggaggcatagaaggtgagaaggaaggagagaagaaaggaaggaatgaatgaaggaaagaaaccaaaccaaaccaaattcttagagtggaaagagaaagttgagtgtctcagcactctgtaccataaaactcagggcttgacatttattaaacttttgggtatcaaaataatataggaactaaagtaaaaataaaaaactctttaacctatatttaagatctaagaatgtatttccaaattatattccactaaatactaaaggccagagtaaaaacaaaactggaagttacacaggatttttaataatgacctgaactc

SEQ ID NO: 165111 - DNA, 495 bp, Homo sapiens
atgattcctggattcagttttctccaaagttcgtttctctcctgcactttctgtttgttatttaagccaaagaggtgtgatgaaaatkgggatatgcaagaatgcttgagatgcgtcctgcaagaggagtagatgtccaagtctttgtgccacgtatgtgtaggttgggaatggcgagggccagagggggaaacagcagtggtcctgggatgggagagaaatttggcaccaaaatgcggggaggaacatgtgcaaagggagccacggggaaaggcgcgccacattcaaagaaccccatataattcattcagtgggacttaggcattgggaggtgggatctacggggtaggaaaaaataatgggtggaagattgcttactatgcaccaacactgctcttagcatatacatatattaggttcattttctctaatcatagcaacactatgaaacaggcactattatggtccctctgtttgggatattccgaggggtat

SEQ ID NO: 165112 - DNA, 495 bp, Homo sapiens
atgattcctggattcagttttctccaaagttcgtttctctcctgcactttctgtttgttatttaagccaaagaggtgtgatgaaaatggggatatgcaagaatgcttgagatgcgtcctgcaagaggagtagatgtccaagtctttgtgccacgtatgtgtaggttgggaatggcgagggccagagggggaaacagcagtggtcctgggatgggagagaaatttggcaccaaaatgcggggaggaacatgtgcaaagggagccacggggaaaggcgcgccrcattcaaagaaccccatataattcattcagtgggacttaggcattgggaggtgggatctacggggtaggaaaaaataatgggtggaagattgcttactatgcaccaacactgctcttagcatatacatatattaggttcattttctctaatcatagcaacactatgaaacaggcactattatggtccctctgtttgggatattccgaggggtat

SEQ ID NO: 165113 - DNA, 572 bp, Homo sapiens
aataacccaatttaaaaatgaacaaaaacagaatagtcagtaaatttttttcaaaaaagacatacaaatggccagcaagtacataaaaagatgcttaacaactgtgcattagagaatggaaaatcaaacccacgataagatattgccttataccagttaggtggytattatcaaaaaacacaacagatgagtgtcagtgcgggttaaagaaaaggaaacccttgtacaccattggtgggaatgtaaaatggtatggtcattatggaaaacagtatagaggatcctcaaaaaatcaaaaaatagaactatgatataactcagcaatctcatgtctgattatccaaaggataatcaggagctcaaggagatatctgcactcccattgcaacaatcttcaatagacaacatacggaaacaatttaactgtccatcaatgaatgaatgggtaagaaaacatgaaacacacacacacacacacacacacacacacacacacacgaatggaatattagccttaaaacggaaagaagttctgccatttgcaacaacatggatggacctgaaggacataa

SEQ ID NO: 165114 - DNA, 484 bp, Homo sapiens
gtaaatatatcaaagaaactgcacataaagaaatgatatatttagatatttaacagctatatattgaatatacagtatcattttcttgaaaaaaaaactcatgttcttctgaaatatttctatataaaattagctcaaataagaactacggagaaaatttagctggcaccaaagactgctatgacagattgcataaawgtgttgctatcttctgtctttttatttttattttttttttatttattatttctttttaaagacagagtctcactttgttgtccaggcagcagtgcagtggcgtgatctcgggtcactgcaacttcaacctcccaggttcaagcgattctcctgcctcgcctcctaagtagctgggattacgggcaggtgccaccacacctggctaatttttgtatttttagtagagacagggtttctccatgttggctaggctggccttgaactcctgacctcaggggattcacct

SEQ ID NO: 165115 - DNA, 484 bp, Homo sapiens
gtaaatatatcaaagaaactgcacataaagaaatgatatatttagatatttaacagctatatattgaatatacagtatcattttcttgaaaaaaaaactcatgttcttctgaaatatttctatataaaattagctcaaataagaactacggagaaaatttagctggcaccaaagactgctatgacagattgcataaaagtgttgytatcttctgtctttttatttttattttttttttatttattatttctttttaaagacagagtctcactttgttgtccaggcagcagtgcagtggcgtgatctcgggtcactgcaacttcaacctcccaggttcaagcgattctcctgcctcgcctcctaagtagctgggattacgggcaggtgccaccacacctggctaatttttgtatttttagtagagacagggtttctccatgttggctaggctggccttgaactcctgacctcaggggattcacct

SEQ ID NO: 165116 - DNA, 484 bp, Homo sapiens
gtaaatatatcaaagaaactgcacataaagaaatgatatatttagatatttaacagctatatattgaatatacagtatcattttcttgaaaaaaaaactcatgttcttctgaaatatttctatataaaattagctcaaataagaactacggagaaaatttagctggcaccaaagactgctatgacagattgcataaaagtgttgctatcttctgtctttttatttttattttttttttatttattatttctttttaaagacagagtctcactttgttgtccaggcagcagtgcagtggcrtgatctcgggtcactgcaacttcaacctcccaggttcaagcgattctcctgcctcgcctcctaagtagctgggattacgggcaggtgccaccacacctggctaatttttgtatttttagtagagacagggtttctccatgttggctaggctggccttgaactcctgacctcaggggattcacct

SEQ ID NO: 165117 - DNA, 582 bp, Homo sapiens
gtataacacaacaagaaggcctttgcaggatgtgggaaccttgcccttggacttcccagcctccagaactataagatataaatctctgctttttataaattacctagtctcaggtattctgtcacggccacacaaagtgaattaagatatacyaccctgacacttagtcagaagataggaaagggaaacggactagaaaattcactgctgtgttgttgttcttttagattctattaccctcctcggcctgcctggaattatttattttaagagtcatcaggttttacattttctgttcagggattttagttataattaatgggagacatagcatggtatgtattgatttcatcttagctagaaccagaaatcttcagtccaattatatttaatgtaaatatccatctggctatgtttaggtctaccatattttaatttttttctttgtcctttttaacttttattcttctattctctctttcctgcattctttatatttacttggatatttttgtgttctatttttatttatgaattaactttttaaagtgacatatctttatattattttcatggttcctc

SEQ ID NO: 165118 - DNA, 567 bp, Homo sapiens
atacataagtagtgtacaccaataaaggatggaagatgaatgattgttagtcccatgtctataaatgcttatcaatttctagttaatagtgagttattaacattcaaccaagtaaagagattatcccaccctaaraaaaatttgaaagtataattatatgatttattaataatatagtgatacaatataatttgatataataaactaaataaaattagagatttgatatcacactaccctatactggctaaaacacacctgagtattatagtatctatattttattaaataaaaaacaacatctttaatggtaaagccactcaaagtatttcaaattaaaaatgagccaaagaagtttttatgaatggacacaaattagttcttcaattagccaaaggctgtctttaaggagtttgaacaaaggcattctgcaaaatcataaagaatattaacaatgaatgaataaaaagagatatatatctttttttacaatcgggtataccatggaattgtcctatcagatgttactctttaaaatgttcttatgatcaagtaattttagaaaac

SEQ ID NO: 165119 - DNA, 619 bp, Homo sapiens
ttacttgttttgattaatcccttttaaatgtatgtatatagcacacatgtatttcaatgtttcatattagaagtattttggtgtttgtttgtttgtttagaagtttggtaatgtttttgtgaccaggaactttagtccatatcaattaacctatgggaaaattggtttctttatagycattttgcttgaagtctcagtttccaagaactgaccggcaatgttgagtgagcacttactgcacaggcacttggtggggatggttgtaaggaaataaagataggctcaatttgtcctagactttactgtcccctccagtcctgggtttctctcatcaggttcacataggagagcatcactgtcatctggagtttagagggttttgtcctgaactgcccactgaggttgctccaaaagtggtagcaaggttcccacaaggaagtgccccaaaccttcctgggaggaggctggctgggattccagagaaagaagcactaaacgagagggagatcagtccaaagcccttgtagaggccctttgtacagagtgctgcagcaatcctggagatggacagagagaacaaagggatgttctagctaggaatgcctgcagccagaaggcc

SEQ ID NO: 165120 - DNA, 668 bp, Homo sapiens
tcatacagctgggtgctcatctgagacaaagcttccagaggaaggatcaggcagcaatatttgctgttctgcaatatttgctgttccgcagcctccactggtgacacacgggcaatcagggtctggagtagacctccagcaaactccaacagacctgcagctgagggacctggctgttagaaggaaaactaacaaacagaaaggaatagcatcaacatcaacraaaagcacatcaacaccaaaacctcatctgtaggtcaccatcatcaaagaccaagggtagataaaaccacaaagatggggagaaaccagagcagaaaaacttaaaattctaaaaaccagagtgccttttctcctccaaaggatcacagctccttgccagcaatagaacaaagctggacagagaatgactttgaggagttgacagaagtaggcttcagaaggtcagtaataacaacttctctgagctaaaggagcatgttctaacccattgcaaggaagctaaaaaccttgaaaaaagattagattaatggctaactagaataaacagtgtagagaagaccttaaatgacctgatggagctgaaaaccgtagcatgagaactacgtgatgcatgcacaagcttcactagcctaattgatcaagtggaagaaagggtatcagtgatt

SEQ ID NO: 165121 - DNA, 499 bp, Homo sapiens
tatatgtgaaggggagtttattaaggagaattgactcacacggtcacaaggtgaagtcccatgataggccatctgcaaggtgaggagcaaggaagccagtagtggctcagtcggagtcmcaaagcctcaaaaggagggaagctgacagtgcagccttcagtgtgtggccgaagacctgagagcccctggcaaagcactggtgtaagtccaagagtccaaaagctgaagaacctggagtctgaggttcgagggcaggaagcatccagcgtgggagaaagatggaggccggaagactcagcaagtctgctcttccaccttcttccacctgcttttcctagcagcactagcagccgattggatggtgcccacccagattgagggtggtctgcctctgccagtccactgcctcaaatgttaatctcctctggcaacaccctcacagacgcacgcaggaacaatactttgcatccttcaatccaatcaagttgacacttattat

SEQ ID NO: 165122 - DNA, 551 bp, Homo sapiens
caagtattaatgaaggttgctaagtaaccacacaattacataaatcttttcaagtgcatttttgagtatttttaaataatgaggtaaaatgtaggacatcatatgaataactaaggtaatgcaaccacatgcatgtttaaagagatttctaggcctgattttsttagaaaaaaataagtatagtatttcccagggaaaatattgtctgtcttggagaatgtatcagttgcaatcacttctcttaaagtagtaaataaagaatagttttatcagaaacgactacaggggaatacagacatttttagaggaattgcttcttcaagataaccaagcatgttagcaacatgaaataattatagcaaaaattatattatttacattatgataacactctctcaatgacagcgtaagatacaacttcttggtccagattaatacgaaagctacattcccaacatttgagataatgaagccaatgatgggaatcatttgaaaatttaacaacactcctcacagtaacaatagtcagaagaacagacaatatcacttgc

SEQ ID NO: 165123 - DNA, 551 bp, Homo sapiens
caagtattaatgaaggttgctaagtaaccacacaattacataaatcttttcaagtgcatttttgagtatttttaaataatgaggtaaaatgtaggacatcatatgaataactaaggtaatgcaaccacatgcatgtttaaagagatttctaggcctgattttgttagaaaaaaataagtatagtatttcccagggaaaatattgtctgtcttggagaatgtatcagttgcaatcacttctcttaaagtagtaaataaagaatagttttatcagaaacgactacaggggaatacagacatttttagaggaattgcttcttcaagataaccaagcatgttagcaacatgaaataattatagcaaaaattatattatttacattatgataacactctctcaaygacagcgtaagatacaacttcttggtccagattaatacgaaagctacattcccaacatttgagataatgaagccaatgatgggaatcatttgaaaatttaacaacactcctcacagtaacaatagtcagaagaacagacaatatcacttgc

SEQ ID NO: 165124 - DNA, 452 bp, Homo sapiens
aaaaacttaaactgcaactgattagttgttcgaggctcaatgtggattaatttgagcattaaaaactcctttgaggatcagggagcagttttaagggggctaccacacatttgtgacttttacttccaggagccctactaggtttgcacaatgagggtcagggagaaatttcctaatgcttccaacaaggaacagggaaaaagtaaccattccgaaatacacccaggtcactctgttcttcttatggcctgtctcaaaagaaactgtrttacccagagcccaacagactgagattatagcagagcctaaaccaccggggagtagggaaatatccaactccagcccctctatccttcccattgcacctaaagaggaaaaacccccaaaacccaaggagcacatgtggagatcatggcccaggggtagaggctcactgtgggactgggtcctaa

SEQ ID NO: 165125 - DNA, 442 bp, Homo sapiens
ctctcgggaacttactcatcaccaaggggagggtgytaagccattcatgagggatccacccccatgatccaaacacctcccaccagaccccacctccaacactggggattccctttcaacatgagatttggaggagacaaatatctaaaccatatcagttggcattatttttgtcctcatttcataaataaggaaactgaagtgtagagagactgagttttgttttatttcccccaggacttctttttctttgagaggagccaggaatgaatccaggtgttctgaattgcagctcaggattccttccactaactcaggatgctgctcaaagccaggccctgaggttaacataacagatcacagaggaaagccattaggatgagtaaggtagaacttacaataaaccaagaaaaacgaagggggtaacttgttgaatgaaaca

SEQ ID NO: 165126 - DNA, 532 bp, Homo sapiens
catttacatcttgcagggaggttctttctctgtctttttccccttatctattcatccatccatccatctctttctctcatttcattgccaaatatttgggaaagcagtccaaggttactgctgcctttgcttcttcacctctcatcctctccctgaaatctgatctccctacatctctcattttctctcttgattcttcttctggtgatttcttcttaaatgttaatgttctctaggttccaacttgggccctstttttgtcttagtctacatgtcctctctgaatgatctcatccacgaccatggctttaactataacctgactctagtgattcaaaaatctttctgtccaacaccaatctcttgtctttactttagaattggatagccactgcatactgggtgcctatagctaaacatccagctatctgtaagtcttgtaaacacaacaacggtatggaaatccaactgaaaaacactcatgcccagtggaccatgaatttaaggcaagtctgatggtgtgagaaaagca

SEQ ID NO: 165127 - DNA, 532 bp, Homo sapiens
catttacatcttgcagggaggttctttctctgtctttttccccttatctattcatccatccatccatctctttctctcatttcattgccaaatatttgggaaagcagtccaaggttactgctgcctttgcttcttcacctctcatcctctccctgaaatctgatctccctacatctctcattttctctcttgattcttcttctggtgatttcttcttaaatgttaatgttctctaggttccaacttgggccctctttttgtsttagtctacatgtcctctctgaatgatctcatccacgaccatggctttaactataacctgactctagtgattcaaaaatctttctgtccaacaccaatctcttgtctttactttagaattggatagccactgcatactgggtgcctatagctaaacatccagctatctgtaagtcttgtaaacacaacaacggtatggaaatccaactgaaaaacactcatgcccagtggaccatgaatttaaggcaagtctgatggtgtgagaaaagca

SEQ ID NO: 165128 - DNA, 532 bp, Homo sapiens
catttacatcttgcagggaggttctttctctgtctttttccccttatctattcatccatccatccatctctttctctcatttcattgccaaatatttgggaaagcagtccaaggttactgctgcctttgcttcttcacctctcatcctctccctgaaatctgatctccctacatctctcattttctctcttgattcttcttctggtgatttcttcttaaatgttaatgttctctaggttccaacttgggccctctttttgtcttagtctacatgtcctctctgaatgatctcatccacgaccatggctttaactataacctgactctagtgattcaaaaatctttctgtccaacaccaatctsttgtctttactttagaattggatagccactgcatactgggtgcctatagctaaacatccagctatctgtaagtcttgtaaacacaacaacggtatggaaatccaactgaaaaacactcatgcccagtggaccatgaatttaaggcaagtctgatggtgtgagaaaagca

SEQ ID NO: 165129 - DNA, 532 bp, Homo sapiens
catttacatcttgcagggaggttctttctctgtctttttccccttatctattcatccatccatccatctctttctctcatttcattgccaaatatttgggaaagcagtccaaggttactgctgcctttgcttcttcacctctcatcctctccctgaaatctgatctccctacatctctcattttctctcttgattcttcttctggtgatttcttcttaaatgttaatgttctctaggttccaacttgggccctctttttgtcttagtctacatgtcctctctgaatgatctcatccacgaccatggctttaactataacctgactctagtgattcaaaaatctttctgtccaacaccaatctcttgtctttactttagaattggatagccactgcatactgggtgcctatagctaaacatccagctatctgtaagtcttgtaaacacaacaacggtatggaaatscaactgaaaaacactcatgcccagtggaccatgaatttaaggcaagtctgatggtgtgagaaaagca

SEQ ID NO: 165130 - DNA, 495 bp, Homo sapiens
gaattcaatcagtaaacctttagaatgacaataacagttcttaaaggagaagccatattctcagaaatgaaaaaaaatggaccccaagaaaaatggacacttcaaagaacagaagcatatttctcccttttcagcactgagagccagagtggaattgtctccttcattgccactgccttcacgttttgtgtgtcgtatctgttttgtgatcactgagacccaagaacccccgacttgccgacatactatgtggccccgagagaggacttgagctctctgggtttcatcattaccatcaattaaataaacaggacagtagcttctttcttggattgttaatttaaggctctggataatacatgtaaccgccttatgatagagcagaatygtaagtaggctcatggtagaatcgttcaatgacatttccctttcctttgggagaaacagaaattcacaggtctaattcttttcatattgatagttcctgaccattat

SEQ ID NO: 165131 - DNA, 495 bp, Homo sapiens
gaattcaatcagtaaacctttagaatgacaataacagttcttaaaggagaagccatattctcagaaatgaaaaaaaatggaccccaagaaaaatggacacttcaaagaacagaagcatatttctcccttttcagcactgagagccagagtggaattgtctccttcattgccactgccttcacgttttgtgtgtcgtatctgttttgtgatcactgagacccaagaacccccgacttgccgacatactatgtggccccgagagaggacttgagctctctgggtttcatcattaccatcaattaaataaacaggacagtagcttctttcttggattgttaatttaaggctctggataatacatgtaaccgccttatgatagagcagaatcgtaagtaggctcatggtagaatcgttcaatgacatttccctttcctttgggagaaacagaaattcacaggtctaattcttttcmtattgatagttcctgaccattat

SEQ ID NO: 165132 - DNA, 545 bp, Homo sapiens
tcctagtaaatcttcttttatcaaggtatatgatcccatatagtagttaactcttactcttactttatgacaacacagtctttattactatgtatcagaaaattaaataattaaaaacaaattttataatattattgctagttgtttttattaagattcaatttcccttgcacttaataaatgtttcagttgctgttgagtcataaattttaaaaataaaattctccaaattattctttaacttttcattcttataagtgcattgctaatgtctaaatctttaaattaatgctagattttaaagtactctactaacagtaaatttaaaatacctttatttgaagaattattttgaaaaccctgcttttttttattattatactttaasttctagggtacatgtgcacaacgtgcaggtttgtttcatatgtatacatgtgccatgttggtttgctgcacccattaactcgtcatttacattaggtatttctcctaatactatccctcccctagccccccaccccacgacaggccccccgtgtgtg

SEQ ID NO: 165133 - DNA, 497 bp, Homo sapiens
  misc_feature (1)...(497): n = A,T,C or G
agagaactccactctgccatgtgggcagtgagtatgtatagacagaaaaagattgaagaaagtagaaatgaggaacaaaaagcagattagttgtttcaaagttactnttccccataatggttaaaacggaacttcyttatcatgtctgctcaaactggcctttctggatatttgtctattctctctcttctttctctctctctcttctctctctctccccccctctctctctccctctctctctctctctntctctctgagtctgtctttcccccacccctcttcctctccttctcctgatttctcataaagtcagctaaacaaccgagtttcagcttggtggattaggactttagcatgactgactccattttaatttggtctgttggtgggagctctgtccaaatcaatggcctccaaaaatttttatttcatactatgttttacagaattttttaatcctgttgtattaaatgcaacagccaaagttaccttga

SEQ ID NO: 165134 - DNA, 337 bp, Homo sapiens
attatttaccttctctatgcctccatattctgatttgtatagyacaataatattattagcaagcttactgggttgttgtaagatttaacagagataacttaagcaaagcacttagtaccatgtctgagacatatagtaggcactcagtgaaggccaactattgttattattagaacttaaacattagaaattccttttataatttaccctaaaggcaattaaacattctataaggtgatttcaaagttagagagcagcttgtcacctataactccttttggtggtttgtcatatgtctcaataagccacagccaattgtcctccttgaagatttgta

SEQ ID NO: 165135 - DNA, 674 bp, Homo sapiens
tatagttaaaacaggacagacattctttaactaatattccatatgcagtgtatgcacagagtacacacagacagccaatattttctattctctcatctctttgtctattccagatccctgctcaggaacccactgtgggccaatcaacagcttcccaaaacgagtcagggagttccagaagctcccattccggtgccagctgagaatccatttggataataacggagtaaaaactctggtttggagaaagtttctgtaatgtttttctttttcctttttggtggaagggagaataaaggaggatattgcctggtaagcatgcaaagaaaaaaagtcacgccaatttcactagaattgcccagaacctcaactctggtgaactgcaggtgacaacacttcacactgtttacatgattggggcttccctggaaactgcgctgaccctgagatgattgaacatttagagtaaaacccttgatgtagttcataaaattggattcaaatgaaaagtttaatgtggagtcattcaaaaataacactaagagctcttccctgaattcaaaagaaaaaggaaggaamacatgttagtcttagcaggagccaaggctgcaggtgggggaagatggagaggacagtgtttgggttttattatgtttacttttctcttacggaag

SEQ ID NO: 165136 - DNA, 640 bp, Homo sapiens
aaataacactaagagctcttccctgaattcaaaagaaaaaggaaggaaaacatgttagtcttagcaggagccaaggctgcaggtgggggaagatggagaggacagtgtttgggttttattatgtttacttttctcttacggaagaatagaagatggatgacttgatgcctgaggtaattcagtatgtttcaccaatttggagatggtcatttgtccatacttaagtctcagtaattatgttgaaatattataatttctgtaagctgggaaggttacaatgtggtggttgtcattgcccgggcatgcacaaacttggtcgtgattcctggtggcatgattagacagacaactgcaaccccttgacacttaattccagaaatcatttaagaatcacttgaaaaaggaatatattattgttctccttccaataaccaagtgtcttctgaaaacctttcattgtcactttctggtaattgarcaatgagaacacatggacacaggaaggggaacatcacacactgggaactgttgtggggtggggggaggggggagggatagcattgggagatatacctaatgctaaatgacgagttaatgggtgcagcacaccaacatggcacatgtatgcatatgtaacaac

SEQ ID NO: 165137 - DNA, 485 bp, Homo sapiens
tattgtaaaacatgatgggtatagttaataagaagacattatgctaytgaaaattgttaagagaatagattttgagtatagtcacaaaaatgaaaattatgtgagaaaatgaatgtgccatttcacaatgtacacaaatttcaaaagatgttgcatgtgataaatgtatataatttctatgtgtcaattaaaaactacgtttttaaaattgaaataaaattaacaagaaaagacaatgaaggaagttagcctttgttatatctttatttaatttaccactctagtctctaagaacaatatggatcatagtatgtgaaagtaggttactgtaaaattaaccaggtagtagtatcaactgcagagttacatcacctcctgcttgtaggatgtgggcgctgaaccaatgaatgtttatgtctcatcaccatcaggaaggagaatcagaagcaggccacctttatgtggtaaagacaataaacacttat

SEQ ID NO: 165138 - DNA, 580 bp, Homo sapiens
cagttgacttatctttttagttcattggtcaccagcaaatgagaagccatatctgcacctgatggtgcagaatatacatacctgagagatcttgaaccttgagttggatacactggggttattggtgtgatagaactagaagaaccatagattcttgttactcctcataaygagtggtagaattaaatcttcctcacactgaatctgggcttgcctgagtgatgttcttgatcaatagaatctggcagaagtgatgttcttggacctttgaggccaagccataagaaaccttgtatcttctacccaggagccttggaaaactcacacttagagccctgagcttccttataacaagccaacttccctgataccaccgtgttttgagaagcccaagcttccaggagagggcatgtggagaggctctgagactacatggaaatggagaggggagaggctaaacccagacttccagacattgtgccaaggcacatgaatgaagtcatcttggatcttctaccctagcctagcatcagactaactcctgttaaagccattaagagcacaaaattgccagctgagc

SEQ ID NO: 165139 - DNA, 519 bp, Homo sapiens
tagaaaaatgaactaaaaattaaagaaaagtagtaataataacaaaaattttaaaaatagaaaatacacctataattagagaagattaaaaaaagtcaaatatttgttaattttttttagccttttcagggtattgatcttttgcaagactgaacattttaaaaagtaaaggacacaaaaacaatattagaaatgacaacacaaagatttttactgataacttaatgaaaggaaataaagatttttttaaacattttattccagtaagttagaaaacttagaaaatttgccaattactagaaaaatatatctggctaaccaaccaaagttgactcaaaaagyagccaaaaataaaaatgccttttacaaagaaactgtcctttccctattgtgtagcatctttttcaaaaaccaattggccataaatacttggatttatttctgggctttctattttgttccattggttaatgtgtctgtttttgggccactatcatgctgttttgcttacaatggctt

SEQ ID NO: 165140 - DNA, 459 bp, Homo sapiens
ttcctcttaattcttatctccacagttaaaaataaacaagtgttatagaaaatgcatgtttctgatattttaatttttctagtgttgtgttttcttggttatcgtttctttctaatcgtaccaagtttgctgcatgtttctattgaaatgatgtatgtaaaatagtcaaactcattgaaacagagaacagaatagkggttgccagggaccgtggggagagagcaaggaggagctgctgatcattgggtctaaaatttcagtaatccaccataaataagactagagggctgctatatggcattgtgcctatagttaacaatattatactctaacttaatattaagtgaaaaggtagatcccatgttaagtgttcttgccatattaaaacaaaaataaaatttttaaaacaatgtcgattcaattaccacctatatgctaatgatttatatatgtctacac

SEQ ID NO: 165141 - DNA, 591 bp, Homo sapiens
aacctgtaaaccacaaataaatttaataaaaaacactctcgatstaaatgaactataaaatcttactgaaagacataaaatgtctgtttttaaaatttgtttttaaaaattgtattgcaatttttcattgtgttttttgggactatttcctatctgaacaaaaagaaaatcactactatgattttggatgcaaatattttacattatgaatatatcaatgctatataaatgataaattactatataaatataatggaaaagtaagcagttttttttgagtggataaaataatctaaaagtttctatggaggactaaattctagagaatagccacaaatatatgagagaccaagcctgctgaggggaaactgtcctggtctcagaccatactgttaaggcactgcagtaaaaccaataagatgtttgtataagactaggtaaacagtttagtggaacacaagagtctgaaattagatccaggagagagaatttaatatggcaaaaattgatggtttggtgggaaaataaacaaaaactgctcttttgattttgtttttgttttgtcttactttttctgctattcacaacttg

SEQ ID NO: 165142 - DNA, 591 bp, Homo sapiens
aacctgtaaaccacaaataaatttaataaaaaacactctcgatgtaaatgaactataaaatcttactgaaagacataaaatgtctgtttttaaaatttgtttttaaaaattgtattgcaatttttcattgtgttttttgggactatttcctatctgaacaaaaagaaaatcactactatgattttggatgcaaatattttacattatgaatatatcaatgctatataaatgataaattactatataaatataatggaaaagtaagcagttttttttgagtggataaaataatctaaaagtttctatggaggactaaattctagagaatagccacaaatatatgagagaccaagcctgctgagrggaaactgtcctggtctcagaccatactgttaaggcactgcagtaaaaccaataagatgtttgtataagactaggtaaacagtttagtggaacacaagagtctgaaattagatccaggagagagaatttaatatggcaaaaattgatggtttggtgggaaaataaacaaaaactgctcttttgattttgtttttgttttgtcttactttttctgctattcacaacttg

SEQ ID NO: 165143 - DNA, 621 bp, Homo sapiens
cagcctacccctgcccacacatttaactcgcatggcctatctcctagcaaaaagggttttctcttgtgaaacacattaatatcactgggtgagctattaacaaaaacctttgcccaggctctactctggacaaattaaatcagaatttccaggtgattgtaggatgcctccagggttgagaatcactgcactggttggtatataagcacaaaatgatttcactttgatggtcatgatgaccatgaagtcatgcccttttcttgacaaatctggtkagttctcaaggagtattactgaaaaatcaaagcccatctgcctgtcttctgatggcttcagtcgtgactagaagatccttgaggaaatggctttgagttgagttgtttgtgtgtatactggatactgaatagcctaggcgagtggccccatgacaatgggctggtgcttgatatccttattctagccatgcagatcctagaatgagcagcttctgtaaggtgaatgaatgccaaccaggtgcttacaggcagtgtgcagagaatcttcctgttgttctacctaagtcctgtctggatggaagtggttgtaagtcctgagaggtctttgtaatttagctactgtttc

SEQ ID NO: 165144 - DNA, 398 bp, Homo sapiens
tggaggttattgtactggaactggggggactggaggaatctgtggagggaggacacttgtgctgagtgtagagatgaagggagttttgaccagcaaccatgacagggcaaggctgggcaccatggatcacacctgtaatcccaatactttgggaggcggaggcaggaggatgtttgagcccaggagtttgagaccagcctgggcaacacagtgagaccctgtctctacaaaaaacaacaacaaaaaacccccacaaaacactatgagagggcagaacggagaggacaacagctcaggcacaattgctctgctcacttcgacctttcagttttgtgttctccccctttcatcctcttcccccartcttttggaagaatcaagtgaaaagggtgtctatg

SEQ ID NO: 165145 - DNA, 598 bp, Homo sapiens
aataaccagtctctggtatgtctttagtagctgcgtaagaacagactaacacagttggtgaaatgcctgtgttgagaaccatgttcgaagttccttgcacaaccaggtttccccattctcaggaagggaggatcggcagacgttcaggctggacctattttaacttaattctctataattggtagatgggttgtctgcagaaaaggatgactaggggttttcaaatggaatgatcttctctgtaggttaaacatttaccttctgctttgcaaacacagttaatttgctggttgaactcccttccctcatgcagagtgtggaggtaaattcctctctgaatttctagtgagtgcagtccaagtgctggagggtgagggtgagaagttgggttagawtctggtggaggggacaattgatcccagccagcaaaggcgatgggaaacaggcagaacctgtagcccagctcatctctgtggtcgcctgcatggcaccaggaaaacaggtgagtaaagccctttcaaacctttagagcccaatggggatatcaaggtcccccaggaaagaatccccatattctggggcacatggtttcaggctc

SEQ ID NO: 165146 - DNA, 366 bp, Homo sapiens
ggagttggggagacatgtgcacagtcagccctcgtgagcaggtgtgagccacctccagaactccactgatgtgagtgataaagaacagaaaagtaaaggggaagaaactgaaactcaattttggtaattttaaagctattcttataaagcttgataatgggaggaggtgcagaaatgttgattaaaagaaattatctgtaattttgtcatttygctcctatttcaccattcttttttttctttcttttttttcaggcaaccattgatagtaattatttgcctgttaaaagtaaaaattttataaaagcgaggataatggggacttggtaaaaggatataatgatataaaaaaagttaaaagagctc

SEQ ID NO: 165147 - DNA, 524 bp, Homo sapiens
ttcccatattcctcaagccaaatgtgaacaacactgttttatctggccctgacaaattctgggctctcaggcttaaggacaatgtgtgagtttttggtcaggatgctcaagggctatacttctgcaaaagctgttggtaaccattctaaacagatttttgccacatttattatcttcagttgattttctctatatctttctgttttccatgtcattgatttttgctttgatgtttcttacttctttctctcacctgctttaagtggattttgattggcttattctattttcttgagctaggaaatcagattattaatttgaaatgttctcccttttctaatgtaagyactgagtgctataaatttccctgtcagtattactttagaagcttcccacatatttgatgatttattttcattttccttcagttttatatattatttttgtataaattttctctttgaccattatattattgagaaacgtgttgttaatgtccaatgttgagaaattatctttctgtt

SEQ ID NO: 165148 - DNA, 552 bp, Homo sapiens
atactcactagcacaaagttgcacagctttattaatcttccttacggctgggtggaagttctcagcttgccaacagaccccacagaaactatcgtgcataggacaatggagtattaactgctgcccctagacaggagacagatctttttttttttttcaaatggaacaatattatctcaatagaagatggagtggaagatttgctctttggatgacttcttagaacccacagtatgtatttatttgtgtgtgtgtgtgtgtgtgtgtgtgtgtgtgtgtataaatgaggtatatgtagtagacagcatgccacccctccagagatgtctgkggcctaatccttttaatttgaaaatattttatggtacatggcaaagggggctttgcagatgcaattaaggttatagacattacgacaaaaatattattttgaattatatatatgggtccgatataatagcatgggctcttaaaaatagagaagtccccctggctaaggtcagagaaatgcaatgaaagagaataagagaaatgtcacagatagtgaactca

SEQ ID NO: 165149 - DNA, 517 bp, Homo sapiens
taatagttatttaaaatctgaaataagaatttaagacaaaaaatgatggccaaaaaaaaaaaaagaggaagcgcagtgattaacatctcaaaacagtagatactggaaagcctagggcacctggggttgccaaagaataagaagtatgaagtcygtttaagcaagacagtgctttcctttaaaaaacaaagtctgtgtttcagctataatttgaatgagacagaaacatgtattgttattgggtaaggagagatcaataatttgatgatgtttataacagttgactgagaagccgatgatataattttcccagaaccctttgttccaagtgattgaaattttgtcatatcctgtaacttgagctcctatctatcaccaagaggattctctttttgtgtcagtgtgattgaggtataatccctacacatataattgaatgttttagcatattcagagagacatgaaatcatcacgacactcaatttttaaatatttgtgaaacaatttaggaaatcac

SEQ ID NO: 165150 - DNA, 563 bp, Homo sapiens
gtgtatgtcttgtaaaactgagttggaagagggggattattaaaaacaatggatctgatacatgggcgcatttggcaagtatcaggaagacacttaggccaaaaagaaaaaagctatttgaaacatgatgtatgcagtagcaaatatagtgtctgaagtaatcaggactcatatcaagtaggacccaatttaaagaatggtagggactttaaagatggaaactttggaaaagtgaactatttcataataaatactaaggaaaacatagattgtaatttttaaagcttttaaatccagaagagcattaattgattatcatgttaactttaaattgtaagacacattaatcattcattaactactgaccactttaaattaaaatgtcacaaaatattaatattctaatttttgatrcattgtattaaacttacttacttttaacagtgcatccttgcgctcattaccaagcaagggagaacaacacatattttgtttaaaaataacacaggggcaaaataaaatacttctcagtctagaactaacatgtttaaaccacttcgatt

SEQ ID NO: 165151 - DNA, 642 bp, Homo sapiens
aggtcaaatgagacacaacatagatttctttatgttttgtccagagctgtgcttaatttcagagagtttgtgtttaaaagtggaagataattcatgtaaaatatgtttcattatcatttgtagaagccaggcatgtgtcccttaatagtaaacgttcctaacatgtcagaatatgagttcacattgtcacagcaaagagagtaagttgctcccaaatatctatgtgtccttcctgtggttgggttgagtcatatatttatttctgaccagtaggctataaatkgaagcaatgtgtgtctgttcctgggtgaggcaggtaagagccctggaagccacttatccagatacatagcttgaaggtggaacagaaccacccacctttattaaactctgaatgaacaaaaatggaaacattttatttttcatttctatgtgttgattctgtagcatgcctaacattatgctgactagtatagaaattggaccaccagtagaatgctgctgcaaaaataaggaaacctaattataaggtatcaacttggtagttgggtgggggaaggtaaagaaaataagatccaagcgtaaagagatgaagatccatatgagcagtagcaaaacatgctgaaatgttgcctaagatca

SEQ ID NO: 165152 - DNA, 413 bp, Homo sapiens
gaattctatgatgctctggaaatttgcaaaattaaagtcractacagtgcaaactcactgtaaatacattgcttggaaggaagtcttgtataatcatcttcacttttaatacatataagcccttcaaacacagcaagccccaaacctgctccaaaggtaattttctattgtttagcaattgttacaattgtccctatccagagaatatttttttctaatttctttaactcagcccacttaaagtcattactaaaattttcaacaacaatgctgtattctacaaaaacactatggttaccttagtccaggacactagtatctctcacttggattacagcagtaatcacttaactgacctcagtgacagcttacttctgccatctcactccatttctcacatttcaatcaaagag

SEQ ID NO: 165153 - DNA, 413 bp, Homo sapiens
gaattctatgatgctctggaaatttgcaaaattaaagtcaactacagtgcaaactcactgtaaatacattgcttggaaggaagtcttgtataatcatcttcacttttaatacatataagcccttcaaacacagcaagccccaaacctgctccaaaggtaattttctattgtttagcaattgttacaattgtccctatccagagaatatttttttctaatttctttaactcagcccacttaaagtcattactaaaattttcaacaacaatgctgtattctacaaaaacactatggttaccttagtccaggacactagtatctctcacttggattacagcagtaatcacttaactgacctcagtgacagcttacttctgccatctcactccayttctcacatttcaatcaaagag

SEQ ID NO: 165154 - DNA, 582 bp, Homo sapiens
atgtgcagggattttttttttcataatgatcagactcaggtttagcatggatattctgtacattaaatatgcttggaaaatcctgccatagtgaccagagttattgctgagtaaatgcatatggggagatttatttgacacctttaagtcctgaaactcaaatgatattatcacggaagtagaggatgaagagtagacagattatctgagccatacaaatgacaaaacacagcatcccttaggtcgtcatgcaaaagtaatgatatggtttggctgtgttgccatccaaatctcatctcgaattgtagctcccataatttccacctgttggaagaggracctggtgggagataattgaatcatggggatggtttcccccatactgttcttgtggtagttaataagtctcacaagatctgatggttttataaggggtttccccttttgcttgactctcattctctcttgtctgctgccatgctaggtcgtgcctttcgccttctgccatgatcatgaggcctccccatctacatggaactgtgagcctattaaacctctttttctttaaaaatgacccagtct

SEQ ID NO: 165155 - DNA, 583 bp, Homo sapiens
cccaggccgccaagctgtgcgactccaggggaaaaccatctcccttctggctccctcatcttctgagagctacctccactcaataaaaccttgcactcattctccaagcccacgagtgatctgattcttcccgtacaacagggcaagarctcaggatacagaaagccctctgtccttgtgacaaggtagagggtctaattgagctggttaacacaagccacctatagacagcaaactaaaagagcacacagtaacacacgcccactgggcgttcaggagctgcaaacattcacccctagacaatgccgtgggatgggagccccacagcctgcccatctgtgtgctaccctggaggtctcagcagcggggcactaaagaagcgagccacacccctatcgcaagccctacgagggggacaagggaacattttccacttcaaatgtgtatgcacacatacatattatagataggatacagatatgtggatattatcaagcttgtccattgcaattatacatttatatatgtacttgtgtgtgtatgtatgcacacacgcacacgtgtatatgtacgtgtatacatg

SEQ ID NO: 165156 - DNA, 566 bp, Homo sapiens
ttctgccactacatggcacaaatatttcttcccccagtttcaataacatgttgatttccttccaagctctcagcagcagcactttagcattcaaatctctgctaacagtctgttcatggtgatttaaactttctgtcttgctcttccagattgttctagtcttgaccccctgcctggtcccaaagccactctcacattttagacgtctcttycagcagcaccctactctcagataccaacatctgcattacttttttattggttaggagcaagttccgggttttacccaccggaattatacaagggaattatacaaaggtttgattcatcaggggttactttaggaagtgtctaccatagctatgttcatgtttatatcaatcccaatgaaagacatgttagtgggaatatatttgagaaatagatagtatcaaaaaattatactgcacattaccattctcacacatgtgtgaaggacataaacaatgagaagaaattatgctaatctgttcactggagcacttgatgcacaaagtaaggatcatataaactctgacgtgctttgc

SEQ ID NO: 165157 - DNA, 492 bp, Homo sapiens
aaggaaatgtgaaaaactataatattacgagtaagaaaaatgttacaaattaggcaagcaaaaaatgtagtgggcatgggaccagaattagaaagcaaaacacattctttctcttctgtaaaaaaaattaaaaaaaatgctttttgtggaaatagaaactgcctgatataattaagacccacaggaactgcatgagtacttgagcgaagcaacttctcagaggtaataaagctccattaaatcacttacccgagacttctgagagggcacttaacagggaatgagtctataacatgtatgtatgtatgtatgtatgtatgtatstatctatctatctatctatctatctatctatctatctatctatcatctatctgtctgtctagctatccatccattcatcagctgtcatatttctaacgatctatcatgtatccatctgtcatctatctatcgatcgatctgttatctatctatgatatggattgtata

SEQ ID NO: 165158 - DNA, 515 bp, Homo sapiens
aaatcaaggaaatgtgaaaaactataatattacgagtaagaaaaatgttacaaattaggcaagcaaaaaatgtagtgggcatgggaccagaattagaaagcaaaacacattctttctcttctgtaaaaaaaattaaaaaaaatgctttttgtggaaatagaaactgcctgatataattaagacccacaggaactgcatgagtacttgagcgaagcaacttctcagaggtaataaagctccattaaatcacttacccgagacttctgagagggcacttaacagggaatgagtctataacatgtatgtatgtatgtatgtatgtatgtatgtatstatctatctatctatctatctatctatctatctatctatcatctatctgtctgtctagctatccatccattcatcagctgtcatatttctaacgatctatcatgtatccatctgtcatctatctatcgatcgatctgttatctatctatgatatggattgtataattgctaggtaattcatc

SEQ ID NO: 165159 - DNA, 515 bp, Homo sapiens
aaatcaaggaaatgtgaaaaactataatattacgagtaagaaaaatgttacaaattaggcaagcaaaaaatgtagtgggcatgggaccagaattagaaagcaaaacacattctttctcttctgtaaaaaaaattaaaaaaaatgctttttgtggaaatagaaactgcctgatataattaagacccacaggaactgcatgagtacttgagcgaagcaacttctcagaggtaataaagctccattaaatcacttacccgagacttctgagagggcacttaacagggaatgagtctataacatgtatgtatgtatgtatgtatgtatgtatgtatctatctatctatctatctatctatctatctatctatctatcatctatctgtctgtctagctatccatccatycatcagctgtcatatttctaacgatctatcatgtatccatctgtcatctatctatcgatcgatctgttatctatctatgatatggattgtataattgctaggtaattcatc

SEQ ID NO: 165160 - DNA, 515 bp, Homo sapiens
aaatcaaggaaatgtgaaaaactataatattacgagtaagaaaaatgttacaaattaggcaagcaaaaaatgtagtgggcatgggaccagaattagaaagcaaaacacattctttctcttctgtaaaaaaaattaaaaaaaatgctttttgtggaaatagaaactgcctgatataattaagacccacaggaactgcatgagtacttgagcgaagcaacttctcagaggtaataaagctccattaaatcacttacccgagacttctgagagggcacttaacagggaatgagtctataacatgtatgtatgtatgtatgtatgtatgtatgtatctatctatctatctatctatctatctatctatctatctatcatctatctgtctgtctagctatccatccattcatcagctgtcatmtttctaacgatctatcatgtatccatctgtcatctatctatcgatcgatctgttatctatctatgatatggattgtataattgctaggtaattcatc

SEQ ID NO: 165161 - DNA, 353 bp, Homo sapiens
cacagccattcaacaagtctctagaagttgcaaactttccctcatcttcctgtcttcttctgatccctccaaactgttccagactcagcccattacccagttccaamgttgcttccacattttcaggtatcttcatagcaatggcccacttctccggtaccaatgttctgcattagtccattctcacactgctataaagaactacctgagactaggaatttataaagaaaaaagggtttaatttacttacagttccacaggtgggaggcatggctgggaaggcttcaggaaacttacagtcatggcagaaagcagaggagaagcaggcacaatcttcacatggtagagcagga

SEQ ID NO: 165162 - DNA, 581 bp, Homo sapiens
gtgcaggacaaaatgtctactatgtatataaatcttaacaaattcataaaatgtttcttgatatctatcactctataatcggttcctggccaatattttctatcccagtaattggcaatatcagttacataaccattcaaatctaaaactaatatactttttttccctcctttctacatagtaccaaatcaattcatcagaatgttttgatcactctaccccacaatatatccagaatctggccattttagtcccttcgcaccattgcacttttgtctaatccaccttcattattaaactgaattaatgcaataatcactttacttactctcctacctctattattgttttctataacagggcaagggagaatatttttaagacacataatagagtatatcattccactgttaatattctacaatacttttccatcytatttttaataatattttaattctgatagttcctcatgtttcttatcacattttcctttttcattaatgactaataattttttttttctgaaaagtgtcatagagtaaatattttagaatttacaggtctagtagtttcggtca

SEQ ID NO: 165163 - DNA, 530 bp, Homo sapiens
tgattgtggggtgggtctctagtctcttttttattactattgtcttttagaatattcttgcaagaagaacaatgcaatgtgatggcattttaaagtttaaaaaaaggtatgaacaatattccaaaaacattgctttctttttctctcatcacggtattttcaggaagtataatatgcaatagatacgttccatcaaatatggctaatttactgacatttatttggtattttatatgctcaaaatttatacacagattttgtcctgacattttccagtatttaagtagatcagggtttttaatagccaatgacattttagatcctctttacagaataaccaaataataaaggcaacaaacacattcatccaggcaatggagcayagtggggatttattttagtttttctaacaatatgggtttttctgattgctttccagatatgccttttttggttacaaaagtccaaaatgtatgctaataaggcttataaatctaaattattatggatattgccttcagtggttctca

SEQ ID NO: 165164 - DNA, 493 bp, Homo sapiens
ttgagaaacactctgttatactctttctgtaagttgcactggcccacgaggcaagaaattcagatatttctcctggtattctacgtaatatcctagaatttctttcacgatactcagatttctaggtgtacttatttgcttgaaattgtctgattagctccattcttccctgtcatataataattgcagaactctgaattaatctagcacagtgcccacttctataacagctcaataaatacttgccaaatgttgactaacacactcactgatttgattcaaataatttttattacttgtaataaataaataaaatatattaccaaggtactgtcgtaaakaataaatttttaatttttttaatttttaaaattatactttatgttctagggtacatgtgcacaacatgcagatttgttacataggtgtacgttttccatgttgatttgctgcacccatcaactcctcatttacattaggtatttctcctaat

SEQ ID NO: 165165 - DNA, 522 bp, Homo sapiens
taatcaacactgagtgatactgacataagaatagacataaagatcaatgtaacataattaaatatccaaaaataaagttatatgcctatctcaattgattcttagcaaggatgccaatatcattccatggagaaagaataatattttcaacaaatagtactgggacagctggatatccatgtataagcaatgaaatttgaagcctacctcataccatacacaaaaatgaatacaaactgtatgaaatacctagatataaaagctaaaactatgaacttttagaagaaattatgggggtatatatttgttacctttgatttgacaataaattgttagatataacaccaaaagcattggcaaaataaaaagtagatatattttactttatcaaaattaaaaaaawttgctcttcaaagaacataatcagaaagtgaaaagataatccataaaattactgaaaatatttgcaaatattatatcttatacaggacttatgtttagtgcacataaagaacacttaca

SEQ ID NO: 165166 - DNA, 376 bp, Homo sapiens
accttgtcacatttcagcattacaaaaggtagggagaaaaataagggaaggttcaattcttcctgcctttattcatcaggctgattctttctttgtgataactgttcttgtagytccttttttgcctccccagttggtcaattctttccccaaaattttgtctatgcagtaacaattacaacccaaaagctatcagctcaccgtcatcttcctgcagggttctcttagctctggtctatttgggggaaagagaagatagttctgtttcctactgagtcatttctattctgcacttctttcctaaccccatcagagacttctaccccttggctagcaatcacctccacccattcacacccccaaaaataattaaatt

SEQ ID NO: 165167 - DNA, 418 bp, Homo sapiens
gtgattcaaatattcattaatggttttgagaatcactggcaatgaatcacattcagacataaagcacaatacctggcacaatgtagaatctagcagggaaaattaggcttttggggaactctatcttttgctgcggtcagcaaagagattcatatataatctcccattatgctacatcccatccatcatakagaaaagtgaaacattatcctatttacactatggatctatgctgcccctttctaggatatttgcaatgttttttaaaatgctagagatagtaatacctattgtcttgtgcaggaattaattcaaatcaactacattttagactagaggcattagagaaagcttctgatttagataacagttctttgtagtttcataacaccctgaattgcagtagggcattttctag

SEQ ID NO: 165168 - DNA, 406 bp, Homo sapiens
gtgattcaaatattcattaatggttttgagaatcactggcaatgaatcacattcagacataaagcacaatacctggcacaatgtagaatctagcagggaaaattaggcttttggggaactctatcttttgctgcggtcagcaaagagattcatatataatctcccattatgctacatcccatccatcatatagaaaagtgaaacattatcctatttacactatggatctatgctgcccctttctaggatatttgcaatgttttttaraatgctagagatagtaatacctattgtcttgtgcaggaattaattcaaatcaactacattttagactagaggcattagagaaagcttctgatttagataacagttctttgtagtttcataacaccctgaattgcagtag

SEQ ID NO: 165169 - DNA, 398 bp, Homo sapiens
cctcttggtgattcaaatattcattaatggttttgagaatcactggcaatgaatcacattcagacataaagcacaatacctggcacaatgtagaatctagcagggaaaattaggcttttggggaactctatcttttgctgcggtcagcaaagagattcatatataatctcccattatgctacatcccatccatcatatagaaaagtgaaacattatcctatttacactatggatctatgctgcccctttctaggatatttgcaatgttttttaaaatgctagagatagtaatacctattgtcttgtgcaggaattaattcaaatcaactacattttagactagaggcattagagaaagcttctgatttagawaacagttctttgtagtttcataacac

SEQ ID NO: 165170 - DNA, 413 bp, Homo sapiens
gtcctcttggtgattcaaatattcattaatggttttgagaatcactggcaatgaatcacattcagacataaagcacaatacctggcacaatgtagaatctagcagggaaaattaggcttttggggaactctatcttttgctgcggtcagcaaagagattcatatataatctcccattatgctacatcccatccatcatatagaaaagtgaaacattatcctatttacactatggatctatgctgcccctttctaggatatttgcaatgttttttaaaatgctagagatagtaatacctattgtcttgtgcaggaattaattcaaatcaactacattttagactagaggcattagagaaagcttctgatttagataacagttctttgtagtytcataacaccctgaattgcagt

SEQ ID NO: 165171 - DNA, 372 bp, Homo sapiens
ggtgccatggtgaggcctagggacatgttcctagtgcctgaaacacaagctacaagacaaagccaagtctaatatggccccatccttcctggcacagctttcactcctggccacttgtggacaggttagatcctcctgacattgctttcacagctctgtccttggtcctgagctctatgtctggtatgcaaattcaggacttaggccctgtccttcatagccacccttggatgccccatgggaacttaaaacccaggaaaatagaaaaaaaaacacraaaaagaatatctgcgtcacagttttgaaattcttgtcagttatttaaactcttaaagtgatgctatattaaattaagtaatagttaatcataga

SEQ ID NO: 165172 - DNA, 625 bp, Homo sapiens
tctgtgaacttgaagtgtgtctttctgtttttcaattttctcatcgataacataggataatagaaattatgagcttctgtttttatgtgagaaagaattgtgtaactctaattggatctacattattattccatcagatggcattcatttaacaaatatattttcaatgctcattcccccaaaaaagattttattcatttgaaagtttatcattatatatatccaaaatctrtggtgtatttggaaggaataagaagggttaaatctcaggtattacaaagccccctttattcctctgaccttgcaacccttagttccggaagcaatgcttagcctctcctcaaagaatgcttgatctcacttggggaaggggaaaagatgcttctaaatttagtctaagtggatttaacatatggcatcataccttcctgggtcaagaggtcccagggtttctggaaaactggaaaacagattttactgggtggtggaaattggagagggtaggccattcagctacttgaagaaaaacagtgacttgaggatttatttttccaagctaaatttcgaaaagaaagctatgccctgatgctaaaaggcatcttgatttaggcttttgagatatttc

SEQ ID NO: 165173 - DNA, 584 bp, Homo sapiens
gatatacattttactgattcttttatttgcttttattaatatcatattttttgcaatgaaaattcgatttttatatttcccagactcctttgcagctagaagtgatgtgtgcatttagggatatgctttgaaaaagagagtacatactcgtctcacttctcttggtttttatctttttgttggacagaatatggacatagcggtggcaaatcatcttagaacatgtggatgagggaaaaactcttaactcttactttgatgaagccaaataaagaacctgggttcttgacaatcttggtgctatgataccaccactggactacttattgctggactgaggagacagagagagaaagacagaaagagagagagagagagagagagagagagagatggatcttttaacacccttgcttgtaatatttggcatataaaatcatgggttgggctagttcacttagggcagtggttctcaatgggaaataacattgcccctatccagaggacattcrgaaaaatctggagacattttttgttgtcacaactggacactgattgctactgtcatcaactgggtggaggcc

SEQ ID NO: 165174 - DNA, 608 bp, Homo sapiens
tataacaatgcaaaatacttagcacccaacaagatagattgcaaagtctggcataaagtaaaaaagttactagccatgcaataaagatacaaagtgacaactcaaaatgggtccagaaataaaataaatgatgaattagttaataagggcattaaaaaaattataaaactatgttatatwtgttcaagaagctagaagaaaagaattgatgatgttaagtagtgacatggaacatgtgaaataaaccaaagtaatctctagaagtgcaaagtatgagatgaaaaatacacaggatgagattaacagtagattagatattacataagaaaagagtagtgaatttaaagaagtaacaataaaaacaacccaaaattaaacacggaaagaaaactactttaaaaaaagaacaaaacataagttatttggacaatgccaagtggcctgatatatttaattagagtccctaaagaaggggggaacaaaaaaccttttttaaaaaaaaaaaaagtctaaaaataacccaaatttgttgaaactataaacacacatatcaaaaagttattaagcacaaacacaaggaacatagaagaaatatacatgaccacatt

SEQ ID NO: 165175 - DNA, 608 bp, Homo sapiens
tataacaatgcaaaatacttagcacccaacaagatagattgcaaagtctggcataaagtaaaaaagttactagccatgcaataaagatacaaagtgacaactcaaaatgggtccagaaataaaataaatgatgaattagttaataagggcattaaaaaaattataaaactatgttatatatgttcaagaagctagaagaaaagaattgatgatgttaagtagtgacatggaacatgtgaaataaaccaaagtaatctctagaagtgcaaagtatgagatgaaaaatacacaggatgagattaacagtagattagatattacataagaaaagagtagtgaatttaaagaagtaacaataaaaacaacccaaaattaaacacggaaagaaaactacttwaaaaaaagaacaaaacataagttatttggacaatgccaagtggcctgatatatttaattagagtccctaaagaaggggggaacaaaaaaccttttttaaaaaaaaaaaaagtctaaaaataacccaaatttgttgaaactataaacacacatatcaaaaagttattaagcacaaacacaaggaacatagaagaaatatacatgaccacatt

SEQ ID NO: 165176 - DNA, 575 bp, Homo sapiens
ttgaatgaatgttattattatcatcctgtgattttaggtataatgcttaatagatatactaattatttctcattctgatctgaaattttgctaattagtattcatgcaattttatgatgagagataattctctctggatctctcacatatttgaatgttttacacacagaagcacygactgccttttttgtgactatcttcacagaaatgtttgtgcagcaatcagccttaaaaaatagtgtctccctctgaagcagaaagctagtttacttattttccagttttaataaaggtaatatcttcctctggagcaaaggtaggcatgctaacttacattataaaatattcaattacatagtatcagtttcccttgcctgtaatacagcctactgcctgtatagctatcatctagtcctcttcatgtttttctgtgagtattggagtttagggaaccagcacaagaaaaatctgatgctctggttactgctattgctgtgagtagtaaatttctttgactctgactctagagtctcatttttactgccagcattcacgaaactgtgacataaatagat

SEQ ID NO: 165177 - DNA, 591 bp, Homo sapiens
atttttagtttgaaattacccatttgattctgctacaggaaaatgatgttagacaatttaagtaatagcaatcaaaattaatgaacatgctttcattaaattcacacgtactgaaaatattgtcattgaaatcacttttccccacacaaaaagaatattttattttgagtgttttcyttctaataattttcactttaaatgccatagaataggccaagataacttcagtatattttaccaataatttcctaattggggattgggtttgagtccatttttctttcataagaggatacatatctttcaaaacagaagggggaagtatctttaatgaaaacccatcacagataacttacatttgattaatattgttgatattagtggatctttttcctctaaacctagcagtttttttggcaaatcaaacattatttttctgtctctgaataaaaaataagtcaggttagtaaagaacagtcacagaaatcatataaactactaaatcaagatggacctaagctttcagccccttcttgggttacttaatcagaattttttaggcaaagtcacaatgggcctgcagggagtgac

SEQ ID NO: 165178 - DNA, 482 bp, Homo sapiens
cccattcacttggttctcattgtctctcttgactaaygccaatgtaagacgtgcctttcaccttcttccacgattatgaggactgccagccacttggaactgtgagtctatttaccctctttttctttaaaaattatctagtcttcggtatctttttcagtgcatgaaaaatggactagtacatacatatatgtcagaaaaagcttattacagaaatgtgcccacttgattatggaggccatggagggactcatccaagtctgaaggactgagaaccagggttattcctgttgtaacccctagtccaaagctgaaatcctaagaagtgatgggagggtattggtgggaaaggcactggaccaaatcccagagtctgaagtcctgagaaccacgagcacccatgtccaagcacagaaaaagatggatgttccaactcaaggggagagagaattcatctttcttctgtcattttgttctattta

SEQ ID NO: 165179 - DNA, 399 bp, Homo sapiens
gaattcagctgtgaatccgtctggtcctgggctttttttggttggtaggctgttaattactgcctcaatttcagagcctgttattggtctattcagggattctacttcttcctggtttagtcttgggagggtgtgtgtgtccaggaatttatccattcctacaaacctgcatgttttgtacatgtatcccagaacttaaagtaaaatttaaagaaatttaaatttaaaaacaagtgaaaaaaggaaaaaagaaattaaattctttttgtgtggaaatatagaaatagaaatataagamtgatgagataaattaggagtcacataattctgaaggccaattggaaatagaagtttaaactttgttttgtctgtctgaacccatggctggagttatcccag

SEQ ID NO: 165180 - DNA, 629 bp, Homo sapiens
agtttcaagacaccaaacaaatatcataaccagagtcagacatggcagaaatgttggaattatcaaaccgagaattttctgaaactatcattaatatgcaagggctttagtaggaaaaataaagagaacatgcaataatgacagctattgtaaatggagaaatggaaattctaagaaagaatttaaaagaaatgctagagataaaaacattgtaacagaaatgaagaaggcctttggtggactcattagcagactagacacagctgaggaaagtatctctgagcctgaggatatgacaatagaaacttttaaaactgaaaagcaaagaggagaaagatagaaagaaaaacactcaaggactatggaacaactacacaatggcaaatacccctattgggaaaactagaaaaagaaagagaaaaaagaaaagaagcaatatttgaagcaacaggaagaattttctcaatttaataccaggcacagaaccacagatgtaagaacctattctgtttaataaatatttcatactgccttttgcaaatacatgccttyatgcatatgttaaaaaccatgcatgtgcaataccaagaatgaacctcaatgtgaactacggactttgggtgataacc

SEQ ID NO: 165181 - DNA, 580 bp, Homo sapiens
tcagtatcttctgtggttccatttaattttttttcaatttatttgaaaaattaaactgttgatagggattgcattaaatctgtatgttgttttgagcaataggaacattttaacaatattaattattttaattcacaaatatgagatatctttttattaatttgtgtctttaaatttcttttatcaatgcttatagtttccatgctttgtattggacatagctttcacttcacttctttggtttaaattatctcttagtgttttattctttctaatgctattttaaatgggattggtttcttgatttatttttcaaatagatttttgtaggtgtaaataaaagcaactaattttgtatgttgrtttggtatcctgctattctgatgaattcatttatttgtgtaacaacttttttgtgtggagtctttagggttttctacacatttgtaaacagggttaattttactttttcctttctgatttgtatcccctttatttcttcttcttgtctgattgctcttgctattacttccctaactatgttaaatagaatagcatgggcatctttgccacggcccag

SEQ ID NO: 165182 - DNA, 422 bp, Homo sapiens
gaattcttagctgccaaaagggtgggctagataggaagaagaggagagagcacaggaggagagaaagggactgcaacaggatgggaagctttcagggggttttcattaagtggttgttgaacaattctcraattgagtgttgttgggtttgtaagggttaattttacagtaatggataaaatgcaaaattttggcctatggtggcttattgtaatcccagcactttggaaggccaatgtgaggtggaagaattgcttgaggccaggaatttgagaccagcctaggcaacatagaaagaccccatctctactaatatagtaataataataatagccagatgtggtggtgcatgcctgtagtcccagttacccaggaggctgaggcaggaggattgcttgagccccggagttagaggctacagt

SEQ ID NO: 165183 - DNA, 422 bp, Homo sapiens
gaattcttagctgccaaaagggtgggctagataggaagaagaggagagagcacaggaggagagaaagggactgcaacaggatgggaagctttcagggggttttcattaagtggttgttgaacaattctcgaattgagtgttgttggrtttgtaagggttaattttacagtaatggataaaatgcaaaattttggcctatggtggcttattgtaatcccagcactttggaaggccaatgtgaggtggaagaattgcttgaggccaggaatttgagaccagcctaggcaacatagaaagaccccatctctactaatatagtaataataataatagccagatgtggtggtgcatgcctgtagtcccagttacccaggaggctgaggcaggaggattgcttgagccccggagttagaggctacagt

SEQ ID NO: 165184 - DNA, 616 bp, Homo sapiens
gaattcttagctgccaaaagggtgggctagataggaagaagaggagagagcacaggaggagagaaagggactgcaacaggatgggaagctttcagggggttttcattaagtggttgttgaacaattctcgaattgagtgttgttgggtttstaagggttaattttacagtaatggataaaatgcaaaattttggcctatggtggcttattgtaatcccagcactttggaaggccaatgtgaggtggaagaattgcttgaggccaggaatttgagaccagcctaggcaacatagaaagaccccatctctactaatatagtaataataataatagccagatgtggtggtgcatgcctgtagtcccagttacccaggaggctgaggcaggaggattgcttgagccccggagttagaggctacagtgagttatgttcatggcactgcactctagcctgggcgacagagtgagaccctgactcttgggggggaaaaaaaagagcaaaatttttacaaaagggtagatggtcttgggatatcatatactgaagtgtttatcttcatgtttgcttttctttcttctccttccctttttcttccttcccctcctcttctctcct

SEQ ID NO: 165185 - DNA, 422 bp, Homo sapiens
gaattcttagctgccaaaagggtgggctagataggaagaagaggagagagcacaggaggagagaaagggactgcaacaggatgggaagctttcagggggttttcattaagtggttgttgaacaattctcgaattgagtgttgttgggtttgtaagggttaattttacagtaatggataaaatgcaaaattttggcctatggtggcttattgtaatcccagcactttggaaggccaatgtgaggtggaagaattgcttgaggccaggaatttgagaccagcctaggcaacatagaaagaccccatctctactaatatagtaataataataatagccagatgtggtggtgcatgcctgtagtcccagytacccaggaggctgaggcaggaggattgcttgagccccggagttagaggctacagt

SEQ ID NO: 165186 - DNA, 572 bp, Homo sapiens
actctgacagcagtccaaggaatgagttagaggggagagagatggaaggtggagggaaaagttagaagattatttcaacagtctagttgagacaagagccactctgtttaaaaagtggatatgcaatggaagcatccaggagagaagttaggaaggaaggatggacaagacttggtgagtgattggctgaggggtgatgaagggggagaggtctgggtgatgctcggatttctaatttgggtgataaggaggatggcagtagctttcatggacaaaagaaaaatgggaagatgagcaggctttgggagggagagacaatratttcagcttttgatgttattgagtttgaggtagctgtgaaggtttcaggtgaagatttccagtaggcagtgagacacatggccctggaactcagaagacaggtcttgacaaaagacacaatttaggaggcaccaacacggttgaggtttcaaacctctgataaaaacctttgggccttctcccaagaaaggatgcaaatatacacattatgtttcctttaatttaagaagctctatttgaatccatccaga

SEQ ID NO: 165187 - DNA, 356 bp, Homo sapiens
cttcttgttctgagtcagttcctgggtgggcaccacaagatcagatgagccagtttattgatctgggtgttgccaggtgatccatcaagtgcagggtctgcaaaatatctcaagcaccgatcttaggatcagtgcttaggragggtcagaatcttgtagcctccacctgcatgattcctaaaccataatttccaatcttgtggctaatgttagtcctacaaagacaatctagtcttcagaaaaaaaggaggtctgccctgggaaagggctgttatcatctttgctttaaaccacaaactataaactaagtttctcccaaagttagttcagcctatgcccaagaatgaggaaagaca

SEQ ID NO: 165188 - DNA, 490 bp, Homo sapiens
gagttttttccaactcaacaattgctatgctcagttaactcaacaaatagaatatgatgtactagcctgatatccatccctctccctcccttctaatataaccttgattctattcaggaatcaccctcatatgcagaggtggatcttgactgatctaagccactcagggtgtagcattcccctggcttttattggttaagtgggagmagacggaactttgtcctaaatagggccaatctggtagaggggagtgccatgtttgggagagatgatctctctctcccactgtacatgaacaagggctcattttgtcctaggttctgctggcaaaacctaagattttgaaggcagccagtctgaggtcaatgccaaaaaatcaaggaggacagagtggagggatagaatatggtcttggtgacatcactgagcttctaacgcaaccaacccagatttcttacaatttcaagtaaatttccctgctgtttaagcc

SEQ ID NO: 165189 - DNA, 267 bp, Homo sapiens
aacttgtgttgtttataactaggaggccgttgtactattattattcctattttatggttgagaaaaccaaggcatggggaaattaaatgacttgcctgaaggttttctactgctartaattggcaagaggaaaagaaacgtgcaagaactttattgattggatgggaatggtagatacattaatttgaaggattttgtcttagtagatcttagagaaagaagagtacatttgggagaaataagtgaattttgttttagaaaaaaaaa

SEQ ID NO: 165190 - DNA, 267 bp, Homo sapiens
aacttgtgttgtttataactaggaggccgttgtactattattattcctattttatggttgagaaaaccaaggcatggggaaattaaatgacttgcctgaaggttttctactgctagtaattggcaagaggaaaagaaacgtgcaagaactttattgattggatgggaatggtagatacattaatttgaaggattttgtcttartagatcttagagaaagaagagtacatttgggagaaataagtgaattttgttttagaaaaaaaaa

SEQ ID NO: 165191 - DNA, 377 bp, Homo sapiens
aatctaacatgactgactccatcctgcttctaacccacaggcgagttttttttttcttattctagcatggaggtcaaaatagctatgagwgacgtttatagttaaactttgagtcaagggaaactgaactccctccttgttcaagattgaaactgcattcataagacaaggttaaaatacggtagggactttaactttgctgaagaatagactcagttaaacaatgacctgccattgcttagtgtgtcttcctcacttccttgctttccatgtgtccttacagtagcatgttgcttactgcaccagagtcacgtaaccggggattgcaaaatttataacttccccaactactcctatagataacatcactattgtga

SEQ ID NO: 165192 - DNA, 377 bp, Homo sapiens
aatctaacatgactgactccatcctgcttctaacccacaggcgagttttttttttcttattctagcatggaggtcaaaatagctatgagtgamgtttatagttaaactttgagtcaagggaaactgaactccctccttgttcaagattgaaactgcattcataagacaaggttaaaatacggtagggactttaactttgctgaagaatagactcagttaaacaatgacctgccattgcttagtgtgtcttcctcacttccttgctttccatgtgtccttacagtagcatgttgcttactgcaccagagtcacgtaaccggggattgcaaaatttataacttccccaactactcctatagataacatcactattgtga

SEQ ID NO: 165193 - DNA, 377 bp, Homo sapiens
aatctaacatgactgactccatcctgcttctaacccacaggcgagttttttttttcttattctagcatggaggtcaaaatagctatgagtgacgtttatagttaaactttgagtcaagggaaactgaactccctccttgttcaagattgaaactgcattcataagrcaaggttaaaatacggtagggactttaactttgctgaagaatagactcagttaaacaatgacctgccattgcttagtgtgtcttcctcacttccttgctttccatgtgtccttacagtagcatgttgcttactgcaccagagtcacgtaaccggggattgcaaaatttataacttccccaactactcctatagataacatcactattgtga

SEQ ID NO: 165194 - DNA, 377 bp, Homo sapiens
aatctaacatgactgactccatcctgcttctaacccacaggcgagttttttttttcttattctagcatggaggtcaaaatagctatgagtgacgtttatagttaaactttgagtcaagggaaactgaactccctccttgttcaagattgaaactgcattcataagacaaggttaaaatayggtagggactttaactttgctgaagaatagactcagttaaacaatgacctgccattgcttagtgtgtcttcctcacttccttgctttccatgtgtccttacagtagcatgttgcttactgcaccagagtcacgtaaccggggattgcaaaatttataacttccccaactactcctatagataacatcactattgtga

SEQ ID NO: 165195 - DNA, 617 bp, Homo sapiens
atatatttatcatatataatatatataatataatgatagctacctattaggcatttccacttcaaaactttttttggctgggcacagtggctcatgcctgtaatccgagaactgtgggaggcccaggatgtcaggagtttgagaccagcctggccaacttggcaaaaccccatctctactaaaaatacaaaaattagccaggcatggtggcatgtagtcccagcaactcaggaggctgaagcaggagaatcacttgaacctgagagatggagggtgccgtgaacagagatcatgccactgcactccagcttgggcaacagagagagactctgtctaaaaaataaaacacacatacgcatattttttttctaaaacaaaattcacttatttctcccaaatgtactcttctttctctaagatctattaagacaaaatccttcaaattaatgtatctaccattcccatccaatcaatamagttcttgcacgtttcttttcctcttgccaattattagcagtagaaaaccttcaggcaagtcatttaatttccccatgccttggttttctcaaccataaaataggaataataatagtacaacggcctcctagttataaaca

SEQ ID NO: 165196 - DNA, 558 bp, Homo sapiens
tacaaaaacctgggtaagtctggagtcatctgttgtgggaccagagaaatcatgcatgctgcttttgaccacacagaccatgatggggaagtactgcatctgatcagcaagagagacagggtctttggccaaaatggagggctcttttctaaccatgttctcagctgttggataggggacgacgactgattttgctgagtggtttgaaaagcctaggggaggccaagtaggggagacttactgccaggactatctctccaagctcagttcctggggcttccaccctcacattctagaggaaagcatattgccactcagccaagttgtgtgatgtgattactagtgaaacgtgatcagctctgggggccctcggctcttggctgtcaatgcaggatgatactgggctacaggagaaagaggtaaggaagacagagtattcccccatgaataggatggaatggattaaagtagaagagaaagtraagtgaactacctcatttgtcatgtggggaagttcaggcctagagaggtgatgtgcttctctaccacctgggcaag

SEQ ID NO: 165197 - DNA, 484 bp, Homo sapiens
acttggatacctaagtggaaaagttctgctaagtgtactcagcctgcttaatgatggggaagaagcaagctttgtgttttctctgtaaacagagaatcttttccatttggctaagtagttggaatttgtagactctttttaactgactgaagcacatataaagagcaataggcaggctcttgttctcaataatggaagctatcaatgaaagaatcctccaccccacaccctacctccacatttcagtaccatcaacttgctgaaaaggaacttcccagccattactgcaaggaacatggtttctaacgttcatgttatatataagtgttgccatggtgatttctattttttatctatttgcaaatgtcccctatgatggtataggtcatgcactatgcaatggcgccatgtctgagggggtgctattcacatcatgggtttgtatagttatcaygacaagtgtctgtcataaggcaatgaagag

SEQ ID NO: 165198 - DNA, 508 bp, Homo sapiens
gcaaagtcttcatttcaagayacagtaagagcccagtgcctactgggtcctgaaatgtctatgagtatgccaggagtacattttcactgattttaagagaagaaaattgatgccatttattttagaaatcactctcattatttttggtattgtgagtttcaaacttgttttggggcaggagaaaaggctgtctgcaggaaacatgtgtgttacattacagtctggcaatcctaaacactaaaaaggagtaataaggaaaggtagcttgccacatagctcagtgaattttaagtgtattttccaatgaaagtccagaaaatgcagaagctgaaagagccaaagacattatccctatcacctcagggcagtggacctgctgttttcctgacgttttatgatttattctaacttctggaagaagagattttctccactgcagataaacatacaagttggctgtccattttgcttttattttcctttccttttatattcatatactgaattc

SEQ ID NO: 165199 - DNA, 457 bp, Homo sapiens
cttgaactttgtagttgccaaaataacagataattgtaccaggcaaattagccagggtttataagcctcaaatctgaaagaaattaagctgtgcctgaaatgaattagtctatcggtaagttagttggatttgtttgcttgtatgtttcgttttgttttgttttgtttaaaaaaaaaatgaaactacgctctcgcactagttttcaaatacctctttagctgttgctgctacaactataaaatgcatyattttattttacaagtctgaagagggaccagtaaaaatgttatgggctgtaattttgatatagaatatgtacataaaattacctaattgcagtcaatttcctcctcccctagtttatccatggctttggggaatttatgtttttgcttgttcaaaaatctttcatggtcacagcatgactgtcccctcccacccccgccattataaggt

SEQ ID NO: 165200 - DNA, 457 bp, Homo sapiens
cttgaactttgtagttgccaaaataacagataattgtaccaggcaaattagccagggtttataagcctcaaatctgaaagaaattaagctgtgcctgaaatgaattagtctatcggtaagttagttggatttgtttgcttgtatgtttcgttttgttttgttttgtttaaaaaaaaaatgaaactacgctctcgcactagttttcaaatacctctttagctgttgctgctacaactataaaatgcattattttattttayaagtctgaagagggaccagtaaaaatgttatgggctgtaattttgatatagaatatgtacataaaattacctaattgcagtcaatttcctcctcccctagtttatccatggctttggggaatttatgtttttgcttgttcaaaaatctttcatggtcacagcatgactgtcccctcccacccccgccattataaggt

SEQ ID NO: 165201 - DNA, 631 bp, Homo sapiens
agccaagaaaatgtatctttatattcttattaaatactctaatttagaaatacatattcattctctcccaaaaagattacaaatcagttgtttattttaatttgcattatctccacaccaaaaggactatccaattcttgaattgctctgaaattttatagtagtgaatatattcgaagaaataggctattgacttggatatgggactcttctttcttaatgacatttttattttaatgggatctgttgtcatgtaattacagtccaaaatgtgagaataagaacagttttagaccacttttgtgtatgtgtgtggaagtttcttgaaaacaactgttatataactgaggtcacttctaacttgagtcagtgaactctccaacaagaggacaaagctactaaaggagggraagtcgttgaagatgaaagctagcaacatctctggagacaatctgaccagcattgagaatgactgctgaatgctagccatgctgagaaatgtggaggacacagggtggactaaggcattgcgcttgctctcaagcttgctcttttctaaaagaagcccatttgaaaatactgaaatcactttttcttcttttgtgaaggatagaaaactcaacaaataagt

SEQ ID NO: 165202 - DNA, 451 bp, Homo sapiens
ttcagacaaaggcaagttgctaagaatgctgtgcaaaggaattgatactggtataaaaggaatctaaaatgctaactttagatctctgaaggctgtccattattttgcatgaagacacctatatgtaagacagctctgcatatcacatatccccactcagttcattatgtttgcccttacatatacttcttcattgccaaaaatctcagattctgtgyagtgtagtgttgatgtttttcaggcatctgtattttgtttccctaaagagaaataaattcttttgaggtaaatactctgtttaatactatgtgttctccccattgcaccaagcagagaaatgagcccagtagtagccattccgtaaatacctgtaaaaccaatgaaaactcagtgattaaattgcttaagagcagaagcaaatgtttaaaacgcatgaatatattaatagatt

SEQ ID NO: 165203 - DNA, 548 bp, Homo sapiens
atgtataaatacaaaatagatatatatgtgtatatatatatgtgtgtgtgtgtatactctgctgcagagggttgagtgttgtaatacaaaagttgctgttgaggtaaaagaaagcgattaatgggaaaacattgcaccatcttcatacaatcatctacctactccaaacatcgtaattatcttgattaattttactaaacttatattttgaaatcattatttcaggagatccataaaatgttcctgaacactcattttgtacaagggagtattctaaatactgctggaaaaacacaaaatgataaagatttgtttttaagcttaaattgctagtgacatagtataccagcaaatggaaagatatttagacatcctgcaatgcattcctattatccagtggattgartctaaaatattcacatgtcaccttaaagctttttactggggcaaaacctttacagataacgctaattcctttattctgatttctggagccctccctcaaacctgcccaagcattcttgttaaagacaatgttcataaagtca

SEQ ID NO: 165204 - DNA, 607 bp, Homo sapiens
ctgcctctaccttctttgttagctgtcagaccaataacaataattaaataccaggagaaggcygggcgcagtggctcaggcctgtaatcccagcactttgggaggccgaggagggcgggtcacgaggtcaggagattgagaccatcctgactaacacggtgaaaccccacctctactaatagaaaaaattaaccgtgtgtggtggcaggcgcctgtagtcctagctactcaggaggctgaggcaggagaacggcgtgaacccgggaggcggagcttgcaatgcgccgagatcgtgccactgcactccagcctgagcaacagagcaagactccacctaaacaaaacaaaacaaaacaaaacaaaacaaaacaaaaaaacagcagaaagtggctggaggtattctgggactgataagaagggaaatagcctatataccaacaataattgtaagaattaagtggcttgtagccgcaggacccaaggaagtatttctaggagtaaatttttagagtgcttgatcaagctgtttggaatatcagattggataagggttcatgattggggtattttcttaggacatggaatttaacagcccagcaaggatatc

SEQ ID NO: 165205 - DNA, 607 bp, Homo sapiens
ctgcctctaccttctttgttagctgtcagaccaataacaataattaaataccaggagaaggctgggcgcagtggctcaggcctgtaatcccagcactttgggaggccgaggagggcgggtcacgaggtcaggagattgagaccatcctgactaacacggtgaaaccccacctctactaatagaaaaaattaaccgtgtgtggtggcaggcgcctgtagtcctagctactcaggaggctgaggcaggasaacggcgtgaacccgggaggcggagcttgcaatgcgccgagatcgtgccactgcactccagcctgagcaacagagcaagactccacctaaacaaaacaaaacaaaacaaaacaaaacaaaacaaaaaaacagcagaaagtggctggaggtattctgggactgataagaagggaaatagcctatataccaacaataattgtaagaattaagtggcttgtagccgcaggacccaaggaagtatttctaggagtaaatttttagagtgcttgatcaagctgtttggaatatcagattggataagggttcatgattggggtattttcttaggacatggaatttaacagcccagcaaggatatc

SEQ ID NO: 165206 - DNA, 607 bp, Homo sapiens
ctgcctctaccttctttgttagctgtcagaccaataacaataattaaataccaggagaaggctgggcgcagtggctcaggcctgtaatcccagcactttgggaggccgaggagggcgggtcacgaggtcaggagattgagaccatcctgactaacacggtgaaaccccacctctactaatagaaaaaattaaccgtgtgtggtggcaggcgcctgtagtcctagctactcaggaggctgaggcaggagaacggcgtgaacccgggaggcggagcttgcaatgcgccgagatcgtgccactgcactccagcctgagcaacagagcaagactccacctaaacaaaacaaaacaaaacaaaacaaaacaaaacaaaaaaacagcagaaagtggctggaggtattctgggactgataagaagggaaatagcctatataccaacaataattgtaagaattaagtggcttgtagccgcaggacccaaggaagtatttctaggagtaaawttttagagtgcttgatcaagctgtttggaatatcagattggataagggttcatgattggggtattttcttaggacatggaatttaacagcccagcaaggatatc

SEQ ID NO: 165207 - DNA, 608 bp, Homo sapiens
ttctgactcttacttacaattactttttcagaatttttctttactcctcaattataagctcccagaagacaggaaaagcatttgttttattcagcactggcagatggcagatgtctaaaaaagatccattaaatgagttatggatttatcaccttttttgtaaccattatgtgaaaaaattgctaagckaatttgacacaaaaatggaatatcgctcttttaaaactcagaaaagcacaactcaaaaacaaaacaaaaactcacaagtttgctctttatagcctaggtcatctttgacaaagcatgtaacactttttatctcattttctcaatctgcaaaatggaaaaatgggaaagtttctttcttgaaaatatgtgaacttcttttctgagattttgtgtctgaagataatctaaattataaattgctgcttaaatattataagactttgtcagttcttcacccttataagtcatcttctattgataaataatgatgacagcctgaaggcatcaggctcaaaggttggatgggcaatacatttcaggagggggatggaatgtcaactccctctaaaattgagctctgttcacctaaatgagaggtc

SEQ ID NO: 165208 - DNA, 608 bp, Homo sapiens
ttctgactcttacttacaattactttttcagaatttttctttactcctcaattataagctcccagaagacaggaaaagcatttgttttattcagcactggcagatggcagatgtctaaaaaagatccattaaatgagttatggatttatcaccttttttgtaaccattatgtgaaaaaattgctaagctaatttgacacaaaaatggaatatygctcttttaaaactcagaaaagcacaactcaaaaacaaaacaaaaactcacaagtttgctctttatagcctaggtcatctttgacaaagcatgtaacactttttatctcattttctcaatctgcaaaatggaaaaatgggaaagtttctttcttgaaaatatgtgaacttcttttctgagattttgtgtctgaagataatctaaattataaattgctgcttaaatattataagactttgtcagttcttcacccttataagtcatcttctattgataaataatgatgacagcctgaaggcatcaggctcaaaggttggatgggcaatacatttcaggagggggatggaatgtcaactccctctaaaattgagctctgttcacctaaatgagaggtc

SEQ ID NO: 165209 - DNA, 499 bp, Homo sapiens
aaacattttattagtcataaataagttgccaatcatttctttgttgttaacttaagaagttttctaaaaaaggatatttttgaaatgtggaatttaactaccatacattaatgagattaaataactcactaaaagtggcagtttttaatttgctgaattttaagttacaatatcttatttcattttagtaacrcccataactttttaaaattatttaatacatgattttaattcccactaagcagtctctactaaatggctttaaaatgttatcatcacgatagaagaaaatgtcaaccttttttacaaaaattctctttttggactgctttattgctatgtgcaggcaatagaacaaagtctaggctgatatgttatatgcatttacaaaaatgccagacatgtaaatagtctaccttctattcctctttttaagaaaagggcaattacttaataactttaagtcatttgatattaaaaagaagaactgatgctgaaa

SEQ ID NO: 165210 - DNA, 581 bp, Homo sapiens
gcaatttgggcataagttacagcaaatagaaacctaatgcgaactagtttaaattagaaagggaattttttagttcatattacccaaaaatcaaggggtacagttggcttcaagaagttcttgttccagaagcttaaaggatattggggctttatctgctctctaccatcaagacagacccttgaaacatgycagaaatgatgtcttccctctgcccaagtctcacactccatcaccttagagcctcagggaaagaaggcactcttgccacaatttcagcaagagttatgtggagagctgtacctggtctagcttagttcatgtgtccatacatgaatgaaccaccacggtaagggaggtccatagctaaagggtcaggcctgggtaacatatctagtgctttccatttggagggtgaggtcagctccaaatgcaccctaatgtgctccaaatgcaccttcaatgtgttcctcgacagaagagaggggaaatctactgtaatgaagagggagtgatatgggccaccaaaagcaacagatgcaccttaagtgcatatatgcatgtttttgagcaagagcaaa

SEQ ID NO: 165211 - DNA, 504 bp, Homo sapiens
aatcttggtaattcatacacagtgatttaaaaaataaccactccacaccctagtcaagtagagaagggagacatatttgggagaccaggcaaatccttgattcgggtttatatttatattatatttatattatattatatttataatatatggctgtcctcaggacaggtggcttcttgttggtgggacctgtaccttcttcctctttgtgtccccagcactgggcccacacatagcaaatgcttgggaagacttggctgaattaccaagttcaactggtgacaggaccaaggtcataggcgtgtagtaaagcttaaaagtcaacacctcctactactctcaagaggtcagttttaaaaaaagatctgtttctgtaatttaataattcaaaaacccaaaattgttatttttctattggtctccattttttgccaaagtttmtttaaaaatatttttcagatagccaatctctgtttctagttgattttcattttatacacatat

SEQ ID NO: 165212 - DNA, 669 bp, Homo sapiens
tcctcttgtgtcttcccctggtgaaggctgaggcctcatttcctctggcccagctgggggttctgtttggctggcctcagaatcctcattctgagaattgtttcagcaccaagggagcttcttgtcccacctcatatcctgtagcattttttttttttttttttttgcctgctgatcttcagaagaaactaacatttgtagttgctatttgatcacagtgaaaaggaattcctcatgcctaggttttaattccacttagtaacctggaataatgttttaaacctcatggttgctgacaactcttgcagaacactagtgaacagagcactcaccttggcacaacgagataagaaaaagtcccctgaaatctgaaaataaataatagaaaactaacatggactctataaaactaatacagctttgggyagcctacatgcccaaatagacactcgcaaatcggcatacaggacatccctagatccaagtccaggaatgagaaaataatacaataatttttaaaaagccaaaaatatacttctcttagatttgaaaaactttgagctttcacaatggaaatttatttttaaagaacagtcattgatggagaagagggaaagactaaaacttgttttggagcttaataaaatgtagatggggggtcaggagaag

SEQ ID NO: 165213 - DNA, 480 bp, Homo sapiens
ctcatttaaatagagaacaatttaacttccatgaggccaaaaaaaaaaaaagaaaccactaarcgataaataattgaggacaaaagtcaacaggataaaattaaaagtgatatagtgatatagtcaaatagaaaagatttcagaggaattagaaaagcaataacagaatatagaactacactggaggcaaaaaggagtgtaattgacactgcagaaaatctatcagagatatgggggaaaacttcagaagttcagagaaaattaaatattcagagaaaaattaaaatgttaggagcaaatataaaataacatcttgataaacatctaccatgttccaagaaaaacagtggaaagaaataaacacatggacccatctagaaatgtataaccactaggataaagttttaaacattatacatttataggtaggaaaaaaatcagtttacatagaataaaaggctggcctcatacatttttctt

SEQ ID NO: 165214 - DNA, 618 bp, Homo sapiens
cttgtgcacatgtttaccggtccatatacataagaatattcacagtatcattgttctttggagcaaaacaagccaaacatctgtaaacagaagaatatatgaatgaatgatgacacagtcatatgctggaatgtaatacagccacacattaacatagttaaatctgaaatrtataacattgagcaatcaaaaagcaagtttcaggaaaaatgcatacataaacctttatttacctgaagttctaaaacaagcaaaattaagtaatagcttatttaggaatatctatacataaagaaaaccaaaggtgctattaacacaaaattcaggatagtgactatctctggagagtagaagaggggattacaatctggggaggtcctgcctaaggctccacaaatatcaatactatttctcctcttagtgggttcattttatcattagtcttgaaattgtatatagatattagacatatttctttggaattattatatgtttattttttaagttttaaaacaaactttgatgcatgagagccaaatcaaggctacaaatatgcaccatcctcccgaccacaacctactccaatttgtcttaaatagtgagttatttccaaaactt

SEQ ID NO: 165215 - DNA, 562 bp, Homo sapiens
tcttctgtatccaattcctgtatccatgctatagctctggaaaccactgtcctactttctgttactacagtcttatcttttctaaattttcaaataagtaaaataatatattataaagttttttatgtttggattcttttacttagcataatgattttgagtttcctaaatctctggaagttggcattgtctcttgtactcttatatatatatatgggccagatacatatttgtccttttagactttttccatattttgtatgcatacatgtatatgtatagaagcaacatagtattgagggtgtgcatgtgtgtttgaacataagtggcataatcttctgcaataatcatttttactcaatattatatttctgggttcatttcatgtttttataatagatccagctcattccttttcagtgttgtgtagtattccactgtacaagtcacccacartttattcagccattgccttgacaaacaacgttgtcatgaccatcgtcatacgtgtctccttgtgttctatacaggaattttttaggcagacattgcaaattggaat

SEQ ID NO: 165216 - DNA, 581 bp, Homo sapiens
tgaaagtgaaccttctcattcatccctaaactagactagaaaacagaaagctatgtaggcaaaactcagttatgctaattgtagtttcctttctcatcagtggttctcagccagaggagataggccacccaggggatatttggcaacgtctggagacattattggttgtcacagcagggggagttgctactagcaactggtgggtctacaggccagggttgctgttacacaacctacaaggcacaactcagcccctcacagcaaagtactcattgataaactcagtttctgatgatatcagaccaattttttctttatacataatgaactgctattttcattcaacaaatagttgagtgcctactgtatttcatgtgtgtgcacataaaaggacctttgttaaaatatatattcacttaaatgtcatgaacaacaagtgcaatgtgagacgccacatgctacaaaaagtgattcctctgccagtrtcatgctcgtttgcttaccgcaccatgcttatttaactaatgtgacgttcattattctgttacagttttgcaatttaaagtaacatatcactcctt

SEQ ID NO: 165217 - DNA, 535 bp, Homo sapiens
tatttagttctattttcttcccaagtttcaatgtcaacatagagcaaggatattcataaaaagtctttaaactacggctttattgtttacttcctcaaataaattttgcatcttttcttctgctaaatttctggttttttgtcttctaagccatcttaaacctgcagaggaatctcaagataggttgactagtttgacctcctaacaaatgtagggataccttttaaaattccttggcaggtaatccagactatgaacagttccagaacagagaactcactaaatcacaatcaagccwatttcttatattccaaaatcaagacatatgtgcaattccctatgcctgatgagaacaacctactccaggtctctgcatggcttggtctctagatacattcaattattggcttacatgtcacattgtcagagagacttgccaattattctctattctcttacccgtctttatttttctttataatactattacctgacattatactctaggtccactaatcattatcatattaattat

SEQ ID NO: 165218 - DNA, 440 bp, Homo sapiens
gaattccttctttttgcagtgttctcctctctggtaactttcttcatacatcccagctgtttcactagcccaaactctgatctctgcacttcaactcagcaaacactctgygctttatttgagttctgcatgcttgcacagtagattagaaaggatctccaaacagaaagtcagggacaccatacagcttgccttgtatactgcccaccactgggaatcactctcttacacctttaatcacaaggctgaaagcaataattttatatattttgtcctattttatagtcatttaagctgggtggctagtttaggaccagctggcctattgcagagagcatctaaatatacatattataaacttgcttcttaaaattaattttatctacaatgagtttatgtgcttactacataatttgtttactatcttgcttattagttaa

SEQ ID NO: 165219 - DNA, 421 bp, Homo sapiens
ctcctctctggtaactttcttcatacatcccagctgtttcactagcccaaactctgatctctgcacttcaactcagcaaacactctgtgctttatttgagttctgcatgcttgcacagtagattagaaaggatctccaaacagaaagtcagggacaccatacagcttgcctygtatactgcccaccactgggaatcactctcttacacctttaatcacaaggctgaaagcaataattttatatattttgtcctattttatagtcatttaagctgggtggctagtttaggaccagctggcctattgcagagagcatctaaatatacatattataaacttgcttcttaaaattaattttatctacaatgagtttatgtgcttactacataatttgtttactatcttgcttattagttaagttt

SEQ ID NO: 165220 - DNA, 563 bp, Homo sapiens
agctgccatagtgtagggtggatataagcttgccctagggttgcctggataagtgttagggtttctcagatggtgggcagtgccatggaactctcaacagattatgtcctttgtctttggctgccagggtgggtagaaaaaaacataaggtgggggcagggttaggcatgtctgagctcagactctccttgtgcagggcttgctgcagctgctgtgggggatgagggtgtggctctcaggccaatggagttatgttcccagggggattatggctgcctttgttrtgttgtacatggctccagggaagttggggaaagccagcagtgacaggcctcacccagcttccacacagccagaaaggccagtctcaatcccgccatgcctccacaacagcaccaagtttatttccaggcagccagtgaacagggctgagaacatgccccaggctatgagcctccccactgagaaagcaagcagggctttcaggtttcatacctccccatctgccacagcttctgtgcttgtatctgcactctctgttcgctgcctctcctggattgtgt

SEQ ID NO: 165221 - DNA, 597 bp, Homo sapiens
cttgtcccatcccttgctcactggagttactctgggaggacttataagcaaagcactcacatttttaatagataaatgtgcattatatatatatatatatatayacacacacacacacatatatgcatacacacacacatataaaatctttcaaggctattcactgataggtctccaattgctcatttctcctctgaagacatgttctctactccagtgtttctgtaagatccatggcccacctactttataacaacttgggtttcactgttaaaaagattcctgaggtgcagcccaaacctactgagtcacaatttctatggatgggcctaataatcagcatttttcaagttcatgagtgaatattatccacaccaaggttgaaggaccaccactttagtgtgggatgctctctatatgactgtcaacaaaaaagcagactcatgttcctgtcaggttacatgcatttctatgtcaaaggacaactactgtttaaaagaggaaactgatattttaaagagcataattaggatgttcttcaatgacagcaactaaaatttgaggaggaaaattggcttggtctatagcatacatttg

SEQ ID NO: 165222 - DNA, 518 bp, Homo sapiens
gttgtatgtaactgacttacaatgatttgttgtatgcatataccgtaatttatttatccattctgctactggtagatatttgagatcactcaggtttttgatacttgaactgattatgtgaatattcttttatttctgatgcacatatacaaaactgtctctaaagtaagtccctggaggarttgtggagttatagtttatcaacacttttttttttttttttttttttttgagacggcgtctggctctgtcacccgggctggagtggagtggcgcggtttcggctcactgcagcctctgccgccagggttcaagcgattctcctgcctcagcctcctgagtagctgggactacaggcctgtgccaccacgcccagcttgttgaccaggctggtcttgaactgctgacctcaagtaatccacccgcctcggcctcccaaagtgctggattactggcgtgagccaccgtgcccggcctgaacactttcaattttagtgggaagtcttctcttttttttc

SEQ ID NO: 165223 - DNA, 518 bp, Homo sapiens
gttgtatgtaactgacttacaatgatttgttgtatgcatataccgtaatttatttatccattctgctactggtagatatttgagatcactcaggtttttgatacttgaactgattatgtgaatattcttttatttctgatgcacatatacaaaactgtctctaaagtaagtccctggaggagttgtggagttatagtttatcaacacttttttttttttttttttttttttgagacggcgtctggctctgtcacccgggctggagtggagtggcgcggtttcggctcactgcagcctctgccgccagggttcaagcgattctcctgcctcagcctcctgagtagctgggactacaggcctgtgccaccacgcccagcttgttgaccaggctggtcttgaactgctgacctcaagtaatccacccgcctcggcctcccaaagtrctggattactggcgtgagccaccgtgcccggcctgaacactttcaattttagtgggaagtcttctcttttttttc

SEQ ID NO: 165224 - DNA, 558 bp, Homo sapiens
tttcattattgcagtcaatttgattattgtcaaagtatccgttttcattaaagttgccatgtaaatctctaattcgtttagcatctaaggtagaagtacttgagtggacttctttgaataagtgatagcagtgatgacagataatggtgctactttgattgcttttgtttacactcttaactactattaaaaaggacagattaaatatatagcaccccaaaatggctacatgaaattgtttttaacttgataacctcccttctatggaaggtgataggtcctcaagcagtcagagaaattgaactgatttacttatcctcacattaccctgctccagattttccttatcttgttgattagagtcagaaattgcttagcggtggctgacaatgcgtatattatttctggcacaacacagaacaacatggaaaagttccattgagttctttatggccagtgaaagtattcttgggcaaatattttatattcatgcagggcttgttttacracaggtatttattcagtcactcatctcatattcattgagttaaaacctat

SEQ ID NO: 165225 - DNA, 517 bp, Homo sapiens
tacccaaaggactataaatcattctattacaaagatacatgaacacgtatgttcattgcagcactgttcacaatagaaaagacatggaattaacccaaatgcccatcaatgatagaccagataaagaaactatggaatactatgcagccataaaaaggaatgagatcatgttctttgcaaggacatggatggagttggagccattattctcaggaaactaacacaggaacggaaaaacaaacattgcatgttctcacttacaagtgggagctgattgatgagcacacatgggcacatggcaggaaacaacacaccctgggcacctgttgtggggggagggtgaagggagggagagcatcaggaagaatagctcatgaatgctgggcttaacagctggatgatgggatgatctgtgcagtaaaccaccatggcacatgtttacctatttaacaaaactgcatgtcctgcatatgtacccctgaacttaaaagttaaragaaaaaaaaagattccattc

SEQ ID NO: 165226 - DNA, 476 bp, Homo sapiens
tgatacgagaatagggatgacaagtgagtaatagtgagattgatggagttccagggttgagtgaaatctccctgaggactgctctactcaaggttgacattacatatctttgttatacctcatgcaaagtaaaacatacattatrtaactatataaatatttcacatatacctcagtaagcccctataaaagacaagatagtctgaatctgtggccaaaataaaaatagcaaaataatgtatttttactaaaagacaaatttctttctacttttcctaatccaataagctgaaagcccaacaacatggagtcatagggttggaaaagttgaattctcttctcaatgaaagattagtgcaagtattggtgagaacataggaaatacaataaaagacaacatagctttatctcgctggtcctcctcggcacttcctgttcttacttactatccaacaaagggtgtggttgtgtttgtg

SEQ ID NO: 165227 - DNA, 476 bp, Homo sapiens
tgatacgagaatagggatgacaagtgagtaatagtgagattgatggagttccagggttgagtgaaatctccctgaggactgctctactcaaggttgacattacatatctttgttatacctcatgcaaagtaaaacatacattatataactatataaatatttcacatatacctcagtaagcccctataaaagacaagatagtctgaatctgtggccaaaataaaaatagcaaaataatgtatttttactaaaagacaaatttctttctactkttcctaatccaataagctgaaagcccaacaacatggagtcatagggttggaaaagttgaattctcttctcaatgaaagattagtgcaagtattggtgagaacataggaaatacaataaaagacaacatagctttatctcgctggtcctcctcggcacttcctgttcttacttactatccaacaaagggtgtggttgtgtttgtg

SEQ ID NO: 165228 - DNA, 396 bp, Homo sapiens
gaattctgtcatgataccactaaccaagagaagaaagctaggaakgcaaccagaatattgagcatgagcatggatacgattggcataagctggtggcagcaattcctggggaaatttccaattaaaatttagtcctgttatgtggtgaaaagggaacacttatacactgctggtggaaatgcaaattagtttaacctctatggaaaacagcatgagatttcttaaagaactaaaagtagatctactattcaatccagcaaccacactagtggatatctacccaaagggaaataagtcattacatcaaaaagacacctacatgcatctgtttattgcagcacaatttcaaagatatggaaccaatctaagtacccatcaaccaacaagtagctgaag

SEQ ID NO: 165229 - DNA, 466 bp, Homo sapiens
gaaaaacactgtcagttaatgactacagagctcaaccagggccttaattcaagtgcraagagcatcataacgcagtgcacttctccagctcaatgtgtgtttatctctcacctatacaggacccactggggacctgcagcgtcttgtaacttttaattgctggtgagcctctggcaagtgtggcttaccctaatacactgaagaagtatccattgctttcagttttgtccagaaaagtgccccggtcaatggcaaacctctttaattgggcttttatcaggttcttccctcgaagtagggacggctattggaaagagaatcagtgtgggttttagggagtgctgacacatgtttttgaaaatgaatagagggggtggcttcttttgatgtcattgaaaatcacttgctagaatgaatttgatatggatcagccacaagggctatgttattgatggataacacaaat

SEQ ID NO: 165230 - DNA, 532 bp, Homo sapiens
aggtcactgaggtggagtactttgctttaattaaagtaaaatttctattataccctatttttcatattggttctattgtaataccataggcataaataaaaagtacagaaaatatttgtaaacatatttcccagaaaaatttgtattaaaacaataacaaaataatcataaaactctagtaaattttttaaaagacactaaaatgaaactataaaataatacctgatatcctgtgagcagatttatgtgtcccacatggacatcccttagcaatttggctgagattgttaacagctttaatttatactaacatttcttcctctgcattcaagataaatattctattttttaaaactttactccatagtttgaacttagtagctctgcctggtaagacctgtgtagttgttagaatagtccaggctgagaagataataagatcaaatttgcgagttgaaatgtttgatccttgcttatcattggagctcagcctaaaatytgctagaacatgtggttgtctagcaaccaacta

SEQ ID NO: 165231 - DNA, 700 bp, Homo sapiens
ctaacatcctttactaattagttaagttcctgacctcctttgaacccacttcctcatctatgaaaggataacccagtgttcaagaacagttggttgattaaactttcaatttccaacgaaaactcaccccaaatcaccacaatttaattgtgatttcatttataaaataatctttcttttcaatagaccttggaaaaatggttgtgctgraaggaaggaaggaaggagaaaagaaaagaaaaggaagaaggaaggaaggagagagaaagaaagaagaaagaaaaaggagaaagaaagaaagagagaaagaaagagaaaaagaaagaaaagagaagaagaaagaaagaaaaagaaagaaagaaagagaagagaagagaagagaagagaaggaaatccaaaaactaaaatactaaacactaaaaagagcgcaagtaaagcaccaaagatacagtttcactaaatcacaaaatcatctcaagatgggaggccttttctttaaaacctacatcacaggtggcaaagacagaagtgtgggaaaggatattaatacaaaggatttgacaatgtggaaggacactaaagcaatacgtttattgcctgggcaaaaatcttttctctgatggtgcaatattgccttaaggctttatatacatcttaaacacaatggactttcaggagcacacagagccctagggcaaca

SEQ ID NO: 165232 - DNA, 470 bp, Homo sapiens
accctgaaaaaagacccagctaacctgtgcctacattcctgacttatgaaaactatgataacaaatttgtgttgttttaagccacccagtttgtggaagtttgytatgcagggatggaaaattgataagagttatctaacatttagtctgagattacttatggctttccccccccatctttgcaattatttgcaaactgtcatagctcttagtggttatttcactggaaaaaaaatctcttactccctgctccctatcttctttccctttctcccatttctcctatcaacacctctgcccaaacctggttcagcattcctgagagtttggacaaataggcaaggacaggagaactaaccaactgtagttcagaacctcggacagcagctctccccatactgcctacagatctctccctcaacacctgtgctctccaccgtgactgtcttgtaaatggcacccttgaccac

SEQ ID NO: 165233 - DNA, 492 bp, Homo sapiens
aggaattcagttaacacattggtttataccttatgagaccctgaaaaaagacccagctaacctgtgcctacattcctgacttatgaaaactatgataacaaatttgtgttgttttaagccacccagtttgtggaagtttgttatgcagkgatggaaaattgataagagttatctaacatttagtctgagattacttatggctttccccccccatctttgcaattatttgcaaactgtcatagctcttagtggttatttcactggaaaaaaaatctcttactccctgctccctatcttctttccctttctcccatttctcctatcaacacctctgcccaaacctggttcagcattcctgagagtttggacaaataggcaaggacaggagaactaaccaactgtagttcagaacctcggacagcagctctccccatactgcctacagatctctccctcaacacctgtgctctccaccgtgactgtcttgtaaat

SEQ ID NO: 165234 - DNA, 462 bp, Homo sapiens
gtaattaaggttaaatgatgtcataagggtggagtcctaatccaatatggtttccttacaggaagagttttgaggtgcaggcatagaggccaaataagggtgtggtgaccagcagttatccccaagccaaagagaaaggcctcaggagaaacaaaacctgccaacacctcaatcttagactttcagcatccagaacggtgagaagataaatttgtgttatttaagccacccactctgtggttttttatgatatgcctggctgactaacacaaacraatttgaataaacatacaaatgacatacaaatgaccactaagtatgtaaaaatctcaagatcagtaataatcaggggagcacaaatcataatcacaataaaataccacttcacactcactgggatggttgaaataaacatagacactaacatgtgtttctaaaactatggagaaattggaaccctca

SEQ ID NO: 165235 - DNA, 524 bp, Homo sapiens
caactgaagtaataatctatctcaagaaaaatgagttcatggctctttatcctttctactttcttcctagagagtcctatagcagcacatcatgtcaaataagtcatctcaaaagggaccaataacaacttttgggcaggtccttctggaagtgaaagaagaaaatatgaggggacttttatagcagtcatgatccagggactattatgacggcaactcctcaggtacatatacatattcccctaaaatattctagaggactctaagagccagtttgagaatcactagtctagggtctacagattatcactttcatcaacatcatcatcatcaccattatcgtcaatcgaacattaccgttaaacattgtgtgaatctcaawctgtctgtattaggaattgtgattggagacagagagaaagaataatcccttaccaagtaatttcaaagcagagaaaatgaaatgaaaatttgttctacatatctcaacatctgtcttcaaaatttaagatgccttctaggaa

SEQ ID NO: 165236 - DNA, 483 bp, Homo sapiens
gtccccattttgattgaatctcattggggcccaagattgttgaatgctggctctgaaaaacatccaaaatattaccaaaacaatctgttgataagaaaactcactgtggtaaaggaggacactgtctctctttagaggcactgtctcttgacagtcctagtagcatctcagaagggaaaggaaaargttgggatatctattgagattttagggtctggtttaaagcagatctttcaatgtgaggacttggttacaattgagagaggggcttcatatgatcatttaggattggtaaccacagcaaaacaggtattttgaagtgagtagttctgaggatcttggggtacaaactgtctttaatactttccattatagagttgacacgtgatatagtttggatgcttgctccctccaaatgtcatgttgaaattaatccccaatgctggagatggagggactggtggggagtgtttgggtcatggg

SEQ ID NO: 165237 - DNA, 512 bp, Homo sapiens
tttcctcttcttccttccactctcctgtgacacctgctcccccttcaccttctgctatgattgtaaaattcctgargccctcaccggaagcagatgcttgtacagcctgcagaaccctgagccaattattttgtttgtaaattacccagcctcaggtatttctttattgcaacacaaaaacagcctaatacaacttccagaaagtttcttaaatgaacaataaagttatttgtaacttttatcttctaggacaagagcattctggaatggtaatgttatatcgatgacaactgtgaatagtttattagttgttttcccattgctataaagaactattggagactgggtaatttagaagaaaagaggtttaatcgactcacagttccacaggtttaacaggaagcatggctgggaggcctcagcaaacttacaatctcatgacagaaggtgaagagtaaacaagcacatcttactgcggcagagcaggagagcgagagagagcacgaggagag

SEQ ID NO: 165238 - DNA, 470 bp, Homo sapiens
ctaatctgtttttctgttcctataattttgccttttactgaatrtcatgtaaatggaaacaaaaggatatacccttttgagtatatcacttctttcactcagcataatgcatttgagatctatccatgttgttactagtatcagtattttgttcctttttattgctaagtcatatttcattgtgtggctataccacagtgtgtttatgcattcaccagttcatgggcatttggattgtttccagattttggtaattatgaaaaaaaccacgataaataattgcatacagatttttgtgtggtcatatttccatttcccttgggtaaatatctaagagtaggattgctgggttatacagtaaatatacttttaatgttataagaaacttccaaactgtatcccaaagtggctgtaccattttgcatttctgccagcaaaaattcccattgctcatctttctcaccagtatt

SEQ ID NO: 165239 - DNA, 410 bp, Homo sapiens
taactgaatgattttttgtttttgttttttgaggcaaggtctcactctgtcaccgaggctggagtgccgtggcatgaacacaactcactgcagccttgaactcttgacctcaagagatcctcctgcctcagccccccatagctgggactacaggcctgcaccaccatgcgtagctaatttttttgtattagcttgccatgyagcccaggcgtgtctcaaactcctggctttaagcaatcatcctgccttggcctcccaaagtgctgggattataggcatgagccactgtggtcaggtgattttttttaagtagataaaaatacactagagaaactctttccttatgacatcctcactaagactactcaagtctatgggtaatatgatgtgtgctgtagttgtggtgcaca

SEQ ID NO: 165240 - DNA, 575 bp, Homo sapiens
aatctgcagtttaaaatttttctgtaatattcttctagaatctccattcctgctcataagcaggaaatacaacagtgacaaccaccacaacaaaaacaccaatacatttcaagcttgtccattaaaatgtaaattagtagcttcctgtttaaattagtctcttttggataaagttgtttccttcaatttaggagtctccatttcataaactcaatcttttgttagtaacctctcagtctttttttttttttttttgagagcttttcctctccttcttttctctcctycttgtgtcatcagagttcaggaaaaaattctaccccactcacattgttagttgtggagaccttggatccacatattgatgctgttagtggtagctcatatcagccagagtgcttggctgttgagtctgctcatgctcatcttcaggtgatgtgtttgacgtctcagtggtgaatgaaatcatggcttgaggttcaccaagaccatgaccactggtgcttggctccttacgtcagcttcctcaggtgctcctggctctcttatgactcaggtgcttcccctccctcctg

SEQ ID NO: 165241 - DNA, 627 bp, Homo sapiens
ccatttatttttgttttataagtaatacccatttaacatacataactgttctaaatttgaaaaatttagaggagacattatctgctttcacagaacttgaaatctaaacatttgatttttaggcaacattagttactagtacaaatgtgggagagctttagtgaagatagtaagaaaaataaatagtgagtgatgcagaattcattatattttattcagactgcattacatccatgttttatagcagatttattttcctaaacctgttaagtttcagcaagtattaaacctgatttacattctacagggacatctccttggatgattatgaaaatagtgcctggaagataccraggagactgtgagtaaacagtgctgctcctgtccatgaagaaccctgcagcagctggtactcagtaggcactcagcgactatgctgaaatgaatgaacacaagagaaaccacaaaggggttcacaatagcctcctcttggattatctaggacaatggtttttaaactctaacttcctgagaaccacctggaggcttgttagaacacaggttcctgggcccctttcccagagtttctaattgagcaggtctggggtaaagcccatgaatttgcat

SEQ ID NO: 165242 - DNA, 627 bp, Homo sapiens
ccatttatttttgttttataagtaatacccatttaacatacataactgttctaaatttgaaaaatttagaggagacattatctgctttcacagaacttgaaatctaaacatttgatttttaggcaacattagttactagtacaaatgtgggagagctttagtgaagatagtaagaaaaataaatagtgagtgatgcagaattcattatattttattcagactgcattacatccatgttttatagcagatttattttcctaaacctgttaagtttcagcaagtattaaacctgatttacattctacagggacatctccttggatgattatgaaaatagtgcctggaagataccaaggagactgtgagtaaacagtgctgctcctgtccatgaagaaccctgcagcagctggtactcagtaggcactcagcgactatgytgaaatgaatgaacacaagagaaaccacaaaggggttcacaatagcctcctcttggattatctaggacaatggtttttaaactctaacttcctgagaaccacctggaggcttgttagaacacaggttcctgggcccctttcccagagtttctaattgagcaggtctggggtaaagcccatgaatttgcat

SEQ ID NO: 165243 - DNA, 430 bp, Homo sapiens
atgaaactaaagattgaaagattgtgatcagaagttttggaataygatacaccctatggaccctctggaacatgaagaggttttggaaggcttgttgattatgtggtaagaatcagatttatttttgttggtagcaccattttattttcctagttctggctatggctaaggaaggattgcatacacatccccatatacacacatgtatatgcatgtatgcatagttgtatgtatatcttattcttcatgtcaaatatattctttataatgacattgtctgtgtgcctgtggaggtaggtattgttgaaaaatgtgcattcactctgtgcattggaaaagatacttagcgttgccacatagtttataatcatgagtcagaaaccagtggtctgatcggtatgtctgatctataggtcatttattcattgaa

SEQ ID NO: 165244 - DNA, 430 bp, Homo sapiens
atgaaactaaagattgaaagattgtgatcagaagttttggaatacgatacaccctatgraccctctggaacatgaagaggttttggaaggcttgttgattatgtggtaagaatcagatttatttttgttggtagcaccattttattttcctagttctggctatggctaaggaaggattgcatacacatccccatatacacacatgtatatgcatgtatgcatagttgtatgtatatcttattcttcatgtcaaatatattctttataatgacattgtctgtgtgcctgtggaggtaggtattgttgaaaaatgtgcattcactctgtgcattggaaaagatacttagcgttgccacatagtttataatcatgagtcagaaaccagtggtctgatcggtatgtctgatctataggtcatttattcattgaa

SEQ ID NO: 165245 - DNA, 564 bp, Homo sapiens
aatttcttcaaatgcagagcaaacgtgtctgtattaaaacctttaaaggagtttaaaatgtctaattaatctgtttcccaaaatttatgagaaaaaggagtttaaaattaaactgcactaaaataagtcttctgaaaccatkcttctaagggcgttaaagaaaattcattttttctcttaaaatgcaaattagatatctaaataaatagtttgcatacctcagagctccagatcattagataagtccagcccacattgtgactgtgtggatagtctcccacaaaatggaattttgttctatcttaacattcttgaagacatgtcaaagaacacaggaccaaaggaaaatcaacattattatactgtttataaagaaaaagattgttctacatcatatatgaaatatttatcacatctgattcaccgacttggcttcttaatttggaaaactaatgcatacatttgcctaagatatcaaggcccaacctactccacaaactgtggtttgtaacctccagttttaggaaggtgcaaactcagaaccaaaacttgagctctcccacc

SEQ ID NO: 165246 - DNA, 594 bp, Homo sapiens
aagcgaataattatttaaagcagggtttgaattagtattacctaaatctagagtttgttcccataactataattttgtcactatcttttattcatggctctctctctctgtttactatgtagttatgtagctaagacaatagaagatagtaaaaatggcaattatagttatctctaatatggctggcttaattaaartaatctttattttcttctttatttttgagcacttaggcatttgttacaaatatttttattgaaaaaaaaatactataactcaatgaatagacctagttggataggttgttgagattgatctagaaaagtaaattattgaccatttttcataaaagatctataactccattaatcatagttaagagtgatcatcaaatagcaagctgttagtctctctaacagtgacaggacagagtcctagtctaactatattggattccaacagcatagaaatacagtcaaattatcaaagaaagactggccattcctataaaagagttgctggaagtgtgaaatgaggaaatgggaaaataatgagttatttgcaaaataagtagtagagtggaaagactgaaga

SEQ ID NO: 165247 - DNA, 530 bp, Homo sapiens
ctttatgggacattgctggagaaatcttcagtgatagaggtattcatttcactgcagttagacaaggtattacaaatacaatggcaataagcaaagctaattgaatcaactgtactgtctttgtcaaaggtattagcagactgatgataattagatctattcttactagaaaacatacattgacccctaatgaaataattactgaaaggcctaaacccctaataataaaatcatgtgtatctcctgctcttagaaactctgacaagattcagcattgcaaggcttgaatgcattatgcctaagtgtatttttcaccacataaaataagcctttaaatggcctgccaactgatgacaaccacacctttcacaatctagaacctgaagattatatcatacggatatgacaccagagaaaaaccaccattgaacygcatcgtaaggaatcatatcaagttcttttactttttaaatttcagcttttattttagatacaggggtacatatgtagaattgtcacatgggtatatt

SEQ ID NO: 165248 - DNA, 530 bp, Homo sapiens
ctttatgggacattgctggagaaatcttcagtgatagaggtattcatttcactgcagttagacaaggtattacaaatacaatggcaataagcaaagctaattgaatcaactgtactgtctttgtcaaaggtattagcagactgatgataattagatctattcttactagaaaacatacattgacccctaatgaaataattactgaaaggcctaaacccctaataataaaatcatgtgtatctcctgctcttagaaactctgacaagattcagcattgcaaggcttgaatgcattatgcctaagtgtatttttcaccacataaaataagcctttaaatggcctgccaactgatgacaaccacacctttcacaatctagaacctgaagattatatcatacggatatgacaccagagaaaaaccaccattgaaccgcatcgtaaggaatcatatcaagttcttttactttttaaatttcagcttttattttagatacaggggtacawatgtagaattgtcacatgggtatatt

SEQ ID NO: 165249 - DNA, 606 bp, Homo sapiens
cactataataagtactaagttatyagagacaaaagacagctctgccttcaaaaagtcacattgcaatgagggagacagacaaggcattacaatagagtgtgataatgtgttatgtaaaagatggagctttattcaagtacgcgtatccaggagggggactttaccctaccagagtgacatgaaacctagttttcaaggctgaaggaagagtttatctggtgggaatggagcaggggtagtataaggtgaatgttccagcagaggaaatagtttgttcacagcctaagtgagcttgtgaaaaagtgtgatatttcattaaactgtagtggctttaaacaaacaaaatatgactggcacatggggtaagtctggggaagagaagaaaaatgagaatagaataagaaagaaggcagcttatgaaaatttctctatgacattctaaaatgtatgtgccatatttataactgttacccttgcaccttgacctggtcaatttctttctttctttttcttttcttttcttttttatttgttttgtgaaattacactcaccattttaataaggagaggtccactaagtaaaccaaattattgaattaaatgctt

SEQ ID NO: 165250 - DNA, 603 bp, Homo sapiens
tgattacagtgagcccaattatgaatcaatgattgtagtgtctgccaaatataactggagcctaaactgaggctgtggagtagcaatgaaaagtgagaggtaaatggttttgagaaatccttgagagctatatctggcctgggtccatggacaagattcccttatcttcaacttccactaaaacagctctttgtgattctttactctgttttcctcttaaatttaatattttaaaatgtctatctcaaaagctaccatctatgtatttcttaaatcaaaaccgtatttttccttcaaaatgtattaaacattttgtttaagcgaagttccttttagaacctgggtttaagtgggaagaaggctggtgaggctgaggagtgcaggatgatctgcagggctagaagtgaagtgtcgtttctttmttaaacaagtatcttgtgtggaaacatgcagcaaagccaagagttaatggtttaaggaatgagccttgagggaacaggggccaagggaaaattttcactttgtccttctgaaggtttactgagaaatgaactcataaatgtcagattaactggagaaaaagcattcaaaatttattaatgt

SEQ ID NO: 165251 - DNA, 367 bp, Homo sapiens
ccaagaaggagtacaaacaatccagactgtgagactacaataaatacccaaacattgacaaatattcacaagcatcaagactacccaggaaaatgtgacctcactaaacaaactaaataaggcaccagtgactaatcycagagtgacagagatatgtaatttttcagacagagaattttaaaatagctgttttgaggaagctcaatgaaattaaaaataacatagagaaggaattcagaattctatcagataaatttaacaaaaagattgagataattaaaaaatatcaaggagaatttctggagctgaaacattgaattgacaaactcaagactgcatcagagtctctcaacagcacaatggataa

SEQ ID NO: 165252 - DNA, 538 bp, Homo sapiens
gcaagggcacaatgcctccaatttctttgctgatgcataacaaaagtgacctctactcaagttcccaataagtttctcatctccatgtaagacttcatcagcctgccatctgtgtgcatattaccatcagcattttagacaaaaccattcaacatgtctctaggaagttccaaactttcccacatcttcctgtatcttctgatccctccaaattgtttaacctctgcctgtcacccagttccaaagctgcttcaacatttctgctatctttatagcccyactcctagtaccagttttctgtagtagtccattcttgcattgctataaatttataaaggaaatttataaaggaaatttataaaggaaagtaatttataaaggaaatttataaaggaaatttataaaggaaagtaatttataaaggaaatttataaaggaaagaggtttaattgactgatagttctgcaacctatataggaagcacagctgcagaggcctcagaaaacttacagtcatagtggaaggtgaaagggaagca

SEQ ID NO: 165253 - DNA, 546 bp, Homo sapiens
agtgccactgccctccagcctgggcaacaagagcgaaactcggtcttgaaaaaaaaaaaaaaagaataaatcaaaaactaacaaaaataattactagtggtaaatgaggaatgatgatagaaagaactaagagatttatgaataaagttctaatgaagttttggcattggaaacatraaaatttaacatatccaaaaaataaaattaaatcatgaagaaaaacttaaaactaaaagcaaacaaactttcactgcatatatgcaattactgatcatacagaaaaaataatccgtttgactctactatagataattttcatcatatatatttggtggaatatattttaagggcaacagatctacaaagaaaagatgctttgtagctttattactgaactaatatgggtattaatattttaattaaagtatacatatgcatatatagaaaatactataaaattattttaatattaaaaattaaccatttcaatgtgaaagatacaattataaaattaaattatgtaaaacttctgtaatatttaatgta

SEQ ID NO: 165254 - DNA, 547 bp, Homo sapiens
ttatcactccagcctgggagacagagttagaccctgtctcagaaagaaaaaaaaaagaaaaaaaaaaggtaggaaaaaatgtattatagagctatttgcatattataaggcagttaattagtataaactatataatatttttcaggattttgtgaaggaggcttgtggtatatatcaccatatcatttgttttgaaaatttttaatttgctgttttttaaatgtaaatattcacttttgtaccaaattttgtattttgtactttgtattcttttyctaaaagagcttgagcaaattttcagagctctgcaatcgaagtcaagattctacaaacttccaaagggaaagaaaaaaaataaaaccaaatccgaatcaccccatacaaagaatcaaaatggctttggacctttctacaccactggaagataaaatttaatagcaaacagccctcaaacttctagcaggaaataatttccaacggtgtagaatttaatacactgtgaagccctttatcaaaagagagagaataaaagtattttctgactggt

SEQ ID NO: 165255 - DNA, 547 bp, Homo sapiens
ttatcactccagcctgggagacagagttagaccctgtctcagaaagaaaaaaaaaagaaaaaaaaaaggtaggaaaaaatgtattatagagctatttgcatattataaggcagttaattagtataaactatataatatttttcaggattttgtgaaggaggcttgtggtatatatcaccatatcatttgttttgaaaatttttaatttgctgttttttaaatgtaaatattcacttttgtaccaaattttgtattttgtactttgtattcttttcctaaaagagcttgagcaaattttcagagctctgcaatcraagtcaagattctacaaacttccaaagggaaagaaaaaaaataaaaccaaatccgaatcaccccatacaaagaatcaaaatggctttggacctttctacaccactggaagataaaatttaatagcaaacagccctcaaacttctagcaggaaataatttccaacggtgtagaatttaatacactgtgaagccctttatcaaaagagagagaataaaagtattttctgactggt

SEQ ID NO: 165256 - DNA, 547 bp, Homo sapiens
ttatcactccagcctgggagacagagttagaccctgtctcagaaagaaaaaaaaaagaaaaaaaaaaggtaggaaaaaatgtattatagagctatttgcatattataaggcagttaattagtataaactatataatatttttcaggattttgtgaaggaggcttgtggtatatatcaccatatcatttgttttgaaaatttttaatttgctgttttttaaatgtaaatattcacttttgtaccaaattttgtattttgtactttgtattcttttcctaaaagagcttgagcaaattttcagagctctgcaatcgaagtcaagattctacaaacttccaaagggaaagaaaaaaaataaaaccaaatccgaatcaccmcatacaaagaatcaaaatggctttggacctttctacaccactggaagataaaatttaatagcaaacagccctcaaacttctagcaggaaataatttccaacggtgtagaatttaatacactgtgaagccctttatcaaaagagagagaataaaagtattttctgactggt

SEQ ID NO: 165257 - DNA, 387 bp, Homo sapiens
gcataaatgaagccagtcccatgttatactctgaaatccatcacagcatttgtgctgatatttccagcctgtgacagcgtggcaggaacactaaggcagggtcattccaggagagcatgtgggatttctctgacatctggcttggactccctgttggccttgccaaatctccttaaaactgcactgcagtcatagacccttccttccctcctctctctccccttcctttcttctcttsccttattctctctctccttcacagatgtcaaacctgcactgtggtcttttagctctcccagcctccaagagttccctccctatttcccctcatggacatttctcctaattaattgcttgcacatctaacccagttttggcatctgcttc

SEQ ID NO: 165258 - DNA, 368 bp, Homo sapiens
ggagcataaatgaagccagtcccatgttatactctgaaatccatcacagcatttgtgctgatatttccagcctgtgacagcgtggcaggaacactaaggcagggtcattccaggagagcatgtgggatttctctgacatctggcttggactccctgttggccttgccaaatctccttaaaactgcactgcagtcatagacccttccttccctcctctctctccccttcctttcttctcttgccttattctctctctccttcacagatgtcaaacctgcactgtggtcttttagctctcccagcctccaagagytccctccctatttcccctcatggacatttctcctaattaattgcttgcacatcta

SEQ ID NO: 165259 - DNA, 387 bp, Homo sapiens
gcataaatgaagccagtcccatgttatactctgaaatccatcacagcatttgtgctgatatttccagcctgtgacagcgtggcaggaacactaaggcagggtcattccaggagagcatgtgggatttctctgacatctggcttggactccctgttggccttgccaaatctccttaaaactgcactgcagtcatagacccttccttccctcctctctctccccttcctttcttctcttgccttattctctctctccttcacagatgtcaaacctgcactgtggtcttttagctctcccagcctccaagagttccctccctatttcccctcatggacatttctcctaattaattgcttgcmcatctaacccagttttggcatctgcttc

SEQ ID NO: 165260 - DNA, 582 bp, Homo sapiens
cttttttaagtttgcatttttaaaaatatgggtttttaaaatagtttttattccccttttatctttttatttttctgtttaatattttttattttwttattttattattattattatttttgaaatggagtctcactctgttgcccaggctggagtgcagtggcacaatctcggctcactgcagcctctgcctctcgggttcaagtgattctcctgcttcagcctcccaagtagctgggattacaggtgcccaccatcacacccggctattttttaaaaaatattttggtagagacagagtttcaccatgttggccagactgctcttgaacaactgacctcaagtgatccacccgcttcggcctcccaaagtgttgggattacaggcgtgagccaccgcgcccagcccccttttatctttttagtcagtttaaaatattttgttttagtctccttcagttagttctgtcatctcaagttcttgggagcttttatccttcttttgttatatttgtcatatctctctcatggtaaatttttttcttagtcattttgtgattttttgattggcagcaatgttttt

SEQ ID NO: 165261 - DNA, 400 bp, Homo sapiens
atagtaaggatgtagtataattcccaaaaggatttaaagaatcttttaaagatcttaaagaactatggggttagaagaattttattagtaatacycttattcatgcttcttatcttttttggctctaagacttaaaagatacaatgtaattcttctggtgaatttaactgaattaggatatatgcatcacacccaggacttgggtgttggcaaatgtgatggttgattttatatgtgaacttggctaggctgtggtgcccagttgtttggtcaagcactagtctagatgttgccgcaaaaatatttgtagatgtgactaacatttacaatcagttgactttaaatcctattaccttccatcatgtgagtgggccttatcccatcagttgaagaccttaag

SEQ ID NO: 165262 - DNA, 400 bp, Homo sapiens
atagtaaggatgtagtataattcccaaaaggatttaaagaatcttttaaagatcttaaagaactatggggttagaagaattttattagtaatactcttattcatgcttcttatcttttttggctctaagacttaaaagatacaatgtaattcttcyggtgaatttaactgaattaggatatatgcatcacacccaggacttgggtgttggcaaatgtgatggttgattttatatgtgaacttggctaggctgtggtgcccagttgtttggtcaagcactagtctagatgttgccgcaaaaatatttgtagatgtgactaacatttacaatcagttgactttaaatcctattaccttccatcatgtgagtgggccttatcccatcagttgaagaccttaag

SEQ ID NO: 165263 - DNA, 400 bp, Homo sapiens
atagtaaggatgtagtataattcccaaaaggatttaaagaatcttttaaagatcttaaagaactatggggttagaagaattttattagtaatactcttattcatgcttcttatcttttttggctctaagacttaaaagatacaatgtaattcttctggtgaatttaactgaattaggatatatgcatcacacccaggacttgggtgttggcaaatgtgatggttgattttatatgtgaacttggctaggctgtggtgcccagktgtttggtcaagcactagtctagatgttgccgcaaaaatatttgtagatgtgactaacatttacaatcagttgactttaaatcctattaccttccatcatgtgagtgggccttatcccatcagttgaagaccttaag

SEQ ID NO: 165264 - DNA, 400 bp, Homo sapiens
atagtaaggatgtagtataattcccaaaaggatttaaagaatcttttaaagatcttaaagaactatggggttagaagaattttattagtaatactcttattcatgcttcttatcttttttggctctaagacttaaaagatacaatgtaattcttctggtgaatttaactgaattaggatatatgcatcacacccaggacttgggtgttggcaaatgtgatggttgattttatatgtgaacttggctaggctgtggtgcccagttgtttggtcaagcactagtctagatgttgccgcaaaaatawttgtagatgtgactaacatttacaatcagttgactttaaatcctattaccttccatcatgtgagtgggccttatcccatcagttgaagaccttaag

SEQ ID NO: 165265 - DNA, 580 bp, Homo sapiens
tgcatttttcaaattatttgtagtgagttggttgccatagttactgcactttcagcactatttgtcaactttttatcataaggtytttctgcataattttgcctattagggtcatttacataatttagtattactagactgtggaaaagttgattaaaggacctaaaatgattgctttgaaattattaagatatgaatttggaagatatttttctataagatgactcatgagtaaaaatgaaatttatatttttatgggttatgagtgttacttttataactattttgaaaagtatacacgactgaattttggcaaaactgccttcctttattgactaactacatgttctgagccagagtaaaccagagaccatgtataaagtaatataatatttattctggcatatgtgatccaagagaaattaaataaaaactagtctccaaagcacattataccagaaacaatagtacatcctgtggcatcttgtcacctgaaaacaccgcaggtttcagtggaactaaagattgagactagcacacaatttctttttaatgacagcttttacatggcagttttgca

SEQ ID NO: 165266 - DNA, 436 bp, Homo sapiens
ggcccttagatagacccttgtaatattcaattccagtctttcattttacagatgaataaatgaagatggcaaaaaattcataactttttgaaggtctcacaactagtttagggcagagttgggaccaaagtccttcagtcccttatccactgaaagtaacaagtggatgggatttggagtcacgagattcccatctgaatcctgcatcctggtgcttgctcataggatgatctgagatctcatttaacatccccaaaacttcagtttctccatctataatatggggataatattaacataygggaccattttgaatattaaatgacttttccctgtattgccacatggtttttccctctgtacctgtctgtgtcatttttttccttttcttataaggacaccagtcatattgtatttgggtcctgcctaatgacct

SEQ ID NO: 165267 - DNA, 646 bp, Homo sapiens
acagtaaacaaatctgagctaatgttatactgttgtgtatgtctttcttttaaaatttgatagatattttgctagatgatgctggtgatgcaactggacataaagatggccgcagtgtgaaaattatagtctccataagcaagggctatggtcgagcaaaggtacttctttaatcttaaactctttattactaacaatgagaattaccatgagtcaagtgtattttatgtgtgaatatttgatctggtaaatatcctacaacaattgtggattggcattagcttaacatgtcatacaaacatgaaaaggacaataaaakgatgacatcatcatagaggtagaaatgtgtcttacatgtacctcacattcattcactgaaaataatattaacagcccctcatttctaaaactttaaaaaatagttatttctttggcaaacatcttgtctgacatattcttttggtttcacttatttgttataggtaatgtttatgatgtgcagtcgctagagctgtcaatatggtctttatacaaagggaagactctaaactaaatgaatattttagaaatcagaaagacacatgttctactgaacttggtaggacaaattccattgatgttacttgtctatttaagcaaggtccta

SEQ ID NO: 165268 - DNA, 631 bp, Homo sapiens
agacagagagaacagcgcaagtagcaagcacgatataagagttgcttgcaatttttaattatagcccttggctcccagtgaagatttctctcacaagcatacacacacatatgcacagtgcacgcgcacatacacatacaaccacacacacacacatctttgttcaaaaccgttttatatgtgtccttcaaaaacaacgatgtacataaagcacaatgggatctcttaaagttaaataaatgcaatacataaattctgaatatttccttggaactcagacctattcaaatgtggttgaaccaccatctaaagaaagacatagaacctgaggtagagtatttggctcttctctgagcaaaagtaggaagagcacaattgtctgtttgcttcagctgacatgtttaatgcttcctgtgaattctgtctcctcatatctttatataaaagccttttagcacagttttaaatattttcagccaaaaaatatgaaaggtttgaaaggcctcttagtcatcctcartgtttgttttttcctcaatgttggtatgacaaaactctttacaaggtactttttttatggaataaaaaagtgtttagaaaataagagcaaaatagatttattggaggagac

SEQ ID NO: 165269 - DNA, 262 bp, Homo sapiens
tttccagaaaaaaaattatatgtgtatatatatatatgtgtgtgtgtgtgtatatatgtgtatatatatatacatatatatacacatatatacatatatgcatatatatacacatatacatggaattatattcgatatatagatatatttaattatttatatataattatttcatakaatattgtggaataaaaatatttctgaacatggagacagcaactgaattttagcatatgttaagcaaatgcattaaatttgagaa

SEQ ID NO: 165270 - DNA, 568 bp, Homo sapiens
ggaagtttatagcaataaatgcttacactgaaaaagtagaaatattttaaaattagcaacctaacaatgtgcctgaagaaactaaaaaatcaagaacaaatcaaacccaaaatcagcagaagaaacacaawaataaagatcagaaaagaactaaatcaaatagagactaaaaaaatacaaatgattaacaaaactaaaatttggttattcaacaagataaataaaattgataaaccactagatagactaaacaaggaaaaagaatatccaaataaacacaatcaaaaacgataaaggagacattacaacagatgccacagaaataaaaaggatcatcagagactattattaacaactatatgctgaaaaatggaaaatatagagaaatagataaattcctagaaacttacaacctaccaagctgttgcatcaggaagaaatagaaaacctgaacatatcagtaatgattagcaaaattgaatcagtaataaaaaacatctcccaactcttttaaagctttggaccaaatagcatcacagcctaattctaccaatcatgcaaagaagaa

SEQ ID NO: 165271 - DNA, 607 bp, Homo sapiens
ggaagtttatagcaataaatgcttacactgaaaaagtagaaatattttaaaattagcaacctaacaatgtgcctgaagaaactaaaaaatcaagaacaaatcaaacccaaaatcagcagaagaaacacaataataaagatcagaaaagaactaaatcaaatagagactaaaaaaatacaaatgattaacaaaactaaaatttggttattcaacaagataaataaaattgataaaccrctagatagactaaacaaggaaaaagaatatccaaataaacacaatcaaaaacgataaaggagacattacaacagatgccacagaaataaaaaggatcatcagagactattattaacaactatatgctgaaaaatggaaaatatagagaaatagataaattcctagaaacttacaacctaccaagctgttgcatcaggaagaaatagaaaacctgaacatatcagtaatgattagcaaaattgaatcagtaataaaaaacatctcccaactcttttaaagctttggaccaaatagcatcacagcctaattctaccaatcatgcaaagaagaataccagtcttcttgatgctattacaataaatcagaggaa

SEQ ID NO: 165272 - DNA, 621 bp, Homo sapiens
ttctcatcataaaccaatattaatactattgttaaataaagtttatattgtctccatatttccttagttgttatctaatgttctkttcttttccaggatcgtatccagatagccacattacagttagcggtcatgtccttagtcttctcttggccatgacaatttatcagactttccttgttttgcatgatcttaacagttttgaggcatactggtcaggtgttttgtagaatgttcctcaattttgatttgtttgacaattttcttagactagggtaaagggttctggggaagaacaccacagaagtaaagtgccattctcacacatcacatcttattaaggaaacataccataatgtgacttattactattgaagttaatctcagtcactagctcaggtagtgtttatcaaatttctccactttaaaattagtgttgtttatttttttcttcaattccatacagtactctttagagagtagcctatgtaaaccaaaaataagagtctgtgtcccccaacagattgagtggatgcccctcttgacagatggggtcacaaagaaacttcaggaagtagatgaggccatgacagaaaggtaggctggacttgcctcatttta

SEQ ID NO: 165273 - DNA, 520 bp, Homo sapiens
ctgacaatcccatctatctatctatctatctatctatctatytatctatctatctatctatctatttatctgtcatctgtctatctctatcatctatctacctatctatctgtctatctatctgatttattgtaatggattggcttacacgattaagtcaggtacctggctcaacaagtttgaagtccatggggcaggcaatgatcaacagatgatggctagagccccaaaagcacaagtgagctgatgcttagaattcacaggcaagcagtcaggaagagaagatcaggagcaggttaggaccacatgagcatgaacagacagtcaagaaggaagattcagcggagatgaagaacgattgcaaaccgaactgcaagttgccaatctctgagctcagggaagagttaaactctttttaaaagtgcttgtgacagattttcacaccaccatgaaaatctaccttttgattaacttaaggcccattgatcagaggctttcattacttctgcaaaatcctttc

SEQ ID NO: 165274 - DNA, 552 bp, Homo sapiens
ctaactggtataatgagtatattcattatactaattggttccagaaaatacctctagacccgtgctttactgtagggcattaaggcttttctttatcagaataactcttattccctttatcttaaactgactrccatgtacttcctttatatttttatctttgtttaagaatgccaaaagaatgtgcaagattattttatcagttgattttaatcattattgatactttttccttctttgaaaaacatatttttattaaaaacggaatttctttcagcactgaaagcaaaaacaaaaacctgccaaccaagaaaaagctttgggtaagataaattcacagccaaatttcacaagacatacagagaaagtctagtaccaattctatgagaagtattagaaaaaattaaggaggagggattcctctgtaattcattctccaaagccagcatcacagtgataccaaaaatggcaaagacacacacgcaaaaggaaactacaggccaatatccataatgaacacagatgcaaaaatcctcatcaaaatactagcaa

SEQ ID NO: 165275 - DNA, 552 bp, Homo sapiens
ctaactggtataatgagtatattcattatactaattggttccagaaaatacctctagacccgtgctttactgtagggcattaaggcttttctttatcagaataactcttattccctttatcttaaactgactgccatgtacttcctttatatttttatctttgtttaagaatgccaaaagaatgtgcaagattattttatcagttgattttaatcattattgatactttttccttctttgaaaaacatatttttattaaaaacggaatttctttcagcactgaaagcaaaaacaaaaacctgccaaccaagaaaaagctttgggtaagataaattcacagccaaatttcacaagacatacagagaaagtctagtaccaattytatgagaagtattagaaaaaattaaggaggagggattcctctgtaattcattctccaaagccagcatcacagtgataccaaaaatggcaaagacacacacgcaaaaggaaactacaggccaatatccataatgaacacagatgcaaaaatcctcatcaaaatactagcaa

SEQ ID NO: 165276 - DNA, 526 bp, Homo sapiens
caaactgcttagtatcttttaaatttatttttttaatttatacaattatttatttaaaattcagtgaagttttgtttttctttgaatgtttgtggtaatttatatttaaagataatatgactgcttatctcataatcatacaatggaattgtttaatcttgtctttgaatatgggagtttaaatattttctgcttgttatatgtccttgaacaaattattactctctctaagcttaatttcttcatctataaactagaagacctaatactaagcagttattttgaagtcgtattcaattttaaatttacctagtgctctcattgaagttttctaatataacttaatcttatattgtgagmatagtgactttaggcactgttttactattttatctataatatataaagctggagaaatatcatacttcaaatgtcctttaacttcctcacactttgccactctcaagttccataactagcataaattttattcaattatttaatatatactatcacaaatggatgc

SEQ ID NO: 165277 - DNA, 526 bp, Homo sapiens
caaactgcttagtatcttttaaatttatttttttaatttatacaattatttatttaaaattcagtgaagttttgtttttctttgaatgtttgtggtaatttatatttaaagataatatgactgcttatctcataatcatacaatggaattgtttaatcttgtctttgaatatgggagtttaaatattttctgcttgttatatgtccttgaacaaattattactctctctaagcttaatttcttcatctataaactagaagacctaatactaagcagttattttgaagtcgtattcaattttaaatttacctagtgctctcattgaagttttctaatataacttaatcttatattgtgagcatagtgactttaggcactgttttactattttatctataatatataaagctggagaaatatcatacttcaaatgtcctttaacttcctcacactttgccactctcaagtyccataactagcataaattttattcaattatttaatatatactatcacaaatggatgc

SEQ ID NO: 165278 - DNA, 561 bp, Homo sapiens
cacaatatcttaatttccaawttgtcatccctgattctccccattttcctaatacagccttgagtatgcctcctcattctctttgctttgcctctacttgccttttatttcctttgactattcttctacttaaatggtggatctccttgattgttttccttcctcttttaactcgataataatttcatatactcgtgtggcttaaacaactagttttacatggaaaaagaaggccttaactttccccttagatctgctatactctaaacaagcagattcctgactttaagccttgctctctcttttttagagcatttactttaggaaacatcactctctgcactctgaggtataaatcttcttgaaatattttttcttttttcttttcttttttttttatttcttttttgcaaattttacaacccaggaacatcattctaaaggacctgggggccatccctttgaaatgtaaacattaagcgagatagtgcccctgtatcttattcgtgagagagtaggagcctaacttccatgggcaccttgctccaagttataaaatta

SEQ ID NO: 165279 - DNA, 561 bp, Homo sapiens
cacaatatcttaatttccaatttgtcatccctgattctccccattttcctaatacagccttgagtatgcctcctcattctctttgctttgcctctacttgccttttatttcctttgactattcttctacttaaatggtggatctccttgattgttttccttcctcttttaactcgataataatttcatatactcgtgtggcttaaacaactagttttacatggaaaaagaaggccttaactttccccttagatctgctatactctaaacaagcagattcctgactttaagccttgctctctcttttttagagcatttactttaggaaacatcactctctgcactctgaggtataaatcttyttgaaatattttttcttttttcttttcttttttttttatttcttttttgcaaattttacaacccaggaacatcattctaaaggacctgggggccatccctttgaaatgtaaacattaagcgagatagtgcccctgtatcttattcgtgagagagtaggagcctaacttccatgggcaccttgctccaagttataaaatta

SEQ ID NO: 165280 - DNA, 607 bp, Homo sapiens
gcattggttttattagtggtcatattgtgcctattaccttgccaatagaaagattttggtatactttgttagaaataatatttagggtctaaggccaaaatgaagttgtctgctatttactccaaaatctgaatattaagacctgatgttggatttatagagtaaacttatccacctaaccatttggaaaatcttagtttgctttacaaatctggcaatggagagctgcattttgacttttgttactcataggcactttaacttcctggaactctgtcttcatagaaatactagaaattatgttttatgacaattttaatataaatatggatatactaaatatataaaacattttcttcaacctaaaggtgtattatayttaatcccttttcaatcatctatgggccaatattattttttaaactgggaatgactatacttactcatggagttaaaaataatgaaaatatctaaaatgaaaacaattcactgccaattatgtatcccaagaaatggaatgtagcttcatacatattttaaccaatttacccacagagcatcataacattaatagtcgctttatatattgcttatcatttttcagggc

SEQ ID NO: 165281 - DNA, 576 bp, Homo sapiens
agatggacatctcatccagtttgtttgtttatttgtttgtttcagggacctatatcaaagtttgttactgaccagattgctgggmcttctggagccccaagcttatggggtcctaaatccatgttctattcctaaggtacccctcaacacagaaaaacaaattcatagcacaaaatacaccagatttgctagagcttaagactggcctcagaattctttttcttattaatcaaaactttacagaggagataaacagtgatttttaccatttgttcaacaggtttgcacagagagggagaggccagaagtctgactggtaagaaattcttacccttttgtcagcataccaggctttcccggttccctttccctgagcagccctagtgacccagttcaccataccatagccatgaaggcaaagccgcaatacaaaagacaagtttttctttccttctttctttttttttttttatgcacttcagtgtgttgttgttcatttggaatgttccactgtaagttaccttgtttagtaacatttcactatttctgttagactttgctacttccctggcctaa

SEQ ID NO: 165282 - DNA, 576 bp, Homo sapiens
agatggacatctcatccagtttgtttgtttatttgtttgtttcagggacctatatcaaagtttgttactgaccagattgctgggacttctkgagccccaagcttatggggtcctaaatccatgttctattcctaaggtacccctcaacacagaaaaacaaattcatagcacaaaatacaccagatttgctagagcttaagactggcctcagaattctttttcttattaatcaaaactttacagaggagataaacagtgatttttaccatttgttcaacaggtttgcacagagagggagaggccagaagtctgactggtaagaaattcttacccttttgtcagcataccaggctttcccggttccctttccctgagcagccctagtgacccagttcaccataccatagccatgaaggcaaagccgcaatacaaaagacaagtttttctttccttctttctttttttttttttatgcacttcagtgtgttgttgttcatttggaatgttccactgtaagttaccttgtttagtaacatttcactatttctgttagactttgctacttccctggcctaa

SEQ ID NO: 165283 - DNA, 576 bp, Homo sapiens
agatggacatctcatccagtttgtttgtttatttgtttgtttcagggacctatatcaaagtttgttactgaccagattgctgggacttctggagccccaagcttatggggtcctaaatccatgttctattcctaaggtacccctcaacacagaaaaacaaattcatagcacaaaatacaccagatttgctagagcttaagactggcctcagaattctttttcttattaatcaaaactttacagaggagataaacagtgatttttaccatttgttcaacaggtttgcacagagagggagaggccagaagtctgactggtaagaaattcttacccttttgtcagcataccaggctttcccggttccctttccctgagcagccctagtgacccagttcaccatamcatagccatgaaggcaaagccgcaatacaaaagacaagtttttctttccttctttctttttttttttttatgcacttcagtgtgttgttgttcatttggaatgttccactgtaagttaccttgtttagtaacatttcactatttctgttagactttgctacttccctggcctaa

SEQ ID NO: 165284 - DNA, 401 bp, Homo sapiens
actggtttaggagttgattgtttttgatacttgacccttagccaattacattttggccattattttgtatttttaaagagattatatttaatttggcatttcccaggttgtcttcctctggaatatagtttgtgtgcatttttctttcttaataaatacaaaggattcgaaatttacagtttacactaaaacagacaaatggcttgggtgtcatttttgatctcataacaagaacaaaaatcagagcaaactsaaaatcaacaattcatcttccatccatcagaagattgatatcatagggcaaacttcagcttagaaaactgaagaggcagtagaacatgttgaatactttttatggagtagaagctgccagggtaagtcactgctaggaacacttaaag

SEQ ID NO: 165285 - DNA, 624 bp, Homo sapiens
agtgtaaactttcagtcatagaaaaatgaatttagttctagaggtctcttgtaaatattgtgtttatatttaaccatactgtactgtgcagttaaaaatgtgttataagaatatgttttaacttctcttgagaaaaaatctatagttaataacaatgtactgtagtcttcaaatttttaagagtaggttttaagcatctttaggacacacgacaaaaaaggtaaatgtttagtaacatatatattaattagctagatttagccactctacaattatttatatttaatatttcgaaacaacatgttgtacatataaaatatccatttttatctgtctatttttgaaacattaatttaaaaaaccctcagatctacataaagaaaaaatgatagagtaggtttaaatgaagataaaattatttattttcttattstttattgatctaataggtaactgttcaaagtaataattacaacaatgcattaattatcttttacagaaattaaaaggaatgacagtggtattagaagtgataggagagaggaattaaaaatattgtaaattacctgaactacctctgaaaaaccttcattttattaaaatggatttagattagttgttaat

SEQ ID NO: 165286 - DNA, 616 bp, Homo sapiens
tggtccatacaaacattcagaagcaaatggagtcattttagtaataacttaatatatttattcttataattttcttttcaaaatattttccacgaacattaaaataaaataatttwaaaaaattagccagggcagtggtatatgcctgtagttgtagctacttgtgaggctgaggtgggaggctcgcttaagccctggaattcaaggccagcctaggcaacatagtgagaccacatctctaaaacacaaacaaacaaaaccaaatgtatcatttgtacatacgttttatcttttatgccaagggagaatatattatgattgcaaagaacaagaaagtataatttctgcttgaagtggaggaaaagtgtcaagagttaggtcttttttattcttttagcccatctattctctaccagcagcagttttgcatcctagatgacaactggcaatatctgtggatataatttgttgtcacaagtggatattgctactggcatttaatgggcagaggtgagaattgctgccaaatattctataatgcagcacataaacatgcacaacaaagaattatctggccccaaatgtcaatagtgccaaggttgagaaacactggttt

SEQ ID NO: 165287 - DNA, 616 bp, Homo sapiens
tggtccatacaaacattcagaagcaaatggagtcattttagtaataacttaatatatttattcttataattttcttttcaaaatattttccacgaacattaaaataaaataatttaaaaaaattagccagggcagtggtatatgcctgtagttgtagctacttgtgaggctgaggtgggaggctcrcttaagccctggaattcaaggccagcctaggcaacatagtgagaccacatctctaaaacacaaacaaacaaaaccaaatgtatcatttgtacatacgttttatcttttatgccaagggagaatatattatgattgcaaagaacaagaaagtataatttctgcttgaagtggaggaaaagtgtcaagagttaggtcttttttattcttttagcccatctattctctaccagcagcagttttgcatcctagatgacaactggcaatatctgtggatataatttgttgtcacaagtggatattgctactggcatttaatgggcagaggtgagaattgctgccaaatattctataatgcagcacataaacatgcacaacaaagaattatctggccccaaatgtcaatagtgccaaggttgagaaacactggttt

SEQ ID NO: 165288 - DNA, 616 bp, Homo sapiens
tggtccatacaaacattcagaagcaaatggagtcattttagtaataacttaatatatttattcttataattttcttttcaaaatattttccacgaacattaaaataaaataatttaaaaaaattagccagggcagtggtatatgcctgtagttgtagctacttgtgaggctgaggtgggaggctcgcttaagccctggaattcaaggccagcctaggcaacatagtgagaccacatctctaaaacacaaacaaacaaaaccaaatgtatcatttgtacatacgttttatcttttatgccaagggagaatatattatgattgcaaagaacaagaaagtataatttctgcttgaagtggaggaaaagtgtcaagagttaggtcttttttattcttttagcccatckattctctaccagcagcagttttgcatcctagatgacaactggcaatatctgtggatataatttgttgtcacaagtggatattgctactggcatttaatgggcagaggtgagaattgctgccaaatattctataatgcagcacataaacatgcacaacaaagaattatctggccccaaatgtcaatagtgccaaggttgagaaacactggttt

SEQ ID NO: 165289 - DNA, 621 bp, Homo sapiens
tggcttttttgtttttactttgaggtaagtcccttctatgcctgttttgttgagggkttttttttttatcataaagggatgctgtattttatcaaatgctttttctgtgtctagtgagatgatcatataggttttgttttaatgttgtttatgtaatgtatcatgatatattatctttttgctctgctgttggattcagttagctagtattttgttggggatttgtgcatttgtgttcatcagggatactgttctgtagttttctttttttttattatgccctttcctgctttcggtattagggtgatactaacttcatagaatgatttagggagaattccttctctgtgtttttggaatagttttagtaggattggaaccaattcttctgaatccttctggtcctggactttgtttgttggcaattttgttttattattattactggttcagtctcactgcttgttattggtctggtcagggtttctgtttcttcctgatttaatctatcagggtagtatatttccaggaatttatccatttcttctagattttctagtttgtgcatgtaaaggtgttcatagtatccttgagtgaccttttgtatttctgtggtattgg

SEQ ID NO: 165290 - DNA, 560 bp, Homo sapiens
taagttatgtattttagttaatagtaatgtattaacatttgttcattgtagtaamatttgttcaaaagtgtgtatcatactaccacaagaaatttacaaaggagaaattaggggtcacacaaggtctctgtatcctctttgcaatgcttctatgattctaaactaccataataaatattttgctactgatatgcccactgaaggcattctttatttctgtcaaaatgattttagtttctggtattttcttttggttcttttttagagtttctttctgtttacactgcccatctgttcttgtgtgtggtctccttatcccattagttcccttaacatattaatcagagtcattttcaactcttggtatgattcttctgtgtctgataattggattgtgtctttatgttatgtattttcttgccttttggcaggtcttgtcatttttgcttaaagctgaatatgttggatcaggcaataagaaatgaggtcaaacatcctttagtatgtgtgtgtgtttagtatatgttaatatggctagaagttagctgtgcttaatgttt

SEQ ID NO: 165291 - DNA, 482 bp, Homo sapiens
cacaattttaccatggtatttttagtctgaatcatgctctgaaaatacatggattagatgatagatagatagatmatacaatggactaagaatactaatataaaataagatatttgaaattcaacctgatatcaccatgcataatgttagaatatactggcttttaaacttgtatattcaccagttcatagaagtttctgtttatttattgtctatgtgtctggtttttgtcatacccgttggctaatttgagtctataataattatcatgtgatgaatcaatgtaaatatttaatattgacacctgaaagatcatagaattttttaaaaattaaaattcctattttgcatagaaatatggggagatatgaggtaagagaaagttaaagttgaaaggaactgccaagatgaaaacctgatgggtaacttttttaaaagcagcatgaatgtatactatcttcctgatttcctaaaagtccttg

SEQ ID NO: 165292 - DNA, 482 bp, Homo sapiens
cacaattttaccatggtatttttagtctgaatcatgctctgaaaatacatggattagatgatagatagatagatcatacaatggactaagaatactaatataaaataagatatttgaaattcaacctgatatcaccatgcataatgttagaatatactggcttttaaacttgtatattcaccagttcatagaagtttctgtttatttattgtctatgtgtctggtttttgtcataccmgttggctaatttgagtctataataattatcatgtgatgaatcaatgtaaatatttaatattgacacctgaaagatcatagaattttttaaaaattaaaattcctattttgcatagaaatatggggagatatgaggtaagagaaagttaaagttgaaaggaactgccaagatgaaaacctgatgggtaacttttttaaaagcagcatgaatgtatactatcttcctgatttcctaaaagtccttg

SEQ ID NO: 165293 - DNA, 613 bp, Homo sapiens
ggtttttgtcatacccgttggctaatttgagtctataataattatcatgtgatgaatcaatgtaaatatttaatattgacacctgaaagatcatagaattttytaaaaattaaaattcctattttgcatagaaatatggggagatatgaggtaagagaaagttaaagttgaaaggaactgccaagatgaaaacctgatgggtaacttttttaaaagcagcatgaatgtatactatcttcctgatttcctaaaagtccttgaggaaatgttatggcataaatcactttgttctagatccagaataataaaaggccttttatctagagtaaaaattaactgctttctgttgtaaattccattattgtaagcatccagtgtcccttcccgctaatgaaaataaaattaacattttccaggtaaacagcatttctcttacatgtgttgaaaaagtcaaataatcttgtcacaatttttttttcatcaagcattttacttaaaggtttctaatctttcttaataacccttagagtttaattttgatcttctccagttctagcattttgtattagcaggaaatcacattgtgccaaatattttgaattgacatctgtaa

SEQ ID NO: 165294 - DNA, 613 bp, Homo sapiens
ggtttttgtcatacccgttggctaatttgagtctataataattatcatgtgatgaatcaatgtaaatatttaatattgacacctgaaagatcatagaattttttaaaaattaaaattcctattttgcatagaaatatggggagatatgaggtaagagaaagttaaagttgaaaggaactgccaagatgaaaacctgatgggtaacttttttaaaagcagcatgaatgtatactatcttcctgatttcctaaaagtccttgaggaaatgttatggcataaatcactttgttctagatccagaataataaaaggccttttatctagagtaaaaattaactgctttctgttgtaaattccattattgtaagcatccagtgtcccttccygctaatgaaaataaaattaacattttccaggtaaacagcatttctcttacatgtgttgaaaaagtcaaataatcttgtcacaatttttttttcatcaagcattttacttaaaggtttctaatctttcttaataacccttagagtttaattttgatcttctccagttctagcattttgtattagcaggaaatcacattgtgccaaatattttgaattgacatctgtaa

SEQ ID NO: 165295 - DNA, 613 bp, Homo sapiens
ggtttttgtcatacccgttggctaatttgagtctataataattatcatgtgatgaatcaatgtaaatatttaatattgacacctgaaagatcatagaattttttaaaaattaaaattcctattttgcatagaaatatggggagatatgaggtaagagaaagttaaagttgaaaggaactgccaagatgaaaacctgatgggtaacttttttaaaagcagcatgaatgtatactatcttcctgatttcctaaaagtccttgaggaaatgttatggcataaatcactttgttctagatccagaataataaaaggccttttatctagagtaaaaattaactgctttctgttgtaaattccattattgtaagcatccagtgtcccttcccgctaatgaaaataaaattaacrttttccaggtaaacagcatttctcttacatgtgttgaaaaagtcaaataatcttgtcacaatttttttttcatcaagcattttacttaaaggtttctaatctttcttaataacccttagagtttaattttgatcttctccagttctagcattttgtattagcaggaaatcacattgtgccaaatattttgaattgacatctgtaa

SEQ ID NO: 165296 - DNA, 449 bp, Homo sapiens
  misc_feature (1)...(449): n = A,T,C or G
tcacaatatgtttatacatttacctcttaagaaacatcttgattgcttctaatatttgaaaatcatgaatcaagatgctataaacacccnatgtgcataaaatgtttgtgtgtatacatggttttcagctcactttttwaaataacaaggtgtggaattgttgggtcatgtagtaaaactacattagctctgtacaaaaccgccaaactatcttataatgtggctgtgcgatttttcattccatcaacaatgaaagagaattcctattgctccacatagttaccaacatttggtgttaaaagtgttttagattttagttattctaatagatacatagtggcatctcactgttgttttaacttacatttcctgtattacatatgatgtaaaatattttttcaaatgcctgtcatctgtatagattttggtgagttgtctgtttagatatt

SEQ ID NO: 165297 - DNA, 577 bp, Homo sapiens
aatattttttcaaatgcctgtcatctgtatagattttggtgagttgtctgtttagatattttattcactttttacttgagttgtttgttttcttattgttgagttttgagattttttwaaattcatattttggatacaagtattttatcagatatgtgttttgcaaatattgtcttccagcctgtggcttgtctttttattctgtaacactgttgtctctagagcagaagttttaaattttaataaggtaaaactgatcaattttttctttcatagataataattttgttgttgtatctaaaaacccattgctgctaaacctaagactgcctaaattattttcttatatctaaaagtttcatagatgtgtgttttaaacttaggtctgtgatccatttcaagttaatttttgtgaagagtttaagccttgtgtctagcttaatttttatttttgggaagtgaacatttatttgtccccaaaatactgttgttcaacaaattgttgcaaacactatcttttctccattgttgctttgctcctttgtcaaaaatcagttgtctatatttgtatggatct

SEQ ID NO: 165298 - DNA, 402 bp, Homo sapiens
tctttatgtccatgtgtacacattgtttagctccctattacaaatgagaagatgtgatatttgattttatttatctgagttatttacctcaggataatggcctgcagatccatccatgttgctgtcaatgacattatttcattattttttatggctgcatagtaattccatttctatggtacatgtatatatatacatgtatatttacatacacagataacattttctttagccaaacaaccattgatgaacacaggttgattctatgactttcgtattgagaatgttgctgcaataaacatacaagttcarattttatataattttatataatgatttcttttcctttgggtagatgcacaaaaatgggattgctctgtcaaaggtggtttcatttttggt

SEQ ID NO: 165299 - DNA, 540 bp, Homo sapiens
ttgtggtgtcagctgtaatgtcacctttatcatttctgattgtgcttgttggaatcttctctctttttttcttggttgwcctagtgagttgtctatcaattttgtttatccttacatagaaccaacgttattattattattattattattattattagggtctcaatcttattcagttcctctctgatccctgttatttattttctttttttagctttgggtttgtttttttcttatttttctgttttcttgaggtaggacatcaggttattaaatttgagaccattctatttttttgacttaggcatttaatgctacaatcttttctcttagcactgcttttgctgtgtcccagaagttttggtatattgtgtttttatttttgttcattcaacacaaaaaaatttctgccttaattttattgtttacccaaaagtcattccatagcaaattatttagtttccatttactcgtatagtttgaaaattcctctttgtatttattttttattttattccactgtggcttgaaacaatactt

SEQ ID NO: 165300 - DNA, 427 bp, Homo sapiens
tccaccaaaaaatgcttaggtcacataaataaattcaataaagtaacaggatgcaaaatcaacataaaatagctgtagcatttatatacagaagtaatagaggatctgagaaaggaatcwtaaagacaatcccagttacaatagttatgaaaaatttaaatacttagaaataaatgtaaccaaagaggtaaaaggcttctacaatgaaaactacaaaacactaatgaaagaaattattgaggacacaaatgggaagacatcccatgttcatgaattggaagaataaacatcattaaaatgtccatactgcccaaagcattccacagatttaatgcaatccctatcaaaataccaatgtaatttttcattgaaatagaagaaacagcccgaaagttctatatatacctaaaaacccaatagtctctgc

SEQ ID NO: 165301 - DNA, 427 bp, Homo sapiens
tccaccaaaaaatgcttaggtcacataaataaattcaataaagtaacaggatgcaaaatcaacataaaatagctgtagcatttatatacagaagtaatagaggatctgagaaaggaatcttaaagacaatcccagttacaatagttatgaaaaatttaaatacttagaaataaatgtaaccaaagaggtaaaaggcttctacaatgaaaactacaaaacactaatgaaagaaattattgaggacacaaatgggaagacatcccatgttcatgaattggaagaataaacatcattaaaatgtccatactgcccaaagcattccacagatttaatgcaatccctatcaaaataccaatgtaatttttcattgaaatagaagaaasagcccgaaagttctatatatacctaaaaacccaatagtctctgc

SEQ ID NO: 165302 - DNA, 550 bp, Homo sapiens
tggtggacaaatatttttcaaagtaatattttgtcacatgaaatatgagtacaatatcaaatggagccccaaatctctcatcagcaaatgagtctgtctgcrgtgtgtttatttcattacactgttataatttcagaagactcctacaggaatggcccccaaggctgtaatacaaatcacacacatacatacacacacttgaaaatatagcaaatttttatttatatcatgatagaaagaagccttatttctctgtagattaacataagactttccatcacattttgaaaatagttgtttttagaactttactcattaaatttccattttttatttctagctttctgtctacttttcattactctttaatgtcaatgataaacttttattagtaaataattgctttgcacttgaattaataatgtattatttttctgttgttcaatgagtacaaaattcagttatgatggaaaaataagttatagagatctgcaacataatataatgcctgtagttaacaatatgatattgtgtacttcaaaatttgtta

SEQ ID NO: 165303 - DNA, 550 bp, Homo sapiens
tggtggacaaatatttttcaaagtaatattttgtcacatgaaatatgagtacaatatcaaatggagccccaaatctctcatcagcaaatgagtctgtctgcagtrtgtttatttcattacactgttataatttcagaagactcctacaggaatggcccccaaggctgtaatacaaatcacacacatacatacacacacttgaaaatatagcaaatttttatttatatcatgatagaaagaagccttatttctctgtagattaacataagactttccatcacattttgaaaatagttgtttttagaactttactcattaaatttccattttttatttctagctttctgtctacttttcattactctttaatgtcaatgataaacttttattagtaaataattgctttgcacttgaattaataatgtattatttttctgttgttcaatgagtacaaaattcagttatgatggaaaaataagttatagagatctgcaacataatataatgcctgtagttaacaatatgatattgtgtacttcaaaatttgtta

SEQ ID NO: 165304 - DNA, 547 bp, Homo sapiens
aagagcatgatggtgaagtatccaacctggctacatcattagaggatttataaactgagaaaaacttacascaaaacattaggcagaagatcatggacagatggatgtatctgtggttatttgtgtgtgtgtgtgtgtgtgtgtgtataattctttttcttcagatttgcagatagtgtgacatattagtccattctcaccccgcaataaagaaatacctgggactgggtaatttataaagaaaacagggtttaactggctggtggttcttaaggctttacaggtagcatggctgggaggcctcaggaaactttcaatcatggctgaaggtaaaggggaagcaagtatgtctgacatggctggagcagaagaaagagaaaagttggaggagctacacacttttaaacagatctcatgagagctcactcactatcacaagaacagcaagggggaaatctgccccatgttccaatcacctcccatcaggcccctcctccagtgtttttttttttggcgggggatggggtgaggacacaattataaacca

SEQ ID NO: 165305 - DNA, 635 bp, Homo sapiens
gcatatgtttctgaaggctgtacaggtagcatggctggggaggcctcaggaatctttcagtcatggtgaaaggggaagcagacatagcttacatggccagagcaggaggaacagagagaagggggaggtgttacacacttttaaacaaccagatctcctgagaactcactcactgtcacaagaacagtaagaagagaatctcccccatgatccaatcacccccctccaggccccttctctaacattggggattataatttgaaatgagatttgggtggagacacaaattcaaaccacatcatgtgatgcataaaggttgtggttatcatctatgatagtagcttaactattaaatctccacaaatataggccatatatggaatctcatcaaaagctagaaaagggaaggtcttgacaattgtctttgcttattttgtagaaaagtattcatttcatttggaaatgaaagactaaatattatagtatttttatttaaactgaaattgatgtcatattcatttattaaaattatatgatttatgctttattttwtgtggatttatattatgcaatataatgtgagtacctcaatcttctaaagagatttattacacagactctaggtttttgtttaa

SEQ ID NO: 165306 - DNA, 572 bp, Homo sapiens
cctcaatcttctaaagagatttattacacagactctaggtttttgtttaattaatcactattgtgttgggaatagcattaaggttcaatgtcagagattgtcatgtatccaattcttattaccacttttagctaaggaaaaaaaatgtgacaataataaaacatgggaaaaaaatctatggaagaayggactttgagggtttgatttgacaaggcatcaagttattttgagtggcttggtctaggcaaaatattttttccagcagcatttctcattgctttatcttgttaaataaaatttaaaacatataataatgattacacacatcttagcaaaatattggtataaacattctgaattatgtggacacttgtgactcacattcctttcctaagtttttataaaattttaactaggatttgggattcaaaatatatatatatatatatatgagagcacttaagctacttagagtcaactgaagtccaataagatggagaatgacatgttcatcaaataatttatcagtggatttgcatctgtacaatacttctggagatgattcatgagca

SEQ ID NO: 165307 - DNA, 646 bp, Homo sapiens
accatgacttctaacattctaaacttcagttttctcatctatataatagtgatattgctttgtggtctacgggattgttctaaacattaattaacattaatttagtaaaataaatagaaatgcgtaaataatgtcttatatgtggcaagcatatttgaagttctctttgaatgaaacagcataactctggaacttttgcgtgttaaaatttaatataacactccagaagtctttttttttattaattctatgtctctacrtctctatgtctctatctatctacctacctacctatctctctattcatccatctgtcatttctcatttcttttactaggattttcagagcttgttccattgatagttctctttcctaataggcatggcatccatacccagccaaatccttatatataaatggacaggatgtatgtatattcaacgatcacctcctctcccttttaatcagttttgcaaaaaagttcttagttaagttttagtcaaacaaggatgcagtactcattaataggaacccaaaaggaaaaaaatggaattatcacaaatgtgaataagatatattttacatgataaatacagagaattaagatatttgtataagcttcatttaaatattcttaatcattta

SEQ ID NO: 165308 - DNA, 646 bp, Homo sapiens
accatgacttctaacattctaaacttcagttttctcatctatataatagtgatattgctttgtggtctacgggattgttctaaacattaattaacattaatttagtaaaataaatagaaatgcgtaaataatgtcttatatgtggcaagcatatttgaagttctctttgaatgaaacagcataactctggaacttttgcgtgttaaaatttaatataacactccagaagtctttttttttattaattctatgtctctacatctctatgtctctatctatctacctacctacctatctctctattcatccatctgtcatttctcatttcttttactaggattttcagagcttgttccattgatagttctctttcctaataggcatggcatccatacccagccaaatccttatatataaatggacaggatgtatgtatattcaacgatcacctcctctcccttttaatcagytttgcaaaaaagttcttagttaagttttagtcaaacaaggatgcagtactcattaataggaacccaaaaggaaaaaaatggaattatcacaaatgtgaataagatatattttacatgataaatacagagaattaagatatttgtataagcttcatttaaatattcttaatcattta

SEQ ID NO: 165309 - DNA, 568 bp, Homo sapiens
atgatatgaccttcctctgggtgtacttgaccagtaagggtgaattgccactaacaagtatgtacagggcctgagtaaacacactgcacatgtggcccctgacaagtgctggcaggccaccttatatgcaacagttaagcaacagcccgcccaggggaagaaagggaggagatagagagcctgggaaacattatggggtataaaatctctagagtctaaacaaaaaagagaacagggaagtcaatttttcaagtcatccacttggccttcttcccagagtatcctactttctctaataaattctcactttgcttaaaagaaattctctctccttctttaaaccttgcctgtgtctctcatttgaattctctgcgttgagaagtcaaactaccaagtttgctgcagagttgccactctggagtttcttcggacagctcaccagctggtaatgtayttcggtgccatgactcagatccatcatctagtggtaaggccctgcaatgcctcacgttcttccactagaggcattcaaacccttgtatgtggtttcttctcctttctctttttt

SEQ ID NO: 165310 - DNA, 482 bp, Homo sapiens
accattgggccaatcaaatgtccataaggtaatttttcaaagtacctagaccaagttgcacaggggtgtttgcacaggggtggtcacacagtctcaaggaagtggctgcagcagtcctcctacttggggaggcctttgaaatcaccatggggcagtcaacccagctcctaatgttccaccaagttggccccttactggacaaaaaagggccacagtggctcactgacarcagattgttgaagtaccaggttttgttattaaaaaacctgcaggtaacagttgagtggtgctagaccctcaacccagccaccctcttgcccctaccaagagacaataacctggcacattcatgctgtgaagtactcagccaaatttatgccagcagggctgacttaaaggaccaacccttgggaaatcccatcaaaatatgattttcagatggaagcagttttgtctggaatggaactagacatgcaggataa

SEQ ID NO: 165311 - DNA, 560 bp, Homo sapiens
atggcaggcttccaacaggcctccgggaatactggttacaaataaacccaaaattgaaagaggaaaaagctcagactttataccctccaggctcactagttctcatgaaaggttggaaggatggaaccctgaaatcccaactaactggaaggtctggaaggtccccttcactgttctattatctactcccatagctattaaagtaccagasgttgccatccagatacactatacttaagtgaagtgaagctgaggtccaagacaagggactgagattcctgcagaggtgtcactctggagttctctggatagttgccgactcacccaccaataataagtctacctcccgactctccaaaatttgtgtccttcccctgtgcaaaatatatccatcaatcccagtatctccaagatcctgcattaactctaagtctaaagtcttatctaaatatcatcagttcaaagtccaaagtctcatcatctaaatcatttaaaccagtgtgggtgagacttgatgtatgattcatcctggagcaaaaatctccctttacctgtaaacc

SEQ ID NO: 165312 - DNA, 560 bp, Homo sapiens
atggcaggcttccaacaggcctccgggaatactggttacaaataaacccaaaattgaaagaggaaaaagctcagactttataccctccaggctcactagttctcatgaaaggttggaaggatggaaccctgaaatcccaactaactggaaggtctggaaggtccccttcactgttctattatctactcccatagctattaaagtaccagaggttgccatccagatacactatacttaagtgaagtgaagctgaggtccaagacaagggactgagattcctgcagaggtgtcactctggagttctctggatagttgccgactcacccaccaataataagtctacctcccgactctccaaaatttgtgtccttcccctgtgcaaaatatatccatcaatcccagtatctccaagatcctgcattaactctaagtctaaagtcttatctaaatatcatcagttcaaagtccaaagtctcatcatctaaatcatttaaaccagtrtgggtgagacttgatgtatgattcatcctggagcaaaaatctccctttacctgtaaacc

SEQ ID NO: 165313 - DNA, 659 bp, Homo sapiens
tcctacctttaaagtttatcttgaaagttcctaggaaaagtcagctatttgctgataagatttacaaaaattaacaataaaagtaatcctgagaatggatatattaccagtaaatttcctacaccttggttgccaatgttcgctcactgaagtaacttgctatactaaatgcrttctttctgcttctccaagaagcagacatccagacagcattagatctgcaagagatttattggagaaaatgactgtgaagaatagaagaaaaacttcagaccacaatgcagatttgacctgtgtgaagaagagtggaaagaaggaggtttgagcagaaaaagcatcagactacagtgaagttctgagaaaaatatggccagggtaaagcatcctccagtcaaagtcacctgtcagaggagtcctactttccaaaggaatgactcagcatcttacagagttctctcagtaattggctgggagcagcataggagaaggagagctttgatatagatgtgagtctacagaagcctcagctgggattgtcagtcaactattctccctaaagcaggagatttgagtggcttatttccatggccactactcaataagtagtacagaggcttaagcaatccaccacggcctcacaagtatttaggaccaaaggc

SEQ ID NO: 165314 - DNA, 447 bp, Homo sapiens
ggaaggaaccattttgccccagacctctataatagtttctctttttttttttttttttaacttttattttaagttcagtgttccaagtgcaggtttgttacatagataaacttatgtcatgggtgtttgttgtacaaattatttcatcacccaggtattaagcctagtacctgttagttatttttcctgatcctctccctcttcccaccctccgccttctgaaaggccctagtgtgtgttgttccctgctatgtgtccatgtgttctcatcatttagctcccacttttaagtgagagcatgtgatatttggttttctgttctcttctaaagaagtgaggyagccagcttttagaaaatgcctttaattcttcttggacatagtacagtgtgctcaatgggtgcagcacaccagcatggcacatgtatacatatgtaactaacctgca

SEQ ID NO: 165315 - DNA, 492 bp, Homo sapiens
gtggagagaaaagagtaatggtaaaaatctacatggcctcttgaaatttcttgttgacaatggcatgcacaacttatgcttacaggccackggccctggtcaatagcatggccaatattgatgtcaactgaacagaaaatgatatatttctacttggatgtacattgcaaggcatatggcaatgtgtgaggaccatattcctcttagagagagggcggcaaataattgggaaaaataaaaccatctgccacaagaactcattctgatattcactgccgtgtgcctcgtatcgaggacagtttccattatttagtaggtttttcatttattctatgattatgccaacattcacttactaagtgtctactatgtatcagataattacaataagataaattagaggataattttcacttatatggaaaggaagattagcatacatgaaaacaaaggaaaaggaataaatgaaaaattgcaagagactataagact

SEQ ID NO: 165316 - DNA, 492 bp, Homo sapiens
gtggagagaaaagagtaatggtaaaaatctacatggcctcttgaaatttcttgttgacaatggcatgcacaacttatgcttacaggccacgggccctggtcaatagcatggccaatattgatgtcaactgaacagaaaatgatatatttctacttggatgtacattgcaaggcatatggcaatgtgtgaggacyatattcctcttagagagagggcggcaaataattgggaaaaataaaaccatctgccacaagaactcattctgatattcactgccgtgtgcctcgtatcgaggacagtttccattatttagtaggtttttcatttattctatgattatgccaacattcacttactaagtgtctactatgtatcagataattacaataagataaattagaggataattttcacttatatggaaaggaagattagcatacatgaaaacaaaggaaaaggaataaatgaaaaattgcaagagactataagact

SEQ ID NO: 165317 - DNA, 492 bp, Homo sapiens
gtggagagaaaagagtaatggtaaaaatctacatggcctcttgaaatttcttgttgacaatggcatgcacaacttatgcttacaggccacgggccctggtcaatagcatggccaatattgatgtcaactgaacagaaaatgatatatttctacttggatgtacattgcaaggcatatggcaatgtgtgaggaccatattcctcttagagagagggcggcaaataattgggaaaaataaaaccatctgccacaagaactcattctgatattcactgccgtgtgcctcgtatcgaggacagtttccattatttagtaggtttttcatttattctatgattatkccaacattcacttactaagtgtctactatgtatcagataattacaataagataaattagaggataattttcacttatatggaaaggaagattagcatacatgaaaacaaaggaaaaggaataaatgaaaaattgcaagagactataagact

SEQ ID NO: 165318 - DNA, 492 bp, Homo sapiens
gtggagagaaaagagtaatggtaaaaatctacatggcctcttgaaatttcttgttgacaatggcatgcacaacttatgcttacaggccacgggccctggtcaatagcatggccaatattgatgtcaactgaacagaaaatgatatatttctacttggatgtacattgcaaggcatatggcaatgtgtgaggaccatattcctcttagagagagggcggcaaataattgggaaaaataaaaccatctgccacaagaactcattctgatattcactgccgtgtgcctcgtatcgaggacagtttccattatttagtaggtttttcatttattctatgattatgccaacattcacttactaagtgtctactatgtawcagataattacaataagataaattagaggataattttcacttatatggaaaggaagattagcatacatgaaaacaaaggaaaaggaataaatgaaaaattgcaagagactataagact

SEQ ID NO: 165319 - DNA, 479 bp, Homo sapiens
accatgaattgaagaagttaaataaaatccctggaaaatgttaagtagcatttttcctgatagagaaggggaaaagtggaaaagtacatttacagagccatagaaaaaaaaaacaaagaaataattaaataattaaattataaactggagcaagttcataattcaattaacattgataattagcctttggcaattttcaccaatcacagaatctcaaggttagtagtatactggtaaacacttaacaactggctttgccaagagtaggawggctcatcatctgtaacatttgctcttttccatggtgtaaattctgccaccatcactgatttcaagctaccgacgtgcatcaaccagccttaaaaattcctgaaaattaaacagccttgtctgccaagctagtaaatgcaatgttcagcatgtcactgctaaacattcttacaactaaaacaagtatctttatcactttgagaatatca

SEQ ID NO: 165320 - DNA, 577 bp, Homo sapiens
cttagctggctcccagccaggaccctccaacctacatgccctgcagcaccgtggccttccaaagcaccccttcagcctagcgcagccagaggcatcctggcgcacatcctgccctggcagcaccatgcttcctgtcgaagcagtgcctccactggggtccacatcaggagagatcagaacacacctgctagacatcaagacacgcagagcagggtgggaargagcagggcagggaggtgttgctctccacagtcttcctctgtgccagacctggggcttgggcaggaatctgacatacagttccccagtgtggtgtctccttgcttgcaggaacacagtggcctgcagcactgtggccatccttactgcccacgggaccaccggggagtaagcacacaccctggacacaaccagggtgaggagaatgaccccaggagcctcacttcctgcatctggaaataagggttagcagggatgggcagggatttctgtatggcaggtgcagcacgggcccaggcaagtggcaaggggccttagaggacacagacttccatagttgcctttctctggctcccac

SEQ ID NO: 165321 - DNA, 537 bp, Homo sapiens
taaaaaaaaatcagaaaagtaattctggtaatatgacaaatcaaggttctataacaccccaaaaagatcacactagctctccagcaatggatgcaaaccaagaagaaatctctgaattgccaaataaagaattcagaaagttaattattaagctactcaaggaagcaccagagaaaggtaaaaaccaacttaaagaaatttaaaaaacaagctctgagggaaaaatggcagatgggaagcaggactagattccagctcccactcagatagagagcagtgtgtggagacttgcatcatgaatttttgctccagaactactgcaggagtaattcacgaaagtcaagaaaacccacagaccttctgaaaaaagtggattgctcctgcaggaccaggaaaacaacccaaatactgtaagtgccaagctttgaaagtgaraaagggggagcatctgcccctgaacacataccctcactgggaaacctgaaggtctagatcataggagaaggatctgatcttacctggggctgagtcaattta

SEQ ID NO: 165322 - DNA, 527 bp, Homo sapiens
agatcttcactaactttgtttttctgctttcctttagcttattgtaaaatgagaagtcttttaactgttttaaaatggtacaatattggaaaccaacatgaaagagttattcagcaacctcatcactggtcaaaatcaacttgcacctttgaaagatgctcccaagaaaaatgtgttgtttcactcaaagatttttaaaaatgtttttaacttctttcattacatgaactactaatgagaaaatattattttaaatttccattctgttyctccaggttccaactgcatctttagagatgatctaaaaacttttgactcaccacacagggagctaaaaaagcaactcttacctgatatgtactcagaggtgctctgggttttaaactgtccatcacacaagccaaaccagactccacaaaacaggaaccaggaacctaagtagttccattgttttgtgctcaaaaacacggggtgctgtatcccgagttctgaagcaactgaaatctatgttgtcacttgtaatacta

SEQ ID NO: 165323 - DNA, 552 bp, Homo sapiens
gtacgaattcagcttctgtgtgtgtgactgtgttctaatactcattacactagaaaaacaggccatagttctatatgcatttytccatatgtgctgaaacatggtcaggtcccatctgcaaatttacctttagaaattagctgtaaagctcatccttatattccaccccttgtgaaaagctgaaaagcagattggtacctcaccattaaagactgcaaaagcactactgactctgaaatgcttcatactcttgtaaagtatatccttatacttgctgtaataaatactttgatttatagattaatgtttgtgacagctggcatcatccagtttacccatgccaggggacgctgtggaaataggactaattaacatttgcatttcagcttcggctaccctagcaggtaggataaaggtcttggagaggaaggatgaccagtagtgtaactcttaaagtatcccttaatctgttggcctctctaaggcttacagaattatacaaggttcagtatgtccatattttattcctaatagctagtaccaagtatgctg

SEQ ID NO: 165324 - DNA, 552 bp, Homo sapiens
gtacgaattcagcttctgtgtgtgtgactgtgttctaatactcattacactagaaaaacaggccatagttctatatgcatttttccatatgtgctgaaacatggtcaggtcccatctgcaaatttacctttagaaattagctgtaaagctcatccttatattccaccccttgtgaaaagctgaaaagcagattggtacctcaccrttaaagactgcaaaagcactactgactctgaaatgcttcatactcttgtaaagtatatccttatacttgctgtaataaatactttgatttatagattaatgtttgtgacagctggcatcatccagtttacccatgccaggggacgctgtggaaataggactaattaacatttgcatttcagcttcggctaccctagcaggtaggataaaggtcttggagaggaaggatgaccagtagtgtaactcttaaagtatcccttaatctgttggcctctctaaggcttacagaattatacaaggttcagtatgtccatattttattcctaatagctagtaccaagtatgctg

SEQ ID NO: 165325 - DNA, 397 bp, Homo sapiens
gaattctttacaacataatcttcccattcatggccatgatattcttctccattattcaagttttcttatctatctttcaaaaaaggacataagacactagcatatttcttgttaggcttttcctaggtaatttttaattgctattataaatagtatccrtttttcccataaaatatttctatatgtttgtatattaatcttgtactgttacctttttcaactctattggttctgataacttgtcagttgtctacctttcatcttctaggtaaatatttcttacaaataatgagatttgctcttactttccaatttatctcattacttttacttgtcttactgcactggctaggacacccaagaatactattgaatagaagttgtagagggtatcctt

SEQ ID NO: 165326 - DNA, 390 bp, Homo sapiens
atggccatgatattcttctccattattcaagttttcttatctatctttcaaaaaaggacataagacactagcatatttcttgttaggcttttcctaggtaatttttaattgctattataaatagtatccatttttcccataaaatattkctatatgtttgtatattaatcttgtactgttacctttttcaactctattggttctgataacttgtcagttgtctacctttcatcttctaggtaaatatttcttacaaataatgagatttgctcttactttccaatttatctcattacttttacttgtcttactgcactggctaggacacccaagaatactattgaatagaagttgtagagggtatccttgtttgatccctgaaaagaattc

SEQ ID NO: 165327 - DNA, 390 bp, Homo sapiens
atggccatgatattcttctccattattcaagttttcttatctatctttcaaaaaaggacataagacactagcatatttcttgttaggcttttcctaggtaatttttaattgctattataaatagtatccatttttcccataaaatatttctatatgttwgtatattaatcttgtactgttacctttttcaactctattggttctgataacttgtcagttgtctacctttcatcttctaggtaaatatttcttacaaataatgagatttgctcttactttccaatttatctcattacttttacttgtcttactgcactggctaggacacccaagaatactattgaatagaagttgtagagggtatccttgtttgatccctgaaaagaattc

SEQ ID NO: 165328 - DNA, 390 bp, Homo sapiens
atggccatgatattcttctccattattcaagttttcttatctatctttcaaaaaaggacataagacactagcatatttcttgttaggcttttcctaggtaatttttaattgctattataaatagtatccatttttcccataaaatatttctatatgtttgtatattaatcttgtactgttacctttttcaactctattggttctgatarcttgtcagttgtctacctttcatcttctaggtaaatatttcttacaaataatgagatttgctcttactttccaatttatctcattacttttacttgtcttactgcactggctaggacacccaagaatactattgaatagaagttgtagagggtatccttgtttgatccctgaaaagaattc

SEQ ID NO: 165329 - DNA, 542 bp, Homo sapiens
gactcttgttctcttcccttgcttttccccaaacaaatgaagtctctctttctatgtttagctgcctggaactgggagaggattgatgcaagagcccctgtggccaccaccactgggactgcaccaggtcagaccaaaactcagcacagcattgggtcttgmtgaaggcccgaggcaaccactgcctggttcctgccaatgttcactcaaggcccaagggctcttcagttagcagttggtgaatccagccaggcttgtgtcctatccttcagtgcagtgatctcccccataacccagggtgggtcccagaatactgtctgggagcgagggcttggagatgggaaccagagcctggaatcaggaatgttatgaatctacttggtgttctattctactgcggctcagctggcaccaatgccacaaaacaaagtccttatcactcttccttctcctttcctcatgcagaaagagtcttgctctgtggataccaccacaccagccagtggctcttactgcctagatgctgttgatgttcattcaag

SEQ ID NO: 165330 - DNA, 386 bp, Homo sapiens
catgttattctggtaggaacagaatgaagtttactaggagaattgaggatggaataaagagcttattcaattttccctaatatatgggctgtttgaattggaagaaatctgttctattattaagaacatggaagaartctattattaagtacaatcaagaagcaggaaaaagaactgccactgagtaccccttttatccttcttggacaagggcagaacattgcacaggatttggaatggatgcagctagtgattaaggtgatgttagtgatttctattgtagtactgactgtgtggccatagatctcacagccttggaatcagtgtgcttcaagcctcgtatcgccctcttgtggccagagttcatctacttatagaaattctgt

SEQ ID NO: 165331 - DNA, 473 bp, Homo sapiens
aatggactatgcgggccattccatggataagtaatctgacctagagaggtgaactgactttttcaggtcatagagctaatggcagagttgagagttgaactgcattctgatttcaaattcagtaattttttttaacattattaacattttcaaaattcaataatacattttaaaaattgtccttgccctgtaaaagtgatttgtattaagarcacattcgtatatgtagatagcattgctagtgcaggtgaatcaaacctgaattgttctacatcacaaatagccagtatagaagtttaagtgcagaaagatttctttgtatatcttggggtattctctgtaacagaaccacagtgctcccttggaaacaaggtgtccacttttaatgtctacattttacttgattttaaattctctatagctattacttcagagacttatacttgttgacagctatgtgtagtggaaagagc

SEQ ID NO: 165332 - DNA, 592 bp, Homo sapiens
tgccacctgttggattgtttctagatgggatcaggatggtccttgtctggtgtccagattgaccttcatcctgggcaccagagagtctcggtgggctctttctgctgttgctttatttttcctctaggactgggcagaattcattttttgaagttagaaaaataacacgtgtttatttgtacaacctttaagaaaagcagatagtgaaagaaagaaaataaaagtgacccatgaatttcaacatactgtcatactgttaatagtttgcattgtcatcctatatgtgtatatacttcttagaatcattgtatcccattgyagattagaagtggttttataccactctacacaaaacagcatattgcaagaatttttctatgctatgatgtataattgacatcatgtttttaatgctgttcagcatttctcatattgacattggtgcttttgcacttggatttccttttctgaggataggaggatttgaaaggtcttcctttggttggtttcttgttgtcatgcaatcctcagcccaaataccaccaccttagcatggccttcctttgtcctcaatttaaagagtctctgccac

SEQ ID NO: 165333 - DNA, 592 bp, Homo sapiens
tgccacctgttggattgtttctagatgggatcaggatggtccttgtctggtgtccagattgaccttcatcctgggcaccagagagtctcggtgggctctttctgctgttgctttatttttcctctaggactgggcagaattcattttttgaagttagaaaaataacacgtgtttatttgtacaacctttaagaaaagcagatagtgaaagaaagaaaataaaagtgacccatgaatttcaacatactgtcatactgttaatagtttgcattgtcatcctatatgtgtatatacttcttagaatcattgtatcccattgcagattagaagtggttttataccactctacacaaaacagcatattgcaagaatttttctatgctatgatgtataattgacatcatgtttttaatgctgttcagcatttctcatattgacattggtgcttttgcacttggatttccttttstgaggataggaggatttgaaaggtcttcctttggttggtttcttgttgtcatgcaatcctcagcccaaataccaccaccttagcatggccttcctttgtcctcaatttaaagagtctctgccac

SEQ ID NO: 165334 - DNA, 600 bp, Homo sapiens
tttaaagctttagacatcttggggctttgctgatcctggagagactgatcctcccagggctaggcagtttttagagatactaagggattctcctgcaagtgtgcctttcatatgcaaactaaccaacctgaagcccacacgccaccactttctctgttggctctcacactctgggtcactacccatctgccctactcacccaaaggccaaataccagaaagtaagaacaattcctctgcttcagagcccactgaaattattccagctagccaatcctaaacctgcttgccctgctagttctagttcacagttgctctgaatagcatccttgactgtaactggaaccacctggaggtggagcgaggctttaaaacactcacactcagcctcaactctagacttactaaatcagtctctggtgatgggtcagagctcgagtgtaaggatttttaaggagaaccccagttgatgwttaagtgcagcaagtattaagaattacttatttagtcttttgacttctaaaggaggcctcctactagactctttactttagacaagctctggtctttgacctctgtctgcttacttcataaatgcctt

SEQ ID NO: 165335 - DNA, 595 bp, Homo sapiens
attgcatatgtgtttaaagaaatttttctttcagataagggaactttcagagagaccctccatgcctgcactggaggatgcagtgaggggataacaagagaaagttaggaagtctttggttctgaggcaacttctaaggtcttccgttttcctttaattcataagtgctcagtatgccaaagcaccatacctggttatctgaggacatacatttgtgaaamtccactaattgctgcttgattgctctattgcttgcaataatgctgtggggcataagttgcttcacacacaaatccaatcaaattaatcttctttgaagggatggttcctctgtttagtgtttgaggtttattcagactgtagaaggggtcttccaagactttcctcatttttctctagcaactagtgggcttacagtttagcctatacctccaatacatttattcatcattcttttcccaattgcctttcaccaacttacactgtttctgagaacactcttaggcttgaattttacattctgtcacaaagtcagtttctttggggagagatttcaagctctctgttctatggtctgcttctcccaaggtgaaat

SEQ ID NO: 165336 - DNA, 539 bp, Homo sapiens
gataggcaagcaggtcaagttggctagatttgggagatgatgttgaaagagatcaagccatgatataatttataatgtaaataaatttaaactttcctctttcccactacartatctttaagatatcacaatcagagcttgatactgcctctatgcgtaattgttcgaatgcatgtgagtcttttctaataaactgtgagctttttgaaggctgagtccttgtcatggtcactattgtgttttcattgtctgctcacatgagatggcctcatgatttgtcaatttaaaaaattagaaatttgttttttcaaagtaaccactttttaaaaaaatatttactattattattagtagtagtttatttcaataggtttttggggaacaggtggtgtttggtcatgggaataagttctttagtggtgatttctgagattttggtgtacccataacccgagcactgttgtttgtgcccaaggtattgtcttttatccctcaccccagtctcaccttttcccctgagtccccaaagtcctttgtat

SEQ ID NO: 165337 - DNA, 539 bp, Homo sapiens
gataggcaagcaggtcaagttggctagatttgggagatgatgttgaaagagatcaagccatgatataatttataatgtaaataaatttaaactttcctctttcccactacaatatctttaagatatcacaatcagagcttgatactgcctctatgcgtaattgttygaatgcatgtgagtcttttctaataaactgtgagctttttgaaggctgagtccttgtcatggtcactattgtgttttcattgtctgctcacatgagatggcctcatgatttgtcaatttaaaaaattagaaatttgttttttcaaagtaaccactttttaaaaaaatatttactattattattagtagtagtttatttcaataggtttttggggaacaggtggtgtttggtcatgggaataagttctttagtggtgatttctgagattttggtgtacccataacccgagcactgttgtttgtgcccaaggtattgtcttttatccctcaccccagtctcaccttttcccctgagtccccaaagtcctttgtat

SEQ ID NO: 165338 - DNA, 539 bp, Homo sapiens
gataggcaagcaggtcaagttggctagatttgggagatgatgttgaaagagatcaagccatgatataatttataatgtaaataaatttaaactttcctctttcccactacaatatctttaagatatcacaatcagagcttgatactgcctctatgcgtaattgttcgaatgcatgtgagtcttttctaataaactgtgagctttttgaaggctgagtccttgtcatggtcactattgtgttttcattgtctgctcacatgagatggcctcatgatttgtcaatttaaaaaattagaaatttgttttttcaaagtaaccactttttwaaaaaatatttactattattattagtagtagtttatttcaataggtttttggggaacaggtggtgtttggtcatgggaataagttctttagtggtgatttctgagattttggtgtacccataacccgagcactgttgtttgtgcccaaggtattgtcttttatccctcaccccagtctcaccttttcccctgagtccccaaagtcctttgtat

SEQ ID NO: 165339 - DNA, 539 bp, Homo sapiens
gataggcaagcaggtcaagttggctagatttgggagatgatgttgaaagagatcaagccatgatataatttataatgtaaataaatttaaactttcctctttcccactacaatatctttaagatatcacaatcagagcttgatactgcctctatgcgtaattgttcgaatgcatgtgagtcttttctaataaactgtgagctttttgaaggctgagtccttgtcatggtcactattgtgttttcattgtctgctcacatgagatggcctcatgatttgtcaatttaaaaaattagaaatttgttttttcaaagtaaccactttttaaaaaaatatttactattattattagtagtagtttatttcaataggtttttggggaacaggtggtgtttggtcatgggaataagttctttagtggtgatttctgagattttggtgtacccataacccgagcactgttgtttgtgcccaaggtattgtcttttatccctcaccccagtctcacctttycccctgagtccccaaagtcctttgtat

SEQ ID NO: 165340 - DNA, 515 bp, Homo sapiens
gtgaaatacaggggtagagggatgcagcagaaaggccttgggagctcgctgagtccccaagcagtccattcctgcctggcaccacagggatccattgggagagtggccagaggagcagtgggtaaaactccacagggagaaggaattctgtagctgaactttgtaacaatttgaaggggggaagaagcctcctggtcagaactcaggggagggtgtgaatgaggcttgcagacttcacaggccagggaagaactaaaacccttttctctcacagctgggaagtggatagmcttgggcaagttttcaagcctgtctcatcctctgccagggaacagacttgtgctgttgtggggggtggggaacactgtgggagtgagactggcccttcagtttgtgtggaatctggataaggcctgtgattgccagctttcccctactttcttgacaacctgcataactcagcagaggcagctgtaatcctcctaggtacacaactccagtgacctgagaatttc

SEQ ID NO: 165341 - DNA, 509 bp, Homo sapiens
atattggtagaaatgctggcaaagattactctggtgaggtcttagatgtaaatgggtgcacattattgttataaagtgagaaataatttggctgaactgtgttctaatgtttygtggaaggtagaatttgtgaatggtgaaactgtatatttagctaaaatttctaagccaaatattgaagaaatggcttggttcttcctgacttcctatagtaaaagatgagaagagagaaagaaagtgaagaaggaactattaagcacaaagaaacccgaactttaagacttggaaaattatcagcctatccatatagcaaacaacagtttgataataacattgggctgagtgtgaactgtggacttaatcagccaccacagcagaaacactgccatgctgaacaggagaaaacagagatggaacaagatgaaggaaggatgttgattcttttagactctacaggaccagatcatagagctatttggctgtgaacactcactattcttcaaacagga

SEQ ID NO: 165342 - DNA, 471 bp, Homo sapiens
gtcctttgccagaggagtcacataggacgtgattaacttttttttttttttagatggagtctcactcttaaaagtgcagtgttcagtggcattggcaagatctttgttcactgcaacctccgcttcccgagctcaagtgatcctttcacytcagcctcttgattagtagctgggattacaggtgtgtgttaccacacccagctaatttttgtatttttagtagagatggtgtttcaccatgttgaccaggctggccttgaactccccacctcaggtaatcctcccacctcggcctcccaaagtgctgggattacaggcatgagccaccctccccagctggacatgcttaattcttttggcaactgaaagttgtgacaaaaattgtgaaattttgtctaccaaaaaaggcctttagagactcaatgcccaaagttttgttgggggctaattgtagacaccatctgcctagca

SEQ ID NO: 165343 - DNA, 519 bp, Homo sapiens
tcactgcaacctccgcttcccgagctcaagtgatcctttcacttcagcctcttgattagtagctgggattacaggtgtgtgttaccacacccagctaatttttgtatttttagtagagatggtgtttcaccatgttgaccaggctggccttgaactccccacctcaggtaatcctcccacctcggcctcccaaagtgctgggattacaggcatgagccaccctccccagctggacatgcttaattcttttggcaactgaaagttgtgacaaaaattgtgaaattttgtctaccaaaaaaggccyttagagactcaatgcccaaagttttgttgggggctaattgtagacaccatctgcctagcacataccaaaattctagactctcagaaggaaagcaagtgttcagaatatgccatattgtttagacacagtgagctgcacttattcatctaggcaaagttattatcagcataagggacagtttaccattcaagtgcccagatgccagccaagggcca

SEQ ID NO: 165344 - DNA, 607 bp, Homo sapiens
ctacactgtaaaacattgataaaatacattaaagaagaaacaaataaatggaaaggtttcctgtrtttaatggattggaataattactattattaaaatgtccatactacccaaagatatggacagatccaatgccacctctatcaaaatttcaaggacatttttcacagaaacagaaaaaaaattccaaaatttataggaaaccagaaaagaccctgaatggtcaaagctatctgaagcaaaaagaacaaagcagaaggtgttacactacctgattgcaaaatctactacaaagctatatgaatttaaacagcatagtactcgtgtaaaaacagacacatgggccaatagaacagaatagagagcctggaaataaatccatgaatttataatctatttatttttgactcagttgccaagaacacacaacgaggaaagttctcttcaacaaatggtactaagaaaactggatattcacatgcagaaggatgaaattatcatctcacaccatatacaaaaatcaactccagatggattaaagacttagatgtaagacctgaaaccttaaagcaactggaagaaaacatagagaaaaagcttcatgaca

SEQ ID NO: 165345 - DNA, 607 bp, Homo sapiens
ctacactgtaaaacattgataaaatacattaaagaagaaacaaataaatggaaaggtttcctgtatttaatggattggaataattactattattaaaatgtccatactacccaaagatatggacagatccaatgccacctctatcaaaatttcaaggacatttttcacagaaayagaaaaaaaattccaaaatttataggaaaccagaaaagaccctgaatggtcaaagctatctgaagcaaaaagaacaaagcagaaggtgttacactacctgattgcaaaatctactacaaagctatatgaatttaaacagcatagtactcgtgtaaaaacagacacatgggccaatagaacagaatagagagcctggaaataaatccatgaatttataatctatttatttttgactcagttgccaagaacacacaacgaggaaagttctcttcaacaaatggtactaagaaaactggatattcacatgcagaaggatgaaattatcatctcacaccatatacaaaaatcaactccagatggattaaagacttagatgtaagacctgaaaccttaaagcaactggaagaaaacatagagaaaaagcttcatgaca

SEQ ID NO: 165346 - DNA, 607 bp, Homo sapiens
ctacactgtaaaacattgataaaatacattaaagaagaaacaaataaatggaaaggtttcctgtatttaatggattggaataattactattattaaaatgtccatactacccaaagatatggacagatccaatgccacctctatcaaaatttcaaggacatttttcacagaaacagaaaaaaaattccaaaatttataggaaaccagaaaagaccctgaatggtcaaagctatctgaagcaaaaagaacaaagcagaaggtgttacactacctgattgcaaaatctactacaaagctatatgaatttaaacagcatagtactygtgtaaaaacagacacatgggccaatagaacagaatagagagcctggaaataaatccatgaatttataatctatttatttttgactcagttgccaagaacacacaacgaggaaagttctcttcaacaaatggtactaagaaaactggatattcacatgcagaaggatgaaattatcatctcacaccatatacaaaaatcaactccagatggattaaagacttagatgtaagacctgaaaccttaaagcaactggaagaaaacatagagaaaaagcttcatgaca

SEQ ID NO: 165347 - DNA, 174 bp, Homo sapiens
tgtcaaaatagcaaagaaacatgcatgcatttaaacaccaacccaggttgagtctgggggcyctcttctcatccttcctcagcagggtgactgatgacacttgccagtagcttttgatcaaatctgcccccatcagaaggtagggggaccagaggacttggggaattcctgtat

SEQ ID NO: 165348 - DNA, 174 bp, Homo sapiens
tgtcaaaatagcaaagaaacatgcatgcatttaaacaccaacccaggttgagtctgggggccctcttctcatccttcctcagcagggtgacwgatgacacttgccagtagcttttgatcaaatctgcccccatcagaaggtagggggaccagaggacttggggaattcctgtat

SEQ ID NO: 165349 - DNA, 384 bp, Homo sapiens
aacttaataaggaagttatacttcttatcaaaggagtttagatatttcctccctctagaaacacttatcaagaccaaggggaatatagttgcataaacagtgcytggggcagagagaaaaagccattcttaggattaacaaataaaacaagcaccccacattttatagatgattttatagagaaaccaagtgttccaggtaaatcagctggttcttaaagactccagttcgaaaatggtttaagcaaagactagaacttgaataagaaacaaagaaccctacagagccagacattgctgctgagcaatatgggatgtataaaaaaggacctgcataacatggaagaaggggcatttagacgaggccagacagactctgttccat

SEQ ID NO: 165350 - DNA, 537 bp, Homo sapiens
tttttaatggggttatgtcttctgttttttgatttgtttaagttccttatggattctacatattagacgtttgtcagatgcatagtttgcaaatattttctcccattctgtagattgccggtttactcttttgatggtttctttaaaactaaagatrgaagctctttagtttaattaggtcccacttgccattttttattgtcgttgcaacgttttttggggacttagccaaaaattctttgtcaatgctgatgttgagaagggtgtttcgtaggttttcttctaggatttttatagtttgaggtcttacatttaaagggaaaagaacaaaccaaccccaagttagcagtatagaacaaataactaaaattaggggagaccttaatgaaattgagatgcaaaaatccatataaaagatcaataaagccagaagttggttcctaaaaaaaaaacaagattgatagactattagctagattaacaaagaaaaaaatgagagtatccaaataaatacaatcagaaatgacaaaaatgaca

SEQ ID NO: 165351 - DNA, 514 bp, Homo sapiens
tttaggaattttccttcctaaaagtcttaccctgtaatgcccatcacatggctgagacacctgggttttactgcagattgatgaaatctctggtacaacaaatacccactcagttaagtgactgatgttttcctttcaggctagctgatcttttttgtttttttttcccagaggatgatatctggggccttwcccttaccagtgaccttccacactcccttccccacccctactccctacccacagccccttagatttaccagtgttttaggaaaagccacagggatgacaaggatccggagcaatgccttttaaacttgagaaaatgcccagagagttctttaaaatacagattcataagcctccatatcagaggttctgactcaataggtctgagatatggcctcagaacttgtactgtttttgttttgttttgtttgtttgttttcagacagggtcttactttgtcacctaggctggagtaccaagctgtccattgaggctgatgctacat

SEQ ID NO: 165352 - DNA, 581 bp, Homo sapiens
aagctttctctttctctccaccgcattcttatctctgtctcttagttatctctatgagcaccccagcccccagcacaaagcaaacaccaaatgaacagtgccccctggagttgttcaggaagtgcacttgtttctcaccccccacccctttctttctccttctaacactggggctcgagcaggctcagggcgctgagagtctgcagcacagtctttattaggtttcctattttctgtcacaacagacaagcctcacaagacaaaagaaaatcgattctttatcgaccacagtccagctgttggctccagagccaagggaggcagccaggcacgcaggtctgacctgtgtcctcagagcccaccggtccctatggggcagagctcagcctgcctgcagcccggggtagctgcccagggaatggcagctttcctcgagttagcacaaggccttctgtggggtaggcctggcrtagtgggcatacagccaggaaaggcgtgaagtgcctggtgttggtgcttctgcctccctgctccgcccccacctcctctttctcatgactccccctccctgggattgccca

SEQ ID NO: 165353 - DNA, 618 bp, Homo sapiens
tgatcaataagcattatgttctgaaactggggaatcagtgaagttaactgagctgcctttcagtgtctctaaacaattgctatttcagttatctgttgctgcctaaggaactagccccagactcagcagcttaaattacaaggatttaataccttttcatgagtccatgggctggcaaggctcagctgggtggttcttctccatatggggttggccagggtcatgtgtgtagctgccttcagctgggagctgagctggaycactctcaatggctttacatgtgccatgtgctttagctggggttgctggaacagcttggcctggctgagccattctctttcgacacagcctctcctaatttagtggtgcctggtgaccactgttacatgttggctggatcctagaagggtgaaaacagaagctgaaaggccccttaaggcctaggactggaaattacactgcatagctgccgctgcattctgttggtcaaagcaagtcatgggattggcctagatttgagagaagaggaaatggaatctacttccttatgggagggacacacatatacagagatgggagagattgttggtggccacctttgcagaaaatctaccacat

SEQ ID NO: 165354 - DNA, 528 bp, Homo sapiens
cctgggctggaactgtgggactgggctctaaggagactaccattttgattagccccctctactgccacatcttcccaaaccaccagagaacctctgcaggcctgattctggcttctcaggcagctgccatacaaacaaatttttgtgtttggctcattaccagccctgccaccctccaatgaagcagatctagctagttttacatctaatttgcatgacaacctacacttttgcctgggaggaccctccactaagtttccaggttattttccttttgttctgatgggcaccgctcggtctaaagaacactaacaaatgsactgatttcaacctagaaggcagtctccctggagttcctagggtctgtgtcaccaactctatctctcttttgtttcctaagtatttattgttgaatgtgacatatgtaacagaaagtgacttaaaaatgtacagctcaattaattaccacaaagcaaacatccacagaaccaccacccaaataaaaatggaagagtgtcccagaagacc

SEQ ID NO: 165355 - DNA, 525 bp, Homo sapiens
gaattcaccattgaagctacgtgggcccagaaatattttcttggggagaagattttcaattacatatttaatttctttaataattttacattcatatgttcaatatttttctcatgtcgatttcaagttgtgtttctcctaagaagtttttcattttatcaaattttcaaacttattgatataaagctatttatactgtcctggtcgttcgacataatcttagacttcttagaggcattgtttatattttcttattcttgtttctttgtcaaaatcttttttggattgagttaattggaagaccttgtctttgagctctgwatttctttcttctacttgttcaattctattgctgagactttccagagcattttgcatttctatgaatgtgttcaatgtttcctgaagtttttattgtttttaccttgtgctatctatttccttgaatatttctcccttcatttcttgtttttttggatttccttgcattggggttcacctttctctggtgcctccctgattatc

SEQ ID NO: 165356 - DNA, 552 bp, Homo sapiens
gtgtgaatttacatacgagtgtgtgtgtgtgtgtgtgtgtgtgtgtgtgtgtgtgtgtgggtgcgcacatgtgcctggaaatcatcttccatctttttgccaggttcagctttcagtcttggctggccccccattctaaagtaaacaccagcacccgctctctttcctctctcctagtgctcttcacttttcctgcacaagccatcagacagatgaacatagcatgtgtctgcttatttgtttaaagcctgtcctctcctgaattgtgagctccacgtctacctgatgtctattacagtatccagcacacactcagtgttcacaaagtatttgaagaatgaatgaatgaacatgtcagttcagktgtagggagggaaaaaggccatgtcagtccagttgtgttaggagacagaggccctaccagttcgggtatattaaggagacaaagacttttcagtcatgcagtcatcccttaatgcacttaaacatttatcaagcggctactatgtgctaggggctgtgctagactatggtgacttaaccatagacaag

SEQ ID NO: 165357 - DNA, 296 bp, Homo sapiens
tctcttccctgcactaaatcctgcctggtatattgatattttgcatcatctcttttcttgatgttcacaaggtttttttatctttgtgcaaattatgtgtgatagaaagatttggaacaggtgaggggaatgcttttcttttttaaaatgggagtaagatgattatgaaaggggtagtgggaagttaggaacagctcaatggaaacctgytgcatggcaggtcagttctaggaaaaagtgtgtcagatgtggaaattgattcccttcaatgggcagccatgccctctatctctttg

SEQ ID NO: 165358 - DNA, 471 bp, Homo sapiens
acatattcctgagctgtaatttcagagattttagttgagtcattctggagtgggaagcataaactccatttttaaataattagtcttagcgatgcttccatagattgcaggtgggctatgtttttcagaaacactttctaaccttcgctaggaaatccttcaaactgctgttcaccaacacaaccatctctctgcacaccacgcttggtggtcctgcgtgccaggctttccaacaaactgagacagctcacctggcttgggcatcttctcytcttcttcactcttccacggttaacaaaatgcaaagtcttaaccttgtcattgggtagctaacttatctggctgacctaatgtagctcactgttatcagtacttaacagcgagaaccattcctgatcaccctacattccttaataatctgtgataacattgaatatctgcagagctttttatcactgtttcaaaaatagc

SEQ ID NO: 165359 - DNA, 563 bp, Homo sapiens
aaccttaagtatctacttaaaaataaatagcttatccccaaccatkctactgaatggttactaattggttaatgtacttcctctttttaaagtaacagaatctgctttgcaaagaagatattcagagacattgggtttaactcaggaggtggttcactgtgaaacatccaggttttgtaaagggtagaaggtaattttgagactccaggacttctcacatttcgatgtttgtactgtagagtttgctacctgttgaatgtccttgtagctccagtcacaaactacatgaaatttagatggggcattactgatgtcaaatttattctgcaaaaggatgtctttaaagcaccttaaaatcaaattatattcttttaaataaactggattttttcctgttgcagaacatattttcatatttcttgtcccataggtaaccattagaagtaatagcattcatgcctgcagtaaatgtctaatcttccatgatagtgcctagacgtgtttgcttggtgtttccctgtttcattccaccccacgcatctcattgttgggtattgtctgtc

SEQ ID NO: 165360 - DNA, 522 bp, Homo sapiens
caaggaaatacaacttttataaataataataataatgataaattacatatatgtagccaaccacatttattgctaaccaccaggcaattttgtaggattattacatttaatgcttagaatattcctatgacattgttattgctatttttatttctcagttgcctaaagtcacatattaaatggaaaagctgaaatgtacaactctagtttagtctaaatacaatgccaagrttttttgtccaaagcagagtacttttcgatatatgtaatccacaaattggcatgtaaaaaccttcattttacataaaatatgcatttctctaggcattttatttaggtctctggtatattttgattaaactaagtaagcagttaaagatctaatctcttgatgtctttagtgttaaagataaataaggtcaaaacactttttacatgtagtaactcagttgactatcatcatagacctgttaggaaggcacttttgtagtacattgtactggagaagaaataatgaattct

SEQ ID NO: 165361 - DNA, 603 bp, Homo sapiens
gtataaattatgtgggtgaggtggaaacacaaattcacttagagcaaccaactatttttcaatctttttcctacttgggttacttttacctcttagaattttccttctgaagttcattcactttgacaaaagaracaaaagcaaaaagttttaattgttcaatttcctttctaccgaataaaaatcttattccattgaacccccctttttttatatatttttctttcttgcccaaacacgaataaaattatcactattgccgttatatttgttccagggctcagaccttggggctttgggattttaaatattgttattatagttgtgggtaacattattcaaaggagcctcttttgcttaagtccttttaaaattcagggtacatcttagagctccctgtgcaccaacaccaagttttgtttatgtaattcaaattcttcttcacctagatgattgccaaatggaaattgaaagtcttcaaggactaaaaatacttggtgaacagtcagcaggtttgcagtgtctttggctatggaagcttggataaaatatgaacaggaatcaaattttaggtcaggacagacattaagaggacaaaacaag

SEQ ID NO: 165362 - DNA, 603 bp, Homo sapiens
gtataaattatgtgggtgaggtggaaacacaaattcacttagagcaaccaactatttttcaatctttttcctacttgggttacttttacctcttagaattttccttctgaagttcattcactttgacaaaagagacaaaagcaaaaagttttaattgttcaatttcctttctaccgaataaaaatcttattccattgaacccccctttttttatatatttttctttcttgcccaaacacgaataaaattatcactattgccgttatatttgttccagggctcagaccttggggctttgggattttaaatattgttattatagttgtgggtaacattattcaaaggagcctcttttgcttaagtccttttaaaattcagggtacatcttagagctccctgtgcaccaacaccaagttttgtttatgtaattcaaattcttcttcacctagatgattgccaaatggaaattgaaagtcttcaaggactaaaaatacttggtgaacagtcagcaggtttgcagtgtctttggcyatggaagcttggataaaatatgaacaggaatcaaattttaggtcaggacagacattaagaggacaaaacaag

SEQ ID NO: 165363 - DNA, 621 bp, Homo sapiens
ccactggttgggggaattggattctggtggtgacagttttgacgatgctgggactggagctgggtgttactgctgccgctcatttaaaaatgaattctccaccacttatacttctttgtgtcactggctccatgtgtagatacaattgactggacaaaccagtactttcttctgcccrtacactagctgccagaaatttcaaaaaaaactcatagataggcattaagcacgtcatcaaagcaaaagtgtcatatcctgggaaatctatagaaatgtctattagacctttttgacattgaattaattttgttggcgacagttgggaaggaaatgttcatgtaaatgaagtaaaatttgtcatggacagatatgaccttgacaatgtatatcttcctgggaacccatagaaatcttgagacggactttggataaacctaggtagcagaatcaagggttcaaagatgtcagggagttgttttacgttttttccaaggtggtggactgaagacattgttagtatgtgtctcccacttggaaagacaaaatattgtgtagagattcatgctgtgaacttttttccaagaagcaccacaggaacttaaaaggaaaactgaaagaagc

SEQ ID NO: 165364 - DNA, 454 bp, Homo sapiens
gtaacctacatcagaactggtgttggtaactgctgctgggggactagaggacagatcacatcactggaccccttgcagacattccccagtacaagcctggagtttggcagccacagtgggcagctagactgagaggagcagcaggattcacggtagtctggccctcagggacttctactcctaggggaaagaggagtgcaccacatcaaaggagcaccttatggagcaaaagaattyggactgccagccttgaaccccagaactctccacctgtgggaagtttctttcagcagaggcccaggtgcagtgctggacttggtggggaaagtctccatctctaccccaaagtcaggtaaccgtggtctcatgacgtgtcttggagaaggggatttcttcttcccctcatgcaccattacagaaacagctgggcatctcccataggagcttggtgggt

SEQ ID NO: 165365 - DNA, 484 bp, Homo sapiens
tcaagtgggttttgtccctgggatggaaggatgcttcaatatacacaagtcaataaatgtgattcatcgcataagcagaattaaaaacaaaaaccatacgatcatcttaatagacacaagaaaagcattcaataaaatccagcgtcctttatgataacagccctcaaaaaaccataaatagaagtaacacacctcaaaataataaatgtcatrtatgacacatccacagccaacatcatattgcatggaggaaaagttgatagcattgcccttaagatctgaacaagacaaggatgaccacttttaccacttctagtcaatgtagtactggaagtcctagccagagcaattagacagcagaaagaaataaagggcaatgaaattggaaaagagaagtctatccctgtttgctaatgatatgactgtatacctagaaaactccaaagtttcttccaaaaaactactcaatttgatacatgaattc

SEQ ID NO: 165366 - DNA, 588 bp, Homo sapiens
tgagtggataaagaacatgtggtatatacacaccatggcatactactcatccattaaaaagaacaaaataatgcctttcacagcaacttgggtggaactggaggtcataattctaagtgaagaaattcaggaayggagaaccaaatgttttatgtgctcacttataaatgggaagctaaactatgcgtacgcaaaggcatatagagtggtataatggacattggagactcagaagggggaagctgtggaaggggggaagggataaaaaactacatattggatacaatggactttacttgggtgacgggtgcactaaaatttcagacttcaccacgttataattcatccatgtaaccaacaccctttgtacccctaaatctattgaaattttaaaagtataaaaaataaaaacaaaggcatcaaggagcaaagaaggccttcttaatatttggcatacatatagaggtaagccacaggtttcatgaataagctggaatctataggatacaagaaaaatgtagctctattcttttatgtatcttcttatgtgaatctgttttcctctgtcatttaaataaatttcaagat

SEQ ID NO: 165367 - DNA, 588 bp, Homo sapiens
tgagtggataaagaacatgtggtatatacacaccatggcatactactcatccattaaaaagaacaaaataatgcctttcacagcaacttgggtggaactggaggtcataattctaagtgaagaaattcaggaatggagaaccaaatgttttatgtgctcacttataaatgggaagctaaactatgcgtacgcaaaggcatatagagtggtataatggacattggagactcagaagggggaagctgtggaaggggggaagggataaaaaactacatattggatacaatggactttacttgggtgacgggtgcactaaaatttcrgacttcaccacgttataattcatccatgtaaccaacaccctttgtacccctaaatctattgaaattttaaaagtataaaaaataaaaacaaaggcatcaaggagcaaagaaggccttcttaatatttggcatacatatagaggtaagccacaggtttcatgaataagctggaatctataggatacaagaaaaatgtagctctattcttttatgtatcttcttatgtgaatctgttttcctctgtcatttaaataaatttcaagat

SEQ ID NO: 165368 - DNA, 600 bp, Homo sapiens
tgttgtatttgcatataacctatgctcatcccttcttatactttcaatcatctttagattatgatatctaatagaatgtacatactatgtaaatagttgttatgctgtgttatttttgttgtattatttgattggtacactgtttttattagttcttttttgaacattttcaaaacatttgaaaatatttgttgaatctgtagatatgaaacctgtggattataagggtcaactatattttttaaatatgtaacttgatttcatgcccacttaagcagaaaataattgaaggcaattttcactttttggatatcccaggatcaaaattataaacatgtgtaactgcaccagtgcttatacagttttggccgtttcaayagcagcaccttgactgtctctgctactgtcaggttagtaccctctaaaagcctttccaatacatttgccagttagctgctgtgggactgcaccactgtgtaaaccattatttttaagttttaaaattttgatattatgaaaaaatgcttaacatatggagggttaagcaaggaaggagggctggcacatatattgacatggtatctaatatatgccaggtct

SEQ ID NO: 165369 - DNA, 530 bp, Homo sapiens
ctcatgggccaaatccgttcatcatctggccctcctgcccagttttgtaaataaattttgttggaacacagccctgttcactggtttacatattatctacacagctttcaaatcactgtggtagcgaggttgtggaagggaaataaatcttgaaaccccaaaatcactaagctaaagggaaaagtcaagctgggaactgcttakgacaaatctgcctcccattctgttcaaagtcatccctctgctcactgagataaatgcgtatttgattgcctcttttggaaaggctaatcagagactcaaaacaatgcaaccatttgtctcttatctaactgtgacctggaagccccctccctcatttagagttgtcctgcctttctggactgaaccaatgttcttcttagttatattgactgatgtctcatgtctccctaaaatgtataaaatcaaactgtgcctcagccaccttgggcacatgtcctcaggacctcctgaggctgtgtcatgagcgtgtgtccttaactttggca

SEQ ID NO: 165370 - DNA, 530 bp, Homo sapiens
ctcatgggccaaatccgttcatcatctggccctcctgcccagttttgtaaataaattttgttggaacacagccctgttcactggtttacatattatctacacagctttcaaatcactgtggtagcgaggttgtggaagggaaataaatcttgaaaccccaaaatcactaagctaaagggaaaagtcaagctgggaactgcttatgacaaatctgcctcccattctgttcaaagtcatccctctgctcactgagataaatgcgtatttgattgcctcttttggaaaggctaatcagagactcaaaacaatgcaaccatttgtctcttatctamctgtgacctggaagccccctccctcatttagagttgtcctgcctttctggactgaaccaatgttcttcttagttatattgactgatgtctcatgtctccctaaaatgtataaaatcaaactgtgcctcagccaccttgggcacatgtcctcaggacctcctgaggctgtgtcatgagcgtgtgtccttaactttggca

SEQ ID NO: 165371 - DNA, 530 bp, Homo sapiens
ctcatgggccaaatccgttcatcatctggccctcctgcccagttttgtaaataaattttgttggaacacagccctgttcactggtttacatattatctacacagctttcaaatcactgtggtagcgaggttgtggaagggaaataaatcttgaaaccccaaaatcactaagctaaagggaaaagtcaagctgggaactgcttatgacaaatctgcctcccattctgttcaaagtcatccctctgctcactgagataaatgcgtatttgattgcctcttttggaaaggctaatcagagactcaaaacaatgcaaccatttgtctcttatctaactgtgacctggaagccccctccctcatttagagttgtcctgcctttctggactgaaccaatgttcttcttagttatattgactgatgtctcatgtstccctaaaatgtataaaatcaaactgtgcctcagccaccttgggcacatgtcctcaggacctcctgaggctgtgtcatgagcgtgtgtccttaactttggca

SEQ ID NO: 165372 - DNA, 625 bp, Homo sapiens
gactggtatccttataaaaagagaaatttggacacagacacacacacacaggcagtaccccatgtgaatagaaaggtagatggggggtgatgcttctacaatccaagggatgtcaaagatcgtcagcaaacaccagaagcaggagagaggtatggggcagagtctccctcccagccacagaagtagaagctctgccaacactcaatgttgggcttctggactacaggactgtgagaaaatacatttctgttgttccaggccacccaatatgtggtattttgttccagcagccctgggaaactaatgcaggaaggtaaagaaaggtgaattatgttgctctgtaaaaacctcagtagtctctttacctaagttttgggtctgattttgataaagaattgaggcttccatgktgtccatgctgggcagagtcatggaccttctcaccaactcttctccccctcaataccctagagcagaaaggccactggacacaccaactgccctacacttaacaggcagcaggagagtccccttcactggggaagatgctcagtgtgacctttgggcttggtcctgatgtgttctacaagataagacaacttagaaagtcccattctcagggcaa

SEQ ID NO: 165373 - DNA, 607 bp, Homo sapiens
tacttgtgatatctggttaagtgtttgatccaccccccatccctcttgcttctgcttttgccatgtgacatgcaagctcctgcttcaccttctgccctgagtaaaagctccctgaggcctccccagaagcagagcaaatgccagtgttatgcttcctgtacagcctacagaaccatgagcaattaaatctcttttctttataaattacccagtctcaggccggccttccttccttccttccttccttmcttccttccttccttccttccctccctcccttccttcttccttcactccctctttcttttcttttctttgctcctttctttcctttcattcttattctgtcacccaggctggagtacagtggtaccatcatggctcactgcagccttcacctcttagctcaagtgatcctctcatctcagcctcccaagtaactagggccatgggcatgcattactatgcctggctaattttaaaattttttgtagagacagtgtctctctctgttgcccaggctggtcttgaactcctgggctcaagcaatcccaccttcttgacctcccaaagtgctgggattacaggtgtgaacccccatgcctgg

SEQ ID NO: 165374 - DNA, 608 bp, Homo sapiens
aattcatctgatgtaccttttcatactcccttgcccaaaagtactggtcaacggaaaactgagcaacatgccaataattcaaatcttgtgggaatgaaagtttgggttatcctaccaaggaaagaacctcatgtaactgagatgctagctaagagtaacaggatatggaatggctggaaaatatggcagcacaacagagtagaakttgcatgtagacattccatctcttactagctctgtaagactcaatattttagggtgacaaactgtcccaattttccaggactgagagatttcctgggacacaggactttcagtgctaaaaccaggaaagtcctgggcaaaccagacaagttatcctacttatgatttgtgctttcttcttcaccaccctgacagtaaataataactatcttacctacctagcaggtgcatgtgaagataatggtcaatctagatattaagcccagctctgccacttacttgtggaatggccttggacagatgacataacttctcacaaagcttcactcccttcttcaggcccaccattatctgacttacttattagcattaatgaactcctttggcctgccccctcttctatg

SEQ ID NO: 165375 - DNA, 608 bp, Homo sapiens
aattcatctgatgtaccttttcatactcccttgcccaaaagtactggtcaacggaaaactgagcaacatgccaataattcaaatcttgtgggaatgaaagtttgggttatcctaccaaggaaagaacctcatgtaactgagatgctagctaagagtaacaggatatggaatggctggaaaatatggcagcacaacagagtagaagttgcatgtagacattccatctcttactagctctgtaagactcaatattttagggtgacaaactgtcccaattttccaggactgagagatttcctgggacacaggactttcagtgctaaaaccaggaaagtcctgggcaaaccagacaagttatyctacttatgatttgtgctttcttcttcaccaccctgacagtaaataataactatcttacctacctagcaggtgcatgtgaagataatggtcaatctagatattaagcccagctctgccacttacttgtggaatggccttggacagatgacataacttctcacaaagcttcactcccttcttcaggcccaccattatctgacttacttattagcattaatgaactcctttggcctgccccctcttctatg

SEQ ID NO: 165376 - DNA, 608 bp, Homo sapiens
aattcatctgatgtaccttttcatactcccttgcccaaaagtactggtcaacggaaaactgagcaacatgccaataattcaaatcttgtgggaatgaaagtttgggttatcctaccaaggaaagaacctcatgtaactgagatgctagctaagagtaacaggatatggaatggctggaaaatatggcagcacaacagagtagaagttgcatgtagacattccatctcttactagctctgtaagactcaatattttagggtgacaaactgtcccaattttccaggactgagagatttcctgggacacaggactttcagtgctaaaaccaggaaagtcctgggcaaaccagacaagttatcctacttatgatttgtgctttcttcttcaccaccctgacagtaaataataactatcttacctacctagcaggtgcatgtgaagataatggtcamtctagatattaagcccagctctgccacttacttgtggaatggccttggacagatgacataacttctcacaaagcttcactcccttcttcaggcccaccattatctgacttacttattagcattaatgaactcctttggcctgccccctcttctatg

SEQ ID NO: 165377 - DNA, 593 bp, Homo sapiens
tattacacagtaaccctctcttgaagtttatggggggagtgatggcactctaatgggattggatttgtctggcatgggacacagcttgagaccacatgactgacttggctttaatgggcttcatgtgggactcgctggcctctgttctttccctttgttttcccttgtcctcttccctccctacctccaaccccaactcacacacaggagtggttcagctttcttctacagcagcgacactaaagctgtacattagaccatgttagacttttaaaggtcttgaaacctaggccatatcccagaccattaaatcaatatctgggaatgggacacagacattgtgttttttcgagctccccaggcgatgccaatgtttgatcaaagtttcaaaccacttttgtawggacttcatcactctgtttctcgattgcatccttgagacgtggaatttagcctctttggtgacatgttgaataagctcaggagctataggctttgtcctttgctatggtcttatctgttttctgttctgggtatctggaacacaactcctgacatctgttctatcaagtcctctgccaagcagttgtctg

SEQ ID NO: 165378 - DNA, 593 bp, Homo sapiens
tattacacagtaaccctctcttgaagtttatggggggagtgatggcactctaatgggattggatttgtctggcatgggacacagcttgagaccacatgactgacttggctttaatgggcttcatgtgggactcgctggcctctgttctttccctttgttttcccttgtcctcttccctccctacctccaaccccaactcacacacaggagtggttcagctttcttctacagcagcgacactaaagctgtacattagaccatgttagacttttaaaggtcttgaaacctaggccatatcccagaccattaaatcaatatctgggaatgggacacagacattgtgttttttcgagctccccaggcgatgccaatgtttgatcaaagtttcaaaccacttttgtatggacttcatcactctgtttctcgattgcatccttgagacgtggaatttagcctctttggtgacmtgttgaataagctcaggagctataggctttgtcctttgctatggtcttatctgttttctgttctgggtatctggaacacaactcctgacatctgttctatcaagtcctctgccaagcagttgtctg

SEQ ID NO: 165379 - DNA, 570 bp, Homo sapiens
aactcccaccaggacccaagctggacaggaaggagacagttgcagttctaacccttcaaggaaggcagctgaggagtaggcagagctccaggcctggagtcagaaaatctaagtatgattcctgctctgcctttccagctgggtgaccccagcaagacactgaactcttgagtctgagtccacacttgagaaataggaacaatgacgcctgtgtcactgggttgtggtactacatacatacgacagggcctgtatacatagcacgcagtgtctggcactcggtaagtgtgccgtgaaccacctgtcctctcttctgagctgcaaggaaggacaagccctggacaaggagtggcctgcgtgatcaaattcyggggcttagaccctgtcgcaagaaagcctagctggagcaaaggctggaggagaggtttacaaggggaattatcttctgttcacctgcaaagacaagggggcagagtgtggcacaaggaatctggagaaggttcccaaggggatggctgaggcggtcatttccagggacagctgtgtgtgcacacagggaaaaaggcaaag

SEQ ID NO: 165380 - DNA, 565 bp, Homo sapiens
ggtgggaggatcgcttgagcccaagaggccgaggttgcagtgagccaagatggtaccaccacactccagcctaggtgacagagtgagaccttctctcaaaaaaaaagaaaagaaaagaaaaaagaaaaaaagaagcttttgtgcttcaaaggaaattattgagaacgtaaaaagaacccacaggatgggagaaaatatttgtgaatcatatatctgatgagtctggtacctaatgcccagtggctcacgcctgtaatcccagcactgtgggaggctaaggcaggcagattactgaggtcaggagtttaagaccagcctggccracatggtgaaaccccatctctaatataaaaatacaaaaattagccaggcttggtggcacgcgcttataatcccagcaattccagaggctgagtcaggagaatcaccttaatgcaggaggcagaggttgcagtgagccaagatggtgccactgcactccagcctgggtgacagagtgagtcagatccatctcaaataaaaaaaaaagagagagagtcttgtatctagaatatataaagagctc

SEQ ID NO: 165381 - DNA, 565 bp, Homo sapiens
ggtgggaggatcgcttgagcccaagaggccgaggttgcagtgagccaagatggtaccaccacactccagcctaggtgacagagtgagaccttctctcaaaaaaaaagaaaagaaaagaaaaaagaaaaaaagaagcttttgtgcttcaaaggaaattattgagaacgtaaaaagaacccacaggatgggagaaaatatttgtgaatcatatatctgatgagtctggtacctaatgcccagtggctcacgcctgtaatcccagcactgtgggaggctaaggcaggcagattactgaggtcaggagtttaagaccagcctggccgacatggtgaaaccccrtctctaatataaaaatacaaaaattagccaggcttggtggcacgcgcttataatcccagcaattccagaggctgagtcaggagaatcaccttaatgcaggaggcagaggttgcagtgagccaagatggtgccactgcactccagcctgggtgacagagtgagtcagatccatctcaaataaaaaaaaaagagagagagtcttgtatctagaatatataaagagctc

SEQ ID NO: 165382 - DNA, 570 bp, Homo sapiens
aagggtcaatgacaaatgaaccaaaattctagcaatttaagtctcagctgtgatgagatggaagatctccaggrctggtaaaattccagattctttaaaaattgcatttcctattctcacaacaggtttggttatttcctggatcccttgggattaaagtatttttttttcaaatcctgtcacaattatattaggagattccagctctgaatctcactgtctcttcccccacaacatgagatggcagatgaattaagactcaggagaagtctatgacccaccatctccttgttaagcttaatttctcttcctggtcccagagaggatcagctatgccttaacccacgtccccagacagaagtgatgctcaaggaattgccttcctcacaattgctttctcataatttcttcatgtgggaaaataaatctcccagtccttgggagaaattgtcaggttaacttgagcctgcagttcttattcaataaatcaaaggacattggtcttaaaccaaataatggcactggcaagaagtggaaagaaaagagggggacaagacacctcttacctgg

SEQ ID NO: 165383 - DNA, 570 bp, Homo sapiens
aagggtcaatgacaaatgaaccaaaattctagcaatttaagtctcagctgtgatgagatggaagatctccaggactggtaaaattccagattctttaaaaattgcatttcctattctcacaacaggtttggttatttcctggatcccttgggattaaagtatttttttttcaaatcctgtcacaattatattaggagattccagctctgaatctcactgtctcttcccccacaacatgagatggcagatgaattaagactcaggagaagtctatgacccaccatctccttgttaagcttaatttctcttcctggtcccagagaggatcagctatgccttaacccacgtccccagacagaagtgatgctcaaggaattgccttcctcacaattgctttctcataattkcttcatgtgggaaaataaatctcccagtccttgggagaaattgtcaggttaacttgagcctgcagttcttattcaataaatcaaaggacattggtcttaaaccaaataatggcactggcaagaagtggaaagaaaagagggggacaagacacctcttacctgg

SEQ ID NO: 165384 - DNA, 533 bp, Homo sapiens
actacaaaggagtatgctttgagaggtcttgagtttccacaacatctttccttatttcctgtcttaggaatttaagtgggatcatctttgcactgtacctgctgccccagtggaagctgaatgccttttcagggtaacattccctgttaatccaacactgctctttggtctctcacagggtggattgtggggcagttcatttccatgtttcaatcccattggttaaacacggacagggcttccagggtcctgtttttatctccatgggggtatgtgtgggagaaccaatggtatcagtatgtactccggagggctcctcgaccttggataaggagaagttctccgtggctgtccagtaggcagaggtggcaactgaatttacttccttctagccccattctggatgcttttattgacagataaaacccccacccatgcccatttcttttcccagaaatgccagaatctgattttgggtcccagtaccaatttctcaagttccttttgcacyctgccctcgcttcagtgaattc

SEQ ID NO: 165385 - DNA, 564 bp, Homo sapiens
aataaggcaaactgaaagaattctcaaggaggatgtcaagagcaacggtaataatagtattaccacactttgcaacactcagttcctggcaggtagctttcctcatctattctcaccaccagccagggcggagggagaaaccaggcagataaaaagagaattgaataacaatgcaagtaagtgatttgatcaaggtcccagaggcagcaagcagctttggaaactgcctggtcccagagccctggcatttggcctccggagattccccaacccccagtcacgccttgtccttgcaggtgcagccccagaaagttgcagcccccgcatgggctctgtgagcctatacagacagtgggtttgtgtgacagcacaattccttgccctgcgagaaggcctggcccacrcacagacagctggaagtcacttcgacccccgatgacaccgttcaaagcctcctctgtttggctttttgattcctgattgacattcgctggcgaggagagataaatgccaggctgaggacaatgttgatccgctcagactattctcagggaaagacttttc

SEQ ID NO: 165386 - DNA, 599 bp, Homo sapiens
atccactcaagttgtggttgcatatatcaacaattcattcctttttattgctgagtatttttccagggtatagatggataggggatcccaccttactcacagcagataccttccaagacccccagtggatgccttcaaccgcggatagaaccgaaccctatacatcctgttttttccccatacatacctatgataaaggtttatttataaattaggcacrgtatagatgaacaataataactaataataaaatagaataattataacaatgtacttttataaaagttatatgaatattgtctatctctcagaatatctgattgtactgtattcatccttcttcattttgcaatctatccacttgataacagagctggccccaagtcacagggagggtacacagcatgggtatgctggacaaagtcatgattcacatcccagatgggagggagcaggacagtgtgagattgcatcacactactcagaatggctcacaacttaaaacttacaaattgtttatttctgaaattttccattgaatattttcagaccatggttggccgtgggtagggcagtactactgtgccacagtttgtttc

SEQ ID NO: 165387 - DNA, 574 bp, Homo sapiens
tgtttcagctattctagttccattgcctttccgaagaaacttgagaataatcagcccttgaatctcacatctttctttctgcaagcacaggatcactgcaatggaacctgagagtgacagttcctcggcctttaccacacgagttctgtggccctctgagctggagaccaggggtcagaagcaggcccaaggcctgtccacctatgtgcccatatccctacctctctgcaagctgctgtgccacactggaacttaggccgggagcagggagcaaatgaacatactctcattggcctgacaagctctgagccctctcacctggacttcagtggccccacaaaggcactagtcagagggctcaggaacctgscagagggctttgctcagctcaggccacccgctccaaggggctttccttagaggctctggctacaggagctaccacacagggttgtttggaggggccacctgccttccctcccctgcagaggtggcaacttcccagagcttacagaagcctgctgctccgctggaggttttcctccacctgaagatgaataacctccatcataaa

SEQ ID NO: 165388 - DNA, 574 bp, Homo sapiens
tgtttcagctattctagttccattgcctttccgaagaaacttgagaataatcagcccttgaatctcacatctttctttctgcaagcacaggatcactgcaatggaacctgagagtgacagttcctcggcctttaccacacgagttctgtggccctctgagctggagaccaggggtcagaagcaggcccaaggcctgtccacctatgtgcccatatccctacctctctgcaagctgctgtgccacactggaacttaggccgggagcagggagcaaatgaacatactctcattggcctgacaagctctgagccctctcacctggacttcagtggccccacaaaggcactagtcagagggctcaggaacctggcagagggctttgctcagctcaggccacccgctccaaggggctttccttagaggctctggctacaggagctaccacacagggttgtttggaggggccacctgccttccctcccctgcagaggtggcaacttcccagagcttacagaagcctgytgctccgctggaggttttcctccacctgaagatgaataacctccatcataaa

SEQ ID NO: 165389 - DNA, 580 bp, Homo sapiens
aactcaaggtaggggcctagcaacctgtattttaataagctctgcagacgatttgctaaattgatgttgaatttacacaacataaaattcatcctttaagtcacttcgaartatgtaatccaatgtttttttccagcacattcacaatgttgtgtagccatcactactaactgcagaacttccccccacccctcaaacaaaccccacatccatgaagccatcactcctcattctccattccccacccagcccctgccaaccacgaatctgctttctgtctctacagatcgcctgttctgttcatttcatgtacacggaatcctacaccatgtggccttttgtgtttggctcctttcccttagaatagtgttctcgaggttcagccacatggtagcatgcatcggaacctcattccttcttatggctggatgatattccattgcaagtgagaccataccacaatttgctatctgctcatctgttaatgatccaggtgattttgatgcccattagagactggaaacaacttccctagatttaaaattcaaatgctgttgtacctatttgtgtcgtgacaata

SEQ ID NO: 165390 - DNA, 604 bp, Homo sapiens
cccactcagacctactaagtcagaaaactcaaggtaggggcctagcaacctgtattttaataagctctgcagacgatttgctaaattgatgttgaatttacacaacataaaattcatcctttaagtcacttcgaaatatgtaatccaatgtttttttccagcacattcacaatgttgtgtagccatcactactaactgcagaacttccccccacccctcaaacaaaccccacatccatgaagccatcactcctcattctccattccccacccagcccctgccaaccacgaatctgctttctgtctctacagatcgcctgttctgttcatttcatgtacacggaatcctacaccatgtgkccttttgtgtttggctcctttcccttagaatagtgttctcgaggttcagccacatggtagcatgcatcggaacctcattccttcttatggctggatgatattccattgcaagtgagaccataccacaatttgctatctgctcatctgttaatgatccaggtgattttgatgcccattagagactggaaacaacttccctagatttaaaattcaaatgctgttgtacctatttgtgtcgtgacaat

SEQ ID NO: 165391 - DNA, 580 bp, Homo sapiens
aactcaaggtaggggcctagcaacctgtattttaataagctctgcagacgatttgctaaattgatgttgaatttacacaacataaaattcatcctttaagtcacttcgaaatatgtaatccaatgtttttttccagcacattcacaatgttgtgtagccatcactactaactgcagaacttccccccacccctcaaacaaaccccacatccatgaagccatcactcctcattctccattccccacccagcccctgccaaccacgaatctgctttctgtctctacagatcgcctgttctgttcatttcatgtacacggaatcctacaccatgtggccttttgtgtttggctcctttcccttagaatagtgttctcgaggttcakccacatggtagcatgcatcggaacctcattccttcttatggctggatgatattccattgcaagtgagaccataccacaatttgctatctgctcatctgttaatgatccaggtgattttgatgcccattagagactggaaacaacttccctagatttaaaattcaaatgctgttgtacctatttgtgtcgtgacaata

SEQ ID NO: 165392 - DNA, 580 bp, Homo sapiens
aactcaaggtaggggcctagcaacctgtattttaataagctctgcagacgatttgctaaattgatgttgaatttacacaacataaaattcatcctttaagtcacttcgaaatatgtaatccaatgtttttttccagcacattcacaatgttgtgtagccatcactactaactgcagaacttccccccacccctcaaacaaaccccacatccatgaagccatcactcctcattctccattccccacccagcccctgccaaccacgaatctgctttctgtctctacagatcgcctgttctgttcatttcatgtacacggaatcctacaccatgtggccttttgtgtttggctcctttcccttagaatagtgttctcgaggttcagccacatggtagcatgcatyggaacctcattccttcttatggctggatgatattccattgcaagtgagaccataccacaatttgctatctgctcatctgttaatgatccaggtgattttgatgcccattagagactggaaacaacttccctagatttaaaattcaaatgctgttgtacctatttgtgtcgtgacaata

SEQ ID NO: 165393 - DNA, 580 bp, Homo sapiens
aactcaaggtaggggcctagcaacctgtattttaataagctctgcagacgatttgctaaattgatgttgaatttacacaacataaaattcatcctttaagtcacttcgaaatatgtaatccaatgtttttttccagcacattcacaatgttgtgtagccatcactactaactgcagaacttccccccacccctcaaacaaaccccacatccatgaagccatcactcctcattctccattccccacccagcccctgccaaccacgaatctgctttctgtctctacagatcgcctgttctgttcatttcatgtacacggaatcctacaccatgtggccttttgtgtttggctcctttcccttagaatagtgttctcgaggttcagccacatggtagcatgcatcggaacctcattccttcttatggctggatgatattccattgyaagtgagaccataccacaatttgctatctgctcatctgttaatgatccaggtgattttgatgcccattagagactggaaacaacttccctagatttaaaattcaaatgctgttgtacctatttgtgtcgtgacaata

SEQ ID NO: 165394 - DNA, 402 bp, Homo sapiens
gaattcccatgtgtctagtaccttatgttatttagcgaggtgaccactatctctccactttagaaagacacaaaattttcatgtaaaattcatctgactggaaatggacccttctaatacagtgactactaaccttttgtgagacatgaacctcctyagactcttcctaggataattcacatacatacctgtaggggctaagggaaaatgtcctcctttgccctctgaaagttcactacaaatcaactgacaaaaggcagaaatattatgggagaaaaggcatacaattttattttaacagtcatagcacaggtgaattgtagaagaatgattactcaatgggggcacagatggttatacacccttcttcttaggagaaagggagatagggaagtatggata

SEQ ID NO: 165395 - DNA, 402 bp, Homo sapiens
gaattcccatgtgtctagtaccttatgttatttagcgaggtgaccactatctctccactttagaaagacacaaaattttcatgtaaaattcatctgactggaaatggacccttctaatacagtgactactaaccttttgtgagacatgaacctcctcagactcttcctagrataattcacatacatacctgtaggggctaagggaaaatgtcctcctttgccctctgaaagttcactacaaatcaactgacaaaaggcagaaatattatgggagaaaaggcatacaattttattttaacagtcatagcacaggtgaattgtagaagaatgattactcaatgggggcacagatggttatacacccttcttcttaggagaaagggagatagggaagtatggata

SEQ ID NO: 165396 - DNA, 507 bp, Homo sapiens
cagggtccccaggagccttcctgacaaccccctgccgctctgtgggggttgctcccctcccatgatgccctctctccctgcagtcgtacccctcacttatgccatgtcattcttgcttartgtctctccaggacccaggagagtggctggtgtgtggcagacacacaagtacttgtttaatgagcccctgagccatggccaggccagggagcagtgagccatgcttgctcatggcctgccttgattttatatatgtatgaacagggtggaggcagcggtatttcaaatgcactctattttatgcagtaatggccacgggggatggagttaggctcttacattgttttcactttttaacattcttacttgttaaatgaagggttggtgactctgtgggttccctggctttctgcaaaccctcaaacctgagtactgctggtcacgcatgtccacagcaaagagccagagttcaccgccctttctcctaccttcttctccagtttgttt

SEQ ID NO: 165397 - DNA, 226 bp, Homo sapiens
agcttaaatattacagagaaaggaaaggaagaatttaatgtakattaagttatattaattattacgtatattatttactatgtacttgtacttctatcacatcctttattaatattttagcaattcaggtcttaacaatgttgaaatcttatttgaatgaacaaggtatatagatacctaatattaaggggagtgatgggtgcagacatttgtagaacaaagatac

SEQ ID NO: 165398 - DNA, 226 bp, Homo sapiens
agcttaaatattacagagaaaggaaaggaagaatttaatgtatattaagttatattaattattacrtatattatttactatgtacttgtacttctatcacatcctttattaatattttagcaattcaggtcttaacaatgttgaaatcttatttgaatgaacaaggtatatagatacctaatattaaggggagtgatgggtgcagacatttgtagaacaaagatac

SEQ ID NO: 165399 - DNA, 373 bp, Homo sapiens
tagagaagaaccaaaggacagatgtcagtgacagtgggccattcattgatggatttctctccaggataaaggccacaccaatcaatattcttacagctgggcctttgaactatttgcttcctccatatggactctccaagggtaaatkgacattttccccagtgccttaatttcttattcaattccagcctcctaggttacaaaagagtttggctaattctaacagctaattttccataagcgcttaaatagttcagtcagaatgatggttgggaatattttatgctgctttcattatgcttcggctaggcagggtaattcttatgaattaccttgtttatttaattaagtaatgcaatacacgacaaaatat

SEQ ID NO: 165400 - DNA, 394 bp, Homo sapiens
aggctgtcgagaaccctagagaagaaccaaaggacagatgtcagtgacagtgggccattcattgatggatttctctccaggataaaggccacaccaatcaatattcttacagctgggcctttgaactatttgcttcctccatatggactctccaagggtaaatggacattttccccagtgccttaatttcttattcaattccagcctcctaggttacaaaagagtttggctaattctaacagctaattttccataagcgcttaaatagttyagtcagaatgatggttgggaatattttatgctgctttcattatgcttcggctaggcagggtaattcttatgaattaccttgtttatttaattaagtaatgcaatacacgacaaaatattaccc

SEQ ID NO: 165401 - DNA, 401 bp, Homo sapiens
tagagaagaaccaaaggacagatgtcagtgacagtgggccattcattgatggatttctctccaggataaaggccacaccaatcaatattcttacagctgggcctttgaactatttgcttcctccatatggactctccaagggtaaatggacattttccccagtgccttaatttcttattcaattccagcctcctaggttacaaaagagtttggctaattctaacagctaattttccataagcgcttaaatagttcagtcagaatgatggttgggaatattttatgckgctttcattatgcttcggctaggcagggtaattcttatgaattaccttgtttatttaattaagtaatgcaatacacgacaaaatattaccctgggtcatgaaaaatagagatct

SEQ ID NO: 165402 - DNA, 401 bp, Homo sapiens
tagagaagaaccaaaggacagatgtcagtgacagtgggccattcattgatggatttctctccaggataaaggccacaccaatcaatattcttacagctgggcctttgaactatttgcttcctccatatggactctccaagggtaaatggacattttccccagtgccttaatttcttattcaattccagcctcctaggttacaaaagagtttggctaattctaacagctaattttccataagcgcttaaatagttcagtcagaatgatggttgggaatattttatgctgctttcattatgcttcggctaggcagggtaattcttatgaattaccttgttkatttaattaagtaatgcaatacacgacaaaatattaccctgggtcatgaaaaatagagatct

SEQ ID NO: 165403 - DNA, 606 bp, Homo sapiens
aactgactctcctatgtagttagcataggatattaccagcaccctagaatctcactttggtccctccctcaggcctcaaaggtacttctatcttgaccktcaacgctaagattagtttttctgatttcttttttttaagtgtacgtaaatagaatcacacataatgcactcttttgtgtctggcatcttgtgttcaatatcatgttttgagacatatccacattgtcccatgcagcaatattttgttcatcttataaatgtaccatattttatccatttttctgcttccaagttttagtattacaaatatactgccttgaccatcctgtacatatcttttgctgaatgcgtacatatcttttgggacacatttctgttgtgtatagaactaagagtggcttttaactgtgtcgctctagctgtattacacagcatttgccagagtttccctaaatattcttaatatcgttgtgttgttctatgtttaatatttaatatgccaagggttctcagggaacatatggtcacagttttttttcccccaatggtgtctgtaaagaaacaggataaacatttcaccatagcatcaactttccaaatagatat

SEQ ID NO: 165404 - DNA, 413 bp, Homo sapiens
cttctcagtttccagttttgtttctttgtcatgaagttcattctcttctcccttttccaggaagaatcatcttctttgaacccccacagtggaaagctccccgctctgtaggggtacgttttatcctaggattatctgtcacaactgaacaggcamaagactcccccaaaaatgcatttttccgtgtctgattttatcagtctggaataaccccatggggggagagggtgaaaaaacttggtgcagacagtgtgggatgaagtttggctttctatgttccagccccttctgaatattcctcggtaatgtggaggtttaaatacgcctgctcatacttcagcagatggctagtgaattgaaccaccttcctcatatatatatatataaatatatatatatacacacacacacac

SEQ ID NO: 165405 - DNA, 559 bp, Homo sapiens
cttaaaagaattatgtgttccaatctggctagacatccaatgttctttcctatgagccctaatttttattttctaatacactagtattttctaagaaaatctaataaaaatcatgaaagagtaaataagaaatggaatgatcatttcatatgaaagcatgtacctaccatgagtattttaatgaaaggaaatgtgccttccaaatcccaggagtttctgagaatgtgaaccatcgtccatggtctgtctttgggatctggacaacctgagagctcccaagactgagaacctatcattactaattacatagatgaaatatatattcctcttaactttgcaacacaatgacaaccacaaactcctttttcagctcctaaatacagcctccttaatatagcacagtaaggaaaactatataagtagaccagttaggtcacacgctaattccattaccttaattgcttccccattgtatattgaatacmgaacttatatatggactttattaaatactaggcactgtttaaagcattcccacacttcaactctttttaatgta

SEQ ID NO: 165406 - DNA, 443 bp, Homo sapiens
gttcccctcatctgtcttacccttgtggctgccctcctgacggttaaactagattcacaagatattgagatgcatgaactgcaatatatcatttgggatttttttgttgcaatcagtggaaactattcctggctaacttaacacaatgaaaaggagacagatggagggaaggagggaggaagagagagaaagagtgagaaacagaatcaaccccaacaatttcctattcttctgtcattctacccaatatttaatttttaggaaacagataggtctagcttgaaccgtgtgtccttgataggaaacttttgctgactatcccaccargactgcatgccacggggataggacatggcctaaaggagccattagaagaagggaaagtgagtgctacacagggaacaacaaacacccaccaaaggaaagcggaggttccttgagga

SEQ ID NO: 165407 - DNA, 509 bp, Homo sapiens
agggcaggtcctgtagcttatagcgcctggagaatgcacggggccataatccatcaggaagagggctggtaaattgcacgaactttgccatttgtctactagtgtgcgaagagagctttatatcaatcctaaagcaacaaactcttctcagagcactataaatatccaggatggcaaaacaggttacctaggggatggttatttgcattataaaagattcctcctttgcaaaaagattcccttccagatgtcttaaaacagaggtctcttaagtgtccttaaatgtgatttataaaattatatttacacaaggttttagaaagggaaagaacaactaatgtttattaagtgccatgtttcctgccacttattatcttcttyaatcttcatagccacaaatgaaacaagagcaagccaagcaaacttgcaaaaaaatgtgataggaaatccgatgggtaaaaatgtcaaattccatctttgcaatggaaaagcactgaactggtacccca

SEQ ID NO: 165408 - DNA, 455 bp, Homo sapiens
gattatttaatataaatttctgtgattattcattttcaagactttgtaattgttctttgttcctatttaatgatttttgtttcatttctgttttggtttcatcataaattatttctttaatattacatttttatttagctctttggagattatatatattctttcttaaattatctctccatctgttttatgattttaatttcatctggaattaaatggtttaattttctgattgtcaattcagttggctctcttcctcagcatttgatctcttcatgtgctttggctaatttagaatgacaactctttttcttyttctctctctctttctctctttctttctttctttcctggcttcttcgccttgctttatctactagtgaggcaaaaaatctcatgtcttcctgatgccccaattaaaaaccagggcttacattggtggtccagagatctta

SEQ ID NO: 165409 - DNA, 382 bp, Homo sapiens
tttgtaagcaaaaatgccctcccgatgactttmaaaaggtctgtagccagatccacaaagccacaaactataagaaatttaaaatgaagagaaactatttacaaatgtaagattcaaagaattctcatctcaaaaatacttcattctactccaattactggcatgttttcagttgaaatgtgcttttattttttttttgaacaatctaaataattgttcacattttccacttcatgtagacacatcttgattataattagaagaaaaaatgcatctggttgaatagaatccaaggtgtaaagctgaagtgaagacattagggataggtgacagaacacttaaggtacaattaaaagattgcctctggctatatttatcattg

SEQ ID NO: 165410 - DNA, 513 bp, Homo sapiens
tcacatttgctgtttgtctgcctgaaatactgagttctaggtcctcttgttgttgaatatktcttgttgtttaggtgtcagctcagatgctacctgctcagagatgccttactttactttctatagaaaaatagctaccttactctcatttaccaatctctttcaaataactataacttattttcgtttaactaagtatagaaaataatatatattatttattatttatgtctatatattgtgtgtgtcctcctatcaaacatctccttgcctatcttgttcatcactgaaatctttgactctggctaacaatttgcttcacaagaatttgtagatgaaaggagaaaaaaggaaaaaaaaggagaggagagaacaggaaaggagagaagaggagaagaaaggaaaggaatgaaaggggaaggaaaaaagaggaagaaagggagggagaaaacaaataaataaaatacttaggcaataaaatgagaaaaaatatgagaaactatactgggaaaa

SEQ ID NO: 165411 - DNA, 563 bp, Homo sapiens
cttctgtcagttaggcagcccacttgactaccatcataggaaaagttgatcgaaatatacattaaaccatggttaatttttgccttcactgtatatgcaataccgatacaaratacacatgtaggctgaagactccttcatcttcaatggtgtccttaattgtgatgttctttttttaacctacagcaccattgatacaaacccttatactcctgctcttatttctactgaaatattttatagacaacccttttctatgatttatacctcattataaaatcaaatttctaggctgtcagaaagaaattgagtgcagcaaagtaggaactagttctgtgacatactgagatggcatatcagcttggaggcataagtcccaaagcagaaagtgggaattatagataccacctacattcattcataaataggagaagaaataatgatggtacagaacagtgattttcaagtcataatgcaagagattcttaatagtattttaaattttaaaaaatggatttatgattgaagctatcaaaatttaccagagctcatttccctcttgc

SEQ ID NO: 165412 - DNA, 456 bp, Homo sapiens
gaatctccaccaagaggagagattagaaacagtctgaatactatgaggaaaataacccagatggtargtgaaaatcaaaggaactgacatatatcctggggcaacagctgtggtcagatcagacagatactatttatatgtcactgaggaaagacacagacatatttatgtacttaagcccaaaggaatgtaaagctacccttgaccttaatgaaaagagctgtaattcttttggtgttccatagtaaaattagtggtcaacacaagttttgttggcaatgttacataaccacacttatgtagatcataataactgtttaaagatgagcattcagaaataacttattatgtacaagagatatgcattaagattaacagctaaattattcagaaaccatggaggccggaaggcactgggatgacatattcaaacttctgaaagtaaaagagtgtcag

SEQ ID NO: 165413 - DNA, 456 bp, Homo sapiens
gaatctccaccaagaggagagattagaaacagtctgaatactatgaggaaaataacccagatggtaggtgaaaatcaaaggaactgacatatatcctggggcaacagctgtggtcagatcagacagatactatttatatgtcactgaggaaagacacagacatatttatgtacttaagcccaaaggaatgtaaagctacccttgaccttaatgaaaagagctgtaattcttttggtgttccatagtaaaattagtggtcaacacaagttttgttggcaatgttacataaccacacttatgtagatcayaataactgtttaaagatgagcattcagaaataacttattatgtacaagagatatgcattaagattaacagctaaattattcagaaaccatggaggccggaaggcactgggatgacatattcaaacttctgaaagtaaaagagtgtcag

SEQ ID NO: 165414 - DNA, 456 bp, Homo sapiens
gaatctccaccaagaggagagattagaaacagtctgaatactatgaggaaaataacccagatggtaggtgaaaatcaaaggaactgacatatatcctggggcaacagctgtggtcagatcagacagatactatttatatgtcactgaggaaagacacagacatatttatgtacttaagcccaaaggaatgtaaagctacccttgaccttaatgaaaagagctgtaattcttttggtgttccatagtaaaattagtggtcaacacaagttttgttggcaatgttacataaccacacttatgtagatcataataactgttkaaagatgagcattcagaaataacttattatgtacaagagatatgcattaagattaacagctaaattattcagaaaccatggaggccggaaggcactgggatgacatattcaaacttctgaaagtaaaagagtgtcag

SEQ ID NO: 165415 - DNA, 456 bp, Homo sapiens
gaatctccaccaagaggagagattagaaacagtctgaatactatgaggaaaataacccagatggtaggtgaaaatcaaaggaactgacatatatcctggggcaacagctgtggtcagatcagacagatactatttatatgtcactgaggaaagacacagacatatttatgtacttaagcccaaaggaatgtaaagctacccttgaccttaatgaaaagagctgtaattcttttggtgttccatagtaaaattagtggtcaacacaagttttgttggcaatgttacataaccacacttatgtagatcataataactgtttaaagatgagcattcagaaataacttattatgtacaagagatatgcattaagattaacagctaaattattcagaaaccatggaggccggaaggcactgggatgacatattcaaasttctgaaagtaaaagagtgtcag

SEQ ID NO: 165416 - DNA, 598 bp, Homo sapiens
ttaattaatcttggatgggtccaggcatccataggttttatgagttccccaggtgattctaatgtgcagtgaggttgcataccattgttttacactttccctatttaatatcacttgctttggttgggyttgagacagggcattgaaaaaaagacaacttaaaattagatccttgaccagttcctaaaaggaagggattatgctattgattgaaaggagttggcaggcaagtaggtgccacggtcattgatatggtttgactctgtgtccccacctaaacctcaccttgaattttaataatccccacgtgtcatggagagacccagtgggaggtaattgaatcatgggggggtgggtctttccatgccgtcctcgtgaaagtgaatacatctcacaagatctgatagttttctaagggggaattcccctgcacactgtctcttgcctgctgccatgtaagatgcccctttgtttttccttcctcttctaccatgattgtgaggcctcccccgctatgtggaactgtgagtccattaaacctctttcctttataaattacccagtctcaggtatttcttatagcagcacaagaagggac

SEQ ID NO: 165417 - DNA, 623 bp, Homo sapiens
cagtgttgtagtttaaatagttaattgtaactaaaatacaactacaccagcctgacaggtccctaagctgttaatcacccaattacctacttactatggatgtgttttatatttttaactgggagaaagctttgagcagggggaataaaaaagaaaaaaaaaaggaaagaatatgaaaaagcacaagagcttttgagaaagaggacacccagagagaacatcacataatttacaattggcctcagaccaatccagggtgcaaggaagccattcttctgtatcctcggcaaccaatctgaaaatttccccataaaccggcttcctgcccatgtgtaattcgtgcttatcaattaaaatcccattaccttatgcaacatgtgtatgtcatgtcctctggcagctggatgtgctgaatgtaaagccaggcctgacctaaataacctgaaactctttgcaaacacatttttatgtggattagaaaaatacttcagaagatttataggtcactgatagaaatatgtttttatggaggctcccactttaatctaggcctggtttagacacatgttkcttctgaaaaatttaatttgcacatccctgtctactggaatgtcacaacacag

SEQ ID NO: 165418 - DNA, 567 bp, Homo sapiens
aatgccattttgaatccattaatggaaaaaattgctgtggtagatatggataaaaggaatagatgttacatttctgctacaagaaaatagtggggtcttcataatgtaattatcaataagttatagaatttctcttttccctctggaaattgtgtgttgatttaaggtgsctatactttataggaaattttatctctcaattcagaaggaattctgacatcacacaagggataacattgtacccttgaaactaacttttaaaaaatgtgtccttttcttggttctttttacaaagaacttttattcatattttcatgttagaaataaaagagttcaattattttagtttggaccttaagctggatagtttataaacatgcatattagcttcatttttcatcaaaatgtgtttcttttttattttagtctgatgccaatgcaagttacttaagagcagctcgagctggacaccttgaaaaggccctcgactacataaaaaatggagttgacatcaacatttgcaatcaggttagctggagttattattgaattttttacttaaaattc

SEQ ID NO: 165419 - DNA, 549 bp, Homo sapiens
catgtcttgaccatttcttgagacataaaatttgtaattttggggtgttacttgaattacagggagagaaactaacttaagcacaagagggaatttattggaattagttaaggaacacrgagaatagaaagctaaagaatctttcagaaagctttggaaacccaatagctggggtggagagtgggagaacagagtgagaagaaagagagtaggattaccctttgacctggttcctacaggtcaatcaagactggagagggagaatcaagggtggacctaaaagagaaaacagaagatagcctgcatgtgtgtctaccctgtaattaatgaagggcaagcttctctgtctcagtccatccaggacaagtcctacctgcataatggggaataggtaattctctgaaagaaaataggggtgacattgtcctgaaggggaaatgggtgtgtgggcactggtgaccaaaactaaagcaaaataaaacaaacacccatgcactacaaatgaccactgtaaaattgaaatttccaccatgaaacactcaccaaaaa

SEQ ID NO: 165420 - DNA, 549 bp, Homo sapiens
catgtcttgaccatttcttgagacataaaatttgtaattttggggtgttacttgaattacagggagagaaactaacttaagcacaagagggaatttattggaattagttaaggaacacagagaatagaaagctaaagaatctttcagaaagctttggaaacccaatagctggggtggagagtgggagaacagagtgagaagaaagagagtaggattaccctttgacctggttcctacaggtcaatcaagactggagagggrgaatcaagggtggacctaaaagagaaaacagaagatagcctgcatgtgtgtctaccctgtaattaatgaagggcaagcttctctgtctcagtccatccaggacaagtcctacctgcataatggggaataggtaattctctgaaagaaaataggggtgacattgtcctgaaggggaaatgggtgtgtgggcactggtgaccaaaactaaagcaaaataaaacaaacacccatgcactacaaatgaccactgtaaaattgaaatttccaccatgaaacactcaccaaaaa

SEQ ID NO: 165421 - DNA, 560 bp, Homo sapiens
tctcctgactgtttaagtacagtgacatcttccccatgtcatgtcatggtgaatcgattatatgaaagtatataaaattcagctttgggcacaccaactcctgctttcattatttagggtctcacccaggacccaattcttgccttgtttttatctctcttcaactcccaggatcttgtttcttattcatttgcattcttattttgattatttccaactttgactttcccctgcctatactgccttagccaagggayggacatttaaatcttctccccacacaagaggcccctggcctggccaccttctacccgatgagatattggacataaatagacataaagaacattactactttctaatttaattctagtttcattttttcctgtcccagtcagagaaagcccaccattgttttattagaaaatgatgggggatgctacaaagttatgtaactaaaatattgcatgtgcaagaggatcactttttactcaaattcatatgatggagatgacaaacatgatttcaaattgctttacaataaatactggttttaaaaa

SEQ ID NO: 165422 - DNA, 560 bp, Homo sapiens
tctcctgactgtttaagtacagtgacatcttccccatgtcatgtcatggtgaatcgattatatgaaagtatataaaattcagctttgggcacaccaactcctgctttcattatttagggtctcacccaggacccaattcttgccttgtttttatctctcttcaactcccaggatcttgtttcttattcatttgcattcttattttgattatttccaactttgactttcccctgcctatactgccttagccaagggacggacatttaaatcttctccccacacaagaggcccctggcctggccaccttctacccgatgagatattggacataaatagacataaagaacattactactttctaatttaattctagtttcattttttcctgtcccagtcagagaaagcccaccattgttttattagaaaatgatgggggatgctacaaagttatgtaactaaaatattgcatgtgcaagaggatcactttktactcaaattcatatgatggagatgacaaacatgatttcaaattgctttacaataaatactggttttaaaaa

SEQ ID NO: 165423 - DNA, 547 bp, Homo sapiens
gagatgagacagatgtgtagattgaaggagtcttgaaaactgagaagtgtggcagatattgtagggagcacagatagaaatgctttgaaaattaatgggacatgatgacttactgaatgtggttggaagagaaaggaaggatcccgaaagaacctgtcagtgatgtcatgtgtgagtgtctgtaaccaatatgtggtgataccttgtattgagaatggaatgcacagggattggtttccacttatttaggttatgccccctcctttcctcccgatttcycctattactttcaactattaacagtatgtttgcaaagtaagaaatgttatctcaggttgatgtttagcttgagttttcagagctagctcacaaatgctgaagttctagatttggaacatccgagaacacggaaatctaccaagctgatgaattagaaacctggagaataattactgaataattttgagaagtgttgaagccactgatttttgtctaagctgtcattcactgggcatgataaatgttagaaatactaattaaaagcctt

SEQ ID NO: 165424 - DNA, 556 bp, Homo sapiens
agggcagagggtagagatgagacagatgtgtagattgaaggagtcttgaaaactgagaagtgtggcagatattgtagggagcacagatagaaatgctttgaaaattaatgggacatgatgacttactgaatgtggttggaagagaaaggaaggatcccgaaagaacctgtcagtgatgtcatgtgtgagtgtctgtaaccaatatgtggtgataccttgtattgagaatggaatgcacagggattggtttccacttatttaggttatgccccctcctttcctcccgatttcccctattactttcaactattaacagtatgtttgcaaagtaagaaatgttatctcaggttgatgtttagcttgagttttcagagctagctcacaaatgctgaagttctagatttggaacatccgagaacacggaaatctaccaagctgatgaattagaaacctggagaataattactgaataattttgagaagtgttgaagccactgatttttgtctaagctgtcattcactggrcatgataaatgttagaaatactaattaaaag

SEQ ID NO: 165425 - DNA, 577 bp, Homo sapiens
ggtttttaaggaccaggcctggaggtgccacatgtcacatcaatctgcatcccctttcatcctcagacacatggcttcacccaggatcatgaaaattgtttgaaaaatatctagccagtctctgctacaccaaccaaagtttggtaagaatgaatgttcttttggttacgtcttccttcttccctccctccatccttccaacaaatatttaaggagaaccacctattaagtatcaaacactctaagctctrtggaacacattagcaaagaaaaacagacgttgccccttccccccatggagctaaacacctggtgtggagaaatcacacaaaaagcatgtaaagttgcaactatgagtaatgtctttttttttttaactttttaagttttttatataaagaggtggggtcccactatgttgcccaggctggtctcaaactcttgagctcaagtgattctcctgcctcagcctcccaaagtgctgggattacaggtatgagccaccacacctggcctgcctactactttgaagcaaggtgtgtgataccgtgaaacctacaaggttaggagtttactc

SEQ ID NO: 165426 - DNA, 593 bp, Homo sapiens
aaccactgccttaaactctcaataaagtgtgcctgtatttggaccgcagctttwcagcatgagagcatcagatgggctctgagtctcaggtgtgactttgaacttcttagccccaacccccaacccctcaccaccaccatgctttgctttgtttgcttgccttgtacttgaagtgtcagccagaaagtggactttgtttcctacactaatttagggccttatattctctccagcctcattggcaataggatgaggatggatcacaaattctttaaagggccaaaggaggctcctccatcttgcctctgctatttcataccaaacagactcatatttgagtcttacatctttgaaaccccagccagcccattctaagtctaggtgacacagaaacctgctgggatgtagggttttaattattcatatctatgtcttatctgtcatatgaaagaaaaccctatcactagccaaaaaaaaaaaaaaaaaaaaaaacacaaaaaacaaaaaaaacgaactaactggctgtctcaggaagcactggcatttgaaaacctcccggagacagcagtagatagtgactaaagacacagact

SEQ ID NO: 165427 - DNA, 526 bp, Homo sapiens
ttaagtccagatgatcaagtaaaatagaaaatactagttccccagccccatgattttatcctctcctcttccactgctcaaggtagttccatgtcttccatgtagttttttctttgctgcccccatcttgctccattctgttttctgaattctccattcttgccaagccctataatctaagttctgatccttatacatgaccctctctgttttcctccaaacatcacattttcccaccatttctcctttctcttttcaatcccagactcctactttcaatcatagcattttctcttatcaggctccgactgaatactttccctattaaattccatgtctcctctttgaccccacaatctcttgagctttccyctagtttgtcttcttagtatgtttccccttcactctcagtgacgtctcttttatctcataattggcaagcatgcagcttgccccaaaccagaagtgcctgattcaattccacagctatccattaagccccctaatatatgttaggtaggtgcta

SEQ ID NO: 165428 - DNA, 607 bp, Homo sapiens
agaattttttagaaaactcccattaagtatttcagtctgcagcaccaaatgaaaggtgctcaaatatacccaaagaagtctctgaaatttcaataagtccttatacctagctgaaactacctcagaaaataatagctttacttcttgtttatctttccaatttcccatgactttcttttctcattgccaaattccatcctgaaaatacagggatagaaattctgggaaatggaattttcttgttttaatgtaaagtgacttaaaaagatctggtgatggccccaggtgatggtaccaagtagactacagataatccagagtatggttatattttagatattgagaaggtgctaggaacataagcatcgtcaagacaaaacttcccctgcactgagtgttgttttcctctctctctctctctctctctcwcacacacacacacacacacacacacacacacacacatcactcactttccagtggggaatgagtggataattagtaattaataaaagtagagttattttatagaggatgagaacacaaagggccgcataatcaatccatttgtgacatgtgtagtctagttgtagggtgatggaaatat

SEQ ID NO: 165429 - DNA, 567 bp, Homo sapiens
cattcagaaaaagaatgtagttaggctctcctctcacatcagccaataaacttcagaagaattttttaaaaaaaggatatagaacttatcagaaactcaaagaatttttaaatatcggtatttttagcagaatttttaaataaattttaagagaaactattttgtttgattattttgaataattgtaaatgcaacctttactcttctaaatattttagtaatatatttatatcacaaaattaaatatctggaggatcagtttctagaattgtttcagaagccaatttcagaaaatccctgattttgtggcayttcctcacacctcctgcatcatggttgctagttgtagctatcacattcttatttaaagcaacattaaaattttgaagctacatggttgctccacttttcaaatggatgcagaaagagaaagcagttgatcatgattagggtaagcaattagcaagatcaaactcattagggagacacaaaccttaacattgtaatgcaaatatagataacacacagtgaactgagttaaaaatcactgaatgataaaatagaaaa

SEQ ID NO: 165430 - DNA, 575 bp, Homo sapiens
ctaacaaaaaaaaaaaaaagagatgatttcagaaacttacttgtagatcatgttgactattcacaattacaatagttctatcaaaaaattattttaattgcatggtctgaaggatccaatcatgagaaattaaagtaatatacactttgagatattcatatattttcatcttttatctgagtatgtctttttgataattkatttatatattctgccttaatatttcattttattataaagataagacttttaaatttggtggcagaaacctccagggaatagggataaaatgtttcacaaacttaaactaaggagataatttcatatcctgattttgtggctgtcacattttcctcttagaaatagatcatgaaacttttcacaaaataatatttctagattcttgctctccatcatcatttggccctctctcatttgaaattctcagaatagttaaaagggtaaaaacgcctgcagtctaatccttactgcattacatttgctatatttctgtcaccgttgaaacctttgtataaacttcaaatttcacctctgcagttttcagtgggttgagg

SEQ ID NO: 165431 - DNA, 700 bp, Homo sapiens
gttaggatattaagtaatagacatttgcagaaaattatagtattagtacaatgcaattattagtgacatttggtctaaggaattgtcataaaaataagaatacaaatgtctagaacactagaaattacagttaacaaatgcataaatgtatcacttatttcaagaaaatcacaaactttggaatggaaagccattcttaaatgaaatatttcaactttcctcaaagtttgcaacaatgtagtacattttcacttttaaaatttgaaacattacagtacagttgaccctgtctatgaatgggttccacatgcatggattcaaccaactgctgatggaaaatatatttttttaaaaaaaggatttttgtgtctgtactgaatatttacagaatatttgttctttataccttaaaatacagtataacaaatgtttacattgtattaggtattataagtaatctataaaagatttaatatatacaggaggatatgcttaggttatatgcaaatcctacaccattttatagaaggtatttaagcatccataaattttggtatccttaggggttctgaaacaaatccctyatagatatcaagggacaactgtgataattcacctcctgaaataaccctgcttatgtaactacatatattcaattatcatttaggaataagttattcactagtaaatggaaacaaat

SEQ ID NO: 165432 - DNA, 461 bp, Homo sapiens
gaattcagcaaaaaagttttattaatcaggaagagagggctaggtgaaaattagagaacactttcatgtcatatacactggagaaattcccaatttctctcaggtttttctccaaaaacagcaacaggtatgcacaaaaattatttgagtatctgaagaaagccttgcttgtcatgcaggctttggggcagaatggacagtggcccctgttttaayggcattaacatagattgttctcccctaactccttcataatgaaagcgtaaaactgctgaaaatgacaaataatttagtataaatgaaacaatgcaggaaaaaagttggaagtttcacactgctctcatgtgatgtccaaacctactgcaaattatcatttatcacaatgatgtcatatcggaaaaaatatagacatataaagcagaaaaagagaaaagagatcgcagaagtagtactgtacatat

SEQ ID NO: 165433 - DNA, 461 bp, Homo sapiens
gaattcagcaaaaaagttttattaatcaggaagagagggctaggtgaaaattagagaacactttcatgtcatatacactggagaaattcccaatttctctcaggtttttctccaaaaacagcaacaggtatgcacaaaaattatttgagtatctgaagaaagccttgcttgtcatgcaggctttggggcagaatggacagtggcccctgttttaacggcattaacatagattgttctcccctaactccttcataatgaaagcgtaaaactgctgaaaatgacaaataatttagtataaatgaaacaatgcaggaaaaaagttggaagtttcacactgctctcatgtgatgtccaaacctactgcaaattatcatttatcacaatgatgtcatatcggaaaaaatatagacatataaagcagaaaaagagaaaagagatcscagaagtagtactgtacatat

SEQ ID NO: 165434 - DNA, 487 bp, Homo sapiens
ctactgaaatctaatcaatatgtcctcactgccatcaattcaaaagaacttgctaagaaggctctagaggcttgtactctcagatagtgaaagtgagawgatgtgtagtgaaagtcatatataggttgtaaattgcaatatggaattcccaaatgctgaattcattttatctcttcggaaataaaaacctgttaaagactcatttgattaagtgatcatatttgaaaacacttatcctacaggaaacactgccatgtctttaaaaacactgtcatctgtctatgtctactccattcattgtccatgtgtttacaacgaagtattaatatatagcaagatcaacataagaatgatgattaattcttggataatcccaaaggattgatgggttcagaaggtctctctggaccagtattcattgtacaaactctgtcttggatcaacttttcaaaatcatacagatgctttagttttattgtttatatcc

SEQ ID NO: 165435 - DNA, 487 bp, Homo sapiens
ctactgaaatctaatcaatatgtcctcactgccatcaattcaaaagaacttgctaagaaggctctagaggcttgtactctcagatagtgaaagtgagaagatgtgtagtgaaagtcatatataggttgtaaattgcaatatggaattcccaaatgctgaattcattttatctcttcggaaataaaaacctgttaaagactcatttgattaagtgatcatatttgaaaacacttatcctacaggaaacactgccatgtctttaaaaacactgtcatctgtctwtgtctactccattcattgtccatgtgtttacaacgaagtattaatatatagcaagatcaacataagaatgatgattaattcttggataatcccaaaggattgatgggttcagaaggtctctctggaccagtattcattgtacaaactctgtcttggatcaacttttcaaaatcatacagatgctttagttttattgtttatatcc

SEQ ID NO: 165436 - DNA, 575 bp, Homo sapiens
ggcgggcacttgcagtcccagctgctcaggaggctgaggcaggagaatggcgtgagcccaggaggcagagcttgcagtgagccgagatggtgtcactgcactccagcctgggtgacagagcaaaactctgtctcaaaaaaaaaaaaaaattccatcatatatgtgcattttctttataacaggtaacatcattcatacagtcagggaagaacaagcttttacaataaatggcgtgagattaacagtaaatctaaataaaaaaatgtgaaactttatctctacctcatacagtaatcccccttccgtatgtgtggcttcctactccagaatttcagttgcccatgatgaacctccatccaaaaatattcartggaaacttccagaaataaactatttgtaagttttaaatagcgtgcagttctgggtagcatgatgaaatctcatgctgttcctcccaggatgtgaataatccctttgtctggtatatccacaatttagatgctccctgtccatgagtcatttgggagctgactcagttgtcaggttgactgtcgcagatcatcacagtgcttatg

SEQ ID NO: 165437 - DNA, 619 bp, Homo sapiens
cacacacacaaacacaatatttagaagtatcattatttatcattgctatttaaattatgtcctaaaaccaatactttgattacctttctgctctcctccgtctttcctgtcaggatatcagtttctagtttggttatataagtggttaaaatttatatggactgctccaaggtgttacattaccatgtggagttggaccaattgctactacttccataattaatatagcaatgtgatgcagagttccttttttattctttttgtaaaagcctattttgaagagatttatagtttcatactggaagtgaatttatttccatagatgcaagagttctgctgctgcttttgacagtaaatatagatgactctcatccaacttactaaccaaatgcaagcttgcttatatgtcatagaggacattactgttcaaagatgaaagtaaaattgatggttgggtactaagtgatgaggtacataatccacttaccaagaaagatatttaaatttgaaacacattaaatggattttacttcaaagycatcaattgggtatatattaattcaattttggagcatcacttctgaaactaacagtttttttttcaaaacaataagcttta

SEQ ID NO: 165438 - DNA, 622 bp, Homo sapiens
gcattctaagtctacttgagtggtctaggatctctaattcccccagacacttttactcatccaaattgtacctgtttcctttgggcttctaacaaatcaacattgaattccttctctatttcatctaacttaaagaaaagtacctcctttataaataaaactgccaaaccaaatgctcataaatctggctgttcttgaaacaactgaaggctctgtattgctgactacacacggatttttctttcttttcatacttaagtcaaatccaaccgtgtgtttccaaaggagccaaggcttccactggtgctgggaaaatactgggcctcagtccatcaaagaaaatattaactcacytaagttaatagccaaacttgcctgatactcttcaaagtctgaagcaaaaaataaagctgagtctcattgtagaaagagttacatagatagaggctcattgttctctgtgccagacctttttgtaacgccaaaaagctaaacgttatgaatttaggctcttgcagcatttaagagatacaagcaaaattgtgatctctcaaaatttgtgtgtgggctttcatatagcgtcaaaagaaagctaatctaccaataaaaacactattaaaag

SEQ ID NO: 165439 - DNA, 460 bp, Homo sapiens
tgctaaaaccataactattttattcaccaatatatcccctaacatgtagcacagtgcgtagcatgtggtagwtattaaataaatatttaaacaaatggatgagtgaatggtctgttaatatgaagtgactgaggttatgtttcttctgatctgcattttttgtgtgtttgcttttttgttattgacatggacaactacatactaccagtttcacagctaatttgtaagcagtttaaaagaataatttacaagccacatacacatacacacacacacacacacacagagttccctgcagtcaacttgctttgcagctttcaaatccaatggcaatgcctttaccactatagacatttccatttcagaagagacagtggtcaatttacctaacatgcacttattgagaaatgaacatgtggtatatcagggtctggcaaccagaaatggaatttgcatggta

SEQ ID NO: 165440 - DNA, 455 bp, Homo sapiens
atccaattacttccctcctttgacacatggggattacaggtctctccctccacatggggaaattacaattcaaaatgagatttaggtggggacacagagccaaaccatatcagtttgagactctgctcagtcccttcctaggtgagaaaccttgagttacagtttgcccatctgcaaatgggctacctcctggtatggctatgaggaatgaagtgagatctgcagagtacctggcttttcttyggtggtcaataaatggcactctcacttgactaatactgagtacaattccagttatcttgggagagactaggaaatctgcagagagagggaaatgcgtaagagaggccacattaaaaataaaatttaaatcctggcagacagaagggggatgatgattgtgaatctctagggacctaaatgtgaaactggtcttatttatttatttttgtcct

SEQ ID NO: 165441 - DNA, 410 bp, Homo sapiens
ggggtgaattgatgagtaagaaactgtaatagcaaccctctggacctactaggcatctgtaattggtaggcttttccgacattttttccttcacagacttagcaaccgaagcacaaggtggattaaataaatgactaaataaaagagaaacagaaatatcatatcctggctccagatccatgattgtcagtagtgtgttacagtgtttttaccagtaacagttagcattgccttgattataagcaaacaaaagtagattttatttagcttaagcaaaaaaaaaaaaaaaaaaaaaaaaamaattattggcaggctttgagtagttcactatatagactaaaggatataggagaatgagacttgagaattgacagaaagcagagtagattggggtttatgcatagcaagtg

SEQ ID NO: 165442 - DNA, 442 bp, Homo sapiens
tctctgggcagggcatctctgaaaaaaaaggcagcagccccagttaggggcttatagataaaacccccatctccctgggacagagcacctgggggaaggggcagctgtgggtgcagcttcagcagacttaaatgtccctgtctgacagctctgaagacagcagtggatctcccaggacagcatttgagctctgctaatggtcaaactgcctcctcaagtgggtcctcaacccytgtgtctcctgactgggagacacctcatacaggagagctctggcggaggcccctctggaatgaagcttccagaggaaggaactggcagcaatgtttgctgttctgtagcctccactggtgatacccaggtaaacagggtctggaatggacctctagcaaactccagcagagctgcagctgagaggcctgtgagaaggaaaactaacaaa

SEQ ID NO: 165443 - DNA, 503 bp, Homo sapiens
tacctaatttcacagaattccttaaaaactatataaaacgttctttgtgtgacaaaaactagtgatactagggttttaaaaatcaaaggccacatatttattgtttttagtaacattcagatgagctcccccatcaaccatcaatgcatcccmacacacacacacacacacacacacacacagagacacacacaaatatagcagaaattaaagccacctcgtgctgcgttaagtgcatgaaccataatatacaccaggtgtagtaattagcaggcacacgaaggctgcctatttgtctggttttgctgctgttgctgtatccccctgtgttttcacaccatcagatagttggacttaattgaggccacatcagatgaggcattactgacacctttaattgaatgagcatccagggaggattaactcataatattgattggcttttagccacttgctcagaagggtgtccgggtagcttattagttgcctttatttacaccttt

SEQ ID NO: 165444 - DNA, 490 bp, Homo sapiens
aacagtttctccgtctataataatctcatttaaagtgtgtccaaaacacttaacatgctttgtttaggaacatcatycctatgcattttttaactatgtaaaaatagatagatctctgagatgctgagtctccagctggttgttcaccagacacgtacacagactggtgcaggattgtgttttgcaagacaaatgggactgtttaaattgagttttaaggcagaggacatgacttccaggattcttgcacatctgcacactaaagatctgctcatatctttgaaaagtgactcatgctttaaacataaaggaaacaaagatgtcctcttgacaagcaaagtaggtctcttagcctccaggtccctaactcccatctactgtggaagcaaagattcaagtttgacaaaatgcaaaactaaaccaaaggattcgtgaatgcccagaaaaatggagaagcagcaactaaggctattcttgaatctcattttaa

SEQ ID NO: 165445 - DNA, 481 bp, Homo sapiens
tttgtcattgaccatcagatctcaagggcatagcgccttgtctggtcaataaaggttgactgaaggaatgaacagaatagatgaacaggtcctgaggccactttaactttgttattgtgccttagagcacaggaaacatcctttaagatgtgcattggtaaraggcatctttacctcaattatttctgtcttcactgaaccccaagttaaaccttcccagatcaggagttcaaactgtctctttaaataaacagactttcttccctagctcctgtttttctctcaacttgtttcggaagttctgagcacataccacgtcagaccattatgctggtatgactaatgttttaccctggcaaatgcgtagtttgcaggaagtgattctgcccatgttaggtctctaagtaaaacaacaaaatgacaatggggatgtctacggcaatgggaatggggatgaggaagacagtgccgctgaatggaa

SEQ ID NO: 165446 - DNA, 627 bp, Homo sapiens
tctaacacacatattttctttgggagacacaccacagctctcttatgcttcaaacccctagacagcacgtcactactgtgcttgggagcatgttaaacaccaaaatcattcaccaggagcacccaaaagtaaaaaacgatgacaccaagtagaccataaaaaagatacttgtttacaaaatgagagttgaaasaaaaaggcagagagtcaccttgtttgacctaagctgggaagatgcatatcaggtgactcaaattctttgctgctctgtgcatatccatgaatgcaagtgaaagtattgagttttggaattacaaagaaattttagtgagttgacaatttgcaaataagaaattcgtgaatgatgaagatcagctttatgctcagtttttgtagatcctgagagagtttcttaaaatggttatacaaatgtagtttttgagaagtgcatgggtaaaaataatatattattttaatttgcattttactaaggactattctaattaagtcagtatgtgagagatctggttgtgccatactgatacttggttattttttgcctttttctttttagccagtgtggtgggtggagttggctgcccaatagaataagtttgtttgtttgtt

SEQ ID NO: 165447 - DNA, 627 bp, Homo sapiens
tctaacacacatattttctttgggagacacaccacagctctcttatgcttcaaacccctagacagcacgtcactactgtgcttgggagcatgttaaacaccaaaatcattcaccaggagcacccaaaagtaaaaaacgatgacaccaagtagaccataaaaaagatacttgtttacaaaatgagagttgaaacaaaaaggcagagagtcaccttgtttgacctaagctgggaagatgcatatcaggtgactcaaattctttgctgctctgtgcatatccatgaatgcaagtgaaagtattgagttttggaattacaaagaaattttagtgagttgacaatttgcaaataagaaattygtgaatgatgaagatcagctttatgctcagtttttgtagatcctgagagagtttcttaaaatggttatacaaatgtagtttttgagaagtgcatgggtaaaaataatatattattttaatttgcattttactaaggactattctaattaagtcagtatgtgagagatctggttgtgccatactgatacttggttattttttgcctttttctttttagccagtgtggtgggtggagttggctgcccaatagaataagtttgtttgtttgtt

SEQ ID NO: 165448 - DNA, 589 bp, Homo sapiens
tttcaataaatgcagaaaaataaaattaaacacccatttatggggaaaaaaagctctcaactgactacaaacagaataaaacttctttatctggtaaaagctatttcctgcaaacattaaacttagtagtgaaatagtgaaagatttcccctaatgtaagaaatgaaacaaacaggcacacttcactagacattgtaggagaaaatgctaaagtctgtgaatataattgtagatttatttaattcatctttcagttatttaagtttttgctccagtgttttgaagctttgttgttaggtacatgcatattcaagaytgttatattttcttagtaaattgcccttttttataattatattatgcctgtatttatttctggtactatttattcttctaatgtctattttgtctgatattaataaagccactccagctttcttttgtttattgactgcatggtacatcattttctatttttttctttttttaaaaaaattattttaaactttataaagatataattcacaccataaaatttacctgtttaaagtctacaattcagtgggttatcgcatattcacagagttgt

SEQ ID NO: 165449 - DNA, 572 bp, Homo sapiens
gaaataaggttggatgaacaaattgaaggatggtaaatgtgggggattttatttctgatgaaagtggctaatagccagaaggagagctgacaaggagatggggtgagaaggtaatcttctcctgaattccagccatctccggctgggttcttctccgaagttacaccatcatgctggccctctgagatcaagctgcttctctcygacatccagccatagtctctgatgtcaagctacttctcctctctctgcctgctgagtatagggttttcatagccacaggatggggcggggtggggccagggccatgggtagttttggaaaaagcaatatttgggtgggaaaacagggaataagttcccatttcgggccatggtttcaggcttgagggtggggttttgccagggacccaccgctgtctgcctagaatttctctacctcctgtcctgatcataattgtctatgtggaaatctaatgaatgtgttaaaatgctactagaattagtaaatgaatttaacaaaattgtacaatataggatcaatatataaatgttaaatgtatttctacaaac

SEQ ID NO: 165450 - DNA, 570 bp, Homo sapiens
tctgcagaacttctccatgaagtagcctagctctttatttaatagacagcctaccctgtggatgtccctgacatctggccatggcccttgactcccactgtagtcttttttggtgatcaatgataataagcaaattactttgtagatgaatataatatctaaccaggtagccatagtaacatgaaaatgcttttcgggtaactagggaaaaaatggtttaatttctttctgttccacatttctagttaaccctttagagatttcattttcatcagtgatgccagtagtagcttagagttctctctctaatccacttagctaatttccctagggctatttccaccaatgccagttggtaagacttgtcccaagaatcttctacaaggctcttggcmcttcttatcaaggatttgttgggagccatcttgaccccaaattctcatgaaatgtttctttcccttctattttcataaatatgtcctgggtttgaaagataatctagacactgctacaaatttttgccatacatgttgaattgccaaagcagagatatgaatcaaaaatcttggt

SEQ ID NO: 165451 - DNA, 585 bp, Homo sapiens
cacaatctaagtaagtgtacattggaatcctaaggagtttttatattatatgagaatcatgtgatttttcccattcagactttatgtgccaccaggctaatataattagcagccatgttaacgcagatgcagaacaaaaaacaaaggacaaagaaaatgcaattgttttgatagggtgaaatgatcacacctyaaaggacctcagagattcttggtaattgttgctttttggaaatacggtatttgattttaaataaaataattcttttgcaaattaatagttgcaaagccctgcactaaaaaataggtgggtgtgtatgttttccttttgctctcaaaagatttttaaaaactttttatgtctttgcgctattatgagtagattgttttacaaataaacgaggtttctagactaagttatgactcatgtaccattgactgaaataaaagttaacccagttttgtttacttctcaagtgtttagtatgtgttcttgtaacatttgggcatcttttttttggtaactgtacaggaaaaaaggccaaagagactctaagttagaaactttattcagttgctttatta

SEQ ID NO: 165452 - DNA, 585 bp, Homo sapiens
cacaatctaagtaagtgtacattggaatcctaaggagtttttatattatatgagaatcatgtgatttttcccattcagactttatgtgccaccaggctaatataattagcagccatgttaacgcagatgcagaacaaaaaacaaaggacaaagaaaatgcaattgttttgatagggtgaaatgatcacaccttaaaggacctcagagattcttggtaattgttgctttttggaaatacggtatttgattttaaataaaataattcttttgcaaattaatagttgcaaagccctgcactaaaaaataggtgggtgtgtatgttttccttttgctctcaaaagatttttaaaaactttttatgtctttgcgctattatgagtagattgttttacaaataaacsaggtttctagactaagttatgactcatgtaccattgactgaaataaaagttaacccagttttgtttacttctcaagtgtttagtatgtgttcttgtaacatttgggcatcttttttttggtaactgtacaggaaaaaaggccaaagagactctaagttagaaactttattcagttgctttatta

SEQ ID NO: 165453 - DNA, 438 bp, Homo sapiens
ttcctaaaatgaaagtgaaataaagacattttcagaaaacagaaaactaataattttttgttagtcattctacccttaaaaaatgactatgaaatgttctttgaacagaaaaaaatgaaaagagaagaaattttgagcatcagaaagaaaaagaamcaagaaacaagaaagagggagaaatatgagtacatacaatagaatatccttctcattaatttcagaaacaatatttcataattaaaacaaatattattgatatttaaaagtgagtaaagcaatcacaatggaagtaaggttcccacgtttcagttgaagtggaaaatatcaataccaataaattgtgaaaagtcagacttgaatattgtaatatccagaacaaccactcaaaatctatacaaagtaatttaaaaatgctgtaactaaatcaagttggaattc

SEQ ID NO: 165454 - DNA, 438 bp, Homo sapiens
ttcctaaaatgaaagtgaaataaagacattttcagaaaacagaaaactaataattttttgttagtcattctacccttaaaaaatgactatgaaatgttctttgaacagaaaaaaatgaaaagagaagaaattttgagcatcagaaagaaaaagaaacaagaaacaagaaagagggagaaatatgagtacatacaatagaatatccttctcattaatttcagaaacaatatttcataattaaaacaaatattattgatatttaaaagtgagtaaagcaatcmcaatggaagtaaggttcccacgtttcagttgaagtggaaaatatcaataccaataaattgtgaaaagtcagacttgaatattgtaatatccagaacaaccactcaaaatctatacaaagtaatttaaaaatgctgtaactaaatcaagttggaattc

SEQ ID NO: 165455 - DNA, 399 bp, Homo sapiens
taaatattaatcttatctagaacatccttgcagatacacttaatatcatttgtcagcatatctgggtacccatagcctagtcaaatcaacacrtaaaattagctattataagttcatcccctgtcaacctggcagccatgtgtctcctaaaaccatacttaattgtcaattaaagaaaatagcaaggtcataattctgcctgatgtgatacaactatcctgtggcaaccaaaaatgcactaaccccttccctagaagaggaagcaaagtccttgagtggatgagggctgcctactttgaatatacatggatgtgtataaatacacatttttttctgttcctctagataaccttgactaatacaatcatcatgttcattccctgactatcttagctgaaa

SEQ ID NO: 165456 - DNA, 619 bp, Homo sapiens
gagatctatttctgatgtatttccaaggctaaaaacaaaaaatgctgttaatgcataaacagtcaaaaagctacgcattgtggttttacagggacttctatttctaaagatgatggttgcatgagggcctctgcctttataagggaaatgtgtagattttaactagctctgtattataatgtttgtgttttgaaaaagaaaagcatgtttctgcactaaaaaataaattcctaatcaaacctttaaagttaacatttagaacagggacagaaatttctattgtttcctaagtgttttgttgctgttgctgtttagatttaaatcattttttagaagktttactgaggcataattgatataaaaaattatacacctttaatatattcacttggatgagtttggacatgtgtgcatacaccaataccatcatcacaaccaaggtactgaacatacttattcacctccaaaaattttcttttgttcttttttaatggtggtagtatatttttaagaattcagcctttgagcagggtacgaaggaccttcaacaacaaatgcaaaagtaaatgagctaagttcatataaagggttagctctcagtgagatattcaagttatga

SEQ ID NO: 165457 - DNA, 201 bp, Homo sapiens
tgctgttgctgtttagatttaaatcattttttagaagttttactgaggcataattgatataaaaaattrtacacctttaatatattcacttggatgagtttggacatgtgtgcatacaccaataccatcatcacaaccaaggtactgaacatacttattcacctccaaaaattttcttttgttcttttttaatggtggtag

SEQ ID NO: 165458 - DNA, 557 bp, Homo sapiens
atacacctttaatatattcacttggatgagtttggacatgtgtgcatacaccaataccatcatcacaaccaaggtactgaacatacttattcacctccaaaaattttcttttgttcttttttaatggtggtagtatatttttaagaattcagcctttgagcagggtacgaaggaccttcaacaacaaatgcaaaagtaaatgagctaagttcatataaagggttagctctcagtgagatattcaagttatgatcatatcctcaagaggcttgtaarctgactgtgggtttccagtttggttattcacagataggccttcatttgctcatttacctattcattcatatagccactcattcattctcaagaagaggtatttgtccatatctcaccatgtggatgagcagatggtcagttctcacttcttttgccattaagtgtgctcaccgttgagctccaggatggtattttctctcactttgcatcattaccgaagtggctatcaagattccctcccctaccttctttttcttttttcaatgtttaagagctggagt

SEQ ID NO: 165459 - DNA, 557 bp, Homo sapiens
atacacctttaatatattcacttggatgagtttggacatgtgtgcatacaccaataccatcatcacaaccaaggtactgaacatacttattcacctccaaaaattttcttttgttcttttttaatggtggtagtatatttttaagaattcagcctttgagcagggtacgaaggaccttcaacaacaaatgcaaaagtaaatgagctaagttcatataaagggttagctctcagtgagatattcaagttatgatcatatcctcaagaggcttgtaagctgactgtgggtttccagtttggttattcacagataggccttcatttgctcattyacctattcattcatatagccactcattcattctcaagaagaggtatttgtccatatctcaccatgtggatgagcagatggtcagttctcacttcttttgccattaagtgtgctcaccgttgagctccaggatggtattttctctcactttgcatcattaccgaagtggctatcaagattccctcccctaccttctttttcttttttcaatgtttaagagctggagt

SEQ ID NO: 165460 - DNA, 557 bp, Homo sapiens
atacacctttaatatattcacttggatgagtttggacatgtgtgcatacaccaataccatcatcacaaccaaggtactgaacatacttattcacctccaaaaattttcttttgttcttttttaatggtggtagtatatttttaagaattcagcctttgagcagggtacgaaggaccttcaacaacaaatgcaaaagtaaatgagctaagttcatataaagggttagctctcagtgagatattcaagttatgatcatatcctcaagaggcttgtaagctgactgtgggtttccagtttggttattcacagataggccttcatttgctcatttacctattcattcatatagccactcattcattctcaagaagaggtatttgtccatatctcaccatgtggatgagcagatggtcagttctcacttcttttgccattaagtgtgctcaccgttgagctccaggatggtattttctctcactttgcrtcattaccgaagtggctatcaagattccctcccctaccttctttttcttttttcaatgtttaagagctggagt

SEQ ID NO: 165461 - DNA, 622 bp, Homo sapiens
aagcttaaaaaaaacccagaaatatgtgcaacacctatttacaaagaatccactgggaaacccccattgagcccaggtagatggcacatgtcccctttgggcatgtaactcagttccctgagggtcagtatattgtctttgtttcaaaggtcccaaggcaaactttttaataattgtgrtcccactcaatagtcatgttcacttactttatgggtacatttgtggcatattttaaaatgcgaagttgagtgcatttcacttaaaaaccaaaggcatgtaatgacaacatgctatagaggaaaaattattgatttgtgtaaataggcagatcttgtttgtattctagctccatcacttactaattttgtgatatgggcaatttatatcctatctgagcctgtgtttcctctacaatatgagataatttctactttgaagtactgttatgagggttaaatataaattactttctggtttatgatgttggtatatactatttccatgcatgatagttatttttatgaataagattttaacagtaagccatagaaaaatacaatgtaagactgattcttagtatctatcaaaacagattgtaaaaatgacttaaacatctagcatg

SEQ ID NO: 165462 - DNA, 622 bp, Homo sapiens
aagcttaaaaaaaacccagaaatatgtgcaacacctatttacaaagaatccactgggaaacccccattgagcccaggtagatggcacatgtcccctttgggcatgtaactcagttccctgagggtcagtatattgtctttgtttcaaaggtcccaaggcaaactttttaataattgtggtcccactcaatagtcatgttcacttactttrtgggtacatttgtggcatattttaaaatgcgaagttgagtgcatttcacttaaaaaccaaaggcatgtaatgacaacatgctatagaggaaaaattattgatttgtgtaaataggcagatcttgtttgtattctagctccatcacttactaattttgtgatatgggcaatttatatcctatctgagcctgtgtttcctctacaatatgagataatttctactttgaagtactgttatgagggttaaatataaattactttctggtttatgatgttggtatatactatttccatgcatgatagttatttttatgaataagattttaacagtaagccatagaaaaatacaatgtaagactgattcttagtatctatcaaaacagattgtaaaaatgacttaaacatctagcatg

SEQ ID NO: 165463 - DNA, 622 bp, Homo sapiens
aagcttaaaaaaaacccagaaatatgtgcaacacctatttacaaagaatccactgggaaacccccattgagcccaggtagatggcacatgtcccctttgggcatgtaactcagttccctgagggtcagtatattgtctttgtttcaaaggtcccaaggcaaactttttaataattgtggtcccactcaatagtcatgttcacttactttatgggtacatttgtggcatattttaaaatgygaagttgagtgcatttcacttaaaaaccaaaggcatgtaatgacaacatgctatagaggaaaaattattgatttgtgtaaataggcagatcttgtttgtattctagctccatcacttactaattttgtgatatgggcaatttatatcctatctgagcctgtgtttcctctacaatatgagataatttctactttgaagtactgttatgagggttaaatataaattactttctggtttatgatgttggtatatactatttccatgcatgatagttatttttatgaataagattttaacagtaagccatagaaaaatacaatgtaagactgattcttagtatctatcaaaacagattgtaaaaatgacttaaacatctagcatg

SEQ ID NO: 165464 - DNA, 611 bp, Homo sapiens
atttacaaagaatccactgggaaacccccattgagcccaggtagatggcacatgtcccctttgggcatgtaactcagttccctgagggtcagtatattgtctttgtttcaaaggtcccaaggcaaactttttaataattgtggtcccactcaatagtcatgttcacttactttatgggtacatttgtggcatattttaaaatgcgaagttgagtgcatttcacttaaaaaccaaaggcatgtaatgacaacatgctatagaggaaaaattattgatttgtgtaaataggcagatcttgtttgtattctagctccatcacttactaattttgtgatatgggcaatttatatcctatctgagcctgtgtttcctctacaatatgagataatttctactttgaagtactgttatgagggttaaatataaattactttctggtttatgatgttggtatatactatttccatgcatgatagttatttttatgaataagattttaacagtaagccatagaaaaatacaatgtaagactgattcttagwatctatcaaaacagattgtaaaaatgacttaaacatctagcatggcagtgactaacattttgaaaagct

SEQ ID NO: 165465 - DNA, 462 bp, Homo sapiens
catgtgtaggcaggttgtcttctctaattatcctcagtccccaccattccatagtgtccccagtagagatactactgacatttttcatttgttgccataattyagctgttgtttttcatagtcagcttgccttctttattttaatatttatataccatgtaggcatctcagtgtttcactcttgctgtgagacagccatagatcccttttgacctagagttttttattctttctttttcaaaattattttccctaaaagaatggaacctataagcctccaaatagtgcatttaaactcaatcacatctagaaaacaatgctaaactattcagaaagaatgaagagaataagtgaattctccaaacccagagctaatgagtgccagctctgaaaatgaagtccttgattcttgacatctggcctagtgtgcctaggaagtataatcggttactctgactcagt

SEQ ID NO: 165466 - DNA, 462 bp, Homo sapiens
catgtgtaggcaggttgtcttctctaattatcctcagtccccaccattccatagtgtccccagtagagatactactgacatttttcatttgttgccataattcagctgttgtttttcayagtcagcttgccttctttattttaatatttatataccatgtaggcatctcagtgtttcactcttgctgtgagacagccatagatcccttttgacctagagttttttattctttctttttcaaaattattttccctaaaagaatggaacctataagcctccaaatagtgcatttaaactcaatcacatctagaaaacaatgctaaactattcagaaagaatgaagagaataagtgaattctccaaacccagagctaatgagtgccagctctgaaaatgaagtccttgattcttgacatctggcctagtgtgcctaggaagtataatcggttactctgactcagt

SEQ ID NO: 165467 - DNA, 462 bp, Homo sapiens
catgtgtaggcaggttgtcttctctaattatcctcagtccccaccattccatagtgtccccagtagagatactactgacatttttcatttgttgccataattcagctgttgtttttcatagtcagcttgccttctttattttaatwtttatataccatgtaggcatctcagtgtttcactcttgctgtgagacagccatagatcccttttgacctagagttttttattctttctttttcaaaattattttccctaaaagaatggaacctataagcctccaaatagtgcatttaaactcaatcacatctagaaaacaatgctaaactattcagaaagaatgaagagaataagtgaattctccaaacccagagctaatgagtgccagctctgaaaatgaagtccttgattcttgacatctggcctagtgtgcctaggaagtataatcggttactctgactcagt

SEQ ID NO: 165468 - DNA, 462 bp, Homo sapiens
catgtgtaggcaggttgtcttctctaattatcctcagtccccaccattccatagtgtccccagtagagatactactgacatttttcatttgttgccataattcagctgttgtttttcatagtcagcttgccttctttattttaatatttatataccatgtaggcatctcagtgtttcactcttgctgtgagacagccatagatcccttttgacctagagttttttattctttctttttcaaaattattttccctaaaagaatggaacctataagcctccaaatagtgcatttaaactcaatcacatctagaaaacaatgctaaactattcagaaagaatgaagagaataartgaattctccaaacccagagctaatgagtgccagctctgaaaatgaagtccttgattcttgacatctggcctagtgtgcctaggaagtataatcggttactctgactcagt

SEQ ID NO: 165469 - DNA, 552 bp, Homo sapiens
actgttggaattttactaaatattgtattgaatctttagacagctttggtagttctgctattttagcactattaatttgtcttcaaatccatcaacacagggttgctttcaatttgtttagaacttctttaatttctttcrgtgatgctttgctcttttcagtgtacaagtgttcacatttttcattaaatttattcttaggtgttttgttcttttagatactatcataaatggaatttgtttcctaattttgtttttggattatttatttctagcatatagagacatgaatgaatcttgtgtgttgaccttgtaatatgcacttttgctgaattttttattagctctagtagctttctgatggattttcttcagattttttttatatatagaattatgtaatctgaaaggagaaataatttattcctttccagtttggatacctcttatttgtctttcttgctgattgctctgctagaagttgcaatgttcactagtgattaaagcagacatccttgtcttgttcctgattttaaagaaaagtgttcagtc

SEQ ID NO: 165470 - DNA, 560 bp, Homo sapiens
tagcttttctttaaggcttctaatgggtgtacagttccaagagtgtaaagggagccttctcagttgtgagattatgaacccaaggttcaaggtcctgaagttttactgtagtgtgcatgccaatgacagtctttctttgatgttctcagaagatcagtcttcaggttctagtttatgaaggcattgattgtcctcagtgaaccataaaaaccttactttacctggtaaaaatacactgtagtataattatctactgctacaaagatggcagtggcaccccatctggagcagccactgccgtcacatcagctacagcggtgaaacatggtaaagagctggatacaagtgggaaacatgcccyttctgagttggtggagttagagcttcctgggaacagttgcagcagcccaagtagtggctgcagatctgggcctcccattccatggagcacacaggacacctgtccttcaagatgcaactacagatgcccaagccacggctgcagagtcaggcatctctacactcttgggggcacaggaaaaaaccccaggcccttgcag

SEQ ID NO: 165471 - DNA, 560 bp, Homo sapiens
tagcttttctttaaggcttctaatgggtgtacagttccaagagtgtaaagggagccttctcagttgtgagattatgaacccaaggttcaaggtcctgaagttttactgtagtgtgcatgccaatgacagtctttctttgatgttctcagaagatcagtcttcaggttctagtttatgaaggcattgattgtcctcagtgaaccataaaaaccttactttacctggtaaaaatacactgtagtataattatctactgctacaaagatggcagtggcaccccatctggagcagccactgccgtcacatcagctacagcggtgaaacatggtaaagagctggatacaagtgggaaacatgccccttctgagttggtggagttagagcttcctgggaacagktgcagcagcccaagtagtggctgcagatctgggcctcccattccatggagcacacaggacacctgtccttcaagatgcaactacagatgcccaagccacggctgcagagtcaggcatctctacactcttgggggcacaggaaaaaaccccaggcccttgcag

SEQ ID NO: 165472 - DNA, 531 bp, Homo sapiens
taggtaagggatgggtctcaggctgaagactgctctttaccatcctagtgtagcaggacgagctgcagacaaaactcctcagacaccgaattaaagaaggaaggggtttatttggccgggggcatcggcaagactcctgtctcaagagccgagctccccaagtgagcaattcttgtcccttttaagggctcacaactctaagaggtgcgtgtgagagggtcatgattgattgagcaagcagggggtatgtgactgggggctgcatgcaccagtaattagattggaacaaaacasgatagggattttcacagtgcatttctatacaatgcctgtaatctatagataacataaccgattaggtcaggggtcgatctttaactaccaagcccagggtgcggcgccaggctgtctgcctgtggatttcatttctgccttttagtttttacttctttctttggaggcaaaaattgggcataagacgatatgaggggtggtctcctcccttactagaagaaggaagaaactcacatt

SEQ ID NO: 165473 - DNA, 531 bp, Homo sapiens
taggtaagggatgggtctcaggctgaagactgctctttaccatcctagtgtagcaggacgagctgcagacaaaactcctcagacaccgaattaaagaaggaaggggtttatttggccgggggcatcggcaagactcctgtctcaagagccgagctccccaagtgagcaattcttgtcccttttaagggctcacaactctaagaggtgcgtgtgagagggtcatgattgattgagcaagcagggggtatgtgactgggggctgcatgcaccagtaattagattggaacaaaacacgatagggattttcacagtgcatttctatacaatgcctgtaatctatagataacataaccrattaggtcaggggtcgatctttaactaccaagcccagggtgcggcgccaggctgtctgcctgtggatttcatttctgccttttagtttttacttctttctttggaggcaaaaattgggcataagacgatatgaggggtggtctcctcccttactagaagaaggaagaaactcacatt

SEQ ID NO: 165474 - DNA, 580 bp, Homo sapiens
tagtgcaatgcctttaaggttcatcaatgtcgtagcatgtgacagtattttcttattttttaaggctgaataatgttacaattttaataattatatatcattatwataactgaataatatttacaacaatacaattgcattttatgtataagtacattttaaaatccattaatgacatttgggttgctttcacctcttggctattgtgaataatgctgcagcaagcatgagtgtgcaaatatttctttgggatcctgctttcaatacttttgggtatatacccaaaagggggattgctggaatatatggtaattctatttttattttttttaggaacctccctaccatttttcatagcatctgcgccattttacattcccattaacaaagcacaagggttccagtttctctacatccttgctagcatttgttattctgtttttttgatcctagacatcctaacaggtgtgaagtgatgtctcattgtagttttgatttgcatttcttgaatgattagtgatgttgaacatctgttcataggcctgttagctatttgtatatcttcactggagaaatgttt

SEQ ID NO: 165475 - DNA, 442 bp, Homo sapiens
atattgaagcaaattatttgtattttctttgttccttaagactctcataattcttaaatgattgagaatctcaaagagtatrtgtttatattgattatattgatatttagtgtggtagaattatacaattgaaattttttcaaaatctatttttagtttagatttcacagccttaccactgttgatattatgggctagataatgctttgttgtgaggactgtcttgtgcattgcagagagtttagcagtattcatggcctctaccaactagatgtccgtagtaacccatgacccaggttataacaacagaaaatattccttgagaacagtattgttaacagaattttttcattgaaaaataacttttctacaacaaaaagttgagtaaaaagtgcgtcatgtatttatattatttaaagtctctcatgttgagcttaatagg

SEQ ID NO: 165476 - DNA, 459 bp, Homo sapiens
gtgcctactaaaatattgaagcaaattatttgtattttctttgttccttaagactctcataattcttaaatgattgagaatctcaaagagtatgtgtttatattgattatattgatatttagtgtggtagaattatacaattgaaattttttcaaaatctatttttagtttagatttcacagccttaccactgttgatattatgggctagataatgctttgttgtgaggactgtcttgtgcattgcagagagtttagcagtattcatggcctctaccaactagatgtcmgtagtaacccatgacccaggttataacaacagaaaatattccttgagaacagtattgttaacagaattttttcattgaaaaataacttttctacaacaaaaagttgagtaaaaagtgcgtcatgtatttatattatttaaagtctctcatgttgagcttaataggagaca

SEQ ID NO: 165477 - DNA, 442 bp, Homo sapiens
atattgaagcaaattatttgtattttctttgttccttaagactctcataattcttaaatgattgagaatctcaaagagtatgtgtttatattgattatattgatatttagtgtggtagaattatacaattgaaattttttcaaaatctatttttagtttagatttcacagccttaccactgttgatattatgggctagataatgctttgttgtgaggactgtcttgtgcattgcagagagtttagcagtattcatggcctctaccaactagatgtccgtagtaacccatgacccaggttataamaacagaaaatattccttgagaacagtattgttaacagaattttttcattgaaaaataacttttctacaacaaaaagttgagtaaaaagtgcgtcatgtatttatattatttaaagtctctcatgttgagcttaatagg

SEQ ID NO: 165478 - DNA, 442 bp, Homo sapiens
atattgaagcaaattatttgtattttctttgttccttaagactctcataattcttaaatgattgagaatctcaaagagtatgtgtttatattgattatattgatatttagtgtggtagaattatacaattgaaattttttcaaaatctatttttagtttagatttcacagccttaccactgttgatattatgggctagataatgctttgttgtgaggactgtcttgtgcattgcagagagtttagcagtattcatggcctctaccaactagatgtccgtagtaacccatgacccaggttataacaacagaaaatattccttgagaacagtattgttaacagaaktttttcattgaaaaataacttttctacaacaaaaagttgagtaaaaagtgcgtcatgtatttatattatttaaagtctctcatgttgagcttaatagg

SEQ ID NO: 165479 - DNA, 490 bp, Homo sapiens
tcaacatttttcagattgatttgtcatgaatgttattccctgtccatctttttttcatctgtaactgtttattaggacttgttatgtaccagacattttgctagcaactttataagcagtatcccatgtaatcctcaaaatactctatgaggaatttttgttatttattctcctttacaggcaagggaatctaaatctcagggaagttcattacctgttccagtgttacagaggagaaaggtgatggaactgggatgttagttgcatccaggcaatccyacatcagctctcacttttaatctcttcccaactttgtctctctctatttcttttcagctgttaatgatttcatatgtatgattgattttgcctgactgagccaaactatattagcatgttattagattagaataacttaatctctttacttggagaaaaaaaaaacaaatcaattaaacaactgcactgatgagacagaggaactgtttta

SEQ ID NO: 165480 - DNA, 523 bp, Homo sapiens
accggtttgagagtttctcaaagtgtatacaactccatgaaattgctcagtaaatgactaaaagcctttatctgacttcttagactgattcctgaaaagatgagtgttaatgtctgggtagacagtcccagctacatcctgcccatcaccaaaagaatgaaatcaggggagaaagaattccagctctacaacatcttactttaagatatactctgggaccagacacggtggctcacacctgtaatcccagcactttgggaggccgaggcaggtggatcacctgaggtcaggagttcaagaccagcctggtcaacatggagaaaccccgtctctactaaaaatacaaaaaattagccaggcgtggtggcgcatgcrtgtgatcccagctacttgggaggctgaggcaaaataatcgcttgaacccagaaggtggaggttgcagtgagctgagatcgcaccactgtactccagcctgggtgacagagtgaaactttatcttaaaaaaaaaaatctatttctgcag

SEQ ID NO: 165481 - DNA, 521 bp, Homo sapiens
taatggaaatcccagccctctcttttctcatgtacaaacggcagatttccaggcccatgatcaaaggcagaaggagagctcagagaatggcaagaggaaaagagaacaatcagaatctgaaaytaaggcagagaaaacatttattaaccaacaaagaagctcattttcgagaaactgagtcctttcaaaaatgcaatcagcattaaaatcactaatttccttcttcctcttccttcagagggaggagtttacagtaaattaatttggaagttaagtgagtacaagtttatctttaaaagtatgtaagagacagaactagggatgaatcaagcttcaaaacataagcaaagtaaaggatgaagctaggaatttaaacctgtcttggtgactttttaaaaagttactcttgcagatgtggggagttgtgtgactctttgctatttttaaaaagttttcattttgactgaatcatggggacttcattaatcctttaccctgtgaagtgttttggagtcatagcc

SEQ ID NO: 165482 - DNA, 521 bp, Homo sapiens
taatggaaatcccagccctctcttttctcatgtacaaacggcagatttccaggcccatgatcaaaggcagaaggagagctcagagaatggcaagaggaaaagagaacaatcagaatctgaaattaaggcagagaaaacatttattaaccaacaaagaagctcattttcgagaaactgagtcctttcaaaaatgcaatcagcattaaaatcactaatttccttcttcctcttccttcagagggaggagtttacagtaaattaatttggaagttaagtgagtacaagtttatctttaaaagtatgtaagagacagaactagggatgaatcaagcttcaaaacataagcaaagtaaaggaygaagctaggaatttaaacctgtcttggtgactttttaaaaagttactcttgcagatgtggggagttgtgtgactctttgctatttttaaaaagttttcattttgactgaatcatggggacttcattaatcctttaccctgtgaagtgttttggagtcatagcc

SEQ ID NO: 165483 - DNA, 524 bp, Homo sapiens
gtgtgatggctcaagcctgtaatcccagcactttgggaggcccaggtgggcagatcaccaggtcaggaaatcaagaccatcctagccaacatagtgaaaccccgtctccactaaaaatacaaaaattagctgggcttggtggcgtatgcctgtagtcccagctactcrggaggctgaggcaggagaatcgcttgaacccgggaggagaaagaattctactggagattcagtttaatagtgaggattaagttgctggctttgcagttataaactggaatttgaacttcaactctgtatcttagtggctgtgtgttcttgggtgagttacctgccctgtctgaggagcagccatgagcagcagcacacagggtctgcaggagtgcagagaatatggagaaggcaatgtggggtaaggggcagggagggggcacatagcttttcctgctgagaaaaggtggagatttacaagagagcatactcagaggagacagaaaagaagtggtggatgaggtagatcttgaaga

SEQ ID NO: 165484 - DNA, 592 bp, Homo sapiens
tgtaaatggcagggcacaggcagagtccgctagacagaggcacagaaagtagatgtgatttagctattcagttatagaccaaagaatccatctttgggcttactcaatgagttgctgcaacaaatctggcaggagggacacgattgaggagaaaaggagaaaataaatacacgacctgatcattatgatcatggaaacattgccacaatgatgagccaatactgctttaatatatttccagagggcttaaatagcctgttccatctagttctatgaagaaatcagtatcctcagaaagaaagtgctactgatcacatgatcagagaaagaggttgccaagtatttagacattctgatttagccttctgattttagagatgagacaactaaagcagagtaaatgattattcagttataaactttgattagcattgatatttttcctactctttacttcatctcataatatctatatctayatttaggatcacatacacttgaatctctatatccatgggttccgtatacatgaattcaactggattgaaaatatttcagtaaaaaaatggatggctgcacctgtactgaacat

SEQ ID NO: 165485 - DNA, 555 bp, Homo sapiens
cataaacttatacttccctagattaataaatcgtaagagaatctgatgaaagtaacctttattttttaatttttagagttatgcaagatgaagctggctcacttccgaaagctttctaggttcaaggtaaattcctgccaacatattcatggttatagtaatttaagtaatggcataatattattgtccacccagtgtctatttccaggacgattccgtttcrtaaagtgaataagaatggaaataagtacgattttacaacattttctccaaagcttgtcaccaccacaatcgatgtagaaacagttgggactaacatatgttactctctgaaattaagatccctgtatgcatttaacaagatgagtcatattcctttcaccaaagtcagaaaatgtatcctggttacttttctctcatttcatttatcttcttagaaaaaacttaagcaaaatcactaacctgtcacttcaagatgcttgggcatttaaaaacaaaatgaagaaaatacagtgtatttaggaagtcaatatattaaaagcaaaggttcaggtt

SEQ ID NO: 165486 - DNA, 530 bp, Homo sapiens
gttatgagaatatcaagtctatcattttactgaatatgaaatttcagatttttttatgtactgtacatttttcctttgaattttatttgaatgcatgcactataatgtctaagttaaatttacagttaaaatatgttgtaattacactctattaacatattttataatgacacyacagaaagttattaaatgtgctttccaacgcactcattgctgtaccaaggctgtcacatttatctgtagaaagagattctctaacatagggttttgcagctttagttgtccagttcgtaagagcaacgggagttttcagacaggcaaataggggaaaatagaacttaaagaggcaccagggcagaatttatttttgaccaagtgctaaggtaagatggctggtaggcatagtgacaacatgctcggggaatgtctgaagcatggtgacatcaccattttccccaacaaatggggacaggaggaagcatcatagagactgtttgttgttgttgttgttgctgttgttggcatggcta

SEQ ID NO: 165487 - DNA, 566 bp, Homo sapiens
gatgacctacagggtgtcatttcatatttcaagtayaatgaggtgaccctgactgacccattacagtcagaggtgtgaaatgcagctttgcagagcaaatgcaaaaagattacgacaaacaagttacaatgcaaatcagttcaaggtggtcagagataaaaacccctacttcagagaaaacagaaactagccaaatttaaggcacccttacaaagaagcataatgaccaaaagtaaaagtccaaatgctcattaacttatctacttaaggaattgtgccttcttgaagataacccaaaatatagtttcactttagaagcagtgactaaagtttgttttcatattcatgtaaaaacataaaattaaaagactttaatttaaaatgattatcacttaacatttcacatttactcatgatgtagaatgcttaaatgaaaagaatgtaaaatgtataacttaatatataaaattataatcacccaaataacattataatgatctaaatactatctaaatcatcttttttttttagagtaaaaataaagcaaattctgtgatgcctatatt

SEQ ID NO: 165488 - DNA, 487 bp, Homo sapiens
cttgactcaattccagagtgcaaacacatmatccatacaccacagtgctttctgtgatgtcagttctgttgagagaaccaaaaagggtaaaatggttaccttaacagagaagttcaaaagtgatttttagaggcaacttgcataaattccaaagtaatgtgaatgtgaacataattgcatgataatctatcaacatgcatgcattgccttttttgggaccacagaaggtgcgggcctggtggtaagaaacatgtgaaaggggagtaagattctaattaagtcttaagagcagcataacatggatttattatacgtaaccttaactatcactgcatcctggtggataattctaggatttttgacctgtagataaagctcttgcctaagtcaggagaagacaatttcagaaactcattattttaggaaatgacgagaatacttctttcaaaaataggtatagctggagtttctagagcttttcccaata

SEQ ID NO: 165489 - DNA, 458 bp, Homo sapiens
ggttctctcctgcaggtgattttgtctcttgagggatttctggttgtcacaagttgggggtagtgctactggcatctaktgtgtagaagtcaagtatggtgagaaacatccagaacacacaggacagtcccacatgaaaaagaattattcagccaaaaaagtcacgagtgccaaggttgagaggccctggaatacagcaactacactataaaaccaacttggaatgtctcccaaatgaaactggttgacctcggtgaacttcataaaaaaatttttatcaaaggtggtagatggcagtgtgatactgtaaattttgtactcaaagtctttgtcttttctaactctttgtcttttctaactcttaaaatgttttaataattaagatatggaatatcaatattccaaagtaatatttagagaaactatatgcttccttcttaagatgaaattaaaatctg

SEQ ID NO: 165490 - DNA, 481 bp, Homo sapiens
attttaaatggaattctgaaagagtatatccttgactgcatttttctattgatggagaaaatgtgtcttctggccttcccttcaggaaaaatgctgctctgagcccaataggcacttatgagacaggcttttttttttttggaaaggkagcttggagttagcacatttgcctgggaggcctgtgggcttccattgattgacagccacagaagcagctctgggctgaatagctcctgggtagtaaggtaaaagtcactgtttgactaacatccaatgggtagagaaagcacaagaaacaaacagtgggagaaaaaaagttgtcaaataaaatcagtaaggtctctgtttgggatttgggaagtcaaacaatggggaaatgtgtgatttaatagtattggttttcagagacatcctcaacagagcctcttaaatgcccttaacagggattcattgtgttaaatgttgatcattcactgttcta

SEQ ID NO: 165491 - DNA, 416 bp, Homo sapiens
aaggcttaagaatagcctgctttagctcaatgatttgttttccagactcactagaagtggtggccctgccatccagacccactagagtggaaatcctgtctcccaaacccagtggggcagaactcccactttctgcacccactggggcagttatcctgtctctatagattttctaggtgagggtcacattcccagggctctacttgacaggggtcattctcctatagctccaagagcccccaccatgaaggctttgggcagaggcaatctggcctrttgatccttaggctgatttggttcctggtgcaggtcttcttcccaatttgtagatgcatgccttcttgctgaatcctcatctggtggagagagagatcatctctcttatgtctcttttcataagtgcactaatcctctta

SEQ ID NO: 165492 - DNA, 541 bp, Homo sapiens
tgggaagaaactaatagtttgactgaactaatagacaataatcaataagaaacttttaaatataattttaaaagttagaagatagtatttgcttttcaaaaataagaaaattmttttttctaattggctagcctggctttggtcaatgtacttgataattttgagctttctacactgagggtaatgaaatattaaaacaataatctagggaggttgtgaagtgtattatcaggaactctgtcaatattctctttgtctaaacattaattgatcatttcaataaaaggtaaggactttttatagtctacagcatgattacaaagtagatgactttctcagtacttcctaaccctttaattcatatgtaacaatttaattttttttcaaattcctttaagcacctgatattattctcagatgcctcaccttcagttgtggccctctagtacctgtcatcaaaaagtagcacagagaatggaatatctgaaataccattcaaaagtatattttatctattgcacgtaattatttatataattat

SEQ ID NO: 165493 - DNA, 545 bp, Homo sapiens
tataacaacttttaaaggtttttggtaatgagtctacaacttcagagaatgaatgagaggrcattcggtgcactcccctataaaacactgctttgattttatatcctgaccgaggaaacaggtggtttttgtgccagaatattgtggttacaataaatgctgatctgatgtttttcagtaatctgtgagtgtttatgagccagattaaataaatattccatctaccttttagccctggcatcctaaagacagcctccaaatggatttgtatgcactgtggtctttcacggactcttacagcttaagagctcgatggggcatttaattgattccagtgagccagtgcaactatccagatccaaatagtttatgccttttatttacagttaaaataactgtcagacgcatcctgtaagggtttttaatatcatgtgtgacctgacctcacaggtcatgcaagttaatattggttcaggtgctattttatttattctttctaaaatcatctgcacagatttttttagataaaaacttttaatataata

SEQ ID NO: 165494 - DNA, 502 bp, Homo sapiens
ccttctttgttaagagaggactgtgttcccatccagcctcatccctccacttgagcactaagtccattcactttaactactsgagggcttcatttcactaatcctcccattctctcccacatcatccagtgttttaccttaattagatcattcccatagcatgtgttatagttcttcaatctttaagaaaaaataaacagaaacagaaaaacaacaaaaaacctcttgagcaatcttttctgtttactgcctcattttacaataaaatgcctcaaaatagtgtttgtagtcatcatataattttctcttgatttctttctaattacactttcaccactactacttccctgcaactaccttctttcctaccaccctacaacgatgcacattacttaacccagtgacaggttctcagctctcatcttacttagtatattactcaacgtttagaataattgatcactttgttccccttgaaacattttctctgcttttctggaca

SEQ ID NO: 165495 - DNA, 502 bp, Homo sapiens
ccttctttgttaagagaggactgtgttcccatccagcctcatccctccacttgagcactaagtccattcactttaactactcragggcttcatttcactaatcctcccattctctcccacatcatccagtgttttaccttaattagatcattcccatagcatgtgttatagttcttcaatctttaagaaaaaataaacagaaacagaaaaacaacaaaaaacctcttgagcaatcttttctgtttactgcctcattttacaataaaatgcctcaaaatagtgtttgtagtcatcatataattttctcttgatttctttctaattacactttcaccactactacttccctgcaactaccttctttcctaccaccctacaacgatgcacattacttaacccagtgacaggttctcagctctcatcttacttagtatattactcaacgtttagaataattgatcactttgttccccttgaaacattttctctgcttttctggaca

SEQ ID NO: 165496 - DNA, 281 bp, Homo sapiens
tacaatccacacagctcctcacaatttcactgtcttttcactcttctaatgagtatgtgggtcatgtctgtgggatacaaktccacattgttttgtctttcccagtaacctatgcctattgccatcagagaccaaattcttgagtttctaactttctagcaaggtacacctgctgtcctgcactccacaggagctgctgtttgttctgattctgtgtcattatttactgcctgcagtgtgagctctgctccttcaaggaaaaaaaggtttggcttatgttt

SEQ ID NO: 165497 - DNA, 435 bp, Homo sapiens
ttcagtgatatttctccaatttgcttttgaaagaagagaaatacggctctgttctgcccggcttactggcggtcagagtttaaggttatctctcttattccctcaacaattgctgttatcctgttcttttttcgaggtgcccacatttcatattgttcaaacacacaagctgtataatttgtgcaattatyacagggtcctgaggtgatacacatcctcctcagctggcaggattaagagattaaagtaaagacaggcataggaaatcacaagggtattgactggggaagtgataagtgtccatgaaatctttacaatttatgtttagagactgcagtaaagataggcataagaaattataaaagtattaatttggggaactaataaatgtccatgaaatcttcacaatccacgttcttctgccatggcttcaac

SEQ ID NO: 165498 - DNA, 517 bp, Homo sapiens
gggtggggcacagccaaatcatatcaatatggtttggttaatactccaatatctcatccgatgaactttttakattggcaaaaggatctgttgtcttggtttaatttgagcattcttaattcctggtctagaagaaaactaaaaactattttcttagtatttgctatgttgcaatactgaaatatatgatttccagaatcttaaatgctgttacaaagccactgtctcccaaataataattcaccaaaataatagaaactaaactttataaatgttgaatttatcacaagaaaaaaacttattatgtgaacatgactccacaaagagtgatccagatttggattgatcatacccccagattatattgatttattgtccagcacaggcatacaaacaagaaaatacagagagctgtgtcttcttgcaataacatgataccatatttattttgtcccaggaaactcttcaccaggaaggtaggagtataaaccaaaaaataaccactatttacttcatg

SEQ ID NO: 165499 - DNA, 402 bp, Homo sapiens
taaccaccttgtgacttgctgaggcaaattagatgaaaagaaatttaaggagtaaatgtaagagtcataacttttaaagctatacaatttatactactgctggcaaaaattacaattacattgaatctcagaacaaatttcagttaaaatgtaattcatagttctacaaagttctaactatattctattaatttaaaataatagtaaatytgccacaatataagatcctagacactgtgtaataactatgagattttttaaaaagtcaccaacagtttttatttttagcatctgtgaagcaactctcatttacattaaagttacattataattagaccatatttttataagtatagaaatctgtctttaatttcttaatttcttactttgtgaaattcctaa

SEQ ID NO: 165500 - DNA, 656 bp, Homo sapiens
taacgaacgcctactgtccacataagacaaacccttaaactcttcaatctgtgatgttgccacatttcattgaaaaaaatatatgccaactgtacagctgtgtgataatagccaaarttaaaaagaattccaggctggaatgcagtggctattcaaaagtgcaatcatagtggactacagcctctaattcctggactcaagcaatccttctgcctcagcctcccacttaggtgggactaaggcattcgccaccatcttagtttatttaagattaagatttagttaatcttagtaactaaaaatgcttttcagtttctttaggtcatgtttttgttaaatttttaacagtaactcataattaaattagtgaatttcatgttcatagttccagtcttaaatagaacacgtatactacagtaaaaaaaagaacacaattgcacattagttttgttaaattaatgtattctacttacttgtcctaaatattcaagtgatggttaattagctgtactcttattttagggcactatctgctcgtattgaaattgttgttactgtttgcttaggtgacactgttcttgtaagctcctaatactcacaaaagataaatatagagcatttagatgttggaaaatcttatgcattgcataatattt

SEQ ID NO: 165501 - DNA, 593 bp, Homo sapiens
aagtcagttggggaattcttaaaaacaatttccaattccccttatagatctaccaaatattactctctgaaggtgggaactcggaatctacaatctttaaaactcctaaaccaccagcttaaaatgtcaatccttacatagatgtgttagttccctgttgccattgtgacaaattaccacaaacttagtgtctgaaaacaacacaratttattatcatacagttttggtggtcagaagtctagttttgtagtggtcagaagtctagtggtctaatgaagcaaattaaagatggcgttctttctgaagaatttagagcagtacacattccttgccttttccagcttctagagggtccccacagtccttggttttcaggaaaatcactgattccatccttacgtcttctctgactctggccttcctgcctccctcttataaggacacctgcgattacactggggcctctagaataatctcccatctcaagatttttaaatcaatcacatctgcaaggcttttagccacaaaaggtaatgtcttcacaggtttgggggattaagagatgaacagctagtgaacattaagtttgttg

SEQ ID NO: 165502 - DNA, 443 bp, Homo sapiens
ccttccttcatcccctagaatatcttttattatccattaatgataatataataataatattaggagatttttattaagatctcctgggctgggtgtggtggctcatgcctataatcctagcattttgggaagccaaggcaggtggattgygtgagcttaggagtttgagaccagcctgaacatggggaaaccctgtctctactaaaatacaaaaaaattagctgggcatggtggcatgcacttgtaattccaggtatttgggaggccgaggcaggagaatcacttgaacccaggaggcggaagttacagcagtgagccgagatcacgccattgtactccagcctgagagacagagcgagactctatctcaaaaaaaaaaaaaaattcttcagatgagccaggtatatcatctagagctttttctacatatcctcaaaggcaac

SEQ ID NO: 165503 - DNA, 541 bp, Homo sapiens
atacaaacttgatacctgatgacaataaaggcagtgcagtttggaactacaaaaggtaggcacgtatctcccaaatgtaaagataacagctttccttacacaagatttgggacgttgaattgaatgaaatctggtaacagttaaagacaaatatctaatacacgtgtagaggtagaacaatacacaaaaaggtagaataatagtttatttagggcttgatttagcaatgagcaaagtggctgtgctgaggggtttaattagatggcatacactaaatgtttgtttttcgctttcttttgaacaccatgggattctcctccaccaactacttttgacttactcatggacagatttgatctcatccctcactgttttcctctgaactattacaacactcagattttcatactttctgaacacctgggaaatacttgaacactttytaagtattaagtaaatattgttcagtaattaaattttgctgattattccatttatacttcttgagctaggatttctaattctgggaatttttagtaag

SEQ ID NO: 165504 - DNA, 431 bp, Homo sapiens
gaattcagaattactaggaagtactgtaatctggaatgagagtttgtgaaagagtctccatctactactgcccaaggcatgctctctgtaaataactgcttgggacactgccagaagagacaaaatctctgaatactctaacttagtctccagctgagctctggtagactgcaacatggaagaaaggaagcaagtttgaaataatagcaatttttgaaagaaaaaaattcacatgccttttgattagtttattttttgaggtatatctaaaaccagaactttctgaaagctgatttttgaacaatttttgttggcattatttatattttctcagaggaactacaattctttcaaaatttagaaaagtaaatgtattaactctacagacaatctsaaaagtattttatatggatttgtagcattgggcaaca

SEQ ID NO: 165505 - DNA, 576 bp, Homo sapiens
attggataatacacttcaaaaaattaaaacttatcctattcatgactttgcacactgtataggtgtgagctttaacaagctctcctgttgtatgtcacgacctcacttgggcccctcttaagaaatctgtgtaaatctaacatttgttgcattcactggttccctaacagggcagcagcctgccactccctttcattgcaatttatctgctatgtttaaaacaaaaccaaaacaaaaatcaccaccaaggaaattactgcttggagttctgtcagttctctctgtttagcccttcttgttctctctcttatgagatattagygccctctcagctgctctcagtgcattcatcgtctcctatcattgtctctgtttctacttccatcatttgtcatcttaatgctgaggtattttgacaagtgggatgaactctgattaactgattatcagaagtggacgagagaagttgagggcactggatgacacactatttcatattttactctcatccaattcatatctatcaagcagattgtagagtgttattactcagcattctccaaattgggtcatttt

SEQ ID NO: 165506 - DNA, 574 bp, Homo sapiens
tagctcattcctagacgtttgccaatgcaagttaaaattggttgtactgtatttcctttatagcaaaggaatgtaatttctcaggtaagatcttatattatatattcatgggaagtgtatgctcaacgaactaagtaaatttgtgtccctcccacttccatgtgtttcttatttaatagtattttactttagtattttgttatcacttaaaatagaaatggtttttaaatttcaataayctttaaaaattggaaattataaaataatttaatgtcttattttaagtcatttacattaaaaacttaaaataagttaagttacttaatgttacttaatgttttatatacacacttaatgttttacatacacatacaatgtgtatatttaatatagacattaatgtatataattcacttatatacattatatacacttaatgttttatacatacacacaaacacatacatacaccgggctgctcccttaggttcaaggaaaagaaacatgtagagagagtaacactttatgatctaggtgtgtatgtgggcaggttgaatagatgtgcctaaatttt

SEQ ID NO: 165507 - DNA, 603 bp, Homo sapiens
ataattcattctaactttacctggtaatttgggtgaccatctgtgttagttaattggttttattcaggaaaacaacaacaacaacaacaacaacaacaaaacttctcatatgtttatgacaggaggtagttttgcaacttggagcaaggaacccccagaaattagactcctatcctcccaaacagacttggagatggggtgcaatttccattgacgttaagtgtttcaaagtgttgaaaggaaaacttcagacaaattaaatttaacagagtttaattaagcaaagaacagttcacaaactgggaagtccccacttccaacgagaatagactcagaatgattttggtgctgcctatcatcagagaggatttatggaccaaaaaagaagtggcatacagggcacagaagtgaggtacaggaatagttaaattggttacagttgtatgtttgcattttttaatgtaagttgaacagttagccacctttgattggctgaaactctgtcattggcacaagagtaggttacagtctatttacatcagttaggttacagttcattacgtatggataaatyaggcaaaacttaaaatttgtatggaggca

SEQ ID NO: 165508 - DNA, 398 bp, Homo sapiens
gacagaggcaaacagccaagtactttcaagattcaatgcatacaactaatttagagaccaaggaatgctagcactttttaaaaggcrtattttcagggggaaagctttgatgcttaatacatcacaataatgcacacagagaagcaggatgctgagccctaacctgaaaacgctcacttttgaaagcgagtaataacacttttgatatgaatgctagaatatataatgctgtggtatatatagagacatcattacacggagagtcaaatgcatcaaacaagccatttacttttaaaatgctctgtagtttattttgcaatttattattaattaaagacctaattggttcaagacttggactataccattgaatcactaaaaacaaaaccacttctaag

SEQ ID NO: 165509 - DNA, 414 bp, Homo sapiens
gacagaggcaaacagccaagtactttcaagattcaatgcatacaactaatttagagaccaaggaatgctagcactttttaaaaggcgtattttcagggggaaagcttwgatgcttaatacatcacaataatgcacacagagaagcaggatgctgagccctaacctgaaaacgctcacttttgaaagcgagtaataacacttttgatatgaatgctagaatatataatgctgtggtatatatagagacatcattacacggagagtcaaatgcatcaaacaagccatttacttttaaaatgctctgtagtttattttgcaatttattattaattaaagacctaattggttcaagacttggactataccattgaatcactaaaaacaaaaccacttctaaggagaacaaatgaattc

SEQ ID NO: 165510 - DNA, 610 bp, Homo sapiens
ctggtagggccagtgctggctgtagcaaggattgttttggaaatctggcataatcaacaaccacaaatcctgggaagaagatgggacattgagagagctgtgctgcagaattttttaattaaaaaacttcttttaaagtttttttccaacttgatttatatatatataatttcagcttttattatagattaaagggtacatgtgcaggtttgctacatgggtatatkgtgtgacactgaggtttgggttccaaatgatcccatcaccaagatagtgggcatagtacccaataggtgttttttcagctcacactcccctctctcccccatccagtagtccccagtgtcttctgttcccatctttatgtctatctgtattcaatgtttagcccctacttataagtgacaacattcagtatttgattttctattcttgagttaatttgcttaggataatggcctccagctgcatccatgttgctgcaaaggacatgatttcattcttttttatggctgcatagtattccgtggtgtatatgtaccacatcttctttctccaatccaccgctgatgggcacttaggttgattccatgtctttgctattgtaaat

SEQ ID NO: 165511 - DNA, 215 bp, Homo sapiens
gccctaaacttcattagcaattttaatttcaccgtggtcctgtggtcctgtgatctcaccctgcctccatttacsttgtgatatcttattaccttgtgaagcatgtgatctctgtgactcacaccctattcgtacactccctccccttttgaaaatcactaataaaaacttgctggttttacagctcagggggcatcacagaacctgccaacatg

SEQ ID NO: 165512 - DNA, 596 bp, Homo sapiens
cttttttgcccaggcttgtctggaactccagcctgggctcaagcaatcctcctgcctcagcctcctaaagtgctgggattacatgctctatacatattttctaccaaaaaaaaaaaaaaaaaaaaaaaaaaactagagtgcactaaaacacctggggtagggaaacaaaaaataacataaattgttttagctaacactgaacaaatatcgattatgggctggcacattatctgatttaattctcttaacatctccttgaaacaggtctattgggcaaatgaggaaactgaagccctatcgcaaggkgatggctctgttgaattctagagactgcaaagatgaaaaaactaaaaaactggggcacaaattattaactatactgcccaaggtcatacactggaaatgggtggtgaaggtaggatatgaaaccaaacttacaacctccaaactctaatcactgtttttagaatactacgagcacctgaacatgcagtctcaagtcaatgaccaaaatattacagatgcaggattgttgatcagaggatgtcttggttaatagaatgccagagactagatccattagttatgagatagat

SEQ ID NO: 165513 - DNA, 596 bp, Homo sapiens
cttttttgcccaggcttgtctggaactccagcctgggctcaagcaatcctcctgcctcagcctcctaaagtgctgggattacatgctctatacatattttctaccaaaaaaaaaaaaaaaaaaaaaaaaaaactagagtgcactaaaacacctggggtagggaaacaaaaaataacataaattgttttagctaacactgaacaaatatcgattatgggctggcacattatctgatttaattctcttaacatctccttgaaacaggtctattgggcaaatgaggaaactgaagccctatcgcaaggggatggctctgttgaattctagagactgcaaagatgaaraaactaaaaaactggggcacaaattattaactatactgcccaaggtcatacactggaaatgggtggtgaaggtaggatatgaaaccaaacttacaacctccaaactctaatcactgtttttagaatactacgagcacctgaacatgcagtctcaagtcaatgaccaaaatattacagatgcaggattgttgatcagaggatgtcttggttaatagaatgccagagactagatccattagttatgagatagat

SEQ ID NO: 165514 - DNA, 596 bp, Homo sapiens
cttttttgcccaggcttgtctggaactccagcctgggctcaagcaatcctcctgcctcagcctcctaaagtgctgggattacatgctctatacatattttctaccaaaaaaaaaaaaaaaaaaaaaaaaaaactagagtgcactaaaacacctggggtagggaaacaaaaaataacataaattgttttagctaacactgaacaaatatcgattatgggctggcacattatctgatttaattctcttaacatctccttgaaacaggtctattgggcaaatgaggaaactgaagccctatcgcaaggggatggctctgttgaattctagagactgcaaagatgaaaaaactaaraaactggggcacaaattattaactatactgcccaaggtcatacactggaaatgggtggtgaaggtaggatatgaaaccaaacttacaacctccaaactctaatcactgtttttagaatactacgagcacctgaacatgcagtctcaagtcaatgaccaaaatattacagatgcaggattgttgatcagaggatgtcttggttaatagaatgccagagactagatccattagttatgagatagat

SEQ ID NO: 165515 - DNA, 596 bp, Homo sapiens
cttttttgcccaggcttgtctggaactccagcctgggctcaagcaatcctcctgcctcagcctcctaaagtgctgggattacatgctctatacatattttctaccaaaaaaaaaaaaaaaaaaaaaaaaaaactagagtgcactaaaacacctggggtagggaaacaaaaaataacataaattgttttagctaacactgaacaaatatcgattatgggctggcacattatctgatttaattctcttaacatctccttgaaacaggtctattgggcaaatgaggaaactgaagccctatcgcaaggggatggctctgttgaattctagagactgcaaagatgaaaaaactaaaaaactgkggcacaaattattaactatactgcccaaggtcatacactggaaatgggtggtgaaggtaggatatgaaaccaaacttacaacctccaaactctaatcactgtttttagaatactacgagcacctgaacatgcagtctcaagtcaatgaccaaaatattacagatgcaggattgttgatcagaggatgtcttggttaatagaatgccagagactagatccattagttatgagatagat

SEQ ID NO: 165516 - DNA, 626 bp, Homo sapiens
ggccaccatttctctgtactgcaggcatctcctaactggcattctcacatcccctgccccattccaatcaattatctactcagtggacagamatcctttcaaagtttagagacctgtgggtcttgcttaatcctgcagctgcctttctggtagttcagatgcttggcttctttccatcccaggtgctcacaggctccctaccaccagagggcccttggcctgcccctgccactttccccaagggagtttttcagaccccaggctagttccagtgggttcctgctatacacctgctgtgctcccaggcctcagcactcccctcagggtgcaaacggtccttcaacattagttagtctttctcccctttgtccactaaccctgggagggtaggcaggtccctgctcctatcaaatccctccctctgggccagggtctagtacctgctgagtgtttgacaaatatttcttgaatgactgcatccctaacatgaggcaatgatcattcccctgcctgttagacataattcactgcctgggaaggcactgtgctgtgtagatgcagcaagctggctaaaatcaactgtagcatggcctatgtcccaagcaggttgtcctgcccatacgctc

SEQ ID NO: 165517 - DNA, 613 bp, Homo sapiens
aataactgccttgacttggcatttggaaatgaaacttgttatttgaccagttaaagtatataaggtttaaaagttaatttgtcttcataagggaaacataacatattgagttccaataggaaagtagttttattttaaatcaaagtctcttggtgggttctggaatttagatttaattccatcagttgggttttctaaccattgtgtaatacattggccagaacaaggggatcttgggcatgtcaggtggctgttttcctcatccttagaatgtgaagggatggtcaaaagccaccacacaggattgtaatgataagcagtgtctgttctgatcacatagtgggcacagctacatgatactgttattcaacaaaggggtcctattcattcagcctgctgttttaggatacctaccagtttctagacagaatataaaaggtgaaaatgatttgatcctaattaaaaaaaaacttataggtgagaaagaagaagcatatccattgagctttctgttctyttgacctaggctttattgccgtgactgagactgggtctaagagatttggattctcttgtcatggggacagaggtgctcacccaggtgtgctgtagt

SEQ ID NO: 165518 - DNA, 576 bp, Homo sapiens
tctgtggcaattccgcactcaatgaaggacaagacggcttccaggtacttaaaagcctttccaaccctgtccgtctgcaggagaagaacrtggtcattgttaggctgaagacaaaccttgatttagtttctcacccacattctttagtgtgactttcctccactgtcttagtttaattatggccagggagaagtgtgaggatgaatgaactaaaaatgataaccaaagcctgtcagctatgacctgctgaaaactattttagcaaaaattcattaggaaaaagaaaatgatcccgtattaagaccatgctctcaaagccttatgaaagcacatacgcaaactaaggcagtaagtacatagtctccttgttattagtgtcaaattactcattctataactttcttgagaaacagattattccacatgtctggagtaatgcagacgcatatttctttgtgcgtgctgaagtttattaaaaagaaaacactcatcatggtttatgagcatgttagacataatagccaacaataattgttatatgcattttacagcccaatagattaacctcctttgaca

SEQ ID NO: 165519 - DNA, 576 bp, Homo sapiens
tctgtggcaattccgcactcaatgaaggacaagacggcttccaggtacttaaaagcctttccaaccctgtccgtctgcaggagaagaacgtggtcattgttaggctgaagacaaaccttgatttagtttctcacccacattctttagtgtgactttcctccactgtcttagtttaattatggccagggagaagtgtgaggatgaatgaactaaaaatgataaccaaagcctgtcagctatgacctgctgaaaactattttagcaaaaattcattaggaaaaagaaaatgatcccgtattaagaccatgctctcaaagccttatgaaagcacatacgcaaactaaggcagtaagtacatagtctccttgttattagtgtcaaattactcattctataacttycttgagaaacagattattccacatgtctggagtaatgcagacgcatatttctttgtgcgtgctgaagtttattaaaaagaaaacactcatcatggtttatgagcatgttagacataatagccaacaataattgttatatgcattttacagcccaatagattaacctcctttgaca

SEQ ID NO: 165520 - DNA, 603 bp, Homo sapiens
ttatgaccctcaattgtatagcggattctctgttttatgattctccagtggggcaggcttctcccttaccaagagtctggaattgtttttatattctgggtttagtttctggttttcttttgtatcagcttcctccattatctctaagaatgtcaacctttatgttaagctgatgataaaagaagtttcattcttaccttcttctaaaaccagaagaccattggcgaggcgcggtggctcacacctgtaatcccagcactttgggaggccaaggcgggtggatcacgaggtcaggagatcgagaccatcctggctaacatggtgaaaccccatctctactaaaaatacaaaaaattagcggggtgtggcggcacacgcctgtagtcgggaggctgaggcaggagaatggcgtggacccgggaggcggaggttgcagtgagctgagattctgacactgcactctaacttgggcgacagagcgagacgctgtctcaaaaacaacaacaaaaacaaaamcaaaacaggaaaattatcatatgggctatgtacccacaagacggtatgcttcccacatggccatgtcttggtggctactagccttgt

SEQ ID NO: 165521 - DNA, 596 bp, Homo sapiens
ttataacatgcgaaatttgaattgacattgacacctatgacctaaagcttcatcgtggccacttttagggtataggagggccagataataaatgggatccagggcctatgtatgtccatgaatgcatggacccatccagtgctatttctttgttctcaaaaggtatatggaatgaacaaaatggtagaatagtagtaatgggcagaatatccacattgatttattagctttaagagccatcatagtagtgaagcctgagtggaagcctctgaaactgcccatttcctggccaaattactaaaaaataaaaatctaatctcaaagggaaatggcagatatcaatgccatctttaagaacctaatgatactagggtggtggtatcattaggttcttaaaggtttcgtttaattcaccagtgtagttcctacaaaaaccggaaagatcctacaaattcaacaaagcattaaccccaaatgcagctgctgtgctacatgtgtggtatctttgcttagagattattacagcctsaaatacgtggtatggggcaattgatctggcaaataccttcttttccattccttatcagaaagaatga

SEQ ID NO: 165522 - DNA, 596 bp, Homo sapiens
ttataacatgcgaaatttgaattgacattgacacctatgacctaaagcttcatcgtggccacttttagggtataggagggccagataataaatgggatccagggcctatgtatgtccatgaatgcatggacccatccagtgctatttctttgttctcaaaaggtatatggaatgaacaaaatggtagaatagtagtaatgggcagaatatccacattgatttattagctttaagagccatcatagtagtgaagcctgagtggaagcctctgaaactgcccatttcctggccaaattactaaaaaataaaaatctaatctcaaagggaaatggcagatatcaatgccatctttaagaacctaatgatactagggtggtggtatcattaggttcttaaaggtttcgtttaattcaccagtgtagttcctacaaaaaccggaaagatcctacaaattcaacaaagcattaaccccaaatgcagctgctgtgctacatgtgtggtatctttgcttagagattattacagcctcaaatacgtggtatgggscaattgatctggcaaataccttcttttccattccttatcagaaagaatga

SEQ ID NO: 165523 - DNA, 573 bp, Homo sapiens
gaatttatgtgatgattttgtgttctgcaaatttaatgaattcatttgtcagttctgatggctttttggttgaatcttaatggtcttctacatacaagatcatgtcataggcttacagagataattttactccttccttttatattttaacagctttatttcttttcttccttcattcctcagtatttccagtactatgtkgagtaaaactggtaaaaatggacatccttgccttgttcctaatcttagagaaaatgcttttagtttttcaccatttagtatgatattagttgtgagtttataatatatggccttcactactttgaagtaaattttttccatagctaatttgttgagagtttttctcatgaaagtgtgttgaattttgttaaatgatttttccgcatctattgagatgattcctttttaattcatttggggtttttttgttgttgttttttgtttttctgagacagggtctcactctctcccctaggctgaatgcaatggcaccatcactggtcactgcagcctcgacctcctggtctcaagcaatcctcccaccttagcctc

SEQ ID NO: 165524 - DNA, 563 bp, Homo sapiens
ttctgatggctttttggttgaatcttaatggtcttctacatacaagatcatgtcataggcttacagagataattttactccttccttttatattttaacagctttatttcttttcttccttcattcctcagtatttccagtactatgttgagtaaaactggtaaaaatggacatccttgccttgttcctaatcttagagaaaatgcttttagtttttcaccatttagtatgatattagttgtgagtttataatatatggccttcactactttgaagtaaattttttccatagctaatttgttgagagtttttctcatgaaagtgtgttgaattttgttaaatgatttttccgcatctattgagatgattcctttttaattcatttggggtttttttgttgttgttttttgtttttctgagacagggtctcactctctcccctaggctgaatgcaatggcaccatcactggtcactgcagcctcgacctcctggtctcaagcaatcctcccaccttagcctcccaagtcactgggactayaggcatgtgccaccatgcccaact

SEQ ID NO: 165525 - DNA, 597 bp, Homo sapiens
ttttttctttcatggattttatcatgtcttagcttcaaacatattgtctacaaagaaaacactcaggtgtgttgcttggctttcaagaacacacacacaaacacacacacacacacacacacccctcactctcaagcacacacactcacacacatatgcacaccatgacactttatcagacctacttcttatcttctcactctccatcttgaattaaccacacaagtcaaaatggtctcacaactagcctttgggtttatcattgtactaacagagactaactaacccaagccctagaacatactctggactcagtccaagtttattacacagagctccatgtgtttctcaaatgccatgcttagggaacctctatacattttcacccttagaatgcttagaatgaactcattttatatcctgcttgcctaaattctactcagattttaaagctcactaatctccaacttatcactaacacttttgcatactgttatacatarctatcttttcttttttctacagtattttggcatttagaagatagtattatgacctttagttgtttctagaagtagattataaccttcctaaaaa

SEQ ID NO: 165526 - DNA, 646 bp, Homo sapiens
attatattaatgagcaattctcttacaaaactcagaaaaagttatttgatgacttagctctaaccaccatactcatcattataggcaactgaactctccagggaataaacactgatggagtgattcatttcatctcagcctttagacctactrtgtaagaatgtttcctcaggagaactcactgtatgcttaattgttcttaatcccatagcaaaggggaaaacaaaatgaattgaaacatgaaataactaaatgtgtattctaccattttaaaactctagtcttcgttttgtttcttcccaactcgccctttgcaattgtgcaacaaataaaagtgataataatggagcttgaaagtacatctgagaaggctagatcctcacagaatctttaaatccaataatgggtgtaaaaagtcattattgctgactccaaatgataagagaagtctctgcaaaagagaagccatagaaaaagactgttgactccaggtgagcaatgtgagtgaatttaaatgttgtcaatttaggaagaccataggaatctccattggcggatcaagatgctcccctattttacagtggcagaaggctttagttttgcattgagatctctagaaatagaaacctcaaacccaatccccatc

SEQ ID NO: 165527 - DNA, 646 bp, Homo sapiens
attatattaatgagcaattctcttacaaaactcagaaaaagttatttgatgacttagctctaaccaccatactcatcattataggcaactgaactctccagggaataaacactgatggagtgattcatttcatctcagcctttagacctactgtgtaagaatgtttcctcaggagaactcactgtatgcttaattgttcttaatcccatagcaaaggggaaaacaaaatgaattgaaacatgaaataactaaatgtgtattctaccattttaaaactctagtcttcgtttkgtttcttcccaactcgccctttgcaattgtgcaacaaataaaagtgataataatggagcttgaaagtacatctgagaaggctagatcctcacagaatctttaaatccaataatgggtgtaaaaagtcattattgctgactccaaatgataagagaagtctctgcaaaagagaagccatagaaaaagactgttgactccaggtgagcaatgtgagtgaatttaaatgttgtcaatttaggaagaccataggaatctccattggcggatcaagatgctcccctattttacagtggcagaaggctttagttttgcattgagatctctagaaatagaaacctcaaacccaatccccatc

SEQ ID NO: 165528 - DNA, 646 bp, Homo sapiens
attatattaatgagcaattctcttacaaaactcagaaaaagttatttgatgacttagctctaaccaccatactcatcattataggcaactgaactctccagggaataaacactgatggagtgattcatttcatctcagcctttagacctactgtgtaagaatgtttcctcaggagaactcactgtatgcttaattgttcttaatcccatagcaaaggggaaaacaaaatgaattgaaacatgaaataactaaatgtgtattctaccattttaaaactctagtcttcgttttgtttcttcccaactcgccctttgcaattgtgcaacaaataaaagtgataataatggagcttgaaagtacatctgagaaggctagatcctcacagaatctttaaatccaataatgggtgtaaaaagtcattattgctgactccaaatgataagagaagtctctgcaaaagagaagccatagaaaaagactgttgactccaggtgagcaatgkgagtgaatttaaatgttgtcaatttaggaagaccataggaatctccattggcggatcaagatgctcccctattttacagtggcagaaggctttagttttgcattgagatctctagaaatagaaacctcaaacccaatccccatc

SEQ ID NO: 165529 - DNA, 543 bp, Homo sapiens
tatatgtgatgattggacactctaaatgctttgaaaaatgtactgactttgtggttcaaagaacacacgttgaaactaaagtaagtcttaattaccttattttccaaagtatgttacattattgytctattgcaataaaaccaggattgttgatggttgagaaaagggcaataaaaataaaacctaaaggtcatgctaaggccagaaataatgaattgaaatggaagtatatgatcctggcattcatataaaataaaatcaaccgtggaaattcacaataagcccaaggctatgcacaaagtataatagagaaaagctggccttaaatgaatcccagaggagattgtgcagaatcactctctggatgaaagatgaattccaaaatagttttatttgttgaaattatttgaaatgattgaaacggcaagcacgctttggcatatatttagtcacttcagggtaccgacacattattagtattcagcactaataccagtgggcacatttgtacagttattttcctttttttgtcatgtgaatgca

SEQ ID NO: 165530 - DNA, 543 bp, Homo sapiens
tatatgtgatgattggacactctaaatgctttgaaaaatgtactgactttgtggttcaaagaacacacgttgaaactaaagtaagtcttaattaccttattttccaaagtatgttacattattgctctattgcaataaaaccaggattgttgatggttgagaaaagggcaataaaaataaaacctaaaggtcatgctaaggccagaaataatgaattgaaatgraagtatatgatcctggcattcatataaaataaaatcaaccgtggaaattcacaataagcccaaggctatgcacaaagtataatagagaaaagctggccttaaatgaatcccagaggagattgtgcagaatcactctctggatgaaagatgaattccaaaatagttttatttgttgaaattatttgaaatgattgaaacggcaagcacgctttggcatatatttagtcacttcagggtaccgacacattattagtattcagcactaataccagtgggcacatttgtacagttattttcctttttttgtcatgtgaatgca

SEQ ID NO: 165531 - DNA, 543 bp, Homo sapiens
tatatgtgatgattggacactctaaatgctttgaaaaatgtactgactttgtggttcaaagaacacacgttgaaactaaagtaagtcttaattaccttattttccaaagtatgttacattattgctctattgcaataaaaccaggattgttgatggttgagaaaagggcaataaaaataaaacctaaaggtcatgctaaggccagaaataatgaattgaaatggaagtatatgatcctggcattcatataaaataaaatcaaccgtggaaattcacaataagcccaaggctatgcacaaagtataatagagaaaagctggccttaaatgaatcccagaggagattgtgcagaatcactctctggatgaaagatgaattccaaaatagttttatttgttgaaattatttgaaatgattgaaacggcaagcacgctttggcatatatttagtcacttcagggtaccgacacattattagtattcagcaytaataccagtgggcacatttgtacagttattttcctttttttgtcatgtgaatgca

SEQ ID NO: 165532 - DNA, 351 bp, Homo sapiens
aacatcattctaccagagatcacaataaaatttccactggacgtgaagatgtgattaccagacactttcgtctcctctagtcaagagtccaccaggcaaataaagaagccacagtataggcagaggtaatcaagtctgatttccaggagaagctgcggttgctgctcagttatcagaaaagagtagaacttgtttgaaagcctggagattcaytgagccatctttggtattccagatccagtgataataatattattaattgctacaataatattatagaattgttttattagttgtgagacatctggcctccaatgagtctagagtgctgctttgggcctggaggctggc

SEQ ID NO: 165533 - DNA, 569 bp, Homo sapiens
tcactttcagggaccccaatcaatcataggtttggtcttttcacatagtcccatatttcttggaggctttgttcattccttttcattctttttttctctaatcttgtcttcatgccttatttcagtaagttgattttcaatctctgatatcctttctttcgcttgatcagttgggctattgatacttgtgtatgcttcacaaagttcttgtgttgtgcttttcatctctatcatgtcctttatgttattctctaaactggttattctagttagcagttcctgtaacstttcatcaaggttctgagcttccttgcattgggttagaacatgctcgtttagctcagaggagtttgttattacctaccttctgaagcttacttctgtcaattcatcaaattcattctccatctagttttgtgcccttgctagagaggagttgcatttggaggagaagaggcattctggcttttggaattttcagcatttttgggctggtttttcctcatctttgtggatttatctacctttgatctttgaggctgatgacctttggatgggtttttgtggga

SEQ ID NO: 165534 - DNA, 582 bp, Homo sapiens
aaattagtatgaagcatctattattatgtgtcagtcgctcctgtatgagctgaaggtacaatagtgaacaagagagacaatgtgttacccctaaataacttatattctagtgatatgggggagataaaaacctagttatatgtaagtattctgataaacataaagttttcagtgaagaataggtgattaatatcctggatccaaaattgatttgcagatttccatttttgtcaatacactagaatagaytatctcaaaagttttcactaatagtattatagaccaccagaatgaaatatcaaaagcgcttccattatcaaaatgcttagttgagtttacaggaaagtagtgaaatcctcaggtgctaaaaagtgaatagggacttggaacccaaagcattaacatcaggtagagacagaaggtgaaaccttgctccttttgaagtggtataatggaattaagattcatgaataaagatgagatctcaaaaggctctcttctgaggaaaaggctgtaatgtaaaaaaattctgctcatgcatacagagagacatgagacaaacttgtctgtcttggcctgaat

SEQ ID NO: 165535 - DNA, 548 bp, Homo sapiens
aattagtatgaagcatctattattatgtgtcagtcgctcctgtatgagctgaaggtacaatagtgaacaagagagacaatgtgttacccctaaataacttatattctagtgatatgggggagataaaaacctagttatatgtaagtattctgataaacataaagttttcagtgaagaataggtgattaatatcctggatccaaaattgatttgcagatttccatttttgtcaatacactagaatagattatctcaaaagttttcrctaatagtattatagaccaccagaatgaaatatcaaaagcgcttccattatcaaaatgcttagttgagtttacaggaaagtagtgaaatcctcaggtgctaaaaagtgaatagggacttggaacccaaagcattaacatcaggtagagacagaaggtgaaaccttgctccttttgaagtggtataatggaattaagattcatgaataaagatgagatctcaaaaggctctcttctgaggaaaaggctgtaatgtaaaaaaattctgctcatgcatacagagag

SEQ ID NO: 165536 - DNA, 638 bp, Homo sapiens
tattaatgttaaccatgggttgccaaatttttattctcttcattatttttgataggtatggaattccgatgatccctaggtcagtagtcgccaacctttttgggaccagggaccagttttgtggaagacaatttttccacagacaaggggtgggaggagatggtttcaagatgaaactgttccaccttggatgatcaggcattwgttaagttctcataatgagtccacaacctagatccttggcatgcactgttcccaatagggctggtgctcctatgagaacctaacgccgatgatgatctgacaggggacagagctcaggcagtaatgctgcctcaccactcacctcctgctgcatggcccaggtcctaacaggccagggatcagtatcggtccatggccaggggagtggggacccctgacctagatggtaaccgcccattcattcactcctctgatatttgttttgtgtaaatatatatgacattgggcagcacctaaactaggtggagcaaagtaggaaagaatttagcaaagatattgtatcaggaaaataaaacaaaatcactccagttattttaacagacaaaacgtcatataggaagttggtgttagaggtctgaaaaggcaagtaggaa

SEQ ID NO: 165537 - DNA, 509 bp, Homo sapiens
ctgaatttgtcccttccctttgctcatggagaagttcagtaaatccctgtctattttgtgagcagttctgactcctccctctacagcaggctcataggtgatacaagctaatgtcagtatcgttaagaaaacctagaatagtaatacacaattaataatgtaatagtaatagcaacaataataatgccactgcccttctgaaacctctcagaaaagcaagaacacttctttcccagaagtctcaaacaatcaccttaaatctcatcaaaccaaatttgagcacaagcccattctagagccaatatccatggccatgaggtgggactatgctgattaagctgggcttgagccagggcccccatgactagaaccagaggcattttgagccaagagtgtgtagagcttcatttaaacttacaaagaccttctaggggtagggatgcaaacccaaacaagagtggcgwcatttccaagagaaaaggggatgaatgatgggaagatagccataa

SEQ ID NO: 165538 - DNA, 440 bp, Homo sapiens
ctctggtttttaattgctgtacttagaccattcacattgaaggtgattatcgatatgttgggttaatatctaccatatttttaactcttttctaytcattgcacttatttttctaaatctccttttatcttttgtggttttgattagaattttatattattcaatttttatctctcagcttatcaattatacttcttttttattgttttaatggtttccttaaaattataatataaatttacaactaatctaatcccagttttacataacactataccacttcacagatagtacaggaactgtacttgttctcagataacatgatcatctatataaaaaatcccaaagagtcatcatcaacaagtcattctagtccttccagaactaaaaagtgattataacaatgtggctggaatcgaggttaatatacaaatgtaatt

SEQ ID NO: 165539 - DNA, 440 bp, Homo sapiens
ctctggtttttaattgctgtacttagaccattcacattgaaggtgattatcgatatgttgggttaatatctaccatatttttaactcttttctactcattgcacttatttttytaaatctccttttatcttttgtggttttgattagaattttatattattcaatttttatctctcagcttatcaattatacttcttttttattgttttaatggtttccttaaaattataatataaatttacaactaatctaatcccagttttacataacactataccacttcacagatagtacaggaactgtacttgttctcagataacatgatcatctatataaaaaatcccaaagagtcatcatcaacaagtcattctagtccttccagaactaaaaagtgattataacaatgtggctggaatcgaggttaatatacaaatgtaatt

SEQ ID NO: 165540 - DNA, 624 bp, Homo sapiens
attgcaattaaaacagccattagataccactacacacccattagaatagctaaaataaaaaaactgacaataccaaatgctggtgaggatgtggaacaatatgaactctcattcattgctagtggaatgcaaaatggtaaagctactttggaaggcagtttgacagtttcttacaaaactaaaaatagttttgtctttttttttttttttgagactaagtcttgctgtcgcccaggctggagtgcagtggcrcgatctcggctcactgcaggctccgccccccggggttcacgccattcttctgcctcagcctcctgagtagttgggactacaggcacccgccacctcgcccggctaattttttgtatttttagtagagacggggtttcactgtgttagccaggatggtctcgatctcctgacctcgtgatccacccgcctcagcctcccaaagtgctgggattacaggcgtgagccaccgcgtccggcctccaaaaatagttttgtcttaacatatgatcccgcaattgcactgctaggtatttagccaattgaatttaaaagctgtctacacaaaaacacgcacatgaatcttcatagccactttactaataattgccaaaa

SEQ ID NO: 165541 - DNA, 506 bp, Homo sapiens
atgtgggccaaggcaagagggtagaattatgtgttatttttatttgatggaagagaaggtagtcagagatttgaagtacaggatttatgttatgagtgctgtgagagaaaaaaggttaaatctacagggtggaactatcacatcaatcttgccaattgtgtttttttcaaatgttccaaatctttgcagactattttttatgtgagaaaaataaagtcctgtgtacttaataacagagacatgctctgggaaatgtgttgttagatgactttgttgttgtakgtatatcataggtgtacacctcttatacaaacctagataatatagcctactacacacctacacacaatacgctacaaagcatgttactgtactgaatactgtagacaattgtaacaattcactaggcaataagaatttttcagctccatcataatcctatgggaccaccgttgtatatgtggtctgtccttgactgaactgttatgtggcacatgactatacca

SEQ ID NO: 165542 - DNA, 562 bp, Homo sapiens
aagcttgccaatgttttctttttttcttttttctttttttttttttttcctgcacaatgtttattagaaatctctgggatcaacatctgtaaaggagaagggaaagaaagtgttgggtagctacatcctaaactgagcccacaggaaaaatttggaagaagaatggtcctccatagtggtcttgagttcaaaagaaagaactcgtcctttgtagccccatgtccatcagtcactgaatgtgagccatgtagccttggacctggaggctggattaacacaatttcagaggggctggctatgaaagggtggcagcggacatactmgcaacagtaaggacaacaagatgttcattgtttcactgaaggaaaatctgaatggtgcatcactagttaacaagataattatttaccacaaataaaatggtacaattgtattatcttgatctttattgcttgacatattttattacacactgctactttattcaagtcagagatccatagccttaaacctgatattgaattctagagggaaaatgcaattacatgcaatagcaattaca

SEQ ID NO: 165543 - DNA, 626 bp, Homo sapiens
cacactagggaactcgttaaaaaaggtttagcaggtgtggttaagaggactatttctggtttgattctgttctttttttaaatttattttattttcattttagttttgtttaaccctaagcttgccaatgttttctttttttcttttttctttttttttttttttcctgcacaatgtttattagaaatctctgggatcaacatctgtaaaggagaagggaaagaaagtgttgggtagctacatcctaaactgagcccacaggaaaaatttggaagaagaatggtcctccatagtggtcttgagttcaaaagaaagaactcgtcctttgtagccccatgtccatcagtcactgaatgtgagccatgtagccttggacctggaggctggattaacacaatttcagaggggctggctatgaaagggtggcagcggacatactagcaacagtaaggacaacaagatgttcattgtttcactgaaggaaaatctgaatggtgcatcactagttaacaagataattatttaccacaaataaaatggtacaattgtattatcttgatctttattgcttgacatattttattayacactgctactttattcaagtcagagatccatagccttaa

SEQ ID NO: 165544 - DNA, 655 bp, Homo sapiens
tcttgaatgggatacaaaaggaagctatgaagagtacattactggaaattctttaaaagtagccaatggcatgattcacttggattgggaggtgaatgcaggaacatcaattttacttttcatctttgtcattaattgtatgattttggatacttaatccatcagcattttacaatcctcttttataaaaccataataataaagtagaatgccttaaaatgtgtaatactagaagtagttatttaaacaaaaggtcagaattaactaatcttgggtgggagctatactaggaamccttgaagaaaacaccactgcatttcttaggtgtttgaacatctgcctcccaggactaaacacttagaacttattaggtcaatttcagctttccaaaagctgggcttggacaaaatctatttatataatattctttatataaccattatgttttccatcacttttccagatatgcattctatagtttgtcaaatgtgtatgtagagtttctttctaaaacgtgatatttacataaacgtatttctaaaattattgttcaatgcaaagagttctcttaaaatagctacatacattgcaacttagaatctctgggttttcttattttgtggcatgaacattccctggagtcaataatttaagt

SEQ ID NO: 165545 - DNA, 424 bp, Homo sapiens
tacttattaaataaatgattcattctggccaccaaagcagaagtaatctatttaacttaacgactgtatcactttctaattctcttatcttgccgggcaattttgttctgcattccatatggttcttcatttgcatgccttccattcctttacaaacatgatgaggactttcatattttagatattataaattttgaaactgaacaaatgttctctctttaaattgactgctaaaggcataraacggaatgcatattccactcttggtaagtatatggtgtatgtggtttgtatgtcatacctgaacctcctttgtgtcccagattttatttctattttgctttatattatattatcttatttaatatataaatatatatctatatgtgtgtgtatatatatacatatatataaagagagaaga

SEQ ID NO: 165546 - DNA, 195 bp, Homo sapiens
gctcaatttttttaataacaaagttgrttttccaagaggttaattcccatatgtaattacttattgtcccagagaattacatataggaaactgaaaagtcagaacttcagcccttgttcttctgttgccaggtttaatgcttcttttaagatataactgtgaaataggaactaatgtagtatacatacaaaaatg

SEQ ID NO: 165547 - DNA, 195 bp, Homo sapiens
gctcaatttttttaataacaaagttgattttccaagaggttaattcccatatgtaattacttaytgtcccagagaattacatataggaaactgaaaagtcagaacttcagcccttgttcttctgttgccaggtttaatgcttcttttaagatataactgtgaaataggaactaatgtagtatacatacaaaaatg

SEQ ID NO: 165548 - DNA, 443 bp, Homo sapiens
gaagaaggcaaagttttaaaaatttcatggagattctcaaagtagtatctattattcccacagtgcttaatttttaactgggctatagtttggatacaatagaatgaagcttttagctttgccacatataactaggaaagcaaacactatctatagtagaataaaaattgttttaaaagattggtaaatgtttaatattaacaagaaaaatatctagcctccagcaatcaaaattgaaacaaacatgaaataactttttttattatcaatttggcagtcttaaaaayggaaatatctagtgtaatgatggagtacagttaatgggaaatcacatacattttaaatgtgatggtagttaagacaacttttttgagaacaattttgcctcgtgaaagccttttaaaaaaatattaaaaccttcagtaatttttcctaaataaatt

SEQ ID NO: 165549 - DNA, 443 bp, Homo sapiens
gaagaaggcaaagttttaaaaatttcatggagattctcaaagtagtatctattattcccacagtgcttaatttttaactgggctatagtttggatacaatagaatgaagcttttagctttgccacatataactaggaaagcaaacactatctatagtagaataaaaattgttttaaaagattggtaaatgtttaatattaacaagaaaaatatctagcctccagcaatcaaaattgaaacaaacatgaaataactttttttattatcaatttggcagtcttaaaaacggaaatatctagtgtaatgatggagtacagttaatgggaaatcacatacattttaaatgtgatggtagttaagacaacttttttgagaacaattttgcctcrtgaaagccttttaaaaaaatattaaaaccttcagtaatttttcctaaataaatt

SEQ ID NO: 165550 - DNA, 500 bp, Homo sapiens
agaaaaatgtatttacattttttttccttgtaagtagtgacttaacttcatatatttgtgaggatgtaactatactttctcaaggcctatggcactttccaataataggctgagtggtttattgagtcaaagtcagtcctgtaagatacggggttatcacttagtaaacagcatcattgtaatatctatagtagtacccttggaatactagaggccaatcagtaatgaatatccctgatgtcaccatgggctagcctgggtactaagggaggcagttaaagaagttttaaactgagttatttctcagaaccccaaataagagctcagcctatctatggctctgctaatattgattttaaaactataacgttcatctttttcttgctttaaattcaagctgtttttaaaatcaaatctttatccccaaccaaaatgtagattttttagttcaccagagaacttcaactgacctaaytaaaactaaaagttcctagctgctt

SEQ ID NO: 165551 - DNA, 607 bp, Homo sapiens
aaaaccagtcacaaaggactatctattttattgatttcatttctatgaaatttccagaataggcaaatctataaagatagaaagtagactatgtattgtttatgtttgctgggatgaaggaattcatgggtgacggctaatgactgcagggttcttcttgagctaatgaaatgttctaaattgattgtgatgatggatgaacaattcttgtgaatatactaaaaggcactgaagtgtttcctttaaatggatgaattgtatgataagtgaattatatgtcaatgcaattatttttaaaatgtaagtytagccaatttgaaacaaatagtaatactatgcagatttcgtcattattggtttgctttacattttaagaccaattgtccctcagaaataataccacttcttaatttctcagcctccaaagcatgggactatacctgcatttccatatcttaagggtgaatcctgttgttctcaaataattcagaacaaaaagagaggacattaacagaatatgtgcggaaggagtgaaaaaaaagtttcatggaaaaattagctctttttagaaataaaatctctgaattagaaggttttaaaaaaatac

SEQ ID NO: 165552 - DNA, 549 bp, Homo sapiens
aactcactcatgtgcctcaggaacagagacaacttctctctgaattcctttcaaccctacagagaacttgtgttttgaatttgttttcttgattgttcttgcttctattttgtcatggacatgaatttattctagatacataatagtgctaatgagcttggatataattcaggatattcaggcatgatagtattaaatttttagggataggaagaaaataatcttttaaagcaggttcagtgaatatgaccattgtgctcagtactttcctcacaacaatcctaagcatttactattattatctgcatcttaaatataaaaaaaaagagggtctgagaagtagagaggctctaataaattatgccattctatctccagaggtttcctctcgattgcatgctgcagtagcagacktgggtagcaattattccaactttatgtaacaattaagattgggctcaggaaaactcctaaacatgattgttatggtttgattgcctttacaggaaagaaaaataaaataaataaatgagtgcttgtttagccaat

SEQ ID NO: 165553 - DNA, 411 bp, Homo sapiens
aattcacagatttgccagactctggtttggctaygtgacttgtttactgcaatgggacaatagcaaataggatgcaagcagcggtttagcaaataagatgcaagcagatgtctgacatttttacacttaggcttttcctcttttgctgccttttgagcttcatgccaccatgtaaacaagtatgggctagctggtgagatgatgagagtcatgtgatctgtgacccagttacacccatcatctctgctgagagcaagtcaactggcagatgtgcgagtggggacgtttggaaccagccagcttctatctatcccataagttgaccagtcacatgagcaagcccagattcagtccttggccacaccagatgtgcctagaagaattaaaagtcaaataactggctgtagttgt

SEQ ID NO: 165554 - DNA, 437 bp, Homo sapiens
gtgtcagttaccttaccccaggcctgatagaagcctctcagaaacaagaggtttctctctgtgcttctgtgcttaggcttagttgtagagaatcagaaccaaatcttagcttcacaacttactggatgtatgaccctttccaagacatgatttataaaatggggtagtaaaataatatttttgtaaattgtgagaatgacatgaaccatttctccattaccacccactttttgtcacattacaacctaygtacgtaaagacaatgtaacttctttgagggccacactgtgactttcgtatgctgtacgtgcttttgcctttgttacccccttcttctataaacacatattgaaaattatattttataacttcattggtataaagacaaatgtaatctttgaccttacaggttaatgtttctcttattattaaaaata

SEQ ID NO: 165555 - DNA, 512 bp, Homo sapiens
tggtaccttcaaatattacaaatattataattaacagacagaatataaaacaaatgcttcacatgcctaaaggactaaaattcagttatggtgcaaatttaaaaagaaccatgtaggcagacatcatcctaaacaaatgttaaattactatcaccaataataagatatatcaatatcatgtacccctgataagcactgagaagatcacaacactacttctttagattgtgccaaaaatgtaaaaactgaatctaatcatgagaaaacctacacgttgataatattctacaaaatagctgactattactcctcagaagtgtcaggtcatgaaagaccaggaaagactgacaagctgtcgcagatttcaatacataaaaactaaatgcaatgggaatcttagatgggatgctaaaacatcaaagggaaattaaaggtaaactagtttcaaagatttgagtaaagactgtagttctgttaataytcgtttatcaatgttaattttttggtttcag

SEQ ID NO: 165556 - DNA, 616 bp, Homo sapiens
tagacttcagattcaagtttctttgggaatcgagacttatttacaagattcacttactagctctggaaaaacaaagttactgaactcctctagatctcaactaactctcctgaaaggatagtcacaactaccttaaaagsttgttacaacaattaaaaaatatatatggtttctaatattttcagtaagtggcaagtaaatgtaaaataaaaacattaagagcaaatcaaattctgagatctcagatttagacaatattgagtaagtacatgaactttggagtcagatacacctaaatcacagattctctatttcctagatatataatttttatcattttcagaaaactatttaacatgataaagatttctcaactgaaacatggagaaatgatagtatttcctcatgcactttactaataatcatgtagatgtttagtattaaaatttaattggcagtaaatttaaatgacatagaaattttttcaaatttagctcttacctcaatataaataaggtaaatgacttcaagcagaatgacgtcggagccccaggcatgaacatgcaggctttccttcatagctttactagagcacacagcacagaagttaaagagt

SEQ ID NO: 165557 - DNA, 455 bp, Homo sapiens
ggtgccggcagaatctggggaaacttatgacaggaggctaaggcagcagctagtgaggtgggtatactaaagccctatctgcagcaccaaattccgatgtggtgctatgtggagaaatttggagtagagaggcttctaccttctttcctctttgggactccgaaggttgataatttttttcttttgaatatttgggggcaactgcttcagaataaatacaaagtcattagacacagaaagaaacaatattaatactttttatttgctcccatatggcataaattttaatgtgtggcttctcagactttaatgtrtatacagatcaccttagcctcttgttaaaatgcaagttctgattcagttgttctaggtagggagcttcaatttctacatttcacacaagttcctacatgatgtgagtgaatctggaagcacaccttttgagttgcaagggc

SEQ ID NO: 165558 - DNA, 474 bp, Homo sapiens
aatattgtttattttttaaagtactatattgtaaacatatataggaataaataatggtttttattactttaagttctagggtacatgtgcacaatgtacaggtttgttacatatgtatacatgtgccatrttggtgcgctgcacccattaattcgtcatttacattaggtatatctcctaatgctatccctcctctctccccccaccccatgacaggccccagtgtgtgatgttcctcaattttaaaatgaagttatatgtatgagatttaatatctagaaagattataaaactagcaaaaattaagagcacataatcaagtatagttttcaaaatataattgtgctattaaaatttggaaaggtaaaattctgaacaatccaggagaaaagtgaaaagttgttaggtcagagcttcatccagtgacacagggatactctaggaccatctcaggcatcatctatgatattaaca

SEQ ID NO: 165559 - DNA, 474 bp, Homo sapiens
aatattgtttattttttaaagtactatattgtaaacatatataggaataaataatggtttttattactttaagttctagggtacatgtgcacaatgtacaggtttgttacatatgtatacatgtgccatgttggtgcgctgcacccattaaytcgtcatttacattaggtatatctcctaatgctatccctcctctctccccccaccccatgacaggccccagtgtgtgatgttcctcaattttaaaatgaagttatatgtatgagatttaatatctagaaagattataaaactagcaaaaattaagagcacataatcaagtatagttttcaaaatataattgtgctattaaaatttggaaaggtaaaattctgaacaatccaggagaaaagtgaaaagttgttaggtcagagcttcatccagtgacacagggatactctaggaccatctcaggcatcatctatgatattaaca

SEQ ID NO: 165560 - DNA, 474 bp, Homo sapiens
aatattgtttattttttaaagtactatattgtaaacatatataggaataaataatggtttttattactttaagttctagggtacatgtgcacaatgtacaggtttgttacatatgtatacatgtgccatgttggtgcgctgcacccattaattcgtcatttacattaggtatatctcctaatgctatccctcctctctcccccsaccccatgacaggccccagtgtgtgatgttcctcaattttaaaatgaagttatatgtatgagatttaatatctagaaagattataaaactagcaaaaattaagagcacataatcaagtatagttttcaaaatataattgtgctattaaaatttggaaaggtaaaattctgaacaatccaggagaaaagtgaaaagttgttaggtcagagcttcatccagtgacacagggatactctaggaccatctcaggcatcatctatgatattaaca

SEQ ID NO: 165561 - DNA, 509 bp, Homo sapiens
cctttggaaaaagtgcaacttgatttctatagagaacaacagagaaaatgaagtttgcttatatgaaatctgaaacatatgccttgtgtgctcactgtgtggggagattgggcactaaaggctttcttctaaaagctctctaataaaaatataaagtcctttactcacctggggatacaaaccacagctaataaatggaattggattcgagtactctactcgagacagaggakagtgaccgtctccaaatgactctacattgtatcctttattacctaaattacacaccagttaactcccaaatgaaacaatatttgttgtaaggtggggcatccagatcctatttgtgcaccaagttttaattttggttgagattttaattagatttcttaggcatctctattttaccatagacattttaatcaaagtacttttccttcctcatttatttgtagtaggtcttcagtgttttctcactacaataaataattattgtagaatggccacaa

SEQ ID NO: 165562 - DNA, 509 bp, Homo sapiens
cctttggaaaaagtgcaacttgatttctatagagaacaacagagaaaatgaagtttgcttatatgaaatctgaaacatatgccttgtgtgctcactgtgtggggagattgggcactaaaggctttcttctaaaagctctctaataaaaatataaagtcctttactcacctggggatacaaaccacagctaataaatggaattggattcgagtactctactcgagacagaggatagtgaccgtctccaaatgactctacaytgtatcctttattacctaaattacacaccagttaactcccaaatgaaacaatatttgttgtaaggtggggcatccagatcctatttgtgcaccaagttttaattttggttgagattttaattagatttcttaggcatctctattttaccatagacattttaatcaaagtacttttccttcctcatttatttgtagtaggtcttcagtgttttctcactacaataaataattattgtagaatggccacaa

SEQ ID NO: 165563 - DNA, 509 bp, Homo sapiens
cctttggaaaaagtgcaacttgatttctatagagaacaacagagaaaatgaagtttgcttatatgaaatctgaaacatatgccttgtgtgctcactgtgtggggagattgggcactaaaggctttcttctaaaagctctctaataaaaatataaagtcctttactcacctggggatacaaaccacagctaataaatggaattggattcgagtactctactcgagacagaggatagtgaccgtctccaaatgactctacattgtatcctttattacctaaattacacaccagttaactcccaaatgaaacaatatttgttgtaaggtgggrcatccagatcctatttgtgcaccaagttttaattttggttgagattttaattagatttcttaggcatctctattttaccatagacattttaatcaaagtacttttccttcctcatttatttgtagtaggtcttcagtgttttctcactacaataaataattattgtagaatggccacaa

SEQ ID NO: 165564 - DNA, 509 bp, Homo sapiens
cctttggaaaaagtgcaacttgatttctatagagaacaacagagaaaatgaagtttgcttatatgaaatctgaaacatatgccttgtgtgctcactgtgtggggagattgggcactaaaggctttcttctaaaagctctctaataaaaatataaagtcctttactcacctggggatacaaaccacagctaataaatggaattggattcgagtactctactcgagacagaggatagtgaccgtctccaaatgactctacattgtatcctttattacctaaattacacaccagttaactcccaaatgaaacaatatttgttgtaaggtggggcatccagatcctatttgtgcaccaagttttaattttggttgagattttaattagatttcttaggcatctctattttaccatagacattttaatcaaagtacttttccttcctcatttatttgtagtaggtcttcagtgttttctcactacaakaaataattattgtagaatggccacaa

SEQ ID NO: 165565 - DNA, 554 bp, Homo sapiens
gtgatttataaagaaaagacatttatttgcctcacagtcctgtaggctgtacaagcagcatggtgtcagcatctgcttctgaggccttcagaaacttacactcatgttggaaagcaaaatgagagctgacataccacatrgcaagagagggagcaagaggcagaggaagaggtcccagactccctttaaacaaccaactcttgcagaacatactcatcaccaagaggatggtgctaagccattcatgagggatccagccccatggaccaacatctcccactaggccacacctccaacactaagggtcatatttcaacatgagatttggagagggtgcacattcaaacattatcgccattgtgtagatataccattttgtttattcatttatcatttgatgggcatttaagaaggaaaatataaaaactgtacattaaatttgtatatcaactgaaagattcatccacctcttcgaaaggctgaaatatggtaaaacataaatctcaaaattgaagaagtggggtcatttactaaaaacattctgttcaagctgt

SEQ ID NO: 165566 - DNA, 554 bp, Homo sapiens
gtgatttataaagaaaagacatttatttgcctcacagtcctgtaggctgtacaagcagcatggtgtcagcatctgcttctgaggccttcagaaacttacactcatgttggaaagcaaaatgagagctgacataccacatggcaagagagggagcaagaggcagaggaagaggtcccagactccctttaaacaaccaactcttgcagaacatactcatcaccaagaggatggtgctaagcsattcatgagggatccagccccatggaccaacatctcccactaggccacacctccaacactaagggtcatatttcaacatgagatttggagagggtgcacattcaaacattatcgccattgtgtagatataccattttgtttattcatttatcatttgatgggcatttaagaaggaaaatataaaaactgtacattaaatttgtatatcaactgaaagattcatccacctcttcgaaaggctgaaatatggtaaaacataaatctcaaaattgaagaagtggggtcatttactaaaaacattctgttcaagctgt

SEQ ID NO: 165567 - DNA, 554 bp, Homo sapiens
gtgatttataaagaaaagacatttatttgcctcacagtcctgtaggctgtacaagcagcatggtgtcagcatctgcttctgaggccttcagaaacttacactcatgttggaaagcaaaatgagagctgacataccacatggcaagagagggagcaagaggcagaggaagaggtcccagactccctttaaacaaccaactcttgcagaacatactcatcaccaagaggatggtgctaagccattcatgagggatccagccccatggaccaacatctcccactaggccacacctccaacactaaggrtcatatttcaacatgagatttggagagggtgcacattcaaacattatcgccattgtgtagatataccattttgtttattcatttatcatttgatgggcatttaagaaggaaaatataaaaactgtacattaaatttgtatatcaactgaaagattcatccacctcttcgaaaggctgaaatatggtaaaacataaatctcaaaattgaagaagtggggtcatttactaaaaacattctgttcaagctgt

SEQ ID NO: 165568 - DNA, 521 bp, Homo sapiens
aaaattttatgttttaaatatgtacagtttatcataactcaattatacctcaaggctatttttaaatgcatgttactaaataattgtataaattaatragtgcaagtaccaaattcatgcctactaatgacattcaggcagaaaaaaattaaaataagtcattactattagcaataaaaggggtcaggatggctagcatttagtatttttaatacttggcaacagggctccatcctactagctatgctgagggaaacagtttcagttatacacaatctggtaataggatcatctagtaatgactaagagcctatgttttggccctcaaattttaaccataaccttaccaaaaacatacacacacttggttcctccacagagatatgaaaaaaatggcaagacagataggtatgtattcatttcataagcagattaaagctagcaagcactccgaagctggaagcagtcctattgttacactgctaaacatgtcacacacctggctaagtcatgtgggtgtc

SEQ ID NO: 165569 - DNA, 600 bp, Homo sapiens
acataataaatggaaaatattatctcgggtttccaatggcattgcctttttatttccatttgctttggtaattggaaggtagaacagatggtgacaatctcattgaatatgttgtgcccattataatagcccattctgccaagtgattgttcatgagcaaaggatgtattataaaggactgttgctttcagaaacatgatgagctcagtgggatggacgattatgcagggggtagagtgggtggtttatggcccttagatagagctgttttgtaaaattaatgacacctgttgcaattcacagakgagcaaatggagacataaaagtgagcaagtggatttgactaggttgttagcaccaactctagcatgaaaaagctctcaggcgcttcgccaatgaggctaacctttcccaaaatagtgccctatttctggccctgcctgaagcccaagaagaacaactgcaaactatgtatatgcctcatatttggaaaggccttgccaggcgtggtggctcacgcctgtaatcccagcactttgggaggccaaggcaggcacatcacctgaggtcaggagttcgagaccagcctggccagcatgg

SEQ ID NO: 165570 - DNA, 547 bp, Homo sapiens
tgttcaagaaaaattaaccctatcatcatcattgtccttattgttatttgctcgtttcacttaatacatatcttgagtcccaggttacatgcattttgttttamatatctcaaaatctagaaaaagaaacagacacataaataaataactcagtaacaaactatattttgctaaagttgaaacatttacagacacacagaaagctgagcaacctattcttctatagaggctcctatagtggtgagggtgagggatagaggaaatcttcaataaagatgtgccactttagttatatattgagtaacatgtaggagtctgaaggatgaagaatttaatatatggttaagtcttcttcctcagcataatcaatttgaatcttcactggcttacaaaacacttggattttttttagccttgatgctgatactgtatgcagtgggagagagacataatatataacataataaaagtgctgtgtgagacaaagtttacatcctcaaaacaatgacggtatatatgccaggacacttatttgggaataataaaa

SEQ ID NO: 165571 - DNA, 583 bp, Homo sapiens
gtgtgcttatgtagaccaaagtacctgtacaggaatattaatagcagcattgctggaaatgcaatgacggtccatcaagactagagtggataaaaatcaatgtaatatggttttataaagtgaaattctacacatcaacaaaaatgaatgaatgcagctgcacacaacatagttatgcttaagaacataaatttgaacaaaagacttaaaatgaaacatacagaattattctatctacataaagttcaaaatacgcaaaactgaaattactgtgtgtgtactgagataaaattatctttaaaatcaatatgcatatatgaatgcatatatacatatataaaatcaatatggatatataaatttaatatatatatagktatattaaaaaacagggtctcactctgttgcacaggctgaagtgcagtgcctgctttaacggctcactgcagcctcgaccttcctgggctaaggtgattctcctacattagcctcccaagtagctgggactatgggcacacaccactatgcctggctaatttttgtattttttgtagagacgaggtctccctatgttgcccaggct

SEQ ID NO: 165572 - DNA, 363 bp, Homo sapiens
cgttttgccagtattttactgaggatttttgcgtcgatgttcatcagggatatcctrgcaatataggttcatgatgatatgtcatattttgatcgtttctttaaaaatattttacaattctttattattttcttccattttgttatttcttgggcaatttaaaagtatttttgctttaattttaaagttttgaaacttttttctttctcattaatttctagtttcatttcactgtgatcagaaaacatattctattatttcatcctgaaaatctcttaagggtttatttgtcacattttagtctattttaataaatattcgctataatgattattgaaaacctaaatttataatggtaaattt

SEQ ID NO: 165573 - DNA, 584 bp, Homo sapiens
cgttttgccagtattttactgaggatttttgcgtcgatgttcatcagggatatcctagcaatataggttcatgatgatatgtcatattttgatcgtttctttaaaaatattttacaattctttattattttcttccattttgttatttcttgggcaatttaaaagtatttttgctttaattttaaagttttgaaacttttttctttctcattaatttctagtttcatttcactgtgatcagaaaacatattctattatttcatcctgaaaatctcttaagggtttatttgtcacattttagtctattttaataaatattcgctataatgattattgaamacctaaatttataatggtaaatttcataagtgatatatggctgtttcagactcttgtgctcctcaattaggttattaagcagaaaatcagtcaaaatgtgtagcactataacttacaagatgagtctttataccaagagttacagcagttctctcaatcttgaataattctttgttgtcagtgttgtcctgtgtttttagaggccgttcttgtcctctgcccattaaggggcagtggcagtcccc

SEQ ID NO: 165574 - DNA, 584 bp, Homo sapiens
cgttttgccagtattttactgaggatttttgcgtcgatgttcatcagggatatcctagcaatataggttcatgatgatatgtcatattttgatcgtttctttaaaaatattttacaattctttattattttcttccattttgttatttcttgggcaatttaaaagtatttttgctttaattttaaagttttgaaacttttttctttctcattaatttctagtttcatttcactgtgatcagaaaacatattctattatttcatcctgaaaatctcttaagggtttatttgtcacattttagtctattttaataaatattcgctataatgattattgaaaacctaaatttataatgrtaaatttcataagtgatatatggctgtttcagactcttgtgctcctcaattaggttattaagcagaaaatcagtcaaaatgtgtagcactataacttacaagatgagtctttataccaagagttacagcagttctctcaatcttgaataattctttgttgtcagtgttgtcctgtgtttttagaggccgttcttgtcctctgcccattaaggggcagtggcagtcccc

SEQ ID NO: 165575 - DNA, 529 bp, Homo sapiens
aagtagcaaatgacctcggcagtggtgagacatcagccttgtcccatcagttccatcaatccagccattgacctaagaatgcacaaactaaaggaaaaaagtctcttggtctcttgatccagccattgacctaagaatgcacaaactaaagaaaaaaagtctcttggtcaagaaccattaaaaatttcattcctcatgttggaatttttcctttattttacctaatttttgtgagacatgtaagacacttggtattaataataatattgccttatatgggtgaaaactaagaccctgaaaaattaaggaaattgaggaatctcacaagcaactggtacttaacgaataccatgcagcctatgccttatgaatacagacttagaacctgaattctgttttaagtactttgcttgatgatgcgcasttgtgaacttacctgagccaattgtcttttcctcaccacaaagctttgtagagatgctgattatttttagtctagctacacttttttctaaagactcagatacag

SEQ ID NO: 165576 - DNA, 367 bp, Homo sapiens
gtaagctgaaatactattttttgttgttgctgtagataaatttgaaccgcgggattcaaatagcataatttctggatctccgaatagttattgaaggtcagtgggggtcatgacctataggtgccagacaaataaggtaaaggagctggcttaaggcacagaagagtgttacagagggtggtaaaataggtmtaatgttgtcacatcttatgccttaaaaagaaaagtttcataaggtgtacatataccaaaatatcatgttgtacacaacaaatacacacattttttgtgtcaactttatctcaatagagctggggggagagtccatatatatcttttataatgtagagttaagccattttttaat

SEQ ID NO: 165577 - DNA, 462 bp, Homo sapiens
tatacttatttgaccagaaacaacttcttccctgcactcagctcatgagaccagtgtttagcagaacatacactgtgaatttctgccatctgtctcaatggctttgagtggggkgaggggaaattatacttaagtacttgagagtgcagttagtcatgtcccctggttcattgtatacaatcatcagtgatccctggggcaaaaccctattttgatcaattgattgatcaacaagttcccctttaacttcattctctcatgcttcccctataggcaaccatatcactttgtttaatgtgaatgttttcattcatatatattcttatgttgggacggcaaaggagtggagggggtgaggaaggaactgacaccctagaatattcctttttgtatatagttttgactttctcaagactttaatcctctacataataaaaatagctaaatcaataagggtggaag

SEQ ID NO: 165578 - DNA, 368 bp, Homo sapiens
tcactttatggaatattttgcattatattttaattaaagttataattacagaactaaatataattagcttctttcttcaaaagaaattggaagtgaacttactttattcaattttcaatgtgtttcttgcagtgttacatagtttattctaattaattgaaggagaactcataaatattttatcaacatggggatgtgatyaaaaactcgagaatttttcccttactttttaattttataccccctaatttttggctcttgctcaaatgtatacagatgatgtagaaggttgaagtccctcattatgttccctcttaacctgatgcttagccgccaggttggttgaagcatttattccttcattttct

SEQ ID NO: 165579 - DNA, 368 bp, Homo sapiens
tcactttatggaatattttgcattatattttaattaaagttataattacagaactaaatataattagcttctttcttcaaaagaaattggaagtgaacttactttattcaattttcaatgtgtttcttgcagtgttacatagtttattctaattaattgaaggagaactcataaatattttatcaacatggggatgtgatcaaaaactcgagaatttttcccttactttttaattttataccccctaatttttggctcttgctcaaatgtatacagatgatgtasaaggttgaagtccctcattatgttccctcttaacctgatgcttagccgccaggttggttgaagcatttattccttcattttct

SEQ ID NO: 165580 - DNA, 458 bp, Homo sapiens
gataactgactatacgtgctggacatcagttctccctagaaagaataaaaataatgaataattatacctcaaatagaatatcaaagagagaacactagaacccagtggagggctcacaggaaaaacctgaagcacagaaaaagaaggaagagaaaggccaacttagtcatgatcagctagaagcctggagcgactcagtattggaggtaagggtaagtgcaagagttttggtagccctcatccctactgcagacttccgggattggaactatgggagagctcctctgttctcatgactgcactagtatgggtggtaatttggagaatayatgagagcattgcaccagactgtaaactcatactgggtcactcaccctacacccagactcagtggctgcagcaggatgccactctgacagcacagttctcagggactgcatcctgccctaggaacctca

SEQ ID NO: 165581 - DNA, 545 bp, Homo sapiens
gtgtaatgatcaaatcagagtaattagaatatccatcaccttaaatgtttatcatttctttgtattgtgaacattcaaaatcctctcttctagctttgtgaaaatatatgataaattattgttaactgtatttgccctatagtgccatagaacatgagaacttattcctcttattatctagctatctagctgtaattttgtatcttgaaccaacctctccctatccttccctgcctcctactcatcccagcctctataaccacaattttcctctgttcagttsttcaactcccacatgtgtgtgagaacacatagtatttatttttctttgatgacttatttcacttaacataataccttccagactttttcatgttgccacaaatgacaggattttattctttttaatggttggatagcttctattgtgtatatataccatattttctttatctattcatctggtgatgaacatttaggttgatcccatatcttggctatgtgaatagtgttgcaataaacatggggggcagatatatgcttgt

SEQ ID NO: 165582 - DNA, 545 bp, Homo sapiens
gtgtaatgatcaaatcagagtaattagaatatccatcaccttaaatgtttatcatttctttgtattgtgaacattcaaaatcctctcttctagctttgtgaaaatatatgataaattattgttaactgtatttgccctatagtgccatagaacatgagaacttattcctcttattatctagctatctagctgtaattttgtatcttgaaccaacctctccctatccttccctgcctcctactcatcccagcctctataaccacaattttcctctgttcagttgttcaactcccacatrtgtgtgagaacacatagtatttatttttctttgatgacttatttcacttaacataataccttccagactttttcatgttgccacaaatgacaggattttattctttttaatggttggatagcttctattgtgtatatataccatattttctttatctattcatctggtgatgaacatttaggttgatcccatatcttggctatgtgaatagtgttgcaataaacatggggggcagatatatgcttgt

SEQ ID NO: 165583 - DNA, 537 bp, Homo sapiens
gaaaacagcaataagaaagaagtttatagctataagtgactacatcaaaaaagaagaaatacttcaaaatgaacaacctaacaatgaatcttaaagagcttgaaaagcaaaaggaaaccaaacccaaagttagtaaaaaacaataataataaagataagaacagaaaataattgaaataaaaatttaaaaaatcaacaaaacaaaaagctggatttttgaaaagataaacttgacaaactctttggcagacttgaaaaagaagaagactgaaataaataaaatcataaataaaaaaggtgacattacaaccaaaatcacagaaattcaaaggattattgatactaggcaactatatgccaataaattaaaacaccaaaaaaaaaggataaatttcyagacacatatgtccaccaatactgaaccaggaagacattcaaaaacatgaacagaccaataacaagtaatgagattgaaggtgtaataaaaattctcccagcaaagaaaatactgggacccaatgacttcactgatgaatt

SEQ ID NO: 165584 - DNA, 628 bp, Homo sapiens
gccactgtaattcaaaccgctttttcatgtacattaaacttgcaataaactttttgtctatctgccatcagtactaactgaaaaaaatgagatgccattgaatattactgggatttttaattgaatacatattcaatctatatctgtagctgggactctayacttagctgatttgaatatgttaagggaccaaacattattagtcaaatcaataagactgaagtatgtacatacacaccaacgactgataatttttgtccatgcatttattctccactttcatctacatttaagaatgcttgtaaatgtaaatatattataaaataataatcttatttattgcagcattattcacaagagccaagacatggaatcaacttagttgtccagttaatggatgaatgaataaagaaaatgtggtacatatacacataaaatattattcagctgtaaaatgggtgaaatcttgttatttgcaacaacatggatggaactgcaggacattatgttaagtgaaatatgttacgtcaagttcattgtgttacgtgaaataagcctggcacaaaaagataaatatcacatattctcattcatatgtgtgagcttaaaaaaaaaatgaactcatgga

SEQ ID NO: 165585 - DNA, 628 bp, Homo sapiens
gccactgtaattcaaaccgctttttcatgtacattaaacttgcaataaactttttgtctatctgccatcagtactaactgaaaaaaatgagatgccattgaatattactgggatttttaattgaatacatattcaatctatatctgtagctgggactctacacttagctgatttgaatatgttaagggaccaaacattattagtcaaatcaataagactgaagtatgtacatacacaccaacgactgataatttttgtccatgcatttattctccactttcatctacatttaagaatgcttgtaaatgtaaatatattataaaataataatcttatttattgcagcattattcacaagagccaagacatggaatcaacttagttgtccagttaatggatgaatgaataaagaaaatgtggtacatatacacataaaatattattcagctgtaaaatgggtgaaatcttgttatttgcaacaacatggatggaactgcaggacattatgttaagtgaaatatgttaygtcaagttcattgtgttacgtgaaataagcctggcacaaaaagataaatatcacatattctcattcatatgtgtgagcttaaaaaaaaaatgaactcatgga

SEQ ID NO: 165586 - DNA, 510 bp, Homo sapiens
ttgcataagtaacaaggtgctgaatattaatagctgagccaatagggaaaacatctccagggcatgtcagagatcttcatggcagcccttctcatcacaggcctggaagcctagacaagaaaaacagttttttgggccagacccagggccctgcttctctgtgcagcctcaggacttgttgcctgtgtcccagtcactccagctccagccatggctaaaaagagccaaggtacaccttgggctgtggcttcagaaggtacaagccccaatccttggtggctttcatgtggtgttgggcctgcaagtgtgcagaaggcaagaattaaggtttggtaacctctgtctakatttcacaggatgaatgaaaatggctggatgtccatatagaagtctgttccaagggtggagccctcatagataacctctactaaggcaccacagaggggaaatgtgaaaaattattatagttattgtttttgattagttcattgtttagtctttctatttagg

SEQ ID NO: 165587 - DNA, 510 bp, Homo sapiens
ttgcataagtaacaaggtgctgaatattaatagctgagccaatagggaaaacatctccagggcatgtcagagatcttcatggcagcccttctcatcacaggcctggaagcctagacaagaaaaacagttttttgggccagacccagggccctgcttctctgtgcagcctcaggacttgttgcctgtgtcccagtcactccagctccagccatggctaaaaagagccaaggtacaccttgggctgtggcttcagaaggtacaagccccaatccttggtggctttcatgtggtgttgggcctgcaagtgtgcagaaggcaagaattaaggtttggtaacctctgtctatatttcacaggatgaatgraaatggctggatgtccatatagaagtctgttccaagggtggagccctcatagataacctctactaaggcaccacagaggggaaatgtgaaaaattattatagttattgtttttgattagttcattgtttagtctttctatttagg

SEQ ID NO: 165588 - DNA, 534 bp, Homo sapiens
ttgtttagtgactggcaagattatttcagagtagtctaagtctgcctttcagaataaagtctatgatgtcgttccttaggtacacagctttggatatgctcatatttaccctgggatgccagtggatttggaaggagttttttttttttctctctctctctctcttttcctgactaaaacaagcttttccactccatttattcctggctgattgttctattgttttaaaagatgttcagaggcataaattacctcgtcaacttatcaaatcaaatttgggatcctttgtagggacagttccttgaggtcasttttgataactcttttgaccccaggggggctctttctggctatgtctacccaatttctatttgggtaactacattttagcctgtacgcccaatgaatctatcaatctcctactgttttagtcagggttctctggagggatagaaataataggacatatgtgtataagaaaaggagtttatattaaggagaattgattaacgtgataacaaggtgaagtcccat

SEQ ID NO: 165589 - DNA, 534 bp, Homo sapiens
ttgtttagtgactggcaagattatttcagagtagtctaagtctgcctttcagaataaagtctatgatgtcgttccttaggtacacagctttggatatgctcatatttaccctgggatgccagtggatttggaaggagttttttttttttctctctctctctctcttttcctgactaaaacaagcttttccactccatttattcctggctgattgttctattgttttaaaagatgttcagaggcataaattacctcgtcaacttatcaaatcaaatttgggatcctttgtagggacagttccttgaggtcacttttgataactcttttgmccccaggggggctctttctggctatgtctacccaatttctatttgggtaactacattttagcctgtacgcccaatgaatctatcaatctcctactgttttagtcagggttctctggagggatagaaataataggacatatgtgtataagaaaaggagtttatattaaggagaattgattaacgtgataacaaggtgaagtcccat

SEQ ID NO: 165590 - DNA, 594 bp, Homo sapiens
tgattgttctattgttttaaaagatgttcagaggcataaattacctcgtcaacttatcaaatcaaatttgggatcctttgtagggacagttccttgaggtcacttttgataactcttttgaccccaggggggctctttctggctatgtctacccaawttctatttgggtaactacattttagcctgtacgcccaatgaatctatcaatctcctactgttttagtcagggttctctggagggatagaaataataggacatatgtgtataagaaaaggagtttatattaaggagaattgattaacgtgataacaaggtgaagtcccatgtgaggtgaagtcccacaacaggctgtctctaatctgaagagcaaggaagccagtagtggctcagtccaagtcccaaagccaaaaaagtagggaagccaaaagcatagccttcaggctatggttgaagccctgagatcccctggaaaaccactggtgtaagtccaagtccaaaggaggaagaacctaaagtctgatgttcaaggacagaaagcattcaacatgggagaaagatgaaaaccagaagattcagcaacccagcatagtcca

SEQ ID NO: 165591 - DNA, 485 bp, Homo sapiens
acccccatgggcctggctaagggtaatgagagccctgatattctcagtcatgctctgctcaaaacagaatattaatctcataattgggaattagccaaatgaagagaatccccacttcttggctgaacttgcccagaagtttggctcagtaactaatagctggacacagagctamtcctgcctctccaaggaaaatggcattttgagtgccagctggtggagagggagccctgtgttcatgcctgtaccactctaggatggtgtttctttcttactgaaatgcagaagacggaaaaataagtgttttatttcaactaccaaaaacttcatatttctcacagttttactatattttcttagataaatatttatttttaatataaccttagggacatttcctggaattttaaatgcttggtttttaactttgtggtttttgttcttattgttttcaataatttaataattttgttgctttaataata

SEQ ID NO: 165592 - DNA, 485 bp, Homo sapiens
acccccatgggcctggctaagggtaatgagagccctgatattctcagtcatgctctgctcaaaacagaatattaatctcataattgggaattagccaaatgaagagaatccccacttcttggctgaacttgcccagaagtttggctcagtaactaatagctggacacagagctaatcctgcctctccaaggaaaatggcattttgagtgccagctggtggagagggagccctgtgttcatgcctgtaccactckaggatggtgtttctttcttactgaaatgcagaagacggaaaaataagtgttttatttcaactaccaaaaacttcatatttctcacagttttactatattttcttagataaatatttatttttaatataaccttagggacatttcctggaattttaaatgcttggtttttaactttgtggtttttgttcttattgttttcaataatttaataattttgttgctttaataata

SEQ ID NO: 165593 - DNA, 546 bp, Homo sapiens
gaatgaagatctcagaggaaaacagagtacagctccaaaagcttacgcaatattggatatagttttctaaccctcctgaagaaatatgtatgatgattttctggataaatttaaaataagaccatcctataaaatacaattatatccaatttaccaagaccttaaaaccagaaggaaatgaatgatgcaaaggaaatgaaaaaattgggggatgctaatagatggttatgacacactgtgtatttttaatagtgtctattctgaggttgcatttgaacaagacagttgagtgagatttcactcaccgaccatcatgtaattactacagcgctctaaaatcatctcttagtggttaaagaggggttaccttattaagatgtgcacctacataatcttgctgttgttggatatagtattctataactgtcactcagaccaagwtgaataatagtgctgttcaggtaaatatgtagttaatcattttttgcttatgggatttatttactactgaataagagatgttgaattctccaactattatagtga

SEQ ID NO: 165594 - DNA, 408 bp, Homo sapiens
atttagacaatttatatttaaagtaattatcaatatagttgagttagtatctttgcatcttatcttccttctttggcatttattgaacactttgcataatttaattttttctcttctcttgaaatatcagtctttctttaaaagcattactgattgttctagagttgattaaatgcatttacaactattccatatccacccaaaaataacactattytgccttccctgtcatgcaagtaacttataaagtagtcttataaaatgcttataaaatattcttataaaggtatactcaaatcttctttgttatctcttatgacattcctacaattcattttacttatccttatgttataatcacctaatacattgttactgttattactctaactaaacatttacttttcc

SEQ ID NO: 165595 - DNA, 564 bp, Homo sapiens
agttgtaccacttcttagatgttttgttatatttttctttgctatttttttgatttgcatttagttaagcaaatatttattgacaaatattcaagctcatgtatggttcccttggctgggtctagtctactatagacattctttatttctgtcacagttgtttgtgttttttttttttttttcaatttctagccttttcttttggtacttcttagtgttttcatctctgtgcttatattacccatctgtycttgcatgttgtttattttttaaagtagagtacttaacatattaattatagttattgtaagtggtttgctcaaaacttcaaaatctgtcatatctgagtcagatctgatgctttctttgttcattcaggctttttttttttttcatcattgagcgtatctcaatttcttgttgaaagtagggcttgatgttctaagtaatagaaaccgagataaacaggcctttattgtgaggttttaagttaatcaggctagagctgggttgtgtttaatgcttgccatggctgcaggtactagaggcttccaatttctctac

SEQ ID NO: 165596 - DNA, 648 bp, Homo sapiens
tgactatatttgtcttctctccataaattatcctgaaataatctacccttgtaagwtaataagcagatacctattttccttgagacacatcacaattaattcctgccatgagacccacattgggagtcagatgtaaatatataccagggaggaaaatacaaaatctgaccctaaaataaatattttatatacttcttaaataattaaaatgtttcttccaatttatatggtcatgaaatttgtgacacagaaatgtgttgcaaattatatttggggatggattatgtttggggatggattctaaggtcaatagtccatggaaaatggaatatttgcactgaattgggtgaaatttactcatgagcatatttagcagagattctggatttcttttgttagattatgtagctggaagtttaaaaaattatgtggctgattggctgaaattgaaattcaatagtggcctgcatttaatgaagctgagatgccagaatttcttgtcataatgtagaggacaaaatccaaaagttttggaagacaggagcacttgttttaatttgttgtggatgtactatacaaccatactccccgcattacacttctcaagaaggtccaggagacactgtcttcacgaaggcattgaaaagt

SEQ ID NO: 165597 - DNA, 648 bp, Homo sapiens
tgactatatttgtcttctctccataaattatcctgaaataatctacccttgtaagttaataagcagatacctattttccttgagacacatcacaattaattcctgccatgagacccacawtgggagtcagatgtaaatatataccagggaggaaaatacaaaatctgaccctaaaataaatattttatatacttcttaaataattaaaatgtttcttccaatttatatggtcatgaaatttgtgacacagaaatgtgttgcaaattatatttggggatggattatgtttggggatggattctaaggtcaatagtccatggaaaatggaatatttgcactgaattgggtgaaatttactcatgagcatatttagcagagattctggatttcttttgttagattatgtagctggaagtttaaaaaattatgtggctgattggctgaaattgaaattcaatagtggcctgcatttaatgaagctgagatgccagaatttcttgtcataatgtagaggacaaaatccaaaagttttggaagacaggagcacttgttttaatttgttgtggatgtactatacaaccatactccccgcattacacttctcaagaaggtccaggagacactgtcttcacgaaggcattgaaaagt

SEQ ID NO: 165598 - DNA, 417 bp, Homo sapiens
tttattttaaaggataagagaggagatgcaaaaatcatactaatagtatcaataaacattgagattaaattaaaaagctcattacataaccattttaaaaagtttttgatcaacaacaaaaaaactatttatctctgtattagttggctaggctgatagcaaactgccatagcctggtggtttagacaacaaaaattattttatttcaattctgatggctagatgtttgagatcaaaatgtccatgtctgaggggttagttcctcctgagagcatctttccttgacttgcagatggtcttctccttgtgtcttcacattgtccttcctctgtatgtggctgtcctaaacatgctcttcttacaagatcaccaatcaaatgggattagktttcactccagtgacttcatttaacttta

SEQ ID NO: 165599 - DNA, 628 bp, Homo sapiens
ccttttggaattcagaattctccatgtttcagtaaggtaaacctcttttacttattttgtagttttcaaagaaaagtaggtttacctgtttccttattatttacagttcagaggaaagacttttactctactgggaaagttttttgagggctctatttgggggtttttctaagataataagacttcaggcttttcacacccttaggcratacacccaagagataagatatcctagaaaagagctctgatgagaattttgagctattataccaaatgagcatgagatgagctggacagggagacttctaaatccctcccaaaggttttgctttcataagaacatcttgcaatttaaaaagacaagccttttacacttagagagctccttgtgactggaaacaatattggtatcaatatcctgttattgcacaaaaaaaagactaaatcatttggggaatagattaactgctataataaagttaagcctttttccttgggctcagctctaaacgccaagttaaacaagcaaacaaacaaaagaaaacaagacaggaagagaagcacaacttaggtctacgtcaactaatattgaatttctgattccataatctgcgaaagtctaaagctc

SEQ ID NO: 165600 - DNA, 583 bp, Homo sapiens
tgtgggcattgtatcattgttcagtaagaagaatgactgctgaactaactcgatctttgtacaaaacagctgaattcccgcatggtccccaaagggtagctgctagacaggcagatccaaaagagaggctctgaactcagctgtaccttctgtgttcccatgcttaatgggatggtctggaggaggtgaccacagtcactgggcagtctgtacttgtgcaaaagccatgcagggatgtctatacaggctcctgatctgctccctgttgctgctggagtagaaagttcctccggcttcgtaaagcagagaaagaaaataagggggcatragattgaaagaaacttgctgagatgatactaagtgacacatggggtggtgttgggggattgtttaagatgcagcagaacactagaaacataagtatcaacagcaatgttataaagttctatgctctctgcttcattcaaggcacagcttggaatactggtgtaggtgcaaggcacacagcttttcactcttctatgtcttcattacacaataccacagtggttaagagaatgggctatttgcagagatgtatgtg

SEQ ID NO: 165601 - DNA, 583 bp, Homo sapiens
tgtgggcattgtatcattgttcagtaagaagaatgactgctgaactaactcgatctttgtacaaaacagctgaattcccgcatggtccccaaagggtagctgctagacaggcagatccaaaagagaggctctgaactcagctgtaccttctgtgttcccatgcttaatgggatggtctggaggaggtgaccacagtcactgggcagtctgtacttgtgcaaaagccatgcagggatgtctatacaggctcctgatctgctccctgttgctgctggagtagaaagttcctccggcttcgtaaagcagagaaagaaaataagggggcatgagattgaaagaaacttgctgagatgatactaagtgacacakggggtggtgttgggggattgtttaagatgcagcagaacactagaaacataagtatcaacagcaatgttataaagttctatgctctctgcttcattcaaggcacagcttggaatactggtgtaggtgcaaggcacacagcttttcactcttctatgtcttcattacacaataccacagtggttaagagaatgggctatttgcagagatgtatgtg

SEQ ID NO: 165602 - DNA, 583 bp, Homo sapiens
tgtgggcattgtatcattgttcagtaagaagaatgactgctgaactaactcgatctttgtacaaaacagctgaattcccgcatggtccccaaagggtagctgctagacaggcagatccaaaagagaggctctgaactcagctgtaccttctgtgttcccatgcttaatgggatggtctggaggaggtgaccacagtcactgggcagtctgtacttgtgcaaaagccatgcagggatgtctatacaggctcctgatctgctccctgttgctgctggagtagaaagttcctccggcttcgtaaagcagagaaagaaaataagggggcatgagattgaaagaaacttgctgagatgatactaagtgacacatggrgtggtgttgggggattgtttaagatgcagcagaacactagaaacataagtatcaacagcaatgttataaagttctatgctctctgcttcattcaaggcacagcttggaatactggtgtaggtgcaaggcacacagcttttcactcttctatgtcttcattacacaataccacagtggttaagagaatgggctatttgcagagatgtatgtg

SEQ ID NO: 165603 - DNA, 583 bp, Homo sapiens
tgtgggcattgtatcattgttcagtaagaagaatgactgctgaactaactcgatctttgtacaaaacagctgaattcccgcatggtccccaaagggtagctgctagacaggcagatccaaaagagaggctctgaactcagctgtaccttctgtgttcccatgcttaatgggatggtctggaggaggtgaccacagtcactgggcagtctgtacttgtgcaaaagccatgcagggatgtctatacaggctcctgatctgctccctgttgctgctggagtagaaagttcctccggcttcgtaaagcagagaaagaaaataagggggcatgagattgaaagaaacttgctgagatgatactaagtgacacatggggtggtgttgggggattgtttaagatgcagcagaacactagaaacrtaagtatcaacagcaatgttataaagttctatgctctctgcttcattcaaggcacagcttggaatactggtgtaggtgcaaggcacacagcttttcactcttctatgtcttcattacacaataccacagtggttaagagaatgggctatttgcagagatgtatgtg

SEQ ID NO: 165604 - DNA, 429 bp, Homo sapiens
gcaaactccctcaatgaaatacagaaaaacagaaggccttccaaaccaaaatttctgatcaaatccaaaccagaagagtattcctccaaacgtgtcccctattcccttccaactggagagagaaatctcctcaaaccaagactcttactacaattcagggagatacaggcagaccccatgatggggccacagtacctttgaggccaacagagcctcttcctgcartctagggagagctggacagttcccatgatagagctgcaatgcctctagaggggccaacagatcaggagaagtggaatactcaccaaaccagctaacatttttcattccaggaattatttctctattccagttagatccatacactgtgggtaagtagcaccctgctggtagatacagtgccagagacagcctttatttgaagag

SEQ ID NO: 165605 - DNA, 547 bp, Homo sapiens
tttgtcaaatatcaaaggttcaagacacttgatgttacaaaacagaaccagtgatcagtatagaataaattattaagccaaaaatggtattttaaatatttttaaaaaccaaaacctttattatttgatagaaagagaagagactcagtttctcaaacaataaggtctaatattgggcctggtgtgaaggttcacatttataatcccagcactttgggaggccaagrcaggaggattgcttgatcccaggagttcaagaacagcctgggaaacatattctttccctggggtagctcctgttctttgggttctgggggtaataagctgttgattgaggggataattcttaaggcaagtctcacaagcattaatgacctatttgactgttggtagcacatttttacctgaaaacaatctctggggcaattgataggttttattcttactttggtggaaggcctggtgaaggtttccattggccggcagctggtagatgaaccttgccatcctctgattgtaaccatcctgaggactgaaacatgtatcc

SEQ ID NO: 165606 - DNA, 491 bp, Homo sapiens
ttcacctttttctttatcttcagccacatcttcactgtctaggatctttatgaccatctcaccagattttcttgatgaatcagctgaagcatgtgagctccatcagataggcccaaactggaatgtcaaaccagacctggtggaaaccagacaccactaccagttttatcctctctgtgtttgwgaagtaagtacagcattaggaaccattttaagctcagctgaatacacaggctttgaggattacggtggtcccctgtcatatagattgtattgctaaactgcttaataaggtaagagaaaacccatagaacgaactacctttgctttatgtacctcaccttactcaaactgccataccactgctaacagcaaccctatgctgtgttgttagaacagatgaagatgcaatgcatcagtggggtattgtatcttagtttatttgcagtgttatgtttaatttttaatatcagataatatatgcatatcaa

SEQ ID NO: 165607 - DNA, 491 bp, Homo sapiens
ttcacctttttctttatcttcagccacatcttcactgtctaggatctttatgaccatctcaccagattttcttgatgaatcagctgaagcatgtgagctccatcagataggcccaaactggaatgtcaaaccagacctggtggaaaccagacaccactaccagttttatcctctctgtgtttgtgaagtaagtacagcattaggaaccattttaagctcagctgaatacacaggctttgaggattacggtggtcccctgtcatatagattgtattgctaaactgcttaataaggtaagagaaaacccatagaacgaactacctttgctttatgtacctcaccttactcaaactgccataccactgctaacagcaaccctatrctgtgttgttagaacagatgaagatgcaatgcatcagtggggtattgtatcttagtttatttgcagtgttatgtttaatttttaatatcagataatatatgcatatcaa

SEQ ID NO: 165608 - DNA, 569 bp, Homo sapiens
gaacctaacatgctgcccaatgatgcccacctcttggtgtacacaaccttgtattctaatcccctcccagtgcgtgtggtcaagaaccgtgacttataaacaacagaataccaaaagactgacgcgatgtgacttgggtgatgatcttacataagtytgtgatttctttcttcctggcaaactctttctctttatggctttggaggagcattccgctatgtgggataaaccaacatgagaagaactgaatgcagccttaggccaacagccagcaaggcgctgaggcccttggtctaatagcctgccccagaagttgcaatatacatttacaaataaaactacattatttcacaagtattgtgagtatcttataataagagaacaatcctaaatcctctgtcctgtagcttgtatcattattcattcatgtcacctatattggagcatatatataaacatacataaaaaagtcaattgttgctattattgttttcaaccagctcttatctgttgaatcaattcacacaaggaaaaataaaagcttttattctctagagaaattactttaa

SEQ ID NO: 165609 - DNA, 614 bp, Homo sapiens
aatcttataaaattctggaacacacatcaatgacaataacacagttatataagtgtaactcaaagtatgctaaacaccattttgtacttgataatrtttcttatatgaatttaataccaaataagccaaatatgggttttttgggactttaaagtatttaatatctgcaaaaactaaacaatctccttcaaatcttagcaatttgttaaggagatccacagaattttctttacaagattaaccttttagaaacctattacaacttgcttaaaccttctgttttattccattacttttaggttaaggcaatccttaaaaccttctcaactaaacaaaattacattccctttaagaaaaatcatattctcataccttcttacaaacttttgccaaaaacacattttacttttcttaaaactgctcttctagtagtttaagtacatgttacgctgttaactcttagcaacttttacttttggtgagaaatctagtaattcagcaacttcaaccatttataagattgcaaagcccataacttttctaagcctagccaggcgacttgcctaactccatatattcctaggccttacctagaatgtaatcgctggaaaaca

SEQ ID NO: 165610 - DNA, 595 bp, Homo sapiens
agaataggaaagcatttcaggtatcctactaggagcatctggttatccataaaacttgatatttcagcctatgtgggggcaaccccagatagtctttgaaagtcagtaagaagagatcttcattcaacctcagaagtgcacagaatttccaaatatcttttagaaacttaattcattatggtgtgtgtgtgtgtgtgtgtgtgtgtatgtgtatgtgacatcgagacttctaaagccttctagagcctttatatatattcaggatgtaccatctaatgctttaactgaaaaatggctactattatggaaagtagtacttcatttatttgtcttaagttggttcctttaaaatagaggttttcaattggggtctattttttgccgccctcgaggacatttggcagtatctagagacacaactggttacaatgagggggtggacattcctggcatctggtgagtagaagccaggaattctgttaaacatcctgaaataaacaggaccacccttctccctcatcaaagaattatctkgttcaatagtgctgaatggtcaatagtgctgaggttcagaaacctttgctgtaaaagctct

SEQ ID NO: 165611 - DNA, 581 bp, Homo sapiens
agagtgtctccttttatttttcttatcacagtcctgtgaggaagacaggccaaacaatgaaaaagagaggtggggaaactggctggagccccacagaaagtataggcacaccaaactcccggctcccagaccctttcctctaaaacatactgcatcgcaggatgagtcctggcaagctgccccttccttggggatagaaagtaatgtgcccctagggaacaaaggttccaccttagtttaatattgccatcagcttctccctactgggaagyagggtctggaagcagtggcctggactcttcccaggacagcagcagcattggctctgaatctacactagcctcttctgagcaaagagctcaataattctgtctacacaaatacacacacatatgcatgtgtcagctgatttaattaagccccttctcaactcaaatggggagtttggacaaagaactgaggggttacaaaattaccagtttttgactggtgttgcttttcaattggttgctttgggatctttctggctcacagcttccttcaatagtgaattggaggcaaggaggttaggatgttaattg

SEQ ID NO: 165612 - DNA, 460 bp, Homo sapiens
gtagttgacgctttgtgcaggatgttagttttattatcaattttggcacagttagatggcaagatgcagagtttattgaccgtcagtccaggttttgaactaatagaatgattcaggaccctctttcttcattcctttaacaaccgacattggagggtgcctctgcttgagaggccatggacttctgtagttgtggatgcaaaaagagatgagccctggtgtttgggcttgggacaggcatgttatctgtcctggggaaacagtgagaggaacaggcagtggagtccttagcatgcactggcaagagcactgcctctgttgtcatttttttcattcctgcatcccagtgaagcatctaaggttaacaatctgaaaaatgagggataatatgacccacctattaggttatttgaaagattaaatgagataatcmttttaaaatatctactgtaatacatag

SEQ ID NO: 165613 - DNA, 568 bp, Homo sapiens
tatcattctcttttatttttaaaaaattattattcaatagcactgtggcattcttttttattaatggatagcattgacattaacatcaagtcaactagtttgaaagctcaaataacatttgatgtgtgtgttattaatccagaaacatttacttataaaatgtaataaaagtgatcctcattctgcatattaggaaactgaggttcaaatattacatawttgtaatgttaaaaacagtttataagttttgaagctggttatctgaactcatgtcttctggtttcaagacaaatattaatcttcaattcccggcttgaacatctaaattgaccaaaacattctctttagcaattgctttctatgataatatccagtactgactttccatcttgtttgattgtttaatttaaatggtcagacttgcctgcatatagtgtctccctcaataaggggatggggatacttagacaggaaaatcttggcaggacttcagtccctaaagctaagaagcatgttttccattgctcactgtccagagaagagaatgtcagttttacttctctcctta

SEQ ID NO: 165614 - DNA, 555 bp, Homo sapiens
aatcatcttttaaagtttatctccttttatttatctttatgacaatccattcatagctctctttggctgttttaggttattcaacgtgtaaccaaaaacataaaggaaaccttgtttccttcattcataaaacaaaaatgaaaaaataggtatatcttgcatactacagccagcagcaactatagaattagggaggaaggaggatgtacttcagaaagagagagccattgaattcagaggagaaaattatctgattcttagcagacagtagctgaagaataacaggaaagtctaatgtatttctgcccccttagatttggggtatcctgcagagcttaccttgattcagttttctttatgaagatcactttgcaggcctatagcttttctgtgagtagaaaacagctcctggcacataatcccactactaaccttcctcargcaatctgctttcctgtcctctatctgaggatgagcacttgtagacttagaggtttcacagtgttttgtacttactatgcatgagggtatggaaccctcacgtttcctcaggga

SEQ ID NO: 165615 - DNA, 582 bp, Homo sapiens
agttcctgatctctgcctcttttggattaaaggtattctatgggaatttttcattcagggaaatatttgtggagatgttatcacatattctaaatctaaacagtcattacatatgagaaatgacactttaagatgtgcgtacactcttttcataaatttgagttccctgaataaatttatattttttagcaatttgaactcaggaatctatcgtaaggggtttgagaacttcccagtgtgctactagtcctscctactggatctgcagtgtcacttggtgtgctttttgtcatacatacagggaagttagttatgttctatgtatagtgttccactgcacctatgagtcttaaacccacttcagataagtctgtatttgtctatgaagttttatgcccccttgtgatgatatatttcaactaaatgcacaagtgatgatcttttacaactaaaatcaaacagttgaatggctaggaaatatggaccttaattttgtttatctaagacattttattgggaaggcctaagcatccataagttaaaataaccatgcaaatggattactaaaatgtttaaggcact

SEQ ID NO: 165616 - DNA, 435 bp, Homo sapiens
aagcataagctttggcaagacttgccccacattcccgtgtggcaacaatgrtctgagcctgagcaataggtgtccctatttgatgcaacacaaactctgccctgttcatcatagtcaccaccactccctaatatcttcctcctcactggctccacttgtttatgacacctgcctggcctctttggctttttgagttaaagactattacagaagcctcttctatggcctaatcacctttaaatatttattagttccaatttacttgtcatgtcatgggtgccaatgagtaattgctgttaatgaatgaagatattgctggaaacaggcctgcacctagcatctgagggccctggagtgaaagtacagatatttaaatgttataaagcgagttaacaaactgttaagtaaaaatctgttctatcctcctactgtggc

SEQ ID NO: 165617 - DNA, 412 bp, Homo sapiens
gcaaaatggatattcagccctcctgggaaatacttcgttatgcaagagtttagtgcattcatgctctctgagaggaaggattgacaggttaactaatttatcttttctcttacctaagctgttctgtcattcaaattctcctagctctctggagcaatgccacacaaaccacgagggcatttggacacagtcacctttcttttcaagtatataaggcaacaatgaggataaatgtctctctgagacagaggcggtgttagacacaacagttgtgagtcacactcaaccagtgctgagaccaggtcctgaaagacagccaccatgtgtttgctaatggtcctttaaagcctggggcccagcacagarccccttttgggagcccataagtgacactggcagtcaaagtcatact

SEQ ID NO: 165618 - DNA, 572 bp, Homo sapiens
tcacctttcttttcaagtatataaggcaacaatgaggataaatgtctctctgagacagaggcggtgttagacacaacagttgtgagtcacactcaaccagtgctgagaccaggtcctgaaagacagccaccatgtgtttgctaatggtcctttaaagcctggggcccagcacagaaccccttttgggagcccataagtgacactggcagtcaaagtcatactcctggagcatggttcttatcattctagaatcccactcagaaatattcaccaatgcacaaaatacatcagacatagcattgtggaccctagatgattggactccaatacaacctgctgttctgcccttctatttttgacactttgcaaagtctcctcaagggcagagattgcagttggaacaataatgcattctagatgccaggctccatatgtgcatttcttcttcctgtctttaaaggcctgcgagtttgtgtatagtaaatttcgaaatttaaagacattaagaaattagatrctaagtaatttcttcaagattctcatgcaggtatcatttcaaaagtggtgatttt

SEQ ID NO: 165619 - DNA, 561 bp, Homo sapiens
gcaccattgttctgtatatttgtgccaggagcgatgtcacttttgatcattttaacacagaagctggctcatgaaagtcagccttcctattgacttgatgacagcctctgctcatggcaagcagtatcctatgggaaggtggtgtgcagactttgagggcagattttcaaactttttgagaacatctatcaaattttcaaggctttattatcccaagagagtgagcagctttttccaggatgtttcatgctgtttgaacactaaarataaaataaatagagaaacaaacctcctagacttagtctgctaacttcctttccattcaaactttaccctttaaagtttgaactaaaaaaaaaaaatcctggcagctctcagaccacatgagtacaactggttatttctaccttgggaggagaaggtgcgtttgattaaacattcatgccattcatttttgatagggtcacccagagttagcagataaaaactcaggatgcccagttgaatttgaatttcagatagataatgaatttatgtttagtaagtaatttacgtaagtat

SEQ ID NO: 165620 - DNA, 529 bp, Homo sapiens
aatcctgttagctgtgagtttcttttctatatacatttatatagttgaggttctgcatatatatataattctgcatcctagcttttcaaaatgatgtgagagcgagataatttcccaaagtcattagaattcattgaaaatataattkatggctataaaataattcataatagatggagtatacataatattgatttctatttcattattaccttattttttaggtgaattacaaatttttgctattaggttggagcaacagtaatttcggtttttgccattacttttaatgctgtgattaatatttttgttcataaaaatcagtactctttaaaaagaacttcccatatatttgcagcacttcttttactatgtgtggagactcctctacttacaaatagattcgtcctgaagatagtgtgtaagtccatttgttctcaagtccgaagggaccagtaaaggtattaccatctgttggtggtaggcaaagataagagttctttttctttatctagatttctaaatagaa

SEQ ID NO: 165621 - DNA, 572 bp, Homo sapiens
agtgctgagccagacatttgttgaaatattactgtggcccttttttattttcagattggagttttaattatctgtgaaggagttaagagttcttgcttgggtcaagtgtttgcaaagaagattctttaaattctgtagctctcaaattttgagttatctgcacattagtttacaatccatgtagttatatgcattatcatatatagaaattaggaatgtgggcactggagtcaaactgtttgcttaccctatttctacctcttattagttgtgtgaattagggcaaattacttaatctctgaggctctgatttttgccccataaagaggggattaaactattgtttatcttatttaaagttcacggctgggcttgttggatcctgtttgtaatcccagcactttgagaggctgaggaaggaggatcacttgaactcaaaagttggagaccagtttaggcagcatagtgagactttgtctstaatttataaaaaataaaatttaaaaaaaatttgaggattgagatgcttcatgtaaagggcttaaaatattttctgagataatgagcactga

SEQ ID NO: 165622 - DNA, 458 bp, Homo sapiens
gggcagggcagtgcctgagtcaccagatgccacccctgccggtttccaggtgagtgtgggttctcctaataagcacattcttgggcgactctttgatctgagactcctttataatttatgaggtttgcagtacaatggggccctctacaggcatcttgatgattagactcaggagaatttagatgaggaaagattaaaatgaaaccaaagaagcaagtttgcagacttaaaggcccataggaccctgtgctggcagcctaagcakcagcagcagttgggtattgaggcatgctccttctaaccaaagttacaaaagatatagagcgctggcacaaacaaaataggaccagagctctatattttttatttttcaaaagaggctagatttttaaaaatagtaaaagagcttggtttttaaatgtgggcttgatttaaaacaaacaccacgaaagctaaag

SEQ ID NO: 165623 - DNA, 610 bp, Homo sapiens
tgttgttgggaaggtagccagggttaactcatgaaggacgttgtcggccatggttaggattttgatataagccaagaatggctgacagcagatcaacatggtctgacttaggttttaaaggactgatcacacctttaaaaacatatcagacctcatgtctgcagttgtgtcaaraactgactttagaggtgtaaaagtagaaacagagaggagaggtattgcaatttcatttaatgggtctagattttgctctaatttgttttgtatttgaacacatagtttcaatcaaatttaataaaatatctgattcttctataggcccttttctggaacctagaacatatacatgactgcaggaacagtagttggctcctcatagagtaaaaatagaaatgttctttttcccagaaaaaaaatcagtaagctggtacagataaccataccacattgcctgtttttccaaaaaattacatttgggtgatatcaaatgcaaatttttgaactgcattgacagaagtcaggcatgtttagagagttagtaaactttttcagaccacagatcagcattaagtgaaatactgcttcagccactgataccttcatggcagat

SEQ ID NO: 165624 - DNA, 472 bp, Homo sapiens
ctgtgctgaattctgggatgwgttcagtttattactccagaagatttattttctgttgtgttcatattgctatttagtgttaaagttttattttttaacttcaaaatatttttcattttaaatatttctaattaattcattttcataattatcaattttatataaccccatattcttgttttataaactgttattctctcattactataatcccttttttatcttcataatgccataaaaatacttaaaatccattttgtttgcacttgtatgcctattttcctcaccctcaggttttctgtttgtcaagtctgttgtttgtccttgtctttgttaagtgcctatgttgttatgacccccgagatatctcatcctacaggatcctggtctcttgccgtaagtttgcagtggccttagccaaggctccaataatagtctggtacagaacaggccttgcagtcacggctgccag

SEQ ID NO: 165625 - DNA, 574 bp, Homo sapiens
aaattcacgatctaaatttttttaaacttattttgaaaaagaaaaatttagagttttgtaatcctaggttacaaaaagtcttttaaaggcagagataaatacaaatagtccctaatattcaatttatttggcctaaattttttcactttaccacagtgtgaaagtgacatacatttaggatgctcctctacttatgatggattatcccaacataggcccatcgttaagtctaggagcatctatacataaagtaaaaaattgacagtaaaagactgttcattggttcagcaaaacattaaaatattttataatattctgtcttaaggaaggaatgagagaaaggacagtttaatacattgttgataggaatgtaaagtaatatactttggaaagtcagcttgatgatttacattttaaaatcttaaaattttagtttcctttgtttccagtagggttggaattaacagacactatctttgactaacttaygtgaaaaataaatttgttggaaggatgttggatagttcacagaatcaaagggaaagtacgaaaacaagtccaggaaaaaagtgga

SEQ ID NO: 165626 - DNA, 521 bp, Homo sapiens
agttctatcctctagaggcaacctcatcttgactgaagcaaatgagagcttcagaatggctccctggtgagctcttgagaactcatstgtgtcactgctacactcggagggagtgggggacctcttagagattcttaagagttgcagcagcttgctggtaagttcctgagaagcccctgccctgttgtttccggatgagatctccaatgtctgctttccttccccctggcttccgtggccttcaatattccccagctttaccaacagtcaagcaagtccctaattcctaataacaaaccccttctgcccccaaaacatggagtgtctcctgttttcctgaccaaccctgactgactcaaacacatagctagataatacacatagctagataattctacaatattgctgtagtgtcatgaaaaccagactgtatcagattttatgaaaattgagtagcaggaaagtatcccagctttagaagattgagggaggcttcctagagaaactggcatctaaggtaa

SEQ ID NO: 165627 - DNA, 521 bp, Homo sapiens
agttctatcctctagaggcaacctcatcttgactgaagcaaatgagagcttcagaatggctccctggtgagctcttgagaactcatgtgtgtcactgctacactcggagggagtgggggacctcttagagattcttaagagttgcagcagcttgctggtaagttcctgagaagcccctgccctgttgtttccggatgagatctccaatgtctgctttccttccccctggcttccstggccttcaatattccccagctttaccaacagtcaagcaagtccctaattcctaataacaaaccccttctgcccccaaaacatggagtgtctcctgttttcctgaccaaccctgactgactcaaacacatagctagataatacacatagctagataattctacaatattgctgtagtgtcatgaaaaccagactgtatcagattttatgaaaattgagtagcaggaaagtatcccagctttagaagattgagggaggcttcctagagaaactggcatctaaggtaa

SEQ ID NO: 165628 - DNA, 589 bp, Homo sapiens
ggggcagaggcaggagagacaaataacccccttataggcccagatatatgtgataatatcccctgttggcagggtccaggcagaagagtcacattattacaattctaactcggtgatatgtcacagtgcacccatgggaagaaatttaagccaaaaagtctcaacacctgagtactaggccttcatctcctgaatgaggcagcgacacctacagaatcctcaggcaataaccctgccccctcatgctaaaaaataacccaactctctacgctattaaaatcaatcgtgaataccacatcgtactcaactattcatcgaaccaacatcaactctattaataatcctaataagaaagcccctcaaatgtcaatactttaccctcatatttcaggatattcctcaatagccatagccatagtataaccaaaaacaatcatcatgccctccaaataaatcaaaaagactattaaccccacgaaacccacacsaaaattcaacagtatatcacaacccacagcacccctaataattagcccctagggctccataaataagagaaagtttcaaagaaaaacctaaaaaccctata

SEQ ID NO: 165629 - DNA, 547 bp, Homo sapiens
cttgtttacaattttatttaaatacatattcagctactcactacaatataatagaatattttttgaaagatcaatggggctgaagtactaagtgaccatatactggagcttctgrgttaccaacaatttaataaaagcttggaataaaataagaccaatgacttgaaagtctgaaattatcattttcaagagtcattttgtagcaaacaagaatatagagaagactagagttatttaaattaatgaaaacatgtagttggttctgaaacacagaaaatagccttgcaaaagttcagagtggatacccatctctaatgtaataccctgcagtgacatattccatagagcaaatcaaagaataccttatttttaaatagtgaaagattgatcagaaagggttcttatctatgttcctagatggctaacatactttatctcatttcatcattgtgatatattattgatggtgtcaatattatacatagggaaggcatgccagtgtattttcctcaatgttccggatagactatatttttttgtatacttt

SEQ ID NO: 165630 - DNA, 533 bp, Homo sapiens
tttgtatagtctgacctaactcatacaacacccctttgggttcataagtaggttacagaatcatacartatgggaaaaacagatatggcctatcttttaatacagacatgctgttcagacattagtaatactaagtgctaactaatactaactgttgtgccgctaaggagttggaaaaagcaaaggatgatgtagaggtaggttacttttcaaggaatttggttttgtttgctgtgtgcctaaagtttatagttctaggcagattactgtcacatttaaaataatacagtctcccatgttaatggattggaagactcaatgtgattgataggtcttttcttcccaagtattgctatacatttcagtataatcttaatcacagtcccagcaaggttttatgtctatatgcgtatggaaattcacaaacatcctgaaacttatggaaatgcaaaagatacaaaatagcccagacaatcttaaagaagttaaataaagttagaaattcatactaccaagtattgagactgttgtcc

SEQ ID NO: 165631 - DNA, 469 bp, Homo sapiens
gggtcataaggaattcctgttttataggttatagcccaaagctgtaagaaatttttaaaagtgtgactagtattagcaggtccattgtcagtttttaattgtttaggtatccccatatgagcaaatgatgacagacaatgtcactgtacatgaccagctgtctcacctgtttggcatgtagcatgcagcatatgagaataagtgtttataattgcatgaacatagctaagcttaccaaaggctgctatatgtgattgtgtgtgtgtgtgtgtgtrtatatatatatatatatatatatatatatatataaaaatatataattgctatacgtgactggctacatttacaacataagctgaatcacagacaacgttgataggatctgaagctgtgagctgtaaaacctgaatgactgcaattagttctgagcattgagctgaaaccccagaggtcattattgtttccagac

SEQ ID NO: 165632 - DNA, 459 bp, Homo sapiens
gaattcctgttttataggttatagcccaaagctgtaagaaatttttaaaagtgtgactagtattagcaggtccattgtcagtttttaattgtttaggtatccccatatgagcaaatgatgacagacaatgtcactgtacatgaccagctgtctcacctgtttggcatgtagcatgcagcatatgagaataagtgtttataattgcatgaacatagctaagcttaccaaaggctgctatatgtgattgtgtgtgtgtgtgtgtgtgtatatatatatatatatatatatatatatatataaaaatatataattgytatacgtgactggctacatttacaacataagctgaatcacagacaacgttgataggatctgaagctgtgagctgtaaaacctgaatgactgcaattagttctgagcattgagctgaaaccccagaggtcattattgtttccagac

SEQ ID NO: 165633 - DNA, 489 bp, Homo sapiens
aaaggggctgagggggccgggcgtggtggctcacgcctgtaatcccagtactttgggaggccaaggtgggtggatcacctgaggtcaggagttcaagaccagcctgaccaacatrgagaaaccctgtctctactaaaaatacaaaattaaccgggcatggtggcatatgcctgtgatcccagctacttgggaggctgaggcaggagaatcgcttgaacctgaaaggtggaggttgcggtgagccgatatcgtgccattttactccagcctgggcaacaagagtgaaactccgtctcaaaaaaataaaaaagaaaagaaaaaaaggaggggggctgagggaaaggaaaactagtttactccagcctgggcaacaagagtgaaactccatctcaaaaaaataaaaaagaatagaaaaaaaggaggggggctgagggaaaggaaaactagctaatggcaggtacattcacaagcagataaaagaagaagtac

SEQ ID NO: 165634 - DNA, 489 bp, Homo sapiens
aaaggggctgagggggccgggcgtggtggctcacgcctgtaatcccagtactttgggaggccaaggtgggtggatcacctgaggtcaggagttcaagaccagcctgaccaacatagagaaaccctgtctctactaaaaatacaaaattaaccgggcatggtggcatatgcctgtgatcccagctacttgggaggctgaggcaggagaatcgcttgaacctgaaaggtggaggttgcggtgagccgatatcgtgccattttactccagcctgggcaacaagagtgaaactccgtctcaaaaaaataaaaaagaaaagaaaaaaaggaggggggctgagggaaaggaaaactagtttactccagcctgggcaacaagagtgaaactccatctcaaaaaaataaaaaagaawagaaaaaaaggaggggggctgagggaaaggaaaactagctaatggcaggtacattcacaagcagataaaagaagaagtac

SEQ ID NO: 165635 - DNA, 435 bp, Homo sapiens
ttccctttaattatagacaagttgatcaygtaaaagtttttttaaaaataaatccttttattgtgacttacacagaccattcatgacatgcttggactttctggtttgtcccaaacattcctctttcttaaacaactagtcattttattctaggtctaaatttaccatacaagattctttcttatataaaattatttctctttaagctttcttaccccccaaaaaaaaccctctttatttctataactttctttatatctctcttatttcctggttccttttaccttgttttatacataacctttaaataagctttgaatttgacaaaatttcttcacctttttaaaaaggacacttttcttaagaaacaattttttcatacaatatatatttttatttgaaaatacccaaataatgaaatatctactatttaat

SEQ ID NO: 165636 - DNA, 420 bp, Homo sapiens
aatttccctttaattatagacaagttgatcacgtaaaagtttttttaaaaataaatccttttattgtgacttacacagaccattcatgacatgcttggactttctggtttgtcccaaacattcctctttcttaaacaactagtcattttattctaggtctaaatttaccatacaagattctttcttatataaaattatttctctttaagctttcttaccccccmaaaaaaaccctctttatttctataactttctttatatctctcttatttcctggttccttttaccttgttttatacataacctttaaataagctttgaatttgacaaaatttcttcacctttttaaaaaggacacttttcttaagaaacaattttttcatacaatatatatttttatttgaaaatacccaaataatg

SEQ ID NO: 165637 - DNA, 416 bp, Homo sapiens
tccctttaattatagacaagttgatcacgtaaaagtttttttaaaaataaatccttttattgtgacttacacagaccattcatgacatgcttggactttctggtttgtcccaaacattcctctttcttaaacaactagtcattttattctaggtctaaatttaccatacaagattctttcttatataaaattatttctctttaagctttcttaccccccaaaaaaaaccctctttatttctataactttctttatatctctcttatttcctggttccttttaccttgttttatacataacctttaaataagctttgaatttgacaaaatttsttcacctttttaaaaaggacacttttcttaagaaacaattttttcatacaatatatatttttatttgaaaatacccaaataatg

SEQ ID NO: 165638 - DNA, 390 bp, Homo sapiens
gagaattctgagtgcagtaagggttaaaaatccttttgacactaacctaaagctttgctccctctggtccacatggggaaatcagttacggataggaaaggtcgactgaaggatagacagagtgcctgatgtttccagctgaaatcctaggaggcctgactgcagagctctgcagagaggtcgggaggagtgcrgaggtggtgggggtgggggtgtgtgtaggggtggctatggtgtgcagagaccctggcttttcactgttgcctttagagaggtctttaatgcctacattaaccctagggctaccaagggagaacctacagctttgcaatacagactaagaatgctactccctctctctcccactgcctatccccaagattgggctcc

SEQ ID NO: 165639 - DNA, 369 bp, Homo sapiens
ccaggatttgcaacgtaaccatccatcattgacagataccatactaacttccaagttttccacatcttaacaatgctgcaatgaaaacattgttttgtttggtaacagcagtgaagtgaaaatakataaaatgctcatcaagaggagccggctgaattccagcacaattaaggtacacagtcatcaaaactaagaaattgacctgtgttgaaatagacagatgtctataatatactaagtgaaaaaaaaccatgggggttgggggcctggaaatcaagccaccaaatggtatgtgcccattttaaatatgtatgtgtatgggtgaaagagagagagagagagagaggatatctgtgtgtgtgtgttaaa

SEQ ID NO: 165640 - DNA, 369 bp, Homo sapiens
ccaggatttgcaacgtaaccatccatcattgacagataccatactaacttccaagttttccacatcttaacaatgctgcaatgaaaacattgttttgtttggtaacagcagtgaagtgaaaatatatmaaatgctcatcaagaggagccggctgaattccagcacaattaaggtacacagtcatcaaaactaagaaattgacctgtgttgaaatagacagatgtctataatatactaagtgaaaaaaaaccatgggggttgggggcctggaaatcaagccaccaaatggtatgtgcccattttaaatatgtatgtgtatgggtgaaagagagagagagagagagaggatatctgtgtgtgtgtgttaaa

SEQ ID NO: 165641 - DNA, 447 bp, Homo sapiens
ggaattccagactagcctggccacggtgaaaccccatctctactaaaaatataaaattagccaggtgtgctaattttatastaatcccagctactaaggaggctgaggcaggagaattgcttgaacccaggagacagaggttgtggtgagccgagattgcacggactcctgcctgggcgacagagaagactcagtctcaaaaaaaaaaaaaaaaaaaaggtgggggaagaggagtgtatttccatgtaagcattccattaaccccgtaagaatgtttcctctaattctaaactaaatgctgtatctagatgagtaactaagattgtaaaagctcatccacatttacacttgggttttcctttcaggctcactcatgagcctcctctccttgtacagagccctaccatgcaccaagcagctaagggttagtagcaatgaataggatag

SEQ ID NO: 165642 - DNA, 507 bp, Homo sapiens
tagattcagatttaatgggtctaagtggggtcctagtacttatagttccaagagattcccaggtgatggcaatgctgttgggatgaggaccacactttgcattgcaacaggatagaaaaatgctacttaaagtacggtcaccaaattcccaggcccctctccagaccccactgaatctgaatccatgggccttgggctcatgaatggtgttttaacaaattctccaggtaatttttacacattctaaagactgagaagcactaatwcagagattaagtgctgtgagggccagatgcattgagttctggatacatgtacttttccccagcaaatagtccccagggtgacatcaggtcttggcctttttcagggactgtcaattcagtaccaagtggcctggctcgactcttccagcataagcagccagaagactggccaggagctgtaactagagactaacacaccccaacatgtttttaggaacagattggatcatgccagaaagga

SEQ ID NO: 165643 - DNA, 620 bp, Homo sapiens
ctcaggatgaatgcttggtgactttgagaatcagtacattgtaatgggatccagtgtactatgagatcatagtgaaagccaattgctaatgattttagttaaagatgaacctcacagagacatggaatacttaaagatctcacagagacatggaatactcaaagatgttgaaacatgagtggagaaatgtgttttttaatttgggccccaaattaatagtcatttatacctattttcatgaaygtatcttctgctagaagtcacataagtacacttgagacgaatgttcaagtaagaaaccccagcagtaatttccataccacacagcataaataggaagcacatcatgagcatactggagctttgcagtctgcatccccagcttaaccctgtgcaacaggctggccagctaccaaggactaaacttaatttttacccttgagtataaattagtccagcacaggactccagacctgcgggactccagagcttagctcagactcagcttgcctgagccccaccatgcactgcagccaggtctcttaagcccaccagctaattaagctaacttcctgaagggagaatttcaaatgtatgggagttgacatcagttaaatact

SEQ ID NO: 165644 - DNA, 620 bp, Homo sapiens
ctcaggatgaatgcttggtgactttgagaatcagtacattgtaatgggatccagtgtactatgagatcatagtgaaagccaattgctaatgattttagttaaagatgaacctcacagagacatggaatacttaaagatctcacagagacatggaatactcaaagatgttgaaacatgagtggagaaatgtgttttttaatttgggccccaaattaatagtcatttatacctattttcatgaacgtatcttctgctrgaagtcacataagtacacttgagacgaatgttcaagtaagaaaccccagcagtaatttccataccacacagcataaataggaagcacatcatgagcatactggagctttgcagtctgcatccccagcttaaccctgtgcaacaggctggccagctaccaaggactaaacttaatttttacccttgagtataaattagtccagcacaggactccagacctgcgggactccagagcttagctcagactcagcttgcctgagccccaccatgcactgcagccaggtctcttaagcccaccagctaattaagctaacttcctgaagggagaatttcaaatgtatgggagttgacatcagttaaatact

SEQ ID NO: 165645 - DNA, 428 bp, Homo sapiens
ttgtcgcatgtagccttggattatttgttctaattgctgtgtagcattccatttatgaacatgccacagtttattctttatccattctactactggatggtcatttggatactcttcaactgggggttattgatagtgttgctatgagtattgtagtacacgtcttctgataaacatgtgagtgagtatctgttgaagtccatccatacaggtggaatggctgggtcatgtggtatgcgtatcttcagcttttacagatgctgccaaaastattttcaaagtgattgtagcaatttgcgctccgcagaagtgtatgagagttctggcagttccacatccttgtcaacacttgatgttttccatcttttttatattagccatcctagcagctataaacagctattagtgagtgttaaactcagtatgct

SEQ ID NO: 165646 - DNA, 428 bp, Homo sapiens
ttgtcgcatgtagccttggattatttgttctaattgctgtgtagcattccatttatgaacatgccacagtttattctttatccattctactactggatggtcatttggatactcttcaactgggggttattgatagtgttgctatgagtattgtagtacacgtcttctgataaacatgtgagtgagtatctgttgaagtccatccatacaggtggaatggctgggtcatgtggtatgcgtatcttcagcttttacagatgctgccaaaactattttcaaagtgattgtagcaatttgcgctccgcagaagtgtatgagagttctggcagttccacatccttgycaacacttgatgttttccatcttttttatattagccatcctagcagctataaacagctattagtgagtgttaaactcagtatgct

SEQ ID NO: 165647 - DNA, 569 bp, Homo sapiens
tctctttgctgaatgaatccgattatggctttccaatactggaagcatattctgccagtgttttgtgccatccacaatgttaacgactacagacataacttgcttttaagcttcactcacattagaattaaggacgtgatgaaaaatgttaaacaatcaacaataaattaagcccttattaatgtcttataaaatctctagtctcatcttggcaagccaccaataacaccactaaacagagttaagaggtgagcagtagcacacagttatatagtatttttgccatgcagatacaaaagaaataacctcaagaatatagagaatagtaaaataattagaagatgagttttaagtatttgagctttgttcttagtatgacttaacygtttaattatagtaattactgtgttacagaaattttcagacgttctcacagaatttctgaaaatttaaaaattggcttttgggaggtggtaagaacaggctttatctcaccagtgcaccctgacccttcctgtgtttacctctgctgaagcctgtgtccagggctctgccaaagctgctcatac

SEQ ID NO: 165648 - DNA, 569 bp, Homo sapiens
tctctttgctgaatgaatccgattatggctttccaatactggaagcatattctgccagtgttttgtgccatccacaatgttaacgactacagacataacttgcttttaagcttcactcacattagaattaaggacgtgatgaaaaatgttaaacaatcaacaataaattaagcccttattaatgtcttataaaatctctagtctcatcttggcaagccaccaataacaccactaaacagagttaagaggtgagcagtagcacacagttatatagtatttttgccatgcagatacaaaagaaataacctcaagaatatagagaatagtaaaataattagaagatgagttttaagtatttgagctttgttcttagtatgacttaactgtttaattatagtaattactgtgttacagaaattttcagacgttctcacagaatttctgaaaatttaaaaattggcttttgggaggtggtaagaacaggctttatctcaccagtgcaccctgacccttcctgtgttyacctctgctgaagcctgtgtccagggctctgccaaagctgctcatac

SEQ ID NO: 165649 - DNA, 436 bp, Homo sapiens
aagataagtttgttcattcatttaacaactatttattaaacttacactgtgtcaggtgctatgttagtcaatgcggatacacaagaaaaaaacaaatgaaagagtgcagataagaaagatctttaggaaatggatgggaagcccttgagacaaagaacagcatcattatagtccaagcagaacaatacttcctcaatccattaaggattgacaagagggctgatgaacacagagattgagagagagtcccggtgaaaattctccacagccttgaccattggttcttaaccattttttctgctgcaatattcacagcaatggaattcacaataggctatatatcctcatgggtatgaccaagtacagaagatagggttrattataacaggaaatccaaaataatggcttaaacaaaaagaacctctctatgtccacc

SEQ ID NO: 165650 - DNA, 553 bp, Homo sapiens
taagctaatacacgataaacgactaaatcatttcatgtgtaggaaggtgaaagtgccaaagaaaggacaaactgagcattaggtaaagggaatcgggaatgccggcagtaggtgatgaatttccacttagaataagatggttggtcagggctggccttcagagtaggctctaatgacccccactttctggtcttcacacactggggtagccccttgcaccaccgtgccacagttggtctgtgtggccaatagaatagggcagaaatactgatacatcatttctgaatctaggtcrtaaaatataatggcctctgcctttctcttgggtcactaaatctagaaaaagccagccaccatattgtgagaagtgcccaaatggggaggcaccgaggcctcctgctaacagccagtgccaggagcttagaggaccctcctgcccagggaacacttcaatgactgcagcctggatggcacctggactgtggcttcctgagagaccttgaggcacagctactcatccgctccttccaaatttcctgatccacattaacta

SEQ ID NO: 165651 - DNA, 578 bp, Homo sapiens
tagtgcttccctcagaacaatctcccagtctttggctgcatgtgcccccagtccaactctcctccctcttcccacccacagtccagtaagcctttagggctaagggcctccctttaccttctttctaattccaacctaacacaccattcaatttcctttcagttctcaaaggcatttcctcttgagaaaacctgattctaacaaataaaaaaagttggttttcaaaacaactgttctggtaaaggctgcaagagcttactttgtaagaccaaaactgcacattcaaatatttttctttagagatatttctagaatcagatccacatatatacagttacttgatgtatgagaggcacaataagaaaaggatcttttttatgtcatgtrgaaataattagatagccatataaaaaaattaaccttaaccctgacctcacattatccttaaatattaattcaggatggacaatagccttgaatgtgaaataagtattctcaaagaaaacatggaagagttatctgtataaccatgggacaggcaacaatttttaaaaattgggacacaaagaacctgccat

SEQ ID NO: 165652 - DNA, 425 bp, Homo sapiens
tgagtaaataatttcttaatttcaaaataacaaacggaagaagtttcaccttaaacctaaagaytcatgcttattcaagagtgcttcaaatggccaatacaataaaacgaagactaagatttttttttaaatgtttattcaaaaaaagtctccagtgcattcaaggttaagcaatgagagaggattctgggagatggcagcttagtaaacaccaggaatctgactcccaggctaggtaacaattgcactggcagaatgaatcatgtaaccattttggaactaggagtcaactgaaagagaggggatgaccactgttgttgcacttccctcaacattgatgcaagttcctctcctgactgaaatgactttcggaggatttaaagaactgatgcctcttccttctcccttaatttttctctttttcc

SEQ ID NO: 165653 - DNA, 425 bp, Homo sapiens
tgagtaaataatttcttaatttcaaaataacaaacggaagaagtttcaccttaaacctaaagactcatgcttattcaagagtgcttcaaatggccaatacaataaaacgaagactaagatttttttttaaatgtttattcaaaaaaagtctccagtgcattcaaggttaagcaatgagagaggattctgggagatggcagcttagtaaacaccaggaatctgactcccaggctaggtaacaattgcactggcagaatgaatcatgtaaccattttggaacyaggagtcaactgaaagagaggggatgaccactgttgttgcacttccctcaacattgatgcaagttcctctcctgactgaaatgactttcggaggatttaaagaactgatgcctcttccttctcccttaatttttctctttttcc

SEQ ID NO: 165654 - DNA, 345 bp, Homo sapiens
tttaaaaagtaaaaaaatcctatagtgtcaggccctgctcaacagcttgctattgctgtaaagataaacacgtggtctatcccctcagcacattttcastcttatcttgcactgtttagtcgtatcttgagcctcagccaccctgatcttttagtttctcaaacagggcctttgcacaaatcgtcccttcatttggagcactgtgagttttgtacaaaactgattcatcctaaaccttcaagtctcaggttaaatgtcacctcttcaacagtcatcacgagattccaggccagaagcagtggctcacacctgtaatcccagcactttgggaggccaaggcaggca

SEQ ID NO: 165655 - DNA, 586 bp, Homo sapiens
gaattctattaactcagtttacactaattagattaagarccttgcatatgaagataaggaaggtgtgcctacatgttcatataaaagtaattggggttgctttcctgaactcttctatttccactatctctctggtactttctgtttccttggggtttccctttttggaaaccaccccctttcgtaattgctccacctctggtgccagttagtggaagggtagaaagatgggaaaaaacaggtctgggtttggatgcactcttttgcagcatgagctctaccgaatggagaggaagtctcccttcccttagagttttggctcctgcagtctcctgttggtagccactgtaacagctgccaccattactgtgggatattttggagtctgaggcataagagaatggacaaaaaggagaggaaaagacccagaggattcctgcattctctctaagctttgggagttcctcttcctgcagtttcagccacaactagaaggtacacctttctctttctgcaccacagtgctcctttccagatttgaggttgcattggattcaggctggggaagctgctgaagaaaaaagaa

SEQ ID NO: 165656 - DNA, 586 bp, Homo sapiens
gaattctattaactcagtttacactaattagattaagagccttgcatatgaagataaggaaggtgtgcctacatgttcatataaaagtaattggggttgctttcctgaactcttctatttccactatctctctggtactttctgtttccttggggtttccctttttggaaaccaccccctttcgtaattgctccacctctggtgccagttagtggaagggtagaaagatgggaaaaaacaggtctgggtytggatgcactcttttgcagcatgagctctaccgaatggagaggaagtctcccttcccttagagttttggctcctgcagtctcctgttggtagccactgtaacagctgccaccattactgtgggatattttggagtctgaggcataagagaatggacaaaaaggagaggaaaagacccagaggattcctgcattctctctaagctttgggagttcctcttcctgcagtttcagccacaactagaaggtacacctttctctttctgcaccacagtgctcctttccagatttgaggttgcattggattcaggctggggaagctgctgaagaaaaaagaa

SEQ ID NO: 165657 - DNA, 417 bp, Homo sapiens
tcccagagtgtggtttacttatttattctcttaatggttttttgttttgttttgyttttaaacagaagtttttaactttaatatactagagttaaatttatcactttttctttatggttagtactttctgtgctatgtctagtaaatctttcactaccttgagatcataaagatattcttcaattttgtcttttaaaagtttcatacttttgcttttaatataactcctaatccacaaggaattttttgtttatgtgtgtaaaagggatctgtaataaataatctaattccatttttgatgtttgactaccaacagctttcaggctccacccctccccctttccctcttgcccagcatctggcaaagctgattagaaaccccaggtgccccctcccttggtgccaaggagaagttca

SEQ ID NO: 165658 - DNA, 417 bp, Homo sapiens
tcccagagtgtggtttacttatttattctcttaatggttttttgttttgttttgcttttaaacagaagtttttaactttaatayactagagttaaatttatcactttttctttatggttagtactttctgtgctatgtctagtaaatctttcactaccttgagatcataaagatattcttcaattttgtcttttaaaagtttcatacttttgcttttaatataactcctaatccacaaggaattttttgtttatgtgtgtaaaagggatctgtaataaataatctaattccatttttgatgtttgactaccaacagctttcaggctccacccctccccctttccctcttgcccagcatctggcaaagctgattagaaaccccaggtgccccctcccttggtgccaaggagaagttca

SEQ ID NO: 165659 - DNA, 527 bp, Homo sapiens
taatgggatttctgggtcaaatggcagttctgttttcagttttatgtgaaatctccaaactgcattccacagtgattaaactaattcgtacattcccaccaacagtgtataagcattctcttttctccacaggcttgccagcatctgttatttttggctttttaacaatagccattttgactagtgtcagatggtatctcatcatggatttgatttgcatttctctgttgagcattttcccattaygtttgttggccactttttgtcttcttttggaaagtgtctgttcatgtcttttgcctatcttttaaagggaatgtttggttttttgctggttgaattgttgaagttacttatggattctggatattagacctttgttggatgaatagtttgcaaatattttctcccattttgtaagttgtctattaaatctgttgatcattttttttgctgtgccgaaactatttagtttaatgagatcacacttgtcaatttttgtttatgctgcaattacttttgagaat

SEQ ID NO: 165660 - DNA, 417 bp, Homo sapiens
gctagttctgtgtgctttatcttctttatggaaaacgactgacataaaactgagaatgtttttgtttttgatataatctgtgagaaaaataatttgaactttgttttatatgtttttggaggtattagtgctttggttgaaatacctaagaactgtgttgtggcagcagttggcaaagaactgagtgagtatgaatttttttctttttgtgtrttttgaacgagaattgtatacacatgctggaaggactaaagtaattttttatttaagggacattgcgtgtgccccactcttggcttcttgggattgttgaagtgatacagagactaagacattttcaggatgttaggccaggtttctttttcttatcagtgttttaatcagtatgttagcttggttaaacagtttattgcttgt

SEQ ID NO: 165661 - DNA, 516 bp, Homo sapiens
aaaaaaagagaaggcttccccctaaaaatgaaagtgttcaggccgggcacgggggctcacgccagtaawccagtactttgggaggccgaggcgggtggattacttgaggtcagcagttcaagaccagcctggtcaacaagctgggcgtggtggcacaggcctgtagtcccagctactcaggaggctgaggcaggagaatcgcttgaaccctggcggcagaggctgcagtgagccgaaaccgcgccactccactccagcctgggtgacagagccagacgccgtttcaaaaaaaaaaaaaaaaaaaaaaaagtgttgataaactataactccacaattcctccagggacttactttagagacagttttgtatatgtgcatcagaaataaaagattattcacataatcagttcaagtatcaaaaacctgagtgatctcaaatatctaccagtagcagaatggataaataaattacggtatatgcatacaacaaatcattgtaagtcagttacatacaac

SEQ ID NO: 165662 - DNA, 551 bp, Homo sapiens
ctgtgccagttaagttattgcctctcacctccaaaccagccttctatactcagttttgctgtggtggctctgggactctgcagaccactggatccagcacagttaaaagtgagaaagcccactgttgatggtaacaatgagcaggaggcccccatggtgggcagtgtctcatcctgcctgcagcaggcagtggcacatgtgggaaaagccccataggccctgtggagggctgggaacattctcccccatccctaccagtcttgggtayctgttctgtggggcaccttagccaaggtggcccttgcccactgagcaaaggataggctcctactcagccctgcggaagcagggagctccccgtcacccctaacccactcttgattttccagaagccctaggagctgacgaaggagaaggtaggcatccagatgggccaagcacagcctgaaaagacctgctgttaagagtgcagggaggggccaggagtttctgctgtgatagctggttccctgttaggctctgcctagaggagatgcttcagggagtgttga

SEQ ID NO: 165663 - DNA, 456 bp, Homo sapiens
caatggcagtcatcctctgaagggtaaagatggcaagggcagatgctattattgaaaaaggatccctaatttcartgtatatcatgggatcgcagagtagtgaagtcaagaagtaatactcacttcaataagtaagagttatgtaatttctgtgaagatagcgaggaagaattagaaatcagaattgacctgcagagacctttgtctatgctcacttaattccttagaaatgaaatgacttaggaggaaaatagataagcagatttctaaagtgttacttaatcagcataataagagaactctatgtttgatgggcagaaatcggacttgagtattcacaatttctcatctacttcccgaacctaaaggcgttcacagacttggagttctttgatcaaaaggaagactgggtccttttgagaaagtactcttcaacactgccacaactgaatactg

SEQ ID NO: 165664 - DNA, 456 bp, Homo sapiens
caatggcagtcatcctctgaagggtaaagatggcaagggcagatgctattattgaaaaaggatccctaatttcaatgtatatcatgggatcgcagagtagtgaagtcaagaagtaatactcacttcaataagtaagagttatgtaatttctgtgaagatagcgaggaagaattagaaatcagaattgacctgcagagacctttgtctatgctcacttaattccttagaaatgaaatgacttaggaggaaaatagataagcagatttctaaagtgttacttaatcagcataataagagaactctatgtttgatgggcagaaatcggacttgagtattcacaatttctcatctacttccygaacctaaaggcgttcacagacttggagttctttgatcaaaaggaagactgggtccttttgagaaagtactcttcaacactgccacaactgaatactg

SEQ ID NO: 165665 - DNA, 555 bp, Homo sapiens
tcggccatcttggaacacacccctggctaatttttgtatttttagtagagactggatttcaccttgttkatcaggctggtcttgaactcctgacctcagatgatccacctgctttggcttccccaaagtgctgggattacaggcataagccaccatgcccggccctattttattttttattttgtttatctgtaaggtatggggtacaggtggtatttggttacatgagtaagttctttagtggtgatttgtgagattgtggtgcacccatcacctgagcagtacacactgcaccatatttgtagtcaaaaccacagtgaaataccatcttatgcctatcagaatgacgattattaaaaaattgaaacaacagatgctggaaaggttgtgaagaaaaaggcacactttcacattgttggtgggagtgtaaataagttcaaccattgtggaagacagtgtggtgatacctgaaggatctctcaaaaaatggtagaccaagcaagaaaaaataatctgtgaagatatctcagactgcaatagtgtaataaacatggt

SEQ ID NO: 165666 - DNA, 555 bp, Homo sapiens
tcggccatcttggaacacacccctggctaatttttgtatttttagtagagactggatttcaccttgtttatcaggctggtcttgaactcctgacctcagatgatcyacctgctttggcttccccaaagtgctgggattacaggcataagccaccatgcccggccctattttattttttattttgtttatctgtaaggtatggggtacaggtggtatttggttacatgagtaagttctttagtggtgatttgtgagattgtggtgcacccatcacctgagcagtacacactgcaccatatttgtagtcaaaaccacagtgaaataccatcttatgcctatcagaatgacgattattaaaaaattgaaacaacagatgctggaaaggttgtgaagaaaaaggcacactttcacattgttggtgggagtgtaaataagttcaaccattgtggaagacagtgtggtgatacctgaaggatctctcaaaaaatggtagaccaagcaagaaaaaataatctgtgaagatatctcagactgcaatagtgtaataaacatggt

SEQ ID NO: 165667 - DNA, 555 bp, Homo sapiens
tcggccatcttggaacacacccctggctaatttttgtatttttagtagagactggatttcaccttgtttatcaggctggtcttgaactcctgacctcagatgatccacctgctttggcttccccaaagtgctgggattacaggcataagccaccatgcccggccctattttattttttattttgtttatctgtaaggtatggggtacaggtggtatttggttacatgagtaagttctttagtggtgatttgtgagattgtggtgcacccatcacctgagcagtacacactgcaccatatttgtagtcaaaaccacagtgaaataccatcttatgcctatcagaatgacrattattaaaaaattgaaacaacagatgctggaaaggttgtgaagaaaaaggcacactttcacattgttggtgggagtgtaaataagttcaaccattgtggaagacagtgtggtgatacctgaaggatctctcaaaaaatggtagaccaagcaagaaaaaataatctgtgaagatatctcagactgcaatagtgtaataaacatggt

SEQ ID NO: 165668 - DNA, 532 bp, Homo sapiens
agagagaattttaatggagttccatacaatgactcgaagggctgacacatgactgcaatgctaaactgttgggaaggccagcatggtgacacaggagtctttacaaaaaaaaaaaaaaatagcggaggaaagcagaaatagaaagaaaaatagaatgctccataatttactaaaaagtcatgactttaccacatgtttaactcattattaaattctttcactttttttcatattgttctccacggttttttgtttgtttgttcgcttgtgggagaactgtgtaccaacgaaggttacaagcattttaaaacaagcactgctgtaattcttgtttgtctctcataaggtctatggcactgccaagaaatgtgcttctggggatccaaatgacataggatacaatgggaatggggtccgtagagttgctcaacaaggtgttcttgatactgagcacatagrgaacactaaatgcttgaattaaatgaagtgcatcaaggttgtaaagtgataatatgcctcttaaatgcagttc

SEQ ID NO: 165669 - DNA, 402 bp, Homo sapiens
ttcctccatccttaatgctgtaattatagatttactgtggatgagatgaagccataactttagcaagcattcagtaagaatacagatagccagataactagattaagcagtttttagtaaaacttgcaacactttcatgcttgaagtaccataatataaacttaatttcaaaatatcaatgacagaaaaaaacagaagcttattagctattgcatatttatgcaataatatattcaaagagacccaatatttataaaattgtatagtagmtaacactgccaaattctgctaatttctactaattgagaaaattaactcattacagtctctgggaaattctgttcatagtttcaaaacaagcattcccagtgtctgaaaggtagcccttttcattttttatat

SEQ ID NO: 165670 - DNA, 446 bp, Homo sapiens
tataagcaggaaacagaggccagaagaaastagagaaaaggagctgccattaaggaaaataagagaacacttggaacccaaacagaagcatgatctacaaggacaggaggaatcacgctgtggtgaaaagcactagctgagaatcaggaaacttggataccagtcctggctgtttcactttcggaaagcctggaagccagtttcttaaggcttagtgtgtttctgagaacatgactttcttacaggatggatttgtaagctcattaaaaaggcctgggaggatgcctagatacaggagtaacttcttgggagcagatgagcttagagggggcaacaaatggagggttttttactttcctcttcattattatttgaattattaataatgtgtatgtgctacatttttttagtttcatcaaaaattgaaaatgggaaaaactgtaaga

SEQ ID NO: 165671 - DNA, 520 bp, Homo sapiens
atgaatatttgtagtttagagccatgtgctcaaacttagctctgtgtaaacatagattgtgaatatctaagctcttyaaattgatccagatggcaaacaaaatctgaaccagaaattaccgaaagactatatatatagccaagactctattcacactttagtcaacgtgaattgaaaatcgtcaatatattttgagtgtattaggcatatgagcaaatagccaagagaacaacatacggaaaatgtttctatcggttgcttctggtatcttttaaaacaaggtctattggggggatttatcttctcaattgaaaagttcagaggacttgagatatgaaatgtttttacgcatgggaagaaacaaagacatttatcccacaaatgatttcataaagatcatctctccacaaataagtagttgtgattaaaaatcctccacatcttatatatttatactactgtggataaaataatacagtgtttgttatgttccagaaaaagcgatgtgtactttacaatt

SEQ ID NO: 165672 - DNA, 564 bp, Homo sapiens
catcccaacactaatattaaacaggctacgatttaataamatatggagatccatttcagcttacactgtatgtttcaattttcacttacaatgtctgggatataccatgtacacacaaaataggtatcaacaattatacttaacactgtttagtttgtctaaccataatgctgttggattaacagtgttctaattggaattggctgatcaactttaaaagtattttaaacttcatcaaatgtgatcctatattttttcctcatgtctgatgatgggaggagagttcacaatcaggttgaagtcactttagtactaaagcaaagcaaacacacttttagatgtgatgtgaaataacctcagagatgctggcatctggtgctatctagactataatacagcagagtgatgtggttgcagtggtttttacaggtactcgagaggagagagtgcatacatcaggttctttgcatcatgtctattttagttttctattatttctcctggtttcctggggagacagcatttatgtctcaaaaaaaatcttcaatactgaaagcatttatg

SEQ ID NO: 165673 - DNA, 467 bp, Homo sapiens
aaaggctacttccaatttgaaaattatgaagactcayaagcaggacacactttgtaagattaaatatctatattagagacatgaactaagttatgcattatacagagttttatattatatgtatgttttttcacacataccatgtcataaaacatggtaattataaaacttggagtttggggggtggaaaactcacttgctatttaggtgtggtagtcaaagacattatcagacatttcctacatctttttgaggttttggataaaaatgctacccttccttttaggaatcaagaatttagatgatgttcaaagatggggaaatttgcatattatccttttttgttgttgttgggtgtctgtattctttctagtcatcaggtcaacttcactatcatgttaaagtccttttctggtatgtattttacaaatagcactgggaacgtttctggtagaaaatagggtaat

SEQ ID NO: 165674 - DNA, 572 bp, Homo sapiens
ccctccaaacacaaaatttaactgaactccattacccattcatttctcataattatttatagctgcagatatgggagagcacacatttccaatgtctgcatttccacaatttatacttagcctcctctccaacttttcatttttctttattttccttttttttttaaacagagtctcactctgtcaccaggctggagtgagtgcagtggcrtgatctcagctcactgtaacctctgcctcccgggttcaagggattctcctgcctcagcctcctgagtagctgggactacactactaatataatttttgtatatttagtagagatggggtttcaccatgttggccaggatggtctcaatctcttgacctcatgatccgcctgcttctgcctcacaaagtgctgggattacaggagggagccaccacgcccagcccatttttcttttttaacagcaacaactataataacaatacccctccattatgggaaaacatatacatattgtgatatggtatatatgtctgtggggtacacacacacagtgtcctaagatgtttctattcatgagctt

SEQ ID NO: 165675 - DNA, 595 bp, Homo sapiens
gagtgccagcactatttataaatgcatcaataagccaacataagcttgattagtctatttttagatttttatatagatggtatcttactatatatgtagtaagagatgataaatattccacacatgttttttaataacaattttattatttaagactcactcatgttgataacataggtgtagtttctttgtcttaattamgctattttattctactgtatgaatacaatttatccattcttctgatatttagcaaatgtcacaggtattcagggaaatgcaattaaaccacaatgaggttacgaatgtgttagacaggcttacgcagagaaaaacagaactatgtagaatacatatgaagatacttattgtaaggtattgcctcaagtgattaggaagactgggaagtccctgtctggaagcctggcagctggagtgttaatagtgcagattatcccagctaatatcttctaaatatccatggacagaagataccatttataattgttttaaagttgaaacttgtagaactgtgagaaaaaagtgcatgagggaaaaacagaataagcaaaggcataaagatggaaaaattaca

SEQ ID NO: 165676 - DNA, 595 bp, Homo sapiens
gagtgccagcactatttataaatgcatcaataagccaacataagcttgattagtctatttttagatttttatatagatggtatcttactatatatgtagtaagagatgataaatattccacacatgttttttaataacaattttattatttaagactcactcatgttgataacataggtgtagtttctttgtcttaattaarctattttattctactgtatgaatacaatttatccattcttctgatatttagcaaatgtcacaggtattcagggaaatgcaattaaaccacaatgaggttacgaatgtgttagacaggcttacgcagagaaaaacagaactatgtagaatacatatgaagatacttattgtaaggtattgcctcaagtgattaggaagactgggaagtccctgtctggaagcctggcagctggagtgttaatagtgcagattatcccagctaatatcttctaaatatccatggacagaagataccatttataattgttttaaagttgaaacttgtagaactgtgagaaaaaagtgcatgagggaaaaacagaataagcaaaggcataaagatggaaaaattaca

SEQ ID NO: 165677 - DNA, 424 bp, Homo sapiens
agtcttgctgagttcaacattttttttctatttttttttattgtggtaaaatgtctataacacaaaatttaccattgaaatgatttttaaatgtaaaattcagtggtayaggtaattcacatttttgttcaattattacaactatccatctccagagcttttttcatgttccccaactgaaacaccgtatccgttgaacactaactactaattccctgctgccacagcccctgactgccaccaaactactttctgactctagacaccttatgtaagaagaatcatccaactgttcttttgtgactgacttatttcacttagcatgctgtctttaatgcttatccttgttgtatcatccatgttgtagcatgtgtcttcacttgaattattgctactaccatccataacaattttcctaggaatt

SEQ ID NO: 165678 - DNA, 593 bp, Homo sapiens
acctggcttctcccaccactctcaaatttacctcttggcagtcttggatacactacctaccatccagcagctcctcagtkctccacaccttcacccttcttagactttttctttaattgtcttagtgtgcttgccattcaattctgtttaaatatctttcccttccctgctttttctgtttgtttccttacagggaatctaagggttgttccccctcttctcagtaacatttattacaatttcaaaatttataattgtgtgtatatttgctaaaaatctgtatctcccacaaaagtgagccaggcacgatggttttgtttaccgtcatatagccagaacttagcatgacacctggaagatagcagacacttccatgaaaatattgatgggtgaataaattgattaatttaattgatgaatgagtgatgttgtgctatgaagttgaaggatgatttttctctaaaacatatatctaacaatgaactccaggttcatctcaggctgcaaacccctttagactttactcacttgagaaaccatgagatgtatactctttatgattctcaccttaaagctttttattttagtcatgg

SEQ ID NO: 165679 - DNA, 444 bp, Homo sapiens
aatttaaatggctttttatttcatggttttgcctaatttccatgtttaggacttctaataaaatgttgaacgtaagtggtgagtgatgacatccttgccttattccttattttaagggaacattagtcagtcttggaaatttcatcaaaagtgtgaactatgycacagtgactggagtccagtatttttgtattatgttactcttgagggctttgtaggggagatgaacaccagtgctccgctcttcgatggatttgctgaaatacagcttctgcaatacagggttaggtggtataagagtttctgctctctgtccctccctagataaaactgtagtcccaaactgtgatgaaacctatagggagaaggagatcatcttcttaattacaccaagctgaagtagagcttccatcataccgctctgcagttgaagggaacaagttg

SEQ ID NO: 165680 - DNA, 613 bp, Homo sapiens
ttcttcatactattacaagtggcattattgtcttaatttcatttttggacttttatggttagtctatagtaatttttaatatatattataattccatatacaaataaaaataattttaatgcttcttttccaatttaaatggctttttatttcatggttttgcctaatttccatgtttaggacttctaataaaatgttgaacgtaagtggtgagtgatgacatccttgccttattccttattttaagggaacattagtcagtcttggaaatttcatcaaaagtgtgaactatgccacagtgactggagtccagtatttttgtattatgttactcttgagggctttgtaggggagatgaacaccagtgctcygctcttcgatggatttgctgaaatacagcttctgcaatacagggttaggtggtataagagtttctgctctctgtccctccctagataaaactgtagtcccaaactgtgatgaaacctatagggagaaggagatcatcttcttaattacaccaagctgaagtagagcttccatcataccgctctgcagttgaagggaacaagttgtggccaaacaccaccggcattgtttctactgagacaga

SEQ ID NO: 165681 - DNA, 531 bp, Homo sapiens
gtattacaaaacacttcaacaatgcctggcagagattgttaaataaattcaatataatccttaaaagaattttttcctaacaagtgtataatccttgtccaatctttttctgagttcttgaaacatttcttgaaaaatatggctaaggcatatataaatgtttaaaaaagaaaaattttaaatttatccatgtgaagagtaaaagcacggataaagtatttgccaaaaagtttatcaatcttaaatatttatgactagtctataataatttacattaagataatttatgatttgggaaaagaatacttcaaaaattaaattatagcaatttactctgaatattctgataaaacatacatcatttcaaaggaagatttatagtagtgtaagaaatgattatgaaggtgactgctcttccttctacttgtattttatagtgggaatttgcctcagttgttgtttctgatgggtgctataccagatgtcctcyggatggtgttaaaaacgtatgaggttcctgggggttaattt

SEQ ID NO: 165682 - DNA, 564 bp, Homo sapiens
tgggccatttgttcattaaataattatttaattattgatattgatttgatgttgttaacaagatgagagtaatcaagacatatatgcagacaccaagaagtcagcaatctggttgaaaaatagatccacagaaaagattattctaagacaaactggaaagtaaaatgtgtactaagtacacatggtcatatgtggatgtgagtatttagaaagtgtacatcaccagccatggacaacaagtcatacagaccacttgagagcaggttaaragcctaaggaacaggacagtgagaagataacataggtgtggaaaaaagaaacaatgtgatatttgcatatatgtaggatagtaggatagggtaagttattcaaaattgtccaaacagaaaatacaacggaggaagtttaaaaaggtttgaagacacagataacatggagggtcacataatcattgcagtatggctttcacctataaattctaggttaaggggagccattgaatgctttccagcaaagaataagcatacttggattttatttttaggtagatctctggtggccatg

SEQ ID NO: 165683 - DNA, 557 bp, Homo sapiens
tttgtttcctcattcataagaaaaaaaaaactcatgcatttacatttgatcataaagttatagcaactcagtcacatcttaaggcttctcttttaatttgagtgttttgttatttccacaatatctgcagttactttcttcacttaagtcttgaattcctcaaagtcatccaggaggtttggaatcaacttcctccaaaacagtgttaaygtttatatcttcacttcctttcatgaatcaggaatattctgaatggcatccaaaatggcaattctttttcagaaggttttcagtttgctctgcctagatctcctaaagaactcactattgaatgcagctatagccttatgaaatgtatttcataaaactgagacttgaaagttgaaattactccttgatccatgggctgcaaaacagatgttgtatttgcaggtatgaaagcattaatcttcgtgtatttcttgatcagatctcataggtgacaaagtgcattgtcaatgagcagtaatatttcgaaagaaatctttttgaatgagtaagagttctcaattgtaggc

SEQ ID NO: 165684 - DNA, 564 bp, Homo sapiens
atagaaatgttgatgagaacttgtcaaattcttgttatcctttaaagtaactgattttaacataagaaaaagaaagaaactgagctgtgcttattttgaaaaaaattggctaaaaacaaattcatacataacagctcttttgtgataaatatcacaaagtactaaaaattttaaaaataaatattttaaaatatccttttaataaatgtggtacaactgtaaaccatgaaaaatcataaaatatctraagtctttgcacaacaaaatatctattatcttatctatactgacatttcacattattatgtatgttggaactgagatcattttggcacatataaaatatcttttgtgttctttaactatccagttgaacctcttcttttgatgtttgctattatcttactaactctaaacttttccaaatactgtttaaatttggttatatttctggttgactttgatggatgcagtttgtttgctataaaacaactagtgtttgtattgattagtagaaaaggcagcttcaaagatttgcatgaatatgacccaaatatgtattag

SEQ ID NO: 165685 - DNA, 564 bp, Homo sapiens
atagaaatgttgatgagaacttgtcaaattcttgttatcctttaaagtaactgattttaacataagaaaaagaaagaaactgagctgtgcttattttgaaaaaaattggctaaaaacaaattcatacataacagctcttttgtgataaatatcacaaagtactaaaaattttaaaaataaatattttaaaatatccttttaataaatgtggtacaactgtaaaccatgaaaaatcataaaatatctgaagtctttgcacaacaaaatatctattatcttatctayactgacatttcacattattatgtatgttggaactgagatcattttggcacatataaaatatcttttgtgttctttaactatccagttgaacctcttcttttgatgtttgctattatcttactaactctaaacttttccaaatactgtttaaatttggttatatttctggttgactttgatggatgcagtttgtttgctataaaacaactagtgtttgtattgattagtagaaaaggcagcttcaaagatttgcatgaatatgacccaaatatgtattag

SEQ ID NO: 165686 - DNA, 463 bp, Homo sapiens
tgacatgcaaattcaggaaattcagagaaacactgcaagatactatacaagacaacaatccacaagatacataattattaaattctccaaagtcaacataaaagaaaaggcagctaaagagaaaggcaagtcatgtataaagggaatcccatcaggctaacagcacatcttttggaagaagccttacaagccagaagagattatgggcttgtttycagcatcctaaaagaaaataaattcctgcctagaatttcatatccagacgaatgaagcttcataaggtaaggagaaatgaaatcattttcagaaaaggaaatactaaggaaatccattaccaccagaactgccttacaagaggtccttcaggtagccataaacatgtaaacaaaagaccattaattgacacctcaaaaacatacttaagtacatagcccactgacactataaagctactatacaacct

SEQ ID NO: 165687 - DNA, 603 bp, Homo sapiens
acttttgagttaggttttgaaaacaatatatcacaagaagaacacatagctttctatccctctagttccttgcatactatctacagaatagaaggaagaaactagtgtcttcttatatgtgacagaaaaagaccatttggtasaatgttaatgttaatatgagccaatgccaataatcaatgagcttgtaatttattcagaatggcttatttaaaacaatgctaagaaatgaatataaaaatatgtaataaaggatataagaatatgacaaatggaatgaaacaggagtacacagataaaacaggattttagccaagttgatgaaatagaaaatctttattgagctagaagcatttgaagtggaattgaagtggaactggaaatatacttattccattgacagagatgaggaccacagaaacagaaaataatttgggagtaatcactctaagttagatttcagacattctcaattactgccattttgtttagaaatagacacacacaggcatcctgatgcccaagagaatgataaggaccagacgcagacatttatttggtattcacacatgtagaggtgatatttggagttatgggataaat

SEQ ID NO: 165688 - DNA, 567 bp, Homo sapiens
attaagctttaccaaatacaaatgaatttcataagggaagattatatgtgtttttacgtctaccattataaatttgtatgccaaataagatcacatggtttctttcccaaattctaacataatcttccactcagagtccttttaaaaggaaacctattggcaaaaaaaaaaaaaaaaaaaaagtttaatttgtcctgtttgatgactcaatacagccaggatatcccagatcaaaagttattggaataatatgatttcatcgtttttacatttatacctacaattatttgtattcactgcaactttaatttaraaatactcatttttttgagctctaaaatgcaaggttcaagtgattttttttccttttaatttaggaggagatccaatagaataattcaaataagcattttcaggttctatgacatgctcataagaaaataaattattcatagaaatgtttattcatagaattactgtcctaataatttaacttctccagaaaacatgttttaaaatgctatatatcaaaataacgtgtaatctttcaaaatagcattagaaaaa

SEQ ID NO: 165689 - DNA, 597 bp, Homo sapiens
tcagtggaccttgaaaaaacgtcagttgaatttttcttgcataaataattttacgtatactaagaagtattatatttgaaatgaaaaatactataaattgtttatgaaacatattttgttcaatgaaactgttatgtttttaaattaatgtttttatayaaggcaaagtttttctatttaaataggaagccatctgattttaagggtaatatgtacttcctgtataaaatctcgcagcaattaaactccaattgttaaattgtttattttgagtataacttatactcatgatggaaagttacataagcagtacaataaatatgttgtaaacatttggatgtgctgaactgtgatcttaaaataatgccatcaacatattgttttgatgaaagtcctagacaaatgacacatcattattagattaatttttctttccactgttcatcaaaatatatatccatataaatgttttattaaccaataatctatccataaaagttatttataccaaaatatgtatgcatacaggtaaaagtatgattcataaaatatttaaagtactgttaaaaaaactaagattatattattaatattatg

SEQ ID NO: 165690 - DNA, 553 bp, Homo sapiens
attaatagaaagtttaactctactatgtagaataacttacttgcaaataattttaacttaaatgcaatggaaggatatgcaaaaataatccaaataaaacacatcccaaaacaaatttaatattgaaaatttcatgttccttatacctgcgttggataggaggtatcatcatgtgacttcatattctctttactttctcagattttctgattaattgcttgtgattcaagtttgggcccatgtatatagctaaaattgaggagcgggtattcatgtaatatttcactcacaataaccattggatcctactgtcatgatactttcataaggggggatgaatgaaaaggagattaggactgaacatccaataagacctcattcatctgtgtttttatgaatcaaccatgatattttcattttacatattatagaaaggatgaaaatgattcaaatatgccaawtagacaacagcaaaatttcactcgttttttgtaatctgtgtgccatttgtttcccagggtttagaaataaagtgctgaagtatataacttct

SEQ ID NO: 165691 - DNA, 559 bp, Homo sapiens
cctgttctattcaaaacaatataagcatcattgttatatggctatctctatgttgaagtataatatcaaaggcaagtatatgaatgaacctagaagaaaatgaaatattgaaacacaggtmtataaaattggatactgcaaactttattcaaatttgcacccaggaaagaaaatgcttattaaagcacatttactaattgcaagtcattatctttactggtaggtatatattccatacagattgatgtattaatgtattcatattaataaatgcttacaaaacatttacaaactaaatttacattaagaaaataaaaatgatttaatactattaataataagagaaataaagttttacatttgtgcaatgctatacttttctcagagcatttgcatatcagtgaaaataatatatttggtcctcaggctacagttttggcatgacacttctagatttataatgttgctgcttcttggatagggaaaatgatcagaaattatatcacaaaagggcaatgtcaaatggtaaatccaggataacaccatatattttgattac

SEQ ID NO: 165692 - DNA, 559 bp, Homo sapiens
cctgttctattcaaaacaatataagcatcattgttatatggctatctctatgttgaagtataatatcaaaggcaagtatatgaatgaacctagaagaaaatgaaatattgaaacacaggtatataaaattggatactgcaaactttattcaaatttgcacccaggaaagaaaatgcttattaaagcacatttactaattgcaagtcattatctttactggtaggtatatattccatacagaytgatgtattaatgtattcatattaataaatgcttacaaaacatttacaaactaaatttacattaagaaaataaaaatgatttaatactattaataataagagaaataaagttttacatttgtgcaatgctatacttttctcagagcatttgcatatcagtgaaaataatatatttggtcctcaggctacagttttggcatgacacttctagatttataatgttgctgcttcttggatagggaaaatgatcagaaattatatcacaaaagggcaatgtcaaatggtaaatccaggataacaccatatattttgattac

SEQ ID NO: 165693 - DNA, 559 bp, Homo sapiens
cctgttctattcaaaacaatataagcatcattgttatatggctatctctatgttgaagtataatatcaaaggcaagtatatgaatgaacctagaagaaaatgaaatattgaaacacaggtatataaaattggatactgcaaactttattcaaatttgcacccaggaaagaaaatgcttattaaagcacatttactaattgcaagtcattatctttactggtaggtatatattccatacagattgatgtrttaatgtattcatattaataaatgcttacaaaacatttacaaactaaatttacattaagaaaataaaaatgatttaatactattaataataagagaaataaagttttacatttgtgcaatgctatacttttctcagagcatttgcatatcagtgaaaataatatatttggtcctcaggctacagttttggcatgacacttctagatttataatgttgctgcttcttggatagggaaaatgatcagaaattatatcacaaaagggcaatgtcaaatggtaaatccaggataacaccatatattttgattac

SEQ ID NO: 165694 - DNA, 559 bp, Homo sapiens
cctgttctattcaaaacaatataagcatcattgttatatggctatctctatgttgaagtataatatcaaaggcaagtatatgaatgaacctagaagaaaatgaaatattgaaacacaggtatataaaattggatactgcaaactttattcaaatttgcacccaggaaagaaaatgcttattaaagcacatttactaattgcaagtcattatctttactggtaggtatatattccatacagattgatgtattaatgtattcatattaataaatgcttacaaaacatttacaaactaaatttacattaagaaaataaaaatgatttaatactattaataataagagaaataaagttttacatttgtgcaatgctatacttttctcagagcatttgcatatcagtgaaaataatatatttggtcctcaggctacagttttggcatgacacttctagatttataatgttgctgcttcttggatrgggaaaatgatcagaaattatatcacaaaagggcaatgtcaaatggtaaatccaggataacaccatatattttgattac

SEQ ID NO: 165695 - DNA, 580 bp, Homo sapiens
gatcataactatcacttagtgttggcatattaaatacatttccttaactaaaataattggtagcttaaaatcaattgtraggaagtactatagggactagcatttgtaagtcttaattgaacttcttaagtaagttggagtccatgaggttgtacactatctcaatggccataggataagaaaggtaagtttgaaaagggcattaaaataataaataagtaaaatcaagctttggttcttaagaaaacattttccagttaataatgtttatgtatgtacatggaaatttatttaaagccattatagtttaagttttgaagtatttttaaacaatgaatacttatggacattaaagagtagcaagcattttagtaatttttctttgctgtaagttaagaggatgagttttattcttctttgtatagatagactatgtgttgtctgaatgaacaaatacagcaagaaatcaataaagaaattagctcactatgcaattataaatagtattataaatagaataattaatatgagaaataagaaacacaagaaaaaatgcactgccaatgtttatagatatgag

SEQ ID NO: 165696 - DNA, 580 bp, Homo sapiens
gatcataactatcacttagtgttggcatattaaatacatttccttaactaaaataattggtagcttaaaatcaattgtgaggaagtactatagggactagcatttgtaagtcttaattgaacttcttaagtaagttggagtccatgaggttgtacactatctcaatggccataggataagaaaggtaagtttgaaaagggcattaaaataataaataagtaaaatcaagctttggttcttaagaaaacattttccagttaataatgtttatgtatgtacatggaaatttatttaaagccattatagtttaagttttgaagtatttttaaacaatgaatacttatggacattaaagagtagcaagcattttagtaatttttctttgctgtaagttaagaggatgagttttattcttctttgtatagatagactatgtgttgtctgaatgaacaaatacagcaagaaatcaataaagaaattagctcactatrcaattataaatagtattataaatagaataattaatatgagaaataagaaacacaagaaaaaatgcactgccaatgtttatagatatgag

SEQ ID NO: 165697 - DNA, 605 bp, Homo sapiens
cttgcagtggtacagtagctcattttaattttcatttccctgattcataggatttgaaatgtcttttcatargcttatttactatttgtatatgttctttaattaggtatgtattaagtattttggcccactttctaattgggctcttctttttattatatagagtttaagaattatttgtatacatcatataatagtcctttgtcagttatgtgttttgcaaatatttcctcccattccgtgattcgtcttttcattcacttaacaatgtcttttgcagagcataaatttttaattttatactagtccagcttatcatgaggtcaggagttcgagaccatcctggctaacatggtgaaacctcatctctactaaaaatacaaaaaattagccaggcgtgatggcacgcgcctgtaatcccagctactcaggaagttgaggcaggagaatcacttgaacctgggaggtggaggttgcagtgagctgagatcaggccactgcactctagcctgggcaacagagcgagactccatctcaaaaaaaaaaaaaaaatctttctttcatggattgtgcttttggtgttgaatccaaaaattcactaccaa

SEQ ID NO: 165698 - DNA, 605 bp, Homo sapiens
cttgcagtggtacagtagctcattttaattttcatttccctgattcataggatttgaaatgtcttttcataagcttatttactatttgtatatsttctttaattaggtatgtattaagtattttggcccactttctaattgggctcttctttttattatatagagtttaagaattatttgtatacatcatataatagtcctttgtcagttatgtgttttgcaaatatttcctcccattccgtgattcgtcttttcattcacttaacaatgtcttttgcagagcataaatttttaattttatactagtccagcttatcatgaggtcaggagttcgagaccatcctggctaacatggtgaaacctcatctctactaaaaatacaaaaaattagccaggcgtgatggcacgcgcctgtaatcccagctactcaggaagttgaggcaggagaatcacttgaacctgggaggtggaggttgcagtgagctgagatcaggccactgcactctagcctgggcaacagagcgagactccatctcaaaaaaaaaaaaaaaatctttctttcatggattgtgcttttggtgttgaatccaaaaattcactaccaa

SEQ ID NO: 165699 - DNA, 607 bp, Homo sapiens
cttgcagtggtacagtagctcattttaattttcatttccctgattcataggatttgaaatgtcttttcataagcttatttactatttgtatatgttctttaattaggtatgtattaagtattttggcccactttctaattgggctcttctttttattatatagagtttaagaattatttgtatacatcatataatagtcctttgtcagttatgtgttttgcaaatatttcctcccattcygtgattcgtcttttcattcacttaacaatgtcttttgcagagcataaatttttaattttatactagtccagcttatcatgaggtcaggagttcgagaccatcctggctaacatggtgaaacctcatctctactaaaaatacaaaaaattagccaggcgtgatggcacgcgcctgtaatcccagctactcaggaagttgaggcaggagaatcacttgaacctgggaggtggaggttgcagtgagctgagatcaggccactgcactctagcctgggcaacagagcgagactccatctcaaaaaaaaaaaaaaaatctttctttcatggattgtgcttttggtgttgaatccaaaaattcactaccaaaa

SEQ ID NO: 165700 - DNA, 605 bp, Homo sapiens
cttgcagtggtacagtagctcattttaattttcatttccctgattcataggatttgaaatgtcttttcataagcttatttactatttgtatatgttctttaattaggtatgtattaagtattttggcccactttctaattgggctcttctttttattatatagagtttaagaattatttgtatacatcatataatagtcctttgtcagttatgtgttttgcaaatatttcctcccattccgtgattcgtcttttcattcacttaacaaygtcttttgcagagcataaatttttaattttatactagtccagcttatcatgaggtcaggagttcgagaccatcctggctaacatggtgaaacctcatctctactaaaaatacaaaaaattagccaggcgtgatggcacgcgcctgtaatcccagctactcaggaagttgaggcaggagaatcacttgaacctgggaggtggaggttgcagtgagctgagatcaggccactgcactctagcctgggcaacagagcgagactccatctcaaaaaaaaaaaaaaaatctttctttcatggattgtgcttttggtgttgaatccaaaaattcactaccaa

SEQ ID NO: 165701 - DNA, 607 bp, Homo sapiens
cttgcagtggtacagtagctcattttaattttcatttccctgattcataggatttgaaatgtcttttcataagcttatttactatttgtatatgttctttaattaggtatgtattaagtattttggcccactttctaattgggctcttctttttattatatagagtttaagaattatttgtatacatcatataatagtcctttgtcagttatgtgttttgcaaatatttcctcccattccgtgattcgtcttttcattcacttaacaatgtcttttgcagagcataaatttttaattttatactagtccagcttatcatgaggtcaggagttcgagaccatcctggctaacatggtgaaacctcatctctactaaaaatacaaaaaattagccaggcgtgatggcacgcgcctgtaatcccagctactcaggaakttgaggcaggagaatcacttgaacctgggaggtggaggttgcagtgagctgagatcaggccactgcactctagcctgggcaacagagcgagactccatctcaaaaaaaaaaaaaaaatctttctttcatggattgtgcttttggtgttgaatccaaaaattcactaccaaaa

SEQ ID NO: 165702 - DNA, 459 bp, Homo sapiens
ggaatgcaacagagctggccttttgcaagcaggtccatcagacaacgaatcgggccctttccttttcccactgtatgatactgtgttcttcaattctgtacccaaaggaatacagcctctgtcatcattttattttataaatgttacccataattacactctattatttactccaaagccctgaaaaaattacaaatacaagtaactcttacctctgaactgttctatgttcacaccttgtgtctataaagaaaaaagtttccaatttagtgtayacaaaatgacttcctcttaatatacatcagtaagtaggcttatctctaccaccctttatagcttaccataaatctctgatatggtttttctatcaatattgattttctatatcaatttttattctatcttgcgacttcctcattttcactttcaccttagctcaacgcaggtcaagatgaaatt

SEQ ID NO: 165703 - DNA, 520 bp, Homo sapiens
tctagagttggagcaagtcttccatttgcttcttatccccttaaaagaatgccttccacttcccaacagcccccatcaagggaccccaagaggccaccatgctcttatctcgcactttctttcctattccccttgcctgaatctggagtggggttgagccctctgccttcaaccttaagatttaggaagttctttccccaactgtctaacttggaaaggtagatgagtctgaattttgaagtaacraatgcaaattccactcagcagaggcaatgttatttatgtacatagggatagtggaatgagttttaatagattctgtccaaaaggggtttgttcctcttatttcctctatgtaggaagttgtgtcttaggcaactttatcagtatcaatggaaaaatgataggcactacaatgaaatggcaggatgccaatatgagatatttcaggaataataagaaatacagtttgtttgtataaaataaactatctcaagaaagttttcaacgacagtgatag

SEQ ID NO: 165704 - DNA, 438 bp, Homo sapiens
gaattcatagcatttactagataacaagcttccttgtggcaggagcctcaccaccttttgctatggatgttcttcagcacaaactttcagtttttgtgcaagtcaatttttaattaacatttaactggcaaaaatgactagctaatataaaatcaagctagattctctgtccattctagagaagttgagcctttgtgagcaaggctgatctcrctcatgatacagaagtctgtctcttttaccttgtttacttttttcctgtttaccttcacagccactgatcctcaaggttagcagatgagtaagtttccaatagcagctgaactggagtgatttctatctggaaccaaacaaatagctagactctgtttggaatttctgcttccagggttatccagccacagagcctgttgcacaaggcaaactggcacttgccca

SEQ ID NO: 165705 - DNA, 435 bp, Homo sapiens
taacaagcttccttgtggcaggagcctcaccaccttttgctatggatgttcttcagcacaaactttcagtttttgtgcaagtcaatttttaattaacatttaactggcaaaaatgactagctaatataaaatcaagctagattctctgtccattctagagaagttgagcctttgtgagcaaggctgatctcgctcatgatrcagaagtctgtctcttttaccttgtttacttttttcctgtttaccttcacagccactgatcctcaaggttagcagatgagtaagtttccaatagcagctgaactggagtgatttctatctggaaccaaacaaatagctagactctgtttggaatttctgcttccagggttatccagccacagagcctgttgcacaaggcaaactggcacttgcccagcatgcttaatagaattc

SEQ ID NO: 165706 - DNA, 435 bp, Homo sapiens
taacaagcttccttgtggcaggagcctcaccaccttttgctatggatgttcttcagcacaaactttcagtttttgtgcaagtcaatttttaattaacatttaactggcaaaaatgactagctaatataaaatcaagctagattctctgtccattctagagaagttgagcctttgtgagcaaggctgatctcgctcatgatacagaagtctgtctcttttaccttgtttacttttttcctgtttaccttcacagccactgatcctcaaggttagcagatgagtaagtttccaatagcagctgaactggagtgatttctatctggaaccaaacaaatagctagactctgtttggaatttctgcttccagrgttatccagccacagagcctgttgcacaaggcaaactggcacttgcccagcatgcttaatagaattc

SEQ ID NO: 165707 - DNA, 577 bp, Homo sapiens
agatctcagctgtcataaagttcatattctaggtatacatcatttttgttaagtcactagagattgcattacacgaactagataaatattccctttattcagtcaataagtgtgttatgacacttttttgcagtggtgtgatcatagctcaccacagccttgaacttctgggctcaagtgatcctctagcctcagcctcctgagttgttaggattacaggtgtgaacgaccgcacttggccctcttttttcttttgtaattagcttttctttctcgttaatgaggtgcttcratttttggcatttgctcagttttcaaggtacttactgctttttgttcccagtgtttccacagatttgtcaaatgcctatcaagaagatttataaatgttcgaagacatcagattatcaattccatgcttccccctctctccacaccccccaagagacctctcttctgcttccctacatcttctttctcgaatctagccagctgatacctgccacatgtgtgggttagccctctattttctcttccactgtgttactgcattccttatacattcttcatgcttcca

SEQ ID NO: 165708 - DNA, 246 bp, Homo sapiens
gaattcatacaaagatcacactaccacaggcactcaaaatcaaacccaaagtatcttaatcaacaacatatatatatatatatatatatatcctcrgagaaaattctcccctacaaaagcaatttcaaacaattagaacaagtgactgctacaccagatgttcagaaatccaagtaatgacacaggaaacatgaaacagcagggaaatatgatgctaccaaaggaccacaattgtccagcaacaga

SEQ ID NO: 165709 - DNA, 571 bp, Homo sapiens
ggaattgcccagtctgtttcactaagtcartcaactgttaagatgttttttaaatataattcatatttcatggtaaatctacttgcattttttcctagttggaacaaaagtggttttaaaactcataactaaataagaaagactgcttacacttttactcggttttaaatctccaaggccatcaaaccataacaagatattgacagtgaccacttccaaaaagtggcatactaaacaaaatacaaagtattggaaagagttattacctgaaattcaaacaaaacacaagttaaagtatttaaaaatcattaataagtttaattagtgtcacattatatgataccaattacaaagtatttacttactattcatatagtagaattttagggcaagtaggagaaaaaatgactttttaataaatttcatttatcaaatttacaccatattaatgaacggattgccaaattgtctaattttatgcctatcaacacacataatttacaccacttcctcaaattagataccttatttcatatccaatgtatgaaatatttatgtttggggttgtaaa

SEQ ID NO: 165710 - DNA, 571 bp, Homo sapiens
ggaattgcccagtctgtttcactaagtcaatcaactgttaagatgttttttaaatataattcatatttcatggtaaatctacttgcattttttcctagttggaacawaagtggttttaaaactcataactaaataagaaagactgcttacacttttactcggttttaaatctccaaggccatcaaaccataacaagatattgacagtgaccacttccaaaaagtggcatactaaacaaaatacaaagtattggaaagagttattacctgaaattcaaacaaaacacaagttaaagtatttaaaaatcattaataagtttaattagtgtcacattatatgataccaattacaaagtatttacttactattcatatagtagaattttagggcaagtaggagaaaaaatgactttttaataaatttcatttatcaaatttacaccatattaatgaacggattgccaaattgtctaattttatgcctatcaacacacataatttacaccacttcctcaaattagataccttatttcatatccaatgtatgaaatatttatgtttggggttgtaaa

SEQ ID NO: 165711 - DNA, 571 bp, Homo sapiens
ggaattgcccagtctgtttcactaagtcaatcaactgttaagatgttttttaaatataattcatatttcatggtaaatctacttgcattttttcctagttggaacaaaagtggttttaaaactcataactaaataagaaagactgcttacacttttactcggttttaaatctccaaggccatcaaaccataacaagatattgacagtgaccacttccaaaaagtggcatactaaacaaaatacaaagtattggaaagagttattacctgaaattcaaacaaaacacaagttaaagtatttaaaaatcattaataagtttaattagtgtcacattatatgataccaattacaaagtatttacttactattcatatagtagaattttagggcaagtaggagaaaaaatgactttttaataaatttcatttatcaaatttacaccatattaatgaacggattgccaaattgtctaattttatrcctatcaacacacataatttacaccacttcctcaaattagataccttatttcatatccaatgtatgaaatatttatgtttggggttgtaaa

SEQ ID NO: 165712 - DNA, 262 bp, Homo sapiens
aatggaatggtgcctaggtactcatgtttgtctaggtgaaaacagcttctaaatccaggtgcttacatcagaattgctctcctggaaatttaggactgagacattgagtcasttacctgtagggtaacctgtagaatcagagatttctcaaatttgacctgtcttattttgataccatgtttcccagcaatgtaacctccccttaagtatcagtttttgtaaaatctcctaatcaatttcttatcagattatattatataaa

SEQ ID NO: 165713 - DNA, 262 bp, Homo sapiens
aatggaatggtgcctaggtactcatgtttgtctaggtgaaaacagcttctaaatccaggtgcttacatcagaattgctctcctggaaatttaggactgagacattgagtcacttacctgtagggtaacctgtagaatcagagatttcycaaatttgacctgtcttattttgataccatgtttcccagcaatgtaacctccccttaagtatcagtttttgtaaaatctcctaatcaatttcttatcagattatattatataaa

SEQ ID NO: 165714 - DNA, 524 bp, Homo sapiens
caaagcttcctccttatggaatttcatcctcttcttcatcttgatcaccttatcttgttctatgattcttttaaggagargttttcccttccttccagcttttttagttttgtgggtgtcaagtaggagagagataattagtttgaattatatactcatctattacccaaaataaagtcctttaaaaaaaaaaagataaactgagacctagacaaattaagtaaccctgtaagaccacttaatcaatggaaatcctggtccagaatcctgagtgattttaacgaaatagttcacagtcatttattaagagcaggggcaccctagaaggaattttttggttctgttgagccagatttatatttggcacatgctcattctttttagactttttagatagcctaataagataggaccatcactatgttatataaatatgaaatccatttgaaaatatgggacctgtcagtataggtactgcttgaactgtaactatgcatatatctgattggcttttatgccctagg

SEQ ID NO: 165715 - DNA, 524 bp, Homo sapiens
caaagcttcctccttatggaatttcatcctcttcttcatcttgatcaccttatcttgttctatgattcttttaaggagaggttttcccttccttccagcttttttagttttgtgggtgtcaagtaggagagagataattagtttgaattatatactcatctattacccaaaataaagtcctttaaaaaaaaaaagataaactgagacctagacaaattaagtaaccctgtaagaccacttaatcaatggaaatcctggtccagaatcctgagtgattttaaygaaatagttcacagtcatttattaagagcaggggcaccctagaaggaattttttggttctgttgagccagatttatatttggcacatgctcattctttttagactttttagatagcctaataagataggaccatcactatgttatataaatatgaaatccatttgaaaatatgggacctgtcagtataggtactgcttgaactgtaactatgcatatatctgattggcttttatgccctagg

SEQ ID NO: 165716 - DNA, 524 bp, Homo sapiens
caaagcttcctccttatggaatttcatcctcttcttcatcttgatcaccttatcttgttctatgattcttttaaggagaggttttcccttccttccagcttttttagttttgtgggtgtcaagtaggagagagataattagtttgaattatatactcatctattacccaaaataaagtcctttaaaaaaaaaaagataaactgagacctagacaaattaagtaaccctgtaagaccacttaatcaatggaaatcctggtccagaatcctgagtgattttaacgaaatagttcacagtcatttattaagagcaggggcaccctagaaggaattttttgrttctgttgagccagatttatatttggcacatgctcattctttttagactttttagatagcctaataagataggaccatcactatgttatataaatatgaaatccatttgaaaatatgggacctgtcagtataggtactgcttgaactgtaactatgcatatatctgattggcttttatgccctagg

SEQ ID NO: 165717 - DNA, 524 bp, Homo sapiens
caaagcttcctccttatggaatttcatcctcttcttcatcttgatcaccttatcttgttctatgattcttttaaggagaggttttcccttccttccagcttttttagttttgtgggtgtcaagtaggagagagataattagtttgaattatatactcatctattacccaaaataaagtcctttaaaaaaaaaaagataaactgagacctagacaaattaagtaaccctgtaagaccacttaatcaatggaaatcctggtccagaatcctgagtgattttaacgaaatagttcacagtcatttattaagagcaggggcaccctagaaggaattttttggttctgttgagccagatttatatttggcacatgctcattctttttagactttttagatagcctaataagatagraccatcactatgttatataaatatgaaatccatttgaaaatatgggacctgtcagtataggtactgcttgaactgtaactatgcatatatctgattggcttttatgccctagg

SEQ ID NO: 165718 - DNA, 316 bp, Homo sapiens
ggaggtagcagtaagttgagatagagccactgtaccccagcctgggtgacagagactgtacaaaaaaaaaaaaaaacatggaatcaaatcataattgcctggggaaggagcaaggaaaaggagagaaaaggattataaaggggcatgaggaaatgttctagggtgatgaatatgytcattacctggttacattcatgagaaaacttatcaaattacatattttaatatgtaccctttatagtatgtcaacattacaggtactctcacaaagctatcaacaaaaataggaaagaagcagcagcaagcaacaacagcc

SEQ ID NO: 165719 - DNA, 402 bp, Homo sapiens
ccactggcctgtaagaaggcctcactcagctccctgggggacacagctaaactagcaaagaaagacactctgctgagaaaaaggggccatacctcctctcrtttacaaataacatgttgggtttaggggagatggggcaggtcagcatctgagttacagtttgcaagtgaaggggaaaagagcggtgcaggcatctccaagctgcacctacatggcctgttgccatactgcaggtgcagaagctccacgaaagccatggggttcacgttggctcaactgccaaggggagagctgtgcagaggacaggcagacactcttacatctgatcacttcataggcacatcgctgagtctgagactcacatgaatgtctatttataaactctgaacttgcattcagcaa

SEQ ID NO: 165720 - DNA, 521 bp, Homo sapiens
atctattcagctggttaagctttcgtggcccttcatgttcagatgtctcaaggtgatatgagtgtgcctcaatttatagggagtgactatggayggtgaactatattgacatataaaggcagctttaaaatacagactacagaaatcaagtggcttgacaattcccttagaacatatgtttatgaagtatagagctcaaatgtaatgatttcagttggttacagagtattaatgaattttgaattgaggcaattgtgatcaagcttgttgccttttctaacatgaatcattattaaaatgatgattgtcctccatagttatgaaagcattaaaaaagcatctacctatgcctgaattaacgggacagatgtggttttcagctttcacctggccaacaggacttccatggttgtgatttcaaggtgcttgtttatgtatatggttttgctggtattttctgagtcttcaataccatttcttgtaatagggtgtgaatgggtgtgtgtgtgcttgctagtatg

SEQ ID NO: 165721 - DNA, 521 bp, Homo sapiens
atctattcagctggttaagctttcgtggcccttcatgttcagatgtctcaaggtgatatgagtgtgcctcaatttatagggagtgactatggatggtgaactatattgacatataaaggcagctttaaaatacagactacagaaatcaagtggcttgacaattcccttagaacatawgtttatgaagtatagagctcaaatgtaatgatttcagttggttacagagtattaatgaattttgaattgaggcaattgtgatcaagcttgttgccttttctaacatgaatcattattaaaatgatgattgtcctccatagttatgaaagcattaaaaaagcatctacctatgcctgaattaacgggacagatgtggttttcagctttcacctggccaacaggacttccatggttgtgatttcaaggtgcttgtttatgtatatggttttgctggtattttctgagtcttcaataccatttcttgtaatagggtgtgaatgggtgtgtgtgtgcttgctagtatg

SEQ ID NO: 165722 - DNA, 307 bp, Homo sapiens
tgcttttctcgtcagttggaagctggttctaagtctggtgagaggaaacccgctgtgggaccctgtcttcccagcctgggtctgtgctcgtacatcctcagctgctgtattctcaaagctctatgctttgtcgtttttgtttttgttttctcttcctgaaattaattacccartgctgagtggaacaatgggatacagaggcttcagagaaattggtttagttttcctcttgaatctgcttttggacaagtctcatttgagctcaggtggtccttttgggtcctgttgctggagggtggatctctca

SEQ ID NO: 165723 - DNA, 488 bp, Homo sapiens
aatctgttgctagcgcctggctgctgtccactgctgttgccagggaaacagacgtcagcttgatggaaacaaggatcagcgaaaactttcacttacctcgtttccactgatcccgacagccatttctatggaaacagtagctgtragccagcggcagagaggttaccactcacttgttaatgtcaggtgtggctaccagcctgtgcacttcaggtaccatggtaccaacagcaccaggatccagctgtcagctacccccaacagctgttaactctgcaacaagaaagttcagtgttcaaaagtatatataaatgtttagctaggttctttattagaaaaaggaaatttagcactctcatttaaagccaaatcagagcttagtttcttgttctaccaaagccaagccatgtgagggtaccgaaggaccctgaatctttccggcaccctaacctcagcattcaactccattcacaatattacttcatggt

SEQ ID NO: 165724 - DNA, 488 bp, Homo sapiens
aatctgttgctagcgcctggctgctgtccactgctgttgccagggaaacagacgtcagcttgatggaaacaaggatcagcgaaaactttcacttacctcgtttccactgatcccgacagccatttctatggaaacagtagctgtaagccagcggcagagaggttaccactcacttgttaatgtcaggtgtggctaccagcctgtgcacttcaggtaccatggtaccaacagcaccaggatccagctgtcagctacccccaacagctgttaactctgcaacaaraaagttcagtgttcaaaagtatatataaatgtttagctaggttctttattagaaaaaggaaatttagcactctcatttaaagccaaatcagagcttagtttcttgttctaccaaagccaagccatgtgagggtaccgaaggaccctgaatctttccggcaccctaacctcagcattcaactccattcacaatattacttcatggt

SEQ ID NO: 165725 - DNA, 482 bp, Homo sapiens
tgctttctgttaaaattctctggatcttttactttcagccatctaaatttgatgtgcttagcagtggttccctttgtgtttcccctgcttgaggtttgttgggccttttggatctgttaacttagttttcaatacttgcaacatgttcagctttatttatcttaaaatttttcttcctcaatctctttattctcctgtgactccaatttcatatacaccagattgcttattgttgttttagagatcactaagccctcaycaactttttctgcaatgtccagtctacttttttcagatattgtactgtttctatttacctactgagatttacctattcttttattatgtccatcttttccttcagttccttaaacaggctcatagtagtgacttcaaagtctttgattattaattgcaacatctgtcatcttttgtttctatcgacttttccctccttgatcgtgaatattttcctgcttctt

SEQ ID NO: 165726 - DNA, 568 bp, Homo sapiens
aagagggaagaaacagtgtcctcacgccaatgccaggctgctcacctccagggacgccatgaacggtgtgtgaacggtgcctctggaggtgcagaracacagccaaattgcaattggtgctctctgactgcaccttctgcttaaaataaaccccaaaccaatgtacaggcacagtcagccagagcccagtcagttatgtctctcgcgggtggggagacacaggcctctgcacagtctgaaactttaggcaatggcttccatgactgccttcatggtcactggacatcctggaatgggaggcatgaatatctcccaccttgtctctcctctgccagttcttgtctatggaaatatggccaagatgtaggtaataggagccaggagagaggaagtctagaaagtgtataagaagagggagccagttcccaaacaccagggagttgagttccaaattctgatttggggaaatcatccacatggctgtcatggaagctatttggggcatttcataattgttatttcagggttcccccaactcccatcatttatagattctccaccacaaaag

SEQ ID NO: 165727 - DNA, 568 bp, Homo sapiens
aagagggaagaaacagtgtcctcacgccaatgccaggctgctcacctccagggacgccatgaacggtgtgtgaacggtgcctctggaggtgcagagacacagccaaattgcaattggtgctctctgactgcaccttctgcttaaaataaaccccaaaccaatgtacaggcacagtcagccagagcccagtcagttatgtctctcgcgggtggggagacacaggcctctgcacagtctgaaactttaggcaatggcttccatgactgccttcatggtcactggacatcctggaatgggaggcatgaatatctcccaccttgtctctcctctgccarttcttgtctatggaaatatggccaagatgtaggtaataggagccaggagagaggaagtctagaaagtgtataagaagagggagccagttcccaaacaccagggagttgagttccaaattctgatttggggaaatcatccacatggctgtcatggaagctatttggggcatttcataattgttatttcagggttcccccaactcccatcatttatagattctccaccacaaaag

SEQ ID NO: 165728 - DNA, 568 bp, Homo sapiens
aagagggaagaaacagtgtcctcacgccaatgccaggctgctcacctccagggacgccatgaacggtgtgtgaacggtgcctctggaggtgcagagacacagccaaattgcaattggtgctctctgactgcaccttctgcttaaaataaaccccaaaccaatgtacaggcacagtcagccagagcccagtcagttatgtctctcgcgggtggggagacacaggcctctgcacagtctgaaactttaggcaatggcttccatgactgccttcatggtcactggacatcctggaatgggaggcatgaatatctcccaccttgtctctcctctgccagttcttgtctatggaaatatggccaagatgtaggtaataggagccaggagagaggaagtctagaaagtgtataagaagagggagccagttcccaaacaccagggagttgagttccaaattctgatttggggaaatcatccacatggctgtcatggaagctatttggggcatttcataattgttatttcagggttcccccaactcccrtcatttatagattctccaccacaaaag

SEQ ID NO: 165729 - DNA, 558 bp, Homo sapiens
ttaatgcttaatttgaatgtgatagaaattaatttaaatgargcacattaaaatgcacctaaataataaaacctgctacatattttaaaaccacacatgaatctctggttaacaaaggtgaaattattcttaaaggagaaggtggtatttaagtagaacaaagatgtcaaatctgatatttagaaagcatagaggttatagtatgacagtgttttcatattttaagatatcaagtatagaatgattttttaaatggttatttctaaaagatttaaaacagagcttcagggaaacttgataaaatttaattatatagtgattttcaacattctaacaaaagaatgggccacagtattaataggtataatgtgggatcagtgtcctgggtcaaacattgaactatataaagttaaacatgtttcattatacattcattatctattgctacataaaaattcctcccaaatttagcatcttaactggatggttctggctggaagactctcatgaggttgtagtcaagatgccttacaagaccacaatcatctgaaggcttga

SEQ ID NO: 165730 - DNA, 609 bp, Homo sapiens
ctgcttgaactttgttcccttgtttgctgtgttacccatgttcttctggtctgtctttcccactgacggagaaaagaagtcctraaaatgaatgaaatcgtttctcaagaaggatgagggcatcctttatacccagtgttgcatatgatgggttctttggctttgctttttcctcttcctcaattctttcttcatgcttcaaattttaaaaagattttttttttctgttatgctggattatatgttcctgtttgccattcctttctcctctagagttctgcatcactttctatttatactttggtattgcctttcttttaatttattcatcttatatttttcctctgctcaacatgtgttgggattagatttcttagcataaggaaatgggatgatctttagatgaaaaacatctcagtgttaaaatgtgaccttaaagtaaggatatttcattcaaccttctgttcattaaattagttctctccaaacctacttatcaagtggtgatcatctagcgtgcttgattacctttaaagttagggaacttgctacctctcaaggctgcctctttcttctaggaaagctctgcacattagaaaattgttccat

SEQ ID NO: 165731 - DNA, 582 bp, Homo sapiens
ttcaaggctcaattcttctttccaatttgaaaactttccaggtagtttctgtccatattcaattgtgtcttttcttcttctgcacccaccatagaattaagcaattagcaccttggttgtatatgttaacaaggtttttaattatctgtgacacatgatgtagattagtgtttagatcaggtcagcccattagtgggtggtaaaattaatttagcaaacccataacatcatttaaaaaataagtagactaggattgagaatatcacatgtaaaatttctgtcttagatatatagtacatatgtatgaaaactattaagatatattgtattttcatctttaacatcttggaatttgggrtgtatcttagaattcaaggtgtcttagcactatgttatcacatactaggtagtgtcttttctattttggtggtatacatgctgctatggtttggctctgtctccacccaaaactcatcttgaattgtagttcccataatccctacgtatggtgggagggacacggtgggaggtcattgagtcatgggggtggttctcccatgctattctcatgatagtgagtaa

SEQ ID NO: 165732 - DNA, 593 bp, Homo sapiens
aatggaggcagggaaatgtagggtgtatttaggtaagagcagctagtttggattggatagtgtacattagagacataccatgggtgagggggtggatgtggacagtgaacctaaacgctttgtggtagcaggtcacaggggccgtgcatacatgcttaaggagattggatgttacaggaaatgggaagctattaaagatttctaagcaagagaatgacaggtcaaatccgacatgatttagaaaaaacgtaggctcagtcagaagccatagtctaatgaccaatgcatcataattacttgctacactaattttcttctttagaagtcagcttttaagatatgtgtttataatacagatttatacagttttacatggttgaaacaaagaataataatatttattatgtaagattcaaatttcagtatcaacaaataaagtattcctgggcccagccgcacctattggttcacgtattgtctatacctgctttcctactacagtggcagagctgagtacctgccacagagaccgtctgcccaacaaagcytgaattatttactctccaacccttaagagaagaaggttgctgact

SEQ ID NO: 165733 - DNA, 479 bp, Homo sapiens
gattcttcactttccatttcatcttaccttcatcattacagccctagcagctgttcacctttwattcctacatgaaacaggatctaataacccttcagggttttcatcagaccctgacaacattaccttccacccctaccatactaccaaagacattttaggtttaatttttctcctcctcctcctaataattctagtactattttcgcctgacctcctgggcgacccagataactatgcattagccaaccccctcaacaccccatcccacattaagccagagtggtacattttgtttgcctatgcaagcaaaagtgtttatccagacaacagaatattactcagagctaaaagaaataagctacaaaaggctattaaaagacatggaggaatctaaaatgcatactactaagcgaaagaaaccaatctgaaaaggctacctactgtatgatttcaactatatgacattctggaaaaga

SEQ ID NO: 165734 - DNA, 363 bp, Homo sapiens
tgtgcctagtgaatatcggtatgagccaaccacagataggaatctctttgggtaatagaaatgactgacttcctgacatcatttagtagaatgaggaggaagagctgccttatagggttttagaccagaagtgctattgattgccttcagaatgacacttctaagaaatgggtaagagtaagctaaaagttacatctttctgagtcttaatccaatcagactgtaattggtgatagaagcttttcaattgtgactacatgagttctaggattaattttcaagaaactgctctccttctaatggttttmatcatcataaatgctttcttcttccctagattttctctgcatatcctagaaatag

SEQ ID NO: 165735 - DNA, 585 bp, Homo sapiens
ttaaaatgatttatttttgcccacaaaagagcatttcccagttacacttaaataatgtcttttttctttaatgtttcactttgaaaacaaaataaaataacattttacttttatgtttttatttcatatctagtttttactttgagacaatagatgaaaggatgtttaaaggagacagtaagtagagttgcataaaataaaatgagaataaaatttrggaaataaaattccatcttctaagcgtgaaataagggtatctaatgagtaaatttaggtaaaaaaccattctcatgatattcacaggaatgtatattgtaaagactttcctggaaggcattttggcaggaaggataactgcagttaattttcatatactttaacctgattattctacctctaggatgtattctaaataaacaactacatgtaccacaaggctgctcatgcaacctgaaaacaaccatacttataaatatatacataaaattatataaccataaaataatgcacaattcagtttttgattaacatggaaagattttcaaatggcaagaccaggttatagaataatatatgtaatatgac

SEQ ID NO: 165736 - DNA, 256 bp, Homo sapiens
agatcacaaagccaaccatgcccagcccctcccagtgcccctagtcctgcaaccagtgttctgaattctgacagcattgtgagcctgccttttgtactttacactcatggaagtataaccaccttcctgttktaaaataaatgtttacttttgaaatgattttagaaatacaccttccatccagctgcccctaataatgacattttgcattaccatggcacatttgtcaaaactaagaaatttaggctgggtgtgg

SEQ ID NO: 165737 - DNA, 642 bp, Homo sapiens
ttaccacattttggaatgggatcaccaactttcagttctaccaacgtccaccttgcagctaaacctgaatctttactgtgaaaagtcttaattctgttggtttcattatgaccatttttttggaatttgttttgaggtaacatgggcttaaaatcactcaattcactattggattctttggagctgttaatctgttcagtgaaaagaacaagaactttggaactcaagatttaactatggttccatcactgaccttgggtatgtttccctaagtcactgcacttcagcttttctcatctgtaaaatgacaaaaatgatactacatagtaagcactaaaatgttcattacacatctcagacctagaaatagctatgtcttttaggtttcattaagctacgtatcactaagaaaagaaattatgttaacaattcacatatcacaccaagtgcttactatggtattrctgtaaatgctttacatgtttaattcttacaacaccctataaggcaaattactcttattttacccattttaaagatcaacatacagggtcagaaaggttagttactttgcttatgtaattgtgcctgtattggaatctagcttagtctcactttaaaattccacctagctattatgtt

SEQ ID NO: 165738 - DNA, 516 bp, Homo sapiens
tttttaacctttgcttggaatattgctgatccgtgttttgtcttttagagttaasaaaacttattttaaactatttatggtctttaataattgagtaaggtgtactcccatgaacaaaatttggagcatgtttgtttctctctgcctggtttctctagaatttggaaactatctgtgagtattcttatggcaatataattgtttgcatcagtgcaataagaatcacatttttcttttgcaagaggacggaattggaaaaattagttattttaccaaggctttgactagaagtgtatgcttccctttaaggagtcaagtttgactggcagagccaatacaagccccacagggagaatgacctcattcccttgcctacacagtccctgtatagggttcctgacctatagtcaatacagaacgtcactttctaacaggtccaggaactccaagtttattatggtacctggagaggaaaggatcacccaactcacaggtatttgaggatgcaaatgcatg

SEQ ID NO: 165739 - DNA, 516 bp, Homo sapiens
tttttaacctttgcttggaatattgctgatccgtgttttgtcttttagagttaacaaaacttattttaaactatttatggtctttaataattgagtaaggtgtactcccatgaacaaaatttggagcatgtttgtttctctctgcctggtttctctagaatttggaaactatctgtgagtattcttatggcaatataattgtttgcatcagtgcaataagaatcacatttttcttttgcaagaggacggaattggaaaaaytagttattttaccaaggctttgactagaagtgtatgcttccctttaaggagtcaagtttgactggcagagccaatacaagccccacagggagaatgacctcattcccttgcctacacagtccctgtatagggttcctgacctatagtcaatacagaacgtcactttctaacaggtccaggaactccaagtttattatggtacctggagaggaaaggatcacccaactcacaggtatttgaggatgcaaatgcatg

SEQ ID NO: 165740 - DNA, 516 bp, Homo sapiens
tttttaacctttgcttggaatattgctgatccgtgttttgtcttttagagttaacaaaacttattttaaactatttatggtctttaataattgagtaaggtgtactcccatgaacaaaatttggagcatgtttgtttctctctgcctggtttctctagaatttggaaactatctgtgagtattcttatggcaatataattgtttgcatcagtgcaataagaatcacatttttcttttgcaagaggacggaattggaaaaattagttattttaccaaggctttgactagaagtgtatgcttccctttaaggagtcaagtttgactggcagagccaatacaagccccacagggagaatgacctcrttcccttgcctacacagtccctgtatagggttcctgacctatagtcaatacagaacgtcactttctaacaggtccaggaactccaagtttattatggtacctggagaggaaaggatcacccaactcacaggtatttgaggatgcaaatgcatg

SEQ ID NO: 165741 - DNA, 603 bp, Homo sapiens
ctgcagtaaagttctgtttctgcctgtaactagaatagtgttcagtgattccattttagtagytctcttaatacagacattataacactagacatttcttaattagagaagtaatttctcaaaaaaaatcataacaatgattcaatagtatatctgttttgagaggcattgcaatatatttggtatagtggttccccattatttgtaggggatacgttccaagatccccagtggatgccaaagtactgaaacctgtatatactgtgttttcctatacatacatacctacctatgataaaggttaatttataaattaggcactgtaaaagactaataataataactaacaataaaatagaacaattataaccatatgctgtcatgaaagatacgtgaatatgctctctctcaaaataccttactacagtgtactcccagttcttcttatgaagatgtgagatgataaaatgcctacatgatgagatgaagtgaggtgaacgatgcaggcactgtgacgtagtcttaggctactgttgaccttgaacacatgcactgcaatactatgagccataagatggctattaagtggccagcaggtgatag

SEQ ID NO: 165742 - DNA, 560 bp, Homo sapiens
caagccatttgatgtctcattgcctcatcctcctcatgtgtgaaaagggaataataataagggtggctacatagtaggggtgttgtaaagatgaaattagctaagaaatgtgagatacttagaactgtgcggtatgtaccaaaaggtgcaatgttttatttttcatgtattgtgaacattttccaaaaggaataacattttagctaactgatacttcaaatatagggttttcttttttgggaaaagtgaatttctattttcagaagtaaaactaggttagtgattcaccagcactaaatatttagtgccaatccatgaggcactttagattacaatgtttgtattagtaaaagtactggactgagagtgaagtgtaccaataataattatagttttatagtaatagttatatgactttcagcaaattggaagttgtaaattgtaaacctcaatttcctagtccataaaatcagatggagtgttgtgcatatatgtgtaagttgcaaaggcatttaartacttcaatagtgcttgaaggctcataatgtaatagaaggcac

SEQ ID NO: 165743 - DNA, 450 bp, Homo sapiens
cccacattttgttggtttaattaatttttagtgattgagtcttggcatttcaatatgcatatttaactaatcatgatgtacttagagagaataatgtgagactttatatagaatatatgaaccttgtaactgcatcattcagatgacctcctctgtrttatgttatttgtataagctctgcaatttgtgtaatgattttagctttaagcagtcatatatcttttacaaaattagaaatagctatcttctgcacatatttactctttcctgtgctctttattgataactagagatctgagtttgcatctgaagctacttcactttagcccagtgaacacactttggtcattctttgtaatgtaaatcttctggaaaataattctctgttttctttcatctaagcatgcatttattcccacttcacctaaagaccagaattgctaactatag

SEQ ID NO: 165744 - DNA, 626 bp, Homo sapiens
ccggtcttctctgagctgttctgttgctcaataaagctcctttttaccttgttcaccctccacttgtccacatacattattcttccaagatgcaggacaaaaacttgggacctgccaaatggcagggctaaaagagctgtggcacaaacgaggctgaaacactccccttgctcaccacgttgtgggtgasaaggagagaagaaagagggagagaagagctgtggcccttcacggagcccagacgtaggagctctgggaacaaccaatgctgtggcacccactttggggatctgtagtccctggcatctccaagcttctgggcatcaccacatttcctggtgccagttgtggaagctgcttgcagtacgcctggtccagtcgcagcctcgcagggagccagcttccatcctggtgcctggagctgcacatcctgccgcagccagcctgccttattgtgcacagtggccggacgccatgcttcctcactctcacacacctcttgctgcccgtcatgctcttggcaggcgtggtatccatgccagtagcacaagccaagcacagcctgccaggtcgtatgggcagaatgagcccagcaggcccaagcaaaattcaggcaaaggagctac

SEQ ID NO: 165745 - DNA, 626 bp, Homo sapiens
ccggtcttctctgagctgttctgttgctcaataaagctcctttttaccttgttcaccctccacttgtccacatacattattcttccaagatgcaggacaaaaacttgggacctgccaaatggcagggctaaaagagctgtggcacaaacgaggctgaaacactccccttgctcaccacgttgtgggtgacaaggagagaagaaagagggagagaagagctgtggcccttcacggagcccagacgtaggagctctgggaacaaccaatgctgtggcacccactttggggatctgtagtccctggcatctccaagcttctgggcatcaccacatttcctggtgccagttgtggaagctgcttgcagtacgcctggtccagtcgcagcctcgcagggagccagcttccatcctggtgcctggagytgcacatcctgccgcagccagcctgccttattgtgcacagtggccggacgccatgcttcctcactctcacacacctcttgctgcccgtcatgctcttggcaggcgtggtatccatgccagtagcacaagccaagcacagcctgccaggtcgtatgggcagaatgagcccagcaggcccaagcaaaattcaggcaaaggagctac

SEQ ID NO: 165746 - DNA, 626 bp, Homo sapiens
ccggtcttctctgagctgttctgttgctcaataaagctcctttttaccttgttcaccctccacttgtccacatacattattcttccaagatgcaggacaaaaacttgggacctgccaaatggcagggctaaaagagctgtggcacaaacgaggctgaaacactccccttgctcaccacgttgtgggtgacaaggagagaagaaagagggagagaagagctgtggcccttcacggagcccagacgtaggagctctgggaacaaccaatgctgtggcacccactttggggatctgtagtccctggcatctccaagcttctgggcatcaccacatttcctggtgccagttgtggaagctgcttgcagtacgcctggtccagtcgcagcctcgcagggagccagcttccatcctggtgcctggagctgcacatcctgccgcagccagcctgccttattgtgcacagtggccggacgccatgcttcctcactctcacacacctcttgctgcccstcatgctcttggcaggcgtggtatccatgccagtagcacaagccaagcacagcctgccaggtcgtatgggcagaatgagcccagcaggcccaagcaaaattcaggcaaaggagctac

SEQ ID NO: 165747 - DNA, 631 bp, Homo sapiens
tatttatattaagaaaatatagaaatgattacatgttatgtagctatccaaattgtgttttccaaaatattttattmtcatgtatatcttttcacaatatattgataggagaaaatatgtacatatttacctagggtttatatctatatatatctagatatagatacatatatagacacacatgcacataaatatgtatatattaaaaagaaacttcctaaactaataacaatgatcatctttcgtaggtaggtagtgttactgagggcattccaaaaatatctttattttcaaaacttctataacaatcatatattgctttcctttttgtggctatttgcaaaataaaatatgtacttttctcactgtaaaagattcagacaacactgagatatgtgagagctgtattatattttaagaaagtcacttctgaggatattatataattacaggtttgcatagttcaagcctaaagtaattccaaaataatttctattatagaaaagccaatggagaaatgtggtctcagaaaataggaatttccaatcacagcacatacatctcctatgatatattttttctctaattacactttttatttcagcgaaaataaaatttctacatttaaaac

SEQ ID NO: 165748 - DNA, 631 bp, Homo sapiens
tatttatattaagaaaatatagaaatgattacatgttatgtagctatccaaattgtgttttccaaaatattttattatcatgtatatcttttcacaatatattgataggagaaaatatgtacatatttacctagggtttatatctatatatatctagatataratacatatatagacacacatgcacataaatatgtatatattaaaaagaaacttcctaaactaataacaatgatcatctttcgtaggtaggtagtgttactgagggcattccaaaaatatctttattttcaaaacttctataacaatcatatattgctttcctttttgtggctatttgcaaaataaaatatgtacttttctcactgtaaaagattcagacaacactgagatatgtgagagctgtattatattttaagaaagtcacttctgaggatattatataattacaggtttgcatagttcaagcctaaagtaattccaaaataatttctattatagaaaagccaatggagaaatgtggtctcagaaaataggaatttccaatcacagcacatacatctcctatgatatattttttctctaattacactttttatttcagcgaaaataaaatttctacatttaaaac

SEQ ID NO: 165749 - DNA, 631 bp, Homo sapiens
tatttatattaagaaaatatagaaatgattacatgttatgtagctatccaaattgtgttttccaaaatattttattatcatgtatatcttttcacaatatattgataggagaaaatatgtacatatttacctagggtttatatctatatatatctagatatagatacatatatagacacacatgcacataaatatgtatatattaaaargaaacttcctaaactaataacaatgatcatctttcgtaggtaggtagtgttactgagggcattccaaaaatatctttattttcaaaacttctataacaatcatatattgctttcctttttgtggctatttgcaaaataaaatatgtacttttctcactgtaaaagattcagacaacactgagatatgtgagagctgtattatattttaagaaagtcacttctgaggatattatataattacaggtttgcatagttcaagcctaaagtaattccaaaataatttctattatagaaaagccaatggagaaatgtggtctcagaaaataggaatttccaatcacagcacatacatctcctatgatatattttttctctaattacactttttatttcagcgaaaataaaatttctacatttaaaac

SEQ ID NO: 165750 - DNA, 491 bp, Homo sapiens
tatttacataaaagtctcccccagtaaagataattgcattggaacagactttttgaaatgttgatgatcacccacaggactatctatgtgaaaataataatgaccttaaaccaacaacaacttgaaaacttgatttgtgtttcttataagaagccaactccttagagtgactggactgaggattccacaaggaatttggacttgaaattttcagaagttattgatattggtactgaactcaactgaagaggtattcttgcaaacatattactagtttcatagactgccttgctgtctcattcatagcacggtggtttcagttactttaaggatcaygtttttctagaaaacaaatttattttttacattactttttctttctgtactcccagtaatggttcccacaatctcatttccgatcagctccaaattgtactccatataaataggttttgatttacaaattgaaaaatctgattatttataaagta

SEQ ID NO: 165751 - DNA, 542 bp, Homo sapiens
gcatgctccagtatgataggaaaatgtgaaatggaaaaggcaaaagacattttgttctttaaaactaatgttggaaaacaaactttatgatgaaagctctggacctcactaatgtatgaaaaacaacttytaaaagatgtctgattttgacagataaattataattgagttctaaaaactgaaattttgatatattattagagaaatgatattaatattttcagtgcgtgatgatgattataatagatcctttttctactctagagagccatctaaataaagtcctagtttcaaaagattataaagtttatttcacaatgagaaccattcaatataaaaacagacaaatagatgcatggaagagaatagagaactcagaaataaagctgaagacctacaaccatcttatctttgacaaactcagcaaaaataaatattggggaaaggactctttttttttagaaagtggtgctaggataactggctacccatgcagaataatggaactggactccttccttttactacatacaaaaattaac

SEQ ID NO: 165752 - DNA, 542 bp, Homo sapiens
gcatgctccagtatgataggaaaatgtgaaatggaaaaggcaaaagacattttgttctttaaaactaatgttggaaaacaaactttatgatgaaagctctggacctcactaatgtatgaaaaacaacttctaaaagatgtctgattttgacagataaattataattgagttctaaaaactgaaattttgatatattattagagaaatgatattaatattttcagtgcgtgatgatgattataatagatcctttttctactctagagagccatctaaataaagtcctagtttcaaaagattataaagtttatttcacaatgaraaccattcaatataaaaacagacaaatagatgcatggaagagaatagagaactcagaaataaagctgaagacctacaaccatcttatctttgacaaactcagcaaaaataaatattggggaaaggactctttttttttagaaagtggtgctaggataactggctacccatgcagaataatggaactggactccttccttttactacatacaaaaattaac

SEQ ID NO: 165753 - DNA, 542 bp, Homo sapiens
gcatgctccagtatgataggaaaatgtgaaatggaaaaggcaaaagacattttgttctttaaaactaatgttggaaaacaaactttatgatgaaagctctggacctcactaatgtatgaaaaacaacttctaaaagatgtctgattttgacagataaattataattgagttctaaaaactgaaattttgatatattattagagaaatgatattaatattttcagtgcgtgatgatgattataatagatcctttttctactctagagagccatctaaataaagtcctagtttcaaaagattataaagtttatttcacaatgagaaccattcaatataaaaacagacaaatagatgcatggaagagaatagagaactcagaaataaagctgaagacctacaaccatcttatctttgacaaactcagcaaaaataaatattggggaaaggactctttttttttagaaagtggtgctaggataactggctacccatgcagaataatggaastggactccttccttttactacatacaaaaattaac

SEQ ID NO: 165754 - DNA, 510 bp, Homo sapiens
ctctgggtattgtgtacttgtgttttttattagctaaacaccagtactcttatttcacggtcactgctaagataataaaagaaaataatctaatgcaatcttacaaccccgactcaagtatrgcctggctgcattcatccaattatgtattagtccatccattaatccatcgatttatacatactaaggaagatgaattgaatgtgtgtcatcttccaggtcctaaactaggtattcttaatgatacagacaaatgacagagcccagcctcattgatttatcatactctgccttacactaaatattcaggtccaaactagacctaggccccctagtttggggggcatatcgatcaactctggccctatactatgccactaagtagccaattactctatggctaaatttaacactaatgcagttctacagttggatgcactcactttagtgagtacttttaaaagcacaaaataacatttaaaattttgaatatatgttatagtagtgagt

SEQ ID NO: 165755 - DNA, 510 bp, Homo sapiens
ctctgggtattgtgtacttgtgttttttattagctaaacaccagtactcttatttcacggtcactgctaagataataaaagaaaataatctaatgcaatcttacaaccccgactcaagtatagcctggctgcattcatccaattatgtattagtccatccattaatccatcgatttatacatactaaggaagatgaattgartgtgtgtcatcttccaggtcctaaactaggtattcttaatgatacagacaaatgacagagcccagcctcattgatttatcatactctgccttacactaaatattcaggtccaaactagacctaggccccctagtttggggggcatatcgatcaactctggccctatactatgccactaagtagccaattactctatggctaaatttaacactaatgcagttctacagttggatgcactcactttagtgagtacttttaaaagcacaaaataacatttaaaattttgaatatatgttatagtagtgagt

SEQ ID NO: 165756 - DNA, 464 bp, Homo sapiens
  misc_feature (1)...(464): n = A,T,C or G
gcccagctaatttttcgtatgttttagtagagatggggtttcatcgtgttaggcagaatggtctccatctcctgacctcgttatctgcccgcctcggcctcccaaagtgctggaattacaggcrtgagccactgtgcccggccaaatgaatcttatttctatgtaataggaaggaacattctgaaagtaagatcaataaaacaattacctttacaatagtatcaaaaagagtaaaacacttaagaattagcttaacaaaagaagtgtgaaacatatgctctgcaagcaagaaaatatcattgaaaaaaagttaaagacctgaattaatggaagacatccaatgctcatggaccaggagacttattattgttaagatgacaatagtactgtacaaatgaatctacagattcaatgcaatacctaacaaaatcctaggtttttctttttttttgggtttnnnnnnn

SEQ ID NO: 165757 - DNA, 464 bp, Homo sapiens
  misc_feature (1)...(464): n = A,T,C or G
gcccagctaatttttcgtatgttttagtagagatggggtttcatcgtgttaggcagaatggtctccatctcctgacctcgttatctgcccgcctcggcctcccaaagtgctggaattacaggcgtgagccactgtgcccggccaaatgaatyttatttctatgtaataggaaggaacattctgaaagtaagatcaataaaacaattacctttacaatagtatcaaaaagagtaaaacacttaagaattagcttaacaaaagaagtgtgaaacatatgctctgcaagcaagaaaatatcattgaaaaaaagttaaagacctgaattaatggaagacatccaatgctcatggaccaggagacttattattgttaagatgacaatagtactgtacaaatgaatctacagattcaatgcaatacctaacaaaatcctaggtttttctttttttttgggtttnnnnnnn

SEQ ID NO: 165758 - DNA, 464 bp, Homo sapiens
  misc_feature (1)...(464): n = A,T,C or G
gcccagctaatttttcgtatgttttagtagagatggggtttcatcgtgttaggcagaatggtctccatctcctgacctcgttatctgcccgcctcggcctcccaaagtgctggaattacaggcgtgagccactgtgcccggccaaatgaatcttatttctatgtaataggaaggaacattctgaaagtaaratcaataaaacaattacctttacaatagtatcaaaaagagtaaaacacttaagaattagcttaacaaaagaagtgtgaaacatatgctctgcaagcaagaaaatatcattgaaaaaaagttaaagacctgaattaatggaagacatccaatgctcatggaccaggagacttattattgttaagatgacaatagtactgtacaaatgaatctacagattcaatgcaatacctaacaaaatcctaggtttttctttttttttgggtttnnnnnnn

SEQ ID NO: 165759 - DNA, 491 bp, Homo sapiens
tgctgacattaggttctcacaaaccctgtgacttttccttctctgggaaataacttttactgctaaataacatgcatcctgaggcttttcaccaatgtgacttttaaaataaaaactttatttagttttctytgtgatttcaatatccatttaaaataattagctctttctagtgtcaaaaaacagtgatttatgatgaagaattttttcaattttattggaatattcctaaattttttagttttgttgtcatagatgacacatgaagaagtaggaaacttgaatgactagcacagcaaaagcccatgaagacgaagccttcattgtgacagcaagttttctttgtcgtgtctcttgttacacttgtgaaataattcacaagattataattatcagcaactttcctagaattatttatgggttcagacctataatcctcctttttctctcatacctcatcttcaagaccactacactggctgggtatggtg

SEQ ID NO: 165760 - DNA, 464 bp, Homo sapiens
  misc_feature (1)...(464): n = A,T,C or G
gcccagctaatttttcgtatgttttagtagagatggggtttcatcgtgttaggcagaatggtctccatctcctgacctcgttatctgcccgcctcggcctcccaaagtgctggaattacaggcgtgagccactgtgcccggccaaatgaatcttatttctatgtaataggaaggaacattctgaaagtaagatcaataaaacaattacctttacaatagtatcaaaaagagtraaacacttaagaattagcttaacaaaagaagtgtgaaacatatgctctgcaagcaagaaaatatcattgaaaaaaagttaaagacctgaattaatggaagacatccaatgctcatggaccaggagacttattattgttaagatgacaatagtactgtacaaatgaatctacagattcaatgcaatacctaacaaaatcctaggtttttctttttttttgggtttnnnnnnn

SEQ ID NO: 165761 - DNA, 563 bp, Homo sapiens
gtctccccagccatttggaactgtgagtcaattaaacctcttttccttataaattagacagtctcgggtatttctttagagcagtgtgaaaatggactaatacaacagcattttggcagcggagactgggccctcaccagacaccaaaccatctggccctgcaatcttagacttctcagcttccataactgtgarcaataaatttattctgtttgtaaattacccagccacagtctcagttattttgctatagcattatgaatagattaatacattgagcatagagaatatatatttcatctggggaatctctgaggctgaaaatgttatcatgaaagagattgtacctcagctggagctgaagcctgattcggtccctttactcaccgtttacagagaacaccaagaataaaatcatgaactgtggcatggagaaaaataatcatgcaaacattttcagaagttatcaagtagtaaattgtctcctgcagaagactggaggaaattggtaaaaggtaaatgtttaaaaagttatgtttgtttataaaagttaataaatgcca

SEQ ID NO: 165762 - DNA, 563 bp, Homo sapiens
gtctccccagccatttggaactgtgagtcaattaaacctcttttccttataaattagacagtctcgggtatttctttagagcagtgtgaaaatggactaatacaacagcattttggcagcggagactgggccctcaccagacaccaaaccatctggccctgcaatcttagacttctcagcttccataactgtgaacaataaatttattctgtttgtaaattacccagccacagtctcagttattttgctatagcattatgaatagattaatacattgagcatagagaatatatatttcatctggggaatctctgaggytgaaaatgttatcatgaaagagattgtacctcagctggagctgaagcctgattcggtccctttactcaccgtttacagagaacaccaagaataaaatcatgaactgtggcatggagaaaaataatcatgcaaacattttcagaagttatcaagtagtaaattgtctcctgcagaagactggaggaaattggtaaaaggtaaatgtttaaaaagttatgtttgtttataaaagttaataaatgcca

SEQ ID NO: 165763 - DNA, 614 bp, Homo sapiens
cttgcattagtacggaagctccattgtgtttctgagaatatattgtccaaagaaagtaatgttctgactaattctttgtaattaaacacattatattgcctcctgatttgcacattgaattacaaaattttgaaatacataaacatcattgatgccaaatactcaaaataaatcatttctgatatctgtgggattaatgaatattaattatctgacattcattactctttaaaatttattttctattattgctcatgtcttgtactttgatttttcatattattcccaggctgtacttggtatcttcttcctgtacagcttttatctactatraaatgtattctggtcaatcaaggtggaagtgttttgatttctttttttttcttttggttttgtctttttgtttttgttttcttttatactttaaaacaaaatatctcatcatcggtctttacagaaccatatgaggaaaatattggttctctgattttctgtggtcctagtaaaataattaaagaaatgaaaataatgaaaagcaaggtcaggcatggtggctcatgcatgtaatcccagcactttgggaggccgaggtcggcagatgacttgaggccagg

SEQ ID NO: 165764 - DNA, 614 bp, Homo sapiens
cttgcattagtacggaagctccattgtgtttctgagaatatattgtccaaagaaagtaatgttctgactaattctttgtaattaaacacattatattgcctcctgatttgcacattgaattacaaaattttgaaatacataaacatcattgatgccaaatactcaaaataaatcatttctgatatctgtgggattaatgaatattaattatctgacattcattactctttaaaatttattttctattattgctcatgtcttgtactttgatttttcatattattcccaggctgtacttggtatcttcttcctgtacagcttttatctactataaaatgtattctggtcaatcaaggtggaagtgttttgatttctttttttttcttttggttttgtctttttgtttttgttttcttttatactttaaaacaaaatatctcatcatcggtctttacagaaccatatgaggaaaatattggttctctgattttctgtggtcctagtaaaataattaaagaaatgaaaataatraaaagcaaggtcaggcatggtggctcatgcatgtaatcccagcactttgggaggccgaggtcggcagatgacttgaggccagg

SEQ ID NO: 165765 - DNA, 500 bp, Homo sapiens
actcatctttctggtaaaaacacatataggctgaaggtaaagggatggaaaaagatattccttgcaaacagaaactaaaagcagcaggagtagctatgtttacatcagataacacagacattaaatcaaaaacagtaaaaaaaaaaagacaaagaaggtcattatataatgagaaaggaaacaattcaacaagcagatataacaatcctaaatatatgtgcacccaacaccataacactcagattcatgaaacaaatattactagacctaaaaaaggggaagacagcaatgcagtcatagtaggggacttcaaaaccttcccacacacagcattacacaggtctctgagacagaaagtcaacaaagaaatattggacttaaattggactttacaccaaatggatctaayagacattttcaaaacggtctacctaacaactgatagacattattctcatcagcacatggaaaattattcatggtagaccatatgttagacc

SEQ ID NO: 165766 - DNA, 549 bp, Homo sapiens
tgcaaactccaagagaacagggatattctctatgttattcatccctgtactctcagttccttgaatagtagtagctggcaattgcttggtgctcattatatatctgtaaactaaagcattcaggtatatactagagatacaatcatgaatataacatgacatctgcacttgagaagcttgmagatgagaagaaaagttttcatttcatatactctggctacatatctatctttggggaccgtacatgagatagaggagagaatgtgatttataatgattctcctgatactccctagtgtttgtaataaaacctcaatataatttccaggactaaaaggctcctcttggccttcatgcagcagcattcatgcagctttccttgaggctcaggtaggcatgtagaagatattccagcttacgtgcctgatgatcatcttgtattgagttaagaggaatgtacaaagtctattttattacaggttaaaggttgtgctttctccaccattacagaatcattcacacagaatcattcgagacagaccaattgcc

SEQ ID NO: 165767 - DNA, 538 bp, Homo sapiens
gtaattagtttggattggttcactgtttagtctttctacataggatgagtagcttacacaccacagttgcagtgttataatattctgtgtttttctgtttacttactattaacagtgagttttgtactttcaggtgattacttattgctcattttaacatccttttctttctgagtgaagcactcccttcagcatttcctgtaggacgtatctggtattggtgaaattcctcagcttttgtttgtctgggaaagtatttgtttctcctttgtgtttgaagkataattttgccagatatattattattgggtaaaaggttttcttcattcagcactttaaatatgtcatgacactctctcctggcctgtaaggtttccactgaaaagtctgctgccaaacatattggagcgccattgtatattacttgtttcttttatctctctgcttctagtatccttgatatttagaagtctgattattccatgtcttgaggtagtcttctttgggttaaatctgcttggtgttctctaaccttctt

SEQ ID NO: 165768 - DNA, 555 bp, Homo sapiens
atctaaatgattgaatgaaagtctatagctttaacagaatgccaaattattaacctggtagaggcacaaacaattcctgtctggcttaaatataccttagttatgaatgtggattttgttttaaagattccaagaagtgacatacataaatttgtgtccaatggtaatacactttacacaatgtactaggagctgggaaataatttaaaaggctggtgaaacaggccaggtgaaaaataatgaattagaatagttagaagaaaactgagttcaagaggtgcataaacactgctcctcaatgtgtgtgtgtgcatgcgcacgggtgttgtagcagaaaataattttgtagctgtagactctttctctttcmctgcatttactgcatccacacaacagattctacagatccatttgaacgaaaatattcagagcagctggtaagctgaggtgtcctcaacctgcaagccctgtgcctcacacacaccagtgcctacctgatgtaatccatactctctcaatatatcctggctttctagtttgtttctttttagaatg

SEQ ID NO: 165769 - DNA, 667 bp, Homo sapiens
caaagcttgtctcctttctgagcactgtgcatttgtgtcagcagatattgtaatgggctatgtgggttggcctccaggataacagctgatgctttcaggtgggagacaggtttgacagtagtagtcgggtttatgcttgaccttttttaaccaggagaagtactaggacatttcatgtgttgggttgggccatggaacactcagtggtcctgatctcatattctgcctccatggtgaaggaggtgatgtcagatggggctgggctgggaaagtgtgcactcaggtcccccaagggcaggcacaagcactgaccccaatgagggacaggggcagtctaaaattggatccttagctttaarcactatttatgtgatgatgactggcaaatatgtatctagtttgacctttctcttgacctctatgctgctatgtcaacttccttcatactctacttctccacttagatgtagataggaatctctatcttgacatgtccaaaactgacttcttggttcccatccgcaaatttccgatcctccttctgcccctattttctccaatgcagtaaattttactataattgattgagctgctcagggagaatcaaagtagtcactctaaattcctctctcttcctcagcactcatttccagtgaaattgcatatg

SEQ ID NO: 165770 - DNA, 462 bp, Homo sapiens
gacaaaaccagaatttcaacctcagcaggttcacactgcttacataattacaatttttattatgccaagaaaagggcaatttttggatttggattttttcggagcaggaggaatttagacatggtaaatgctagctagccatggtaacagataagccctaaataattccaagagttttaatgctgcagaagtttatttattggtcaataactctttaatgtggctgctcagcagcagacctctgtaaagtgattcagggatgaagacttcttccaatttgggtttccaccatcccctagggtttcawtgtccttgactggcagacaaaggtaaagattaagagaattttcccgaggtttctggtctcagaagtgacatgcatcatttcctctcgcaatccattgaccagaatctaggcacatggccgcaggtaactacagagacatatagaaatatattcta

SEQ ID NO: 165771 - DNA, 481 bp, Homo sapiens
cgctggttatcaaaaatgcccataaatactggccaggcgtggtagctcacgcctgtaatcccaacactttgggaggccaaggcgggcagatcacttgaggtcaggagttcaagaccaacctggctaacatggtgaaaccccgyctctactgaaaatacaaaaattagccaggcatggcagtgtatgtctataatcccagctactcaggaggctgaggcaggagaatcccttgagccctggaggcagaggttgcaatgagccgagatcgcaccactgcactccagcatgggcaatagagtgagactccatctcaaaaaaataataataataatgcccacaaataaatactgcctcatgtcccatgttgctgtggacaccctagaatccaactggcccaacatggtttggagggcactgccaacctcctaggcatcccccaacaagggtcctcagagacatccttcatctaagaccaagtcag

SEQ ID NO: 165772 - DNA, 487 bp, Homo sapiens
tcttcctgtgcctcagacagagtgtgtggccttttgtgatccgaccacatatgcctctccatcctgttgcrccatctctgcctcacacctggtgttcttgggacaccacatttcaagcctgtcccccacacacctgggcctctgctcaagccacccaactccttttcatccagaaaagtccaacttttaaggctcagtgtaaaagacacctcagggaagtttcatttccccagcacttgacgcaactagacacttgttatgttagatggacaatgtttttgtttttgtttgttgttgttgtttttgccagcatgatttcgttttcattcctacaaccctaggaaataagtttccacactttactgaagaaaacaactgaatctcaagagagagatttgcccaaggtcttctgctaataagtgtagcagagccagctgagctcctcctcaagttcaagactctattaggccccttgtgttgggaagaa

SEQ ID NO: 165773 - DNA, 503 bp, Homo sapiens
cctgtgcctcagacagagtgtgtggccttttgtgatccgaccacatatgcctctccatcctgttgcaccatctctgcctcacacctggtgttcttgggacaccacatttcaagcctgtcccccacacacctgggcctctgctcaagccacccaactccttttcatccagaaaagtccaacttttaaggctcagtgtaaaagacacctcagggaagtttcatttccccagcacttgacgcaactagacacttgttatgttagatggacaatgtttttgtttttgtttgttgttgttgtttttgccagcatgatttcgttttcattcctacaaccctaggaaataagtttccacactttactgaagaaaacaactgaatctcaagagagwgatttgcccaaggtcttctgctaataagtgtagcagagccagctgagctcctcctcaagttcaagactctattaggccccttgtgttgggaagaatcggcttcttactgaagttg

SEQ ID NO: 165774 - DNA, 466 bp, Homo sapiens
aattcaaggatatgtcattgacccaggaaagtcttctctgacccgccaggctgtaaggtgctctccagccttatgtacagctcttttgttcttatgactcyatgattctgtgtcaagttgtatcattatttgactcctgtccatcttttctactgtaagctgcatgacagcatgtctgagttcactcatcagtctgtcctcagtacctagcatagttgctgagtacatggtaaatgcccaacaaatgtttgtttggaagactgaaagacagacaaacggaaagaaggaagagaagaaagaaagagaggaaggcagaagaaagaatgataaataaataaataaataaataaaatttggagaagtcaaagaaaaacattgtgctgcatgtttgagggagaaacaaatggaatgggatgtgagtgaaacccagaagacacagggcatttgagtaaaggtgttcctacga

SEQ ID NO: 165775 - DNA, 406 bp, Homo sapiens
catatttggaagaaagatgcttcagctccagtcattatgtctgagttccaataatggggggaaggaccagaaggaggaaggcatagtgtttactttaagaaagcaaaactttatcaataatccccagaaggtttttgtttacarctactggtttcaaaaatggtatagaataatagtttttcatctgagcacaacgtcattctcaacaaaggggttgttgtttgttttgttttgttttagtaaggaaaaggaggagaatactgggtagaaaaatagaagtttctgccatatcactttttaatgttgagagctgaaactcccattgaaagaagagcctatgtcttcaactggaatatccagaatccaatcaaagtaggcaaggagtagtcaaaaaataccatgcatg

SEQ ID NO: 165776 - DNA, 418 bp, Homo sapiens
cttggctttttcctcatatttggaagaaagatgcttcagctccagtcattatgtctgagttccaataatggggggaaggaccagaaggaggaaggcatagtgtttactttaagaaagcaaaactttatcaataatccccagaaggtttttgtttacaactactggtttcaaaaatggtatakaataatagtttttcatctgagcacaacgtcattctcaacaaaggggttgttgtttgttttgttttgttttagtaaggaaaaggaggagaatactgggtagaaaaatagaagtttctgccatatcactttttaatgttgagagctgaaactcccattgaaagaagagcctatgtcttcaactggaatatccagaatccaatcaaagtaggcaaggagtagtcaaaaaataccatgca

SEQ ID NO: 165777 - DNA, 542 bp, Homo sapiens
gctggtcttgaactcctgggctcaaagaattctcctgcttcagcctcctgagtagctggaactaaaggtatgggccatgatgtccggctccaaaaacctttataataagaaaatattattattagctcaggtgcactgactcacacctagttatcctagtgctttgagaagctgaggtgggaggatcgcttgagcccaggagttcaaggttactgtgagctgtgatcatgtcattgcactccagtgtggagacgcagtgagaccctgtctaaaaaaaagaaaaaraaaagaggaaaaagaagagagaaaatgctatgaacattttctgtttctaaaattaaaattagtgcccaaacacatcccatgccaatcgcagctcaacactttaaccaatttctatcaacccaattagcatcttcctcatgtggccactggtccacaggaaacattaagggatgtactcaccatctctgcatcattttcagaagcactaggtttttctgatgctcctgtgccactatttataggagcaatcactagag

SEQ ID NO: 165778 - DNA, 535 bp, Homo sapiens
ctgcttcagcctcctgagtagctggaactaaaggtatgggccatgatgtccggctccaaaaacctttataataagaaaatattattattagctcaggtgcactgactcacacctagttatcctagtgctttgagaagctgaggtgggaggatcgcttgagcccaggagttcaaggttactgtgagctgtgatcatgtcattgcactccagtgtggagacgcagtgagaccctgtctaaaaaaaagaaaaagaaaagaggaaaaagaagagagaaaatgctatgaacattttctgtttctaaaattaaaattagtgcccaaacacatcccatgccartcgcagctcaacactttaaccaatttctatcaacccaattagcatcttcctcatgtggccactggtccacaggaaacattaagggatgtactcaccatctctgcatcattttcagaagcactaggtttttctgatgctcctgtgccactatttataggagcaatcactagagcaccttataaatcaggaaattagatct

SEQ ID NO: 165779 - DNA, 332 bp, Homo sapiens
atgagcatatctgtggccaacaacacccttttacagaaagaacaaggccaacattttattctccctattgcaaggctgttgactgtcccagacaccgaaggggagactgtgacatggtggccatgagcattcatctcacagatctccaactacaaggagaacaactgaccaaggactctggctgyctttgaaatatattatcatgtttgagcccaggtaaaccttcccaaagccacttccagccactgactaagcgcagcagggctactaaggtgagccctccaatgtctaattgtagctctaggactccgcaacagttttgccaaattttt

SEQ ID NO: 165780 - DNA, 410 bp, Homo sapiens
ctttccacagtccttcactcagtacagacaktcttcatgcaaagaaagaggcctgttcatagtgcacacagggggccaacttcatacgaatcacgtggtgtgaatggtatggactgaggcccctcaacaaccacatgttctgtagctctgtttctattgcgaaagaagggatcgctcaagaaaaggcaatagggagaatataaggaggaaaagccttttttatttttaaggaataactatttttgaaaaatagagcttgacagaaacattagttgaggagtaatccaaagactgcattgactgtcatgggaagcagggaggcccctggtcctgaaagtgctgagtcagaggattgaggctattttgcagggatttcatcacatgatatgcaggggatgctgaacttgata

SEQ ID NO: 165781 - DNA, 397 bp, Homo sapiens
ctttccacagtccttcactcagtacagacattcttcatgcaragaaagaggcctgttcatagtgcacacagggggccaacttcatacgaatcacgtggtgtgaatggtatggactgaggcccctcaacaaccacatgttctgtagctctgtttctattgcgaaagaagggatcgctcaagaaaaggcaatagggagaatataaggaggaaaagccttttttatttttaaggaataactatttttgaaaaatagagcttgacagaaacattagttgaggagtaatccaaagactgcattgactgtcatgggaagcagggaggcccctggtcctgaaagtgctgagtcagaggattgaggctattttgcagggatttcatcacatgatatgcaggggat

SEQ ID NO: 165782 - DNA, 403 bp, Homo sapiens
tttccacagtccttcactcagtacagacattcttcatgcaaagaaagaggcctgttcatagtgcacacagggggccaacttcataygaatcacgtggtgtgaatggtatggactgaggcccctcaacaaccacatgttctgtagctctgtttctattgcgaaagaagggatcgctcaagaaaaggcaatagggagaatataaggaggaaaagccttttttatttttaaggaataactatttttgaaaaatagagcttgacagaaacattagttgaggagtaatccaaagactgcattgactgtcatgggaagcagggaggcccctggtcctgaaagtgctgagtcagaggattgaggctattttgcagggatttcatcacatgatatgcaggggatgctgaac

SEQ ID NO: 165783 - DNA, 418 bp, Homo sapiens
ttctacctatcttttctttccacagtccttcactcagtacagacattcttcatgcaaagaaagaggcctgttcatagtgcacacagggggccaacttcatacgaatcacgtggtgtgaatggtatggactgaggcccctcaacaaccacatgttctgtagctctgtttctattgcgaaagaagggatcgctcaagaaaaggcaatagggagaatataaggaggaaaagccttttttatttttaaggaataactatttttgaaaaatagagcttgacagaaacattagttgaggagtaatccaaagactgcattgactgtcatgggaagcagggaggcccctgktcctgaaagtgctgagtcagaggattgaggctattttgcagggatttcatcacatgatatgcaggggatgctgaa

SEQ ID NO: 165784 - DNA, 397 bp, Homo sapiens
ctttccacagtccttcactcagtacagacattcttcatgcaaagaaagaggcctgttcatagtgcacacagggggccaacttcatacgaatcacgtggtgtgaatggtatggactgaggcccctcaacaaccacatgttctgtagctctgtttctattgcgaaagaagggatcgctcaagaaaaggcaatagggagaatataaggaggaaaagccttttttatttttaaggaataactatttttgaaaaatagagcttgacagaaacattagttgaggagtaatccaaagactgcattgactgtcatgggaagcagggaggcccctggtcctgaaagtgmtgagtcagaggattgaggctattttgcagggatttcatcacatgatatgcaggggat

SEQ ID NO: 165785 - DNA, 556 bp, Homo sapiens
tgctctttgatttgaaccaatttgagagtcaatagctagaagcaatatagctcaactgagaaaatgcttactttggaatttatgaggactcagaatctctatgtatcatgcaggggaacataaagaagaatgtctaggtggtaagaatagttaacattggcatacataacataatggggttgtagagtttctttttcagggagtttttgacataaggctggttattaatatgagatggttgaactatctctttcacccttagaaattgctgggtgaccttttagtcataygaacaagagcaaaacaaaaaagtagtgaaagggtttgtgagcaatatgtcaattttagcagttttactacaaaaagattattcattgacattgtcatataaccaccagaatttacatttattctttaatttcaacaaaataatattattgagcacacactattccaggctccgagctaattactgagtcactagataagaggaaatgtacctgtccttaaggagcttacagaatagcaagtgtcatataaatgatcgccataatga

SEQ ID NO: 165786 - DNA, 490 bp, Homo sapiens
agggtgtcctttccccgttttatgcttttgtttggttgtcaaagatcagttggctttaagtatttggctttatctctgggttttatattctgtttcattggtctatatgcctattttttatactagtaccatgctgtttttggtgatgatagccttatagtatgaagttgggtaatgtaatgcctccatatttgttctttttgcttagacttgctttggctatgggggctcattttggttccatatgaattttaggattgtttattctagttatgtgaagaatgatggtggtattttgatgggaattgcattgaatttgtagacttcttaggcagtatagtcattttcacaatattgattctactcatctatgagcatsggaagagtttccatttgtttgtgttgtgtatgatttctttcaacagtgttttatggttttccaagagggacattatataatgataaaaggatattttccagtggggaaaca

SEQ ID NO: 165787 - DNA, 490 bp, Homo sapiens
agggtgtcctttccccgttttatgcttttgtttggttgtcaaagatcagttggctttaagtatttggctttatctctgggttttatattctgtttcattggtctatatgcctattttttatactagtaccatgctgtttttggtgatgatagccttatagtatgaagttgggtaatgtaatgcctccatatttgttctttttgcttagacttgctttggctatgggggctcattttggttccatatgaattttaggattgtttattctagttatgtgaagaatgatggtggtattttgatgggaattgcattgaatttgtagacttcttaggcagtatagtcattttcacaatattgattctactcatctatgagcatgggaagwgtttccatttgtttgtgttgtgtatgatttctttcaacagtgttttatggttttccaagagggacattatataatgataaaaggatattttccagtggggaaaca

SEQ ID NO: 165788 - DNA, 564 bp, Homo sapiens
tattctttcaggtcctagtgcctgtcagttcttacttacctctggactttcttatgggctttttcctttatctggaatactctttcccctttatcttggataattcttcctcaaatattaagtccaaatgagaccacattttcttcattaactgccccttgcggtagatcttrccatgctagacaagggccactgctatgtacaccagcaatattctggacatgccttacaatagcatttaatagctttttcttgtatttttatcagttgctttcagtagcagctcaccataatgttgttagggcctcgcatcctacatttctggatgactattaaatatttactaaatgaataaataaatgaaattcactgaatctgtaagcaagaaataccaatgatggttcactttgtcccagcacaattcccatatgaagacaaatgatataaaacattaaaaaaattaagaaaaaattatcatgaaaaaatagggtaatagtaaataaatttggccttcagctaaacagagagagaaaattctatttaacacaaactgcatttaatagt

SEQ ID NO: 165789 - DNA, 572 bp, Homo sapiens
tcttctaaaatgcaaatgtcgttccgataccccccttaggaggacgaaaatctttgatgtcttttgctttcaggataaagatccaatttcttgctatgccttaaaaagcattgtccttagtcaactatgtagtcttatgcccaccctcccaatcacccttccaactcctttgacctccatgcactgcatgttcagcacaattttattctttcaggtcctagtgcctgtcagttcttacttacctctggactttcttatgggctttttcctttatctggaatactctttcccctttatcttggataattcttcctcaaatattaagtccaaatgagaccacattttcttcattaactgccccttgcggtagatcttgccatgctagacaagggccactgctatgtacaccagcaatattctggacatgccttacaatagcatttaatagctttttcttgtatttttatcagttgctttcagtagcagctcaccataatgttgttagggcctcgcatcctacatttctggrtgactattaaatatttactaaatgaataaataaatgaaattca

SEQ ID NO: 165790 - DNA, 279 bp, Homo sapiens
ggccttattttaaagacagcagagcctctttaagtttatttatggaagatagcatttaggagtgtgattctgctgacaaacacatctgccatctatgttaagagggcaacagctgagtttctgttgtgttagagtgattatacatatgtgaatctatttsattcacttcttttgagaacattcctattcagataacatctatctgaatgcctggacatgtagaaatggttagtaaatttttttaatgactcaataaatgtataattttttaaacaaact

SEQ ID NO: 165791 - DNA, 561 bp, Homo sapiens
ctgctcagtagcggatagagaacagagtgtaaaacatttacaattatatgtggacaatagcattcagccatatattggtattctgatttagatactcattagaaaatgtaccccaccttgtctgattacagttggatgatattgctatccttactctttcactgagctwcacttaatgactagactttatttgggatatcagagagtggatattacctgagtaagggcattacttatgaaggataatggaaataattatatgtgaattcagcacccaatccacagttgcttcctctgacaccagtcagtaatctcatgcagcttaatatggttctgtggttgaggttaggtgagtaattgtcgtatcaattaagtaaattaaactaatttttttagcttttattattcagatcacttatatttgcatactacaaagaatgcaatctttcaatctgggttaccctaagtttcactatccagtggaatgacagagaaaagagaaaacagtgtcatataggtggttttgatgagccaggcctggaagtgacccatagtaaattt

SEQ ID NO: 165792 - DNA, 561 bp, Homo sapiens
ctgctcagtagcggatagagaacagagtgtaaaacatttacaattatatgtggacaatagcattcagccatatattggtattctgatttagatactcattagaaaatgtaccccaccttgtctgattacagttggatgatattgctatccttactctttcactgagctacacttaatgactagactttatttgggatatcagagagtggatattacctgagtaagggcattacttwtgaaggataatggaaataattatatgtgaattcagcacccaatccacagttgcttcctctgacaccagtcagtaatctcatgcagcttaatatggttctgtggttgaggttaggtgagtaattgtcgtatcaattaagtaaattaaactaatttttttagcttttattattcagatcacttatatttgcatactacaaagaatgcaatctttcaatctgggttaccctaagtttcactatccagtggaatgacagagaaaagagaaaacagtgtcatataggtggttttgatgagccaggcctggaagtgacccatagtaaattt

SEQ ID NO: 165793 - DNA, 453 bp, Homo sapiens
gtttgttgccaaagtggttagaataaatagtggtaaaatgttgtaggtatgtttaatcagttatgttttgtttttaattctcacttttattttctccacctataaaccttcagtgacccccccctcctgacaaccacatcttgtatcagtcactgtaaacttctgctgatttcagctcacagggtgyctttcccaggtgtgtgcctataccccgcacctggaagaaaactccctccctgccatctttcctctgaatagttcttaggagttcatcaaggtcccattcagttctcacatctagtagaaatctttatagccattccctaacatactgataggtacaaatatatagttttgtacctaattttttatacactctcacacatgtttttcagtactccgagaggcagatgaattctttcattaatacattgattaatttttcagttgccc

SEQ ID NO: 165794 - DNA, 398 bp, Homo sapiens
tgtaaagattactgaaagggcaaaagtggtcagagctgcaagtgggagtagggtagggagaagcttagaaaaagatgtaatatactgggtttttcttagtttacagaaatttatgcttatcaatgtgtatacatttatatgcagatatataaacatatatgcttataatacagaataaaatgcataaaggtgagattttatatatatatgaatgaatgaataatttcaaatttataaaacatttgcaaaggtagaacagagggtttctgtatacccctcactgaattcccrtattactagcaccttacattgtcatatgtctgtcagaatcaagaaactgaaattgacactggtatattagtaataactaaactctcagcattatttggatttcacta

SEQ ID NO: 165795 - DNA, 411 bp, Homo sapiens
caaatgtaaattggagtcayattcagttgttcctggaccctctttgcagttttccctctgtcttaagtagacgatgtcggaggaaaaaaataggtaaccataatatgtggccttattatgtacaaaatgaataagccatcatttccagtactatcataaggagctacgtgagaaacattatagtcaaggagtatacacaagcatggaatttacactggcctctgtgtatatgctgaacgctagttactgattttaaatttcaaggtaacattttctaacaagggagactttccccagaggtattgcttctgtctcccaactcttcatatttgagtgctggtcaggagaagcctgggtgaggggatggagaaatagccactctggatgaaggctgcagagccaaccttcagg

SEQ ID NO: 165796 - DNA, 483 bp, Homo sapiens
tttccatctcattaaggaggcaagacactcgtggtttaaaagcgcaactaggcagacaaagagattcacgtgcagttgcatttggcttacgcagatcgtaagccattcatagagttgcctatgaatggggatacattatgagaaatgtggcattaggtgatttggttgttgtgtaaacatcatagagtgtcctttcacaaacctggatggtacagcctactacacacctaggctgtatggtgtagcctattgttcctaggctacaaacctgtacagcttgttactgtactgaatactgtaggcaattgtaacagtggtttttgcrtatctaaacatatctaaacatagaaaaggtactgtaaaaatacatgataataatcttatgcagactccatcatttatgcagtctgtcattgacgaaaatgtcattatgtagcatataactacattatgtaaatttagagaagagagaaatgtgagata

SEQ ID NO: 165797 - DNA, 527 bp, Homo sapiens
aacagtatgggcctgcttacctcatagtgtcctgttacctagcaaccaacatgtccaggcattacaaagatgggggctatatgaatatacacccttattttctgttaacaatagataggataaaatgaaacggggaaaacagctataaatcatcatcatcaacaacaaaataatttctaaaagttagctttagaatgaacacactatcaaaaaatgtaaagctgatctgyatgtgatttcaatggcctcctagtgcttggtggggagcatacttcctgtgttcctaagtcttttttaatatctaaaattttaaaaataataacaggaaaattatgatggtaattataataatgcattccttcatatcaccacttactaaatgttattatttatagtgaagttcctttgcttctattcccataaataacatttatataagagaaattgttataccctgtggaaaaataatatttcaaagctcgtagactaccaaccatttcaactgactttacttacactcctaggtc

SEQ ID NO: 165798 - DNA, 656 bp, Homo sapiens
cttataaaggacatagaagagacaagctcagttttctccaaaggagaaggagtgcacttagagggagctgtgttttggtgacctctgaaactcagtactgcagcgaatgagctcctgaccttgaggagtacttaacagaattatgtctcgaagaatcattgtgggaacccttcaaagaacccagcggtgagtgaaacttatattgataaaattatatcttctttcctttacaaaataataaattagagtgttaaaaatatctcattatcttaaatctacacaatgataccatctgtaattcatattcttactatagattttatgaattatgaggataytaattgttgttattttgcattttctatcattcttcaatatagttttgaaaaaatgaaaatatctagtgtttgctgcaacagatatgtatgcataatgaatatatggagttgatatttatacatgtatgtacacataggtgtgtgtaaatatatgtgtaatgagtgtattaatattatacaattgaattgagaagacattaatgaatgttcattcattcattcagcatttacacataactttaaattagtaaggtaatgatgagagatgaaaaatagtgaaactgaaaaaaatgagaaagctccccaaaacatcccagt

SEQ ID NO: 165799 - DNA, 616 bp, Homo sapiens
ctagtagaggaatataaatgacagattgacaaactgtaggaaacactgttactctctttctgaagttttcaagcaccatcctatgtgaaagttccctcctgtccaaacaagctcaaggcccatcttctccctatacaaggcaaacctgtaaggccttccttccaaagagtacattgctttggttttcttcctaaattcctattggaattagaactctcagaatccctgggagacagagcaaagatgacttaattcattgagcagcagagctccctataagcgaacatcaccttccccatctttcctactgccacacccatacgagagaggatctagaaagagcgatggcagcctgaacacagaaaacatccccacttggcagaccyctcctcagcaatccccccagcctcatgcttcacttgcaaagtgtgacataaccacgggacgagtgccttgcttgaaccaaagcaacgatttagccagtctggacctctctgtgctttttttaattcttcctgtgaatacctcagcttcaactgggcctccatacagtcagttggtgggcttattgtactgtggtgctttgcaatgcaaccctgcaaagaacaagatttgt

SEQ ID NO: 165800 - DNA, 543 bp, Homo sapiens
gtaatagtgtttaatcttccagaaagctttatatgttgttccacaataaaattgatatttgtttcagcaaagttttcctgacactcacaaacccacaaactgttcctcttaatgcagatattgtagaatctacaaagttcaaatccatttttgatccaaagaaagtagaggagtatttgagacatgagtgtacccagccctttttttaatcasaggcaatgcatgggtctggctggttacactttgccaagaagacttgtcttatgaaacccaaggtatattttgttatgccattttatgtccttttcttttaacattgtggaaagtggtatgttgaatcaagtgtaagctgagttttccagacaactgaaatagctacatcatgaatgttattttgttattaaagggtttttactcagtgctttgtgccaatggatgtccttttccttggagacacataactacaaaattacctcagcttggcctggttttctctcctgccctcttggggaaacatgggcctggcctgggaaaaggcaggtc

SEQ ID NO: 165801 - DNA, 543 bp, Homo sapiens
gtaatagtgtttaatcttccagaaagctttatatgttgttccacaataaaattgatatttgtttcagcaaagttttcctgacactcacaaacccacaaactgttcctcttaatgcagatattgtagaatctacaaagttcaaatccatttttgatccaaagaaagtagaggagtatttgagacatgagtgtacccagccctttttttaatcagaggcaatgcatgggtctggctggttacactttgccaagaagacttgtcttatgaaacccaaggtatattttgttatgccattttatgtccttttcttttaacattgtggaaagtggtatgttgaatcaagtgtaagctgagttttccagacaactgaartagctacatcatgaatgttattttgttattaaagggtttttactcagtgctttgtgccaatggatgtccttttccttggagacacataactacaaaattacctcagcttggcctggttttctctcctgccctcttggggaaacatgggcctggcctgggaaaaggcaggtc

SEQ ID NO: 165802 - DNA, 439 bp, Homo sapiens
ttgcaccattcttcctcgaatgtcgtgtccttatttattcgcagacctttggacagaaaggagcatcttaagagaacagttgcataaatagtctcagcttatgccaatgctaaactagataatcaccawaacctcttccacctctgctatttcctgtttctaatgatccatcactcttactcagagaaggaaacagtagctaaacctggcaaatttcaatgctaagaatctctggtctcagtttagccacatcaggatagccaaactaagagaaatgtaaaagtctaggtggggcctttgaatgagagattaggctcattgaaggaaaatacttccacactttgggagctcattggcatgagcccatttttttagcctctggttaagggcatttgatggtgtgaagtatcctttagtcaaaatgctttaagttattggt

SEQ ID NO: 165803 - DNA, 504 bp, Homo sapiens
gggaaaagaagagcaaaataaacccaaagcaagtagaagggaggaaataaagagcagaagtcaatgaaattgaaaacagaaaagcaataaagaaaatcaatgaaacaaacagctacttctttgaaaacagatcaataaaattgacaaagctttaactaacaaagaaaaagagagacaaggtacaaattcccaatatcaggaatgaaatagtggatatcccttcagaccctgcagaaatcaaaagtataataagaaaatcatatgaataattctacaccataaattttaaagcttagatgaaatttaccaatgcctcaaaaagcacaaattagcatccagtatgaaatagattgaatagtgctttaattattaagaagattgaatttacaagtttaaaattctcaaaaaagaaatctgcaggtctaggtgatttcatcagagaattytactaattgttcaaagaattaacatcaattccttttttaatttttttatttttttaat

SEQ ID NO: 165804 - DNA, 335 bp, Homo sapiens
taacaaagaaaaagagagacaaggtacaaattcccaatatcaggaatgaaatagtggatatcccttcagaccctgcagaaatcaaaagtataataagaaaatcatatgaataattctacaccataaattttaaagcttagatgaaatttaccaatgcctcaaaaagcacaaattagcatccagtatgaaatagattgaatagtgctttaattattaagaagattgaatttacaagtttaaaattctcaaaaaagaaatctgcaggtctaggtgatttcatcagagaattctaytaattgttcaaagaattaacatcaattccttttttaattttt

SEQ ID NO: 165805 - DNA, 573 bp, Homo sapiens
taagagtccctttgaactttaagctacaactgccactcaattactttgggatcctcataccaagaaaccagcaataaactaaakaaatcaaccaaccaactagcaagggtaatcgaccctgcccatcaggaggggcttagcttctgctacacaatagaagaagggaagaatatgcttggcggtcaggtggtccactaagaggtctcttgatgttcccatgctcaccacttaatggtaatacacaagaatagcaaccatagactgagaagggcacagtaacttggggctcaggaccctctgggatgagggtttcattacttccagcaggtaagttacccagtgcagcacagggaatagccagagtggaggggaatgagtgtgtttaaaaaaaaaggaggggagcagtaataagccttgagaccaaactgcagcagcaagcgctgtagtatttcttactaaactttcacttgtaagctctcaggaaacgagaccaaccaaaattcaatagaaggcattcccaaacatagtgcagttattataagaagtaagtgggtttgagcgacatgagggctg

SEQ ID NO: 165806 - DNA, 605 bp, Homo sapiens
tggagagcaagttccacttgcccagtccccaggccactcttttttacagtgacctccaaagcctctggacccagctgccagctccactcctggctctgaggtcccccctggcaggagcacacatgccacagctttscaccaaatccccaaagtgcccagcacattccaggctcccactgtctccaagggaccctagggccctggtagaggagggtaatggcaggaagccataatatattaaaacagcagattaaaacaaacaagagcattttggatcatattacacatcactttcctcacatctgacagcagaaaaaaatcaaaggcggtaaaagacaatcgtagaccataatggtccaataacttggtgataaaagtgcttgtgggagcagcgtgggcgtcggcggctccgggtgcaggaatcaaagtcctcttccagatccacagtggtgtattcagaggcattactgcttaagtgctcgtttaagacttcctccaaaatgcagcgcacttgctggagaatcataattaggccccaactgtgggccatattcacacattgtgcatcattcttaaagatgacagaaaaaaaattacccagggct

SEQ ID NO: 165807 - DNA, 605 bp, Homo sapiens
tggagagcaagttccacttgcccagtccccaggccactcttttttacagtgacctccaaagcctctggacccagctgccagctccactcctggctctgaggtcccccctggcaggagcacacatgccacagctttgcaccaaatccccaaagtgcccagcacattccaggctcccactgtctccaagggaccctagggccctggtagaggagggtaatggcaggaagccataatatattaaaacagcagattaaaacaaacaagagcattttggatcrtattacacatcactttcctcacatctgacagcagaaaaaaatcaaaggcggtaaaagacaatcgtagaccataatggtccaataacttggtgataaaagtgcttgtgggagcagcgtgggcgtcggcggctccgggtgcaggaatcaaagtcctcttccagatccacagtggtgtattcagaggcattactgcttaagtgctcgtttaagacttcctccaaaatgcagcgcacttgctggagaatcataattaggccccaactgtgggccatattcacacattgtgcatcattcttaaagatgacagaaaaaaaattacccagggct

SEQ ID NO: 165808 - DNA, 605 bp, Homo sapiens
tggagagcaagttccacttgcccagtccccaggccactcttttttacagtgacctccaaagcctctggacccagctgccagctccactcctggctctgaggtcccccctggcaggagcacacatgccacagctttgcaccaaatccccaaagtgcccagcacattccaggctcccactgtctccaagggaccctagggccctggtagaggagggtaatggcaggaagccataatatattaaaacagcagattaaaacaaacaagagcattttggatcatattacacatcactttcctcacatctgacarcagaaaaaaatcaaaggcggtaaaagacaatcgtagaccataatggtccaataacttggtgataaaagtgcttgtgggagcagcgtgggcgtcggcggctccgggtgcaggaatcaaagtcctcttccagatccacagtggtgtattcagaggcattactgcttaagtgctcgtttaagacttcctccaaaatgcagcgcacttgctggagaatcataattaggccccaactgtgggccatattcacacattgtgcatcattcttaaagatgacagaaaaaaaattacccagggct

SEQ ID NO: 165809 - DNA, 605 bp, Homo sapiens
tggagagcaagttccacttgcccagtccccaggccactcttttttacagtgacctccaaagcctctggacccagctgccagctccactcctggctctgaggtcccccctggcaggagcacacatgccacagctttgcaccaaatccccaaagtgcccagcacattccaggctcccactgtctccaagggaccctagggccctggtagaggagggtaatggcaggaagccataatatattaaaacagcagattaaaacaaacaagagcattttggatcatattacacatcactttcctcacatctgacagcagaaaaaaatcaaaggcggtaaaagacaatcgtagaccataatggtccaataacttggtgataaaagtgcttgtgggagcagcgtgggcgtcggcggctccgggtgcaggaatcaaagycctcttccagatccacagtggtgtattcagaggcattactgcttaagtgctcgtttaagacttcctccaaaatgcagcgcacttgctggagaatcataattaggccccaactgtgggccatattcacacattgtgcatcattcttaaagatgacagaaaaaaaattacccagggct

SEQ ID NO: 165810 - DNA, 577 bp, Homo sapiens
ggttaggatgtgttaggatctcttaggggggcaccattaaactcactgcatgcccccttcttcccttcctctgagactgttcccaytcaggttctgtggactcatcatctcctgtgtgtgaggcttcacgctgtggcatagagatggggtctcagggctgaggtgggtgcttacaagtacaggcccggaatcagacaaagcctgagcccaatcccggctcctcatgtatcagctgtgagatttaagcaagtaactgaacctcccaggactctagcacctcatctctgacatgcaatagtaacatctacccacagttttgttgtagagatgggtaagaagccagtgccacggcccagtgtgcactggggtagctgttagtgtgcgccggcgctggaggagcttgagctttggtcctgactgtgcctaattagccctgtgacctctggtgagtgtcccctagcccctgtccagagcacgtgtggaatgtgtaaagaggtcgagattagccaggatgatttcctagtctttccagccacaatagtcttgggccagaaagactctgagaccctggttaaac

SEQ ID NO: 165811 - DNA, 455 bp, Homo sapiens
cccagtcagaagccccttggggcgatgcctgtcttcagtcagctcatcttacctttctccatctctcggaggatattgatggcctggaggtggtgggcaaagggtggcccttctcggctgttactgtggaagactacacagtgtttgaaagaagtcagggaagctcctctgaagacacarcatacttgtgagtgcagcctgaaccctggggagagaggctgaagagttctccagcacctaccagtattaaagagcgggcttccctccctgagatcagggtgcctctagcctagcttctgtccagtggttgccacccactccttgaacccattccagcacctgtgctggctttcctattgccatctgctcctttccaataaccaactcctaatggggatttcccagacattcccttgctggtcaactgagggctctctagaccctcccactgctat

SEQ ID NO: 165812 - DNA, 364 bp, Homo sapiens
atgttacagatattatacatataatatatatagtccactaaattgatgtttcttkgaactagtatctgtggaagagataaatctgtgttcttcactgctaaacaggagaaaacatccactctctctaaatcattggtctcatcccttctcttcctttcaacgattcaccttcacttgagaaaacaacgccctaggtaattttccttgtatgcaaaaatgtctcttagatagaataacgtctttcttctccccaaagtatacgctttgaaataatgaaaccttgagttgagaaggttctttcttgtgagtgtgacaagaagcagcacaatcttcccaagcaggcgaatgggaagatgagatccct

SEQ ID NO: 165813 - DNA, 518 bp, Homo sapiens
ccacactctcccctacatgtcctcactgacaattaatccccccatctgcattgtgtgattcagcaatgttcagaagaaaaaaacacaataaataaacaacagtgaaacaagataaaaataaaaaatatagtgtaagaattatttacacagcatttacactgcattaggcattataggtaatctagagatgacttaaagtgtatgggagggtgtgcataggtgatgctcaaatgccrtgtgccattttataccagggacttgagcatctttgaattttggtatttgatggaggtcctggaaccaacccctgtgaataccaagggataactgtatattacaatgaatctcattttacacacctattcctcactttagtttcttctgatttccctccactttctccctgatacctccacataaccctgttggctccctgtggtacaatattgtactgacttttgggggagaggacaataaacaatggaggaatttttgtatcatcatggccacagaagtga

SEQ ID NO: 165814 - DNA, 400 bp, Homo sapiens
aaaaatatagtgtaagaattatttacacagcatttacactgcattaggcattataggtaatctagagatgacttaaagtgtatgggagggtgtgcataggtgatgctcaaatgccatstgccattttataccagggacttgagcatctttgaattttggtatttgatggaggtcctggaaccaacccctgtgaataccaagggataactgtatattacaatgaatctcattttacacacctattcctcactttagtttcttctgatttccctccactttctccctgatacctccacataaccctgttggctccctgtggtacaatattgtactgacttttgggggagaggacaataaacaatggaggaatttttgtatcatcatggccacagaagtgaag

SEQ ID NO: 165815 - DNA, 331 bp, Homo sapiens
tatatgagatcatgtgtgagatacaatagagatatcatgtgtgagatatatgatacagatatgtgtgatatgagatatcatgtgtgatatatatgrtagagatatatgtgacatgacatacatatcacacatatctgaataggatatatatgagatatatatatataatattctgccacatgtatatggtgagccatggaagtctgcgtagctaggcatatatgtgatatatatgaaaaaggaagaaaattctgacacgttacaatatgtgtcggctttgaggaccttatgctaaattaaatcagtcacaaaacaaaaaatactgtatgat

SEQ ID NO: 165816 - DNA, 498 bp, Homo sapiens
tgagcttggcacatcacttaacatttctcggcctctgtttcctcatctgtacaaatgagagtctgaattccgtagttcaatggagctgtgagaactaaacaggaaagtgcaatatggaggagtgagccctcaataaaaggagcttggtgttcatgagggattcactacatcccgggtgatgtcaccacggaggtgagactggggtctgatgagccatgcctgcacagcattgctgccctctgagggacaggacttcaagaaactgtcaggctagcgctgaatcttcaacacacrtaatcaacttctgcacaaaccatatctgccagtgggtgtgcacgtaaggtggagaggatatattgatggagtatgacatgaacagcaatatcccagactctgctgcctttatatgcttttgtacatcaaggtccaggcagagggtgtatagagcttttgtacaacaaccttcccacccgccaagtacttctgggagttcccaaa

SEQ ID NO: 165817 - DNA, 534 bp, Homo sapiens
ctttatgtaactttaagaaataaaaatctctgccgatgaaattytgacactatgctttcttaatgattaatgctcagaattgttattttatgcttctcaaaggagttcttgtagccttctttagacataggactgaatcgtttattgctcttgtgcctacataaaaatgaaaatacatgctgaactcattgattacggtatttccaaaatctcctcatgttgagagtctggcacttctgaatcgctttcagctctgaggcatcgatgtctgtgttatttcacatcctccgagctttctttctctgagccctcaagagtgttgatgactcggtatcttcagttcccagcaactctattgccttctagattttttttttccccaaggcctggacaggcattctcaaatttttgatgttggcactttcttggcctaaccagaaggtgtcagtgggagtttttcagaaggcaattgagactgataagcctccctcagatggctcttctgttgtccagccatgccatcaccaacaacag

SEQ ID NO: 165818 - DNA, 649 bp, Homo sapiens
aagtcatacactgagatcatgcagagttggatctttataatccaataaaataycccctttgcctactaactgtttcttttctgtgtgcacagagcactttgtttactttgctagttcattttatcgtactagaatacatggcatttttgcctgtacttggctgtgatttccttgaggaaagagactgcttttttgcttatttggttttaccaaggaaaaatccatttagctgcaaatgatggaaaatgtggttacagtggtttaaaaaagtagatgttaattttcatcacttaataagaggtctggaggtaggctatctggtgaagttactcgaacatagccttagagacctgggttctttctttttacctcctttagcacattgacctttgtccttaggctgtgacctcaaggtcacaaaatggttgctgtatctccaagcgtcgtaaccagcttccaggtcaaagggacctttctttttcttttctgtttttttcctttattggtcagaaaagcaagaaagtgttcatttatatcccattagccagaactagggatcagggccattcccagaccaattgctagccaaggggaatgagacaactagttgtgacacacagcacaaggttcctcagccatgactcagagc

SEQ ID NO: 165819 - DNA, 195 bp, Homo sapiens
aacttttcttcctgccccattcctagaaytggcaggagaacatttaaatacaatagtgcataattatactaaacaataaaaagaggtgttctcagtagaccagaaattagtagaaaatacagaaagagaaaccgcaagggtgactaaatggtgagtagagcagcctccctctgacttcatccccttccccagcaa

SEQ ID NO: 165820 - DNA, 195 bp, Homo sapiens
aacttttcttcctgccccattcctagaattggcaggagaacatttaaatacaatagtgcataattatactaaacaataaaaagaggtgytctcagtagaccagaaattagtagaaaatacagaaagagaaaccgcaagggtgactaaatggtgagtagagcagcctccctctgacttcatccccttccccagcaa

SEQ ID NO: 165821 - DNA, 637 bp, Homo sapiens
ttttgtctgtcagctcttgtgtcatttcattgtgattcttagcttccttagattgggttttgttgttctcctgaatctcaatgatcttcattcatatccatattctgaattatatttgtgacattttagccatctaagctcagtcaaggactcttgctggagagctagtgcagttgtttggaggaaggaagacacttgactttttgaattgtcagtttttgcactgtttctttcccatctttgtggcttgatgttcaatctttgaggttgctgtcttattttttcttacygtttgatgacgttgggggtttgcttgtggtttaagggggctttagttgactggcttcatttctggaaaactttagggggccatggctcagctcataactcctggactgtgtgctctaactctgggagactggtatcaggtcttgcctttgttatctggcccctcaaggttaggacctgctgtgctgaagaaactgagttgctccccaaccacaggtcacaacattctgatgggcggtgtcagccaaagaacttcatggttctgctacataggcggcagcaggatctgtccttcttcacatctgtctgcagcagcagcatcaccagcacagcaggggtaccccttgtt

SEQ ID NO: 165822 - DNA, 553 bp, Homo sapiens
tttttgtgtgtatggcagactttattaaatgtttagagtaactgggttgtattatcctaaaatatttaagataatggaaaccagtcatttttgtttatcccatctacttgctgcctggccaccagaagttttcccttctccgtgctcctcgtcagactctggttcccatcatgttgctgatctgttctttcacaagcaccctcttcactttctactttctccattactaaacacttgtaatttcctatgcagagyacatttttttctctgtgcatatttaattgtatccttttaactcatgtacttggagtcgcaccttctacatgtaaagggtaacccaccaatatattttcttcttacacgcaaatctgacgctagttatccatatatttcccagacggctagagttcatgcaggatgtatttaaggatgtctgaaatgttaaactcagtctttcatctatactttacctgcactcatgcaacagaatgtggccagagggaaacaaaaatcagatactaactagtctccctttggattcatgaggatgaat

SEQ ID NO: 165823 - DNA, 553 bp, Homo sapiens
tttttgtgtgtatggcagactttattaaatgtttagagtaactgggttgtattatcctaaaatatttaagataatggaaaccagtcatttttgtttatcccatctacttgctgcctggccaccagaagttttcccttctccgtgctcctcgtcagactctggttcccatcatgttgctgatctgttctttcacaagcaccctcttcactttctactttctccattactaaacacttgtaatttcctatgcagagtacatttttttctctgtgcatatttaattgtatccttttaactcatgtacttggagtcgcaccttctacatgtaaagggtaacccaccaatatattttcttcttacacgcaaatctgacgctagttatccatatatttcccagacggctagagttcatgcaggatgtatttaaggatgtctgaaatgttaaactcagtctttcatctatactttacctgcacwcatgcaacagaatgtggccagagggaaacaaaaatcagatactaactagtctccctttggattcatgaggatgaat

SEQ ID NO: 165824 - DNA, 502 bp, Homo sapiens
tagaggaaagagtatcattctacctaaacagcaccttaagataggcagagcttcgatacaygggctttttgacatcttggtaggcagaacaacttttttcctgcatttactgaatttctcagttaagattatagactgaacttttaaattctaaaggcagctaagtgcattgaggatcactgaaaactgatgtgtttgtgtcaggtacagggaaggaatgtaggttcaggagctccaaattctgttctttatgtagctttgatcatggcacagggctaactgggaaacatatcctatctaaattctaggattcatttaggttgtccataagctcctgggtcatcatcccctctaccaagttgtcttaggttagcgctctgatttgttggttacataagccttgactatggctttaaattggagacttatactatgatattgaccacagaagtgtgttaatttctgttaagtaacaattagttaatatcttgaaaggaatgtg

SEQ ID NO: 165825 - DNA, 286 bp, Homo sapiens
cctgcctcagaaactatactatttagcagaagatagaccaggtgcctatctacccaatcccaactccacacagttctcaaactggggatgcctctgtgttaagattaagcagaagaagaaagtgactgatcatgactaagcgtattttgcactttgttaggtcttaacatttagaaaaagagatgtmattattggacttccttttttactcatgttcttcataatagatgattttattcaaatttacattttttaggattattcctagacaacatggctagatata

SEQ ID NO: 165826 - DNA, 340 bp, Homo sapiens
gcggttagttatgctagtgtttgaactcagatagtctgacatcaaagccttgtgcttagccacacaactgcactgcatatcccgcaggaacaacaaaaaagtaacgtaaaatgaatcaaagcaatrgtgcttttaacttttcctgttggttattgaaattttttgttgctgtttgataagtgttacctgactactatttataaagaaatcttcattgttatgtagatgatggctgcttaatttagaatctaacatctagtcatcaaaaatgtagcatgatggtattttcactagttagcctcttggtaagtgttgagaggagagagagtagctacctaag

SEQ ID NO: 165827 - DNA, 604 bp, Homo sapiens
taacaaagtatgggggaagaagtgtaatatgatagcaaactcacatgaatrgtgcatcagggaatctgggctctgcttccaatggggttatagattctatatattagttttataacttttaagatttcagaagtgcataaacagttacaggaaaaaatggatttctattgaaaagttgtatttgtatactaatttataattaaagatatattttattttattataattaataatcataattattttgctgggacaaccatgaggcaaaaggaaagctgcctttagaaaggcattttctctgctcttttctttgcacagggactactttacacctgtctgaagagttctgatatctgtttttaccttcatacatttctcatgctagcacaccttccctgtattaatgaggcttttcagttaagtttctttcctgctaatgacgtctaaaaactgaaggccaagtaatgagcagatcaatagctttcattaaagtctctttgtagagcctcttttaattttatctcctatgatgtgacctccaatttgcataagagagactacttacacttacagacagaattgattgacttaacctaacaaaggt

SEQ ID NO: 165828 - DNA, 604 bp, Homo sapiens
taacaaagtatgggggaagaagtgtaatatgatagcaaactcacatgaatagtgcatcagggaatctgggctctgcttccaatggggttatagattctatatattagttttataacttttaagatttcagaagtgcataaacagttacaggaaaaaatggatttctattgaaaagttgtatttgtatactaatttataattaaagatatattttattttattataattaataatcataattattttgctgggacaaccatgaggcaaaaggaaagctgcctttagaaaggcattttctctgctcttttctttgcacagggactactttacacctgtctgaagagttctgatatctgtttttaccttcatacatttctcatgctagcacaccttccctgtattaatgaggcttttcagttaagtttctttcctgctaatgacgtctaaaaactgaaggccaagtaatgagcagatcaatagctytcattaaagtctctttgtagagcctcttttaattttatctcctatgatgtgacctccaatttgcataagagagactacttacacttacagacagaattgattgacttaacctaacaaaggt

SEQ ID NO: 165829 - DNA, 425 bp, Homo sapiens
tggcttcccaaagtgctaagattataggcatgagacattgtacctggcctgtgtagtgttttacaggcagtggtcatgttttatttcttaaaatcggtagtgggtaggtgtttgttttatgattattcayaataaatatattatttgtgtgtattaaatatttaacatgtataataaggtatatttttaacgggacaatagcaatatcaacaacaactcaattatttgttaattgtacatcatgttccagccactgtgatagataatttcacagaaactctgttagatagtgattgttacttcaatgctatagaaaatctgataatagtgaattacaagcaagtgctatggagtcaaagggcttgggttgaagtctatgatcttctacctactagctgtgtattctggggtaattcatatgatgt

SEQ ID NO: 165830 - DNA, 622 bp, Homo sapiens
gcccatgttgtttaagcatcaactgtatataatttcacacagtggttaattatatattttaaaaataactctgtaaagaaataaaatgtgaagtggtatagggaaatatgtgaaaccaggaattctacttaatatatggtgattaaggaatccctttgtgtagctaacatttgagctgagccttgataggatgattactcacattctacaaacctcacacttcttcgctaaaaaatgaaaataatataatatatataccaygtaaggttgttaaaggtattaagatcttgcattggccaggcgcggtggctcacgcctgtaatcccagcactttgggaggcagaggcaggcggatcacgaagtcaggagattgagaccatcctggctaacacggtgaaaccctgtctctactaaaaatacaaaaaaaaaaaaaaaaaattagccaagtgtggtggcgggtgcctgtagtcccagctactcagaaggctgaagcaggagaatggcgtgaactcgggaggcagagcttgcagtgagcagagatcatgccactgcactccagcctgggcaacagagcgagactctgtctcaaaaaaaaaaagatcttgcattggaggttcttacc

SEQ ID NO: 165831 - DNA, 650 bp, Homo sapiens
ttgcaaaggctataaaatcatagcaaaagtatcaaaagaatcagcttccctccagatcacagcatgatgagatttgaaaacacgatatttcaaaggagccatgttctctggtttgatgtaacttatatgaagtgctagcagccccatatttttaaccacaccaataaaagtatagcgttattaattattataataggctaataatttggaagaacggaaaaataatgtctactatttttccatttctaggcctttcttgttaagaggatttttcctgttaaatacagatttaagtgtcttagaaagctgcagttggaaatgtggaagatctttgttgtggaggcagtgcaacacagtggttgagggccagctttgtaggcagtcaacctgagttgtactctcaacttcactgattactagctctgtatgatgtcataattacttattctctgtgtcggatgtaacttatttgcttggtactcatagtaccaccttctagtatgcctttctttatagagtttataaggctgagaaytataatacatttcacagatgttcttgcagtcagccttctggaggcaaattaggttcaccaattaggtgcacttagtcaagtgcttgaaaggtggaggggagattatgtagaccac

SEQ ID NO: 165832 - DNA, 585 bp, Homo sapiens
gctatctgggcatcctttagtccagtcaagttaacatataaaattaacyatcatgaatattattccatatatatatatatataatgtatataaataaaaaacaaggaatatatatgatatatatataaattccttattggttctgtttctctgaagaaatagactaatacatgtaccttatttcccaaaaataaggaatatacatatgtatattctttatttataggttttatatatatatatatatatatatatatatattcctactttttgggaaatggctcataagattatggtagctgagcagttgacaatctggtctacaagctagaggactaagaaagccagtggtataatttagtttgagtctgaagacatgagaaccagggggctaataatgtgagtcccagggtctaaaggcagagaactagaagatccaaaactaagggcatgagaagatggatgtcccagctcaagaagagagaaaattcacccttcttccctccactttttgttctattggggccctcaatagattagatgatgcctactcacactggtgaagatagactttttttttcactt

SEQ ID NO: 165833 - DNA, 585 bp, Homo sapiens
gctatctgggcatcctttagtccagtcaagttaacatataaaattaaccatcatgaatattattccatatatatatatatataatgtatataaataaaaaacaaggaatatatatgatatatatataaattccttattggttctgtttctctgaagaaatagactaatacatgtaccttatttcccaaaaataaggaatatacatatgtatattctttatttataggttttwtatatatatatatatatatatatatatattcctactttttgggaaatggctcataagattatggtagctgagcagttgacaatctggtctacaagctagaggactaagaaagccagtggtataatttagtttgagtctgaagacatgagaaccagggggctaataatgtgagtcccagggtctaaaggcagagaactagaagatccaaaactaagggcatgagaagatggatgtcccagctcaagaagagagaaaattcacccttcttccctccactttttgttctattggggccctcaatagattagatgatgcctactcacactggtgaagatagactttttttttcactt

SEQ ID NO: 165834 - DNA, 544 bp, Homo sapiens
cagctggaggttaagcatctaagattaattcctgaacaccaacatagaaaggccacyaagggagttgctgcctgtctgatcaggaagcttctggagtcaggagctgcttctttagttcctggttccaggatcatcccagctctgctgaagtctgaagatcaagatgttgccatcaaactcttagctctaagaccccactactcagcacatctttgtttcatgccagcaaatgaatgtccttccttgaattctcctttcaatgcctacatacgtggggaccaattactgaaacctctgatgatgctaataaaacccaaacaccaaatttctcatccttgctttccagtagtaacaaaaaaattcccaggagcagggatcctgcatcacttcttacttctaaatctccaaaggtgcactgtcttagcagaagctgggtcacatatggagataagcttacagggaacctgagaagcaagactgggactagtgcaaggcaagaaagatatccagggcacaaagtttaaggaggcactcattctcacat

SEQ ID NO: 165835 - DNA, 466 bp, Homo sapiens
attttacataaggtttgaataggtgtaatttttttgcatgtggacatttaattggtccagcaccatctgttgaggactgtttttcctccatggaattacctttgcctctttgttaaatcttgatcttgagtattattttgtcttattaacctttgaaatcttatgaattaaagctttgattttatttggtaatacacattatcatgatttttcccctaccagtttctcmtaagtccactgtctatccaatcttcagtgcatcttcagtcaattcaaaaaggtgagaattgttattgttttaaagtccaagccttgtaaattatacagttcctgtgggtctctttttcagtctcatgctacttaatttggggagtttttttttcttcctcactaaggggaataggagaataatattgagaatagggtgatgaaatcagtccctcatagaaacatcataagaacttaa

SEQ ID NO: 165836 - DNA, 446 bp, Homo sapiens
tgtaatttttttgcatgtggacatttaattggtccagcaccatctgttgaggactgtttttcctccatggaattacctttgcctctttgttaaatcttgatcttgagtattattttgtcttattaacctttgaaatcttatgaattaaagctttgattttatttggtaatacacattatcatgatttttcccctaccagtttctcataagtccactgtctatccaatcttcagtgcatcttcagtcaattcaaaaaggtgagaattgttattgttttaaagtccaagccttrtaaattatacagttcctgtgggtctctttttcagtctcatgctacttaatttggggagtttttttttcttcctcactaaggggaataggagaataatattgagaatagggtgatgaaatcagtccctcatagaaacatcataagaacttaagag

SEQ ID NO: 165837 - DNA, 466 bp, Homo sapiens
attttacataaggtttgaataggtgtaatttttttgcatgtggacatttaattggtccagcaccatctgttgaggactgtttttcctccatggaattacctttgcctctttgttaaatcttgatcttgagtattattttgtcttattaacctttgaaatcttatgaattaaagctttgattttatttggtaatacacattatcatgatttttcccctaccagtttctcataagtccactgtctatccaatcttcagtgcatcttcagtcaattcaaaaaggtgagaattgttattgttttaaagtccaagccttgtaaattatacagttcctstgggtctctttttcagtctcatgctacttaatttggggagtttttttttcttcctcactaaggggaataggagaataatattgagaatagggtgatgaaatcagtccctcatagaaacatcataagaacttaa

SEQ ID NO: 165838 - DNA, 399 bp, Homo sapiens
ctacaccctaaaatcggatctactggctcattattagcagagcaccacctcctggtttcccttcttaaaccccgcccctaccctaataatcatccttcttgacccttcatgactatgagatgaaatcttgcatagcagaaataaataccaggtaatsaccaagcacggtatgccaggccccatctaaaatacttaggctaattgttctcaacccatgctgcacaggagaatcacccagagagcttttaaaagcagtaatatttgggaatcaccccagacaaactaaataagattctctttggtggggaggggaagtaacaagatcaactgacttgacaacttcgcaatttaagagggaaagagtatgtaagaggaggagggaaagaaaaagtagagaag

SEQ ID NO: 165839 - DNA, 399 bp, Homo sapiens
ctacaccctaaaatcggatctactggctcattattagcagagcaccacctcctggtttcccttcttaaaccccgcccctaccctaataatcatccttcttgacccttcatgactatgagatgaaatcttgcatagcagaaataaataccaggtaatgaccaagcacggtatgccaggccccatctaaaatacttaggctaattgttctcaacccatgctgcacaggagaatcacccagagagcttttaaaagcagtaatatttgggaatcaccccagacaaactaaataagattctctttggtggggaggggaagtaacaagatcaactgacttgacaacttcgcaatttaagagggaaaragtatgtaagaggaggagggaaagaaaaagtagagaag

SEQ ID NO: 165840 - DNA, 510 bp, Homo sapiens
ctgcacctggccttttttttttttttttttttaagatttttacagattttctacatagacaactatgtcatctgtgacgaaagatagttttatccttgttattttcttccttctatttgttttggatttaatttgcttcccttccctctktcaccagcttcttacagtggagatttggataattgatttaaacctcttttcttttataatatgagcatttaaagctatagattcctttgaagaattgctttagtggctttacaaattttggcatattgcattttcattatattttagttcaaactattttctaatttctcttgtgattttttgatgcagagttacttataaatataattttaaaattaataggtttaattgtcataattgtatacatgtatgggatacaaagtgatattttgatatatgtattatacaacatggaataaattaataaacataggcagcacctcatttacttatcattttttgtggcaaaacatctgaagt

SEQ ID NO: 165841 - DNA, 510 bp, Homo sapiens
ctgcacctggccttttttttttttttttttttaagatttttacagattttctacatagacaactatgtcatctgtgacgaaagatagttttatccttgttattttcttccttctatttgttttggatttaatttgcttcccttccctctgtcaccagcttcttacagtggagatttggataattgatttaaacctcttttctttkataatatgagcatttaaagctatagattcctttgaagaattgctttagtggctttacaaattttggcatattgcattttcattatattttagttcaaactattttctaatttctcttgtgattttttgatgcagagttacttataaatataattttaaaattaataggtttaattgtcataattgtatacatgtatgggatacaaagtgatattttgatatatgtattatacaacatggaataaattaataaacataggcagcacctcatttacttatcattttttgtggcaaaacatctgaagt

SEQ ID NO: 165842 - DNA, 510 bp, Homo sapiens
ctgcacctggccttttttttttttttttttttaagatttttacagattttctacatagacaactatgtcatctgtgacgaaagatagttttatccttgttattttcttccttctatttgttttggatttaatttgcttcccttccctctgtcaccagcttcttacagtggagatttggataattgatttaaacctcttttcttttataatatgagcatttaaagctatagattcctttgaagwattgctttagtggctttacaaattttggcatattgcattttcattatattttagttcaaactattttctaatttctcttgtgattttttgatgcagagttacttataaatataattttaaaattaataggtttaattgtcataattgtatacatgtatgggatacaaagtgatattttgatatatgtattatacaacatggaataaattaataaacataggcagcacctcatttacttatcattttttgtggcaaaacatctgaagt

SEQ ID NO: 165843 - DNA, 547 bp, Homo sapiens
aaatattgacacccactcaccaggcttgagaactagaaaagctacatggatttctagagtgagcaatgatttcctctggccgccattccttgccaggtcggtgccactcagcacatgccaagggcagagaccagtttcttgtttcatctggctatggtgtagacctacagtcayaccgctaaggtagaaagctcacagcccctccaaaaattgacacaataatgaaatcagaaagacaaaactaagcaatcaatttaagacagaaaaagaggtatgtataatctaatgataaacccaggttaaaagatggcattgggtaggtatttgtattttcactgcactgctaagtcacctagtatatacacacatctctaaatttttctgtataaaaattctggattcaaactacattccctatatagactaatttacttaaacatttaaaccccagaacactagcagctaagggagttaaaaccaatggatgcaggtattgccctgactagaaatgcaaaccaaatgtgctctggtaaacatttaagaattc

SEQ ID NO: 165844 - DNA, 547 bp, Homo sapiens
aaatattgacacccactcaccaggcttgagaactagaaaagctacatggatttctagagtgagcaatgatttcctctggccgccattccttgccaggtcggtgccactcagcacatgccaagggcagagaccagtttcttgtttcatctggctatggtgtagacctacagtcataccgctaaggtagaaagctcacagcccctccaaaaattgacacaataatgaaatcagaaagacaaaactaagcaatcaatttaagacagaaaaagaggtatgtataatctaatgataaacccaggttaaaagatggcattgggtaggtatttgtattttcactgcactgctaagtcacctagtatatacacacatctctaaatttttctgtataaaaattctggattcaaactacattccctatatagactaatttacttaaacatttaaaccccagaacrctagcagctaagggagttaaaaccaatggatgcaggtattgccctgactagaaatgcaaaccaaatgtgctctggtaaacatttaagaattc

SEQ ID NO: 165845 - DNA, 547 bp, Homo sapiens
aaatattgacacccactcaccaggcttgagaactagaaaagctacatggatttctagagtgagcaatgatttcctctggccgccattccttgccaggtcggtgccactcagcacatgccaagggcagagaccagtttcttgtttcatctggctatggtgtagacctacagtcataccgctaaggtagaaagctcacagcccctccaaaaattgacacaataatgaaatcagaaagacaaaactaagcaatcaatttaagacagaaaaagaggtatgtataatctaatgataaacccaggttaaaagatggcattgggtaggtatttgtattttcactgcactgctaagtcacctagtatatacacacatctctaaatttttctgtataaaaattctggattcaaactacattccctatatagactaatttacttaaacatttaaaccccagaacactagcagctaagggagttaaaaccaatggatgcaggtattgccctgactagaaatgcaaaycaaatgtgctctggtaaacatttaagaattc

SEQ ID NO: 165846 - DNA, 605 bp, Homo sapiens
atttattttttaaacatgcaaacatggtggttattttccatggcttggctggtctggagagggctgtctcatgttcctgagcacctgcggctctgcagtctgtcctcctggcagagaaatgcatttcaattctgggtgtttgttttgttttgcttgtasctattcttagattgggaatagacacatgaatagatacagtactgtggagagagctttatggggtcaacatggcatcactcttgctcaagaggggcttcctggagaagggctatcacttactctgtcttttgggggtggtttatctcaatttattggggctttgacatccagagactcaggatcatattaattccaacagacatctcaccattcaaatgaatgagaacagacgtgcgaattattggacttgattagatccaaggctaggctctaaagcactcaaataggattctgaatgcagagccccatggaggagctagatttccatcagccaaatgacccaccccaggagtgaattggggattgcagtgatgcccaaactaaatagagcttccaatgtggcggtggtgaccttactcatctaccagtgtctgggggtgatttta

SEQ ID NO: 165847 - DNA, 561 bp, Homo sapiens
tactaaattctaaaattctatatttcaaaaaacgttgttcaatgggaagcgttttttaaactacacatttatattcaagttctatgcccaaaccaaaactaagttagaaatcaaattagccaatgctgtttattcatatgtttgctatagcaagggaaatatctatggtcccttttgctccttcagaggttcaaggaggatttgaaaggaaaatgagttttataggaaaaaaaagcacattctattaaggtgagatttttgaaaggggcatggggmagtcttatgattggcctttaagtatatttggctgtccttgtttggttgcaagggagcaggcactttgaggtttccagaaaggaagaggctattcaaactgtggcccgagatttcctacaactagtgagtcaattgagtgttctttatggttatactgatagaatatttgagtcatggtcctgaggtaaggatggtggtaatggcagacagtttctcaaaaaattgtaaagcactgaatcgctgcattctcatctgctgtggctaattgtgagggcttgggccagt

SEQ ID NO: 165848 - DNA, 576 bp, Homo sapiens
aggtgagatttttgaaaggggcatggggcagtcttatgattggcctttaagtatatttggctgtccttgtttggttgcaagggagcaggcactttgaggtttccagaaaggaagaggctattcaaactgtggcccgagatttcctacaactagtgagtcaattgagtgttctttatggttatactgatagaatatttgagtcatggtcctgaggtaaggatggtggtaatggcagacagtttctcaaaaaattgtaaagcactgaatcgctgcattctcatctgctgtggctaattgtgagggcttgggccagtcaacatatctcctttgactgcactttctttacaccatgaagatggtaaattgggtgatgtttacattctcttcagagtcttgcacgtctaggattccrtgatgacactggccacaaactaatttaattcattatgtttatcaattgctaattgagatgaatagcaattcatctcttaggttggttatagggagaactcaaatttatctgaagccttatgaacaaacacatctactgagttatgaaactctgtaataaccagc

SEQ ID NO: 165849 - DNA, 565 bp, Homo sapiens
atggggactatgagtgacctcagaatgcttgctgagcattctggaatgtactgtgcagatggcaaatatgactcattttcacatatggcccttccccagaaagaagggctgggcaacagtttccctgaatctttgcaggcatgggcaccaatgagcatttatgaagtgtttagaattgtgcagtatatcacttggtaggcacatacatttggtctgaatcttgatgaagaagttttttaaaaaaaaaaaaacaaaacaaaacttctccctgttttcctggcataatattctgaacagcagcaacgcaatctgttgtttgtttagaaaagatggcagaagggtgtatgtagtgtgtgtgcatgtgtgtttgtttgttatggagggatatctgttcacagtgcagtaaaagagtaatcctacaacatagagttacctgaattagttattatcatttgggaagacgttgaggtttaraatgaattagttaaagctctgctcccatggtgggcgtatagcagagaaaatcctctctttagccttccctccccagtgtgggcatatgcac

SEQ ID NO: 165850 - DNA, 516 bp, Homo sapiens
accccccaaacactaaacatttaagcacatgatatttaaaataaggatatttgaaatgctgactgatatacttcargtcctctgataacaatgctctttcctggttcatgacactctctaatctagtgtttcaccccttagagtaagttactaatgcatttttcactataaacaagtttgttactgccaaatgttgctaatatgtgaataaaagtagcatttgtctcctggtgaccctgcagcctaaaatagaagccatcaaggtagcaccagtgattgtgactgccaagcacaagacaataaattcagatttggctgatgggaaatgcttaaaagcccccaatattcaaatagaaaaaaaaattaatgaaaaaaagggagttgtgatggaaattagagtaaacaataaaatatggaggctggaaaaacaagttaaaaaggagaagatgtaacttttaatccagctccaaagtcccagagcttggaagttgtccctcccagttttacaagataaag

SEQ ID NO: 165851 - DNA, 391 bp, Homo sapiens
gaattccgtcttttttaactcttgaattatcatctgacatgacacccagcatgcattggcttgctgcgcctgaacataaagcactcaagcagtctattttgttttggcgagagaagcagaaatattattcatcttgattggatcctttctgttgggtcttgctgtttaattaaaccagatctgtgttttagctctttggtaacatggggttcaaatagacagggatattatatccttatgtaaaacaagggcmggttggtgtccaagaatcatggctatgcaagtaaagatttctacaggcgtgctattattacacaatttcccctgtaattttatcatctacttgatattattgcacaaattctgaggtcaaacttcaaagtaaaactct

SEQ ID NO: 165852 - DNA, 573 bp, Homo sapiens
acaggcattgttagaagtttggactgtttggcttatcaggtgctgtgcatctttctgagtcccagtgttgttaatcaacatagacgrcagactagttaatgctgctgttagtaagactgtggcaaagattagaaggttatcaaacagatataaacaggagttctaggattcctatctaacatatgaaattaacaactaataggtatctttcgttgatagttgatttgattgagtgcatgtggataaaagtcaacaagtgaacaacttgattgtctgctgaattaatagaatggaagaactttaaatggttctgaaagctaatttaattcagaaacctccgtgagatttcagctcttttgtgaaactagtgaataaaatgttggcaattcattgagaataaaaatgtgagcattagcttcttctgttcttggaatttttaaaatgtgtataaaaatgttttttacaaggagggagcatttaacttaggagtatgctcatattatcctctaaacaaacactgggaattaaaacaaaggaaaaccgccttttaaatttgccttgagtttacagtcc

SEQ ID NO: 165853 - DNA, 567 bp, Homo sapiens
aacaccaaaattacaaagtttttgttgtaaggattagcgagggagaatctgaaatatttctagttaaaagatgataggtggatatatggaaattaatttcagagaagcttattgctaatgttaaaatatataaaacatgattgaaagtcaatttagcatttcacyccatctctgcagtataccatcattattgtcttattttatgaaatatatatttaatcatttattcgtttgcttttttaaaataagttttcaagctgacagattggctatgggagtgggtaagaaagaaaagagtcagaggctggccaagatggccaactagaagcagctagcatgcaccactctcacagagaaaaatagaaggggcaagtaaatacagcaccttcaacagaaacgtccaggtacatgcattgagattcatcaagaaaacaactcaacccacagagagtggagaaaagcaaggcaatgtgaccacccatccaggagcaacacggagtcaggggaacctccgtagcccagggaagcagtgagtacatgagtgaccccagggacccacacttctcc

SEQ ID NO: 165854 - DNA, 562 bp, Homo sapiens
cctgtacatgtacctcttgaatctaaaagaaaagttataaaaattttataaaaataatctgaattmtttataatattttattataagaaacaacaaaagtgcgattatgaaacattagctaagatgtgattttttcatatttttctaaaaatatttaatatatttgatttataaacacactatcacttaagtacaaatcccattgatgtaatcattatcctccccccaaaacaaatcagctgagcatattagcactcccaaagtatagctgactctgagctaagacaataaggaatcattctccctgattattctttttcccatgaaggtattttttacatttgctataacctttaaaaaagcaatttatatatacgtattaattaatttttgtaaatggtaaaatatatatataaatgtatatatatatatctccaaattaatagacaaggtatgtgtcactgtattagtctgttctcatgctgctaataaagacctacttgagactgggtaatttataaaggaaagaggtttgactcacagttcctcagggctgaggagg

SEQ ID NO: 165855 - DNA, 562 bp, Homo sapiens
cctgtacatgtacctcttgaatctaaaagaaaagttataaaaattttataaaaataatctgaattctttataatattttattataagaaacaacaaaagtgcgattatgaaacattagctaagatgtgattttttcatatttttctaaaaatatttaatatatttgatttataaacacactatcacttaagtacaaatcccattgatgtaatcattatcctccccccaaaacaaatcagctgagcatattagcactcccaaagtatagctgactctgagctaagacaataaggaatcattctccctgattattctttttcccatgaaggtattttttacatttgctataacctttaaaaaagcaatttatatatacgtattaattaatttttgtaaatggtaaaatatatatataaatgtatatatatatatctccaaattaatagacaaggtatgtgtcactgtattagtctgttctcatgctgctaataaagacctacttgagactgggtaatttataaaggaaagaggtttgactmacagttcctcagggctgaggagg

SEQ ID NO: 165856 - DNA, 604 bp, Homo sapiens
gtctataaacaatagaaaaattctttaggccaaccgccgtggctcacrcctgtaatcccaacactttgggaggccaaggcgatcggatcgcttgagcccaagagttggagatgagcccgggcaaaacagcaaaactccatctatagaaaaaaaaggaaaaaattagctggcagtggtggcacatacctctagtcccagccactcaggaggctgtggtgggaggatcgcttgggccttggaggtggaagttgcagtgagccgagatcgcagcaccactgcactccagccttggtgacagagtgagaccctgtctcaaaaaaaaaaaaaagtatttaacctcatgggtagccaaacactttatattttttaaatatatcaaattttcaagtatttaaaataataactaaagccaggatcatgcactaaagtcaatattcttgaacatgtacattagtataaaactttacgtatggtagagggagagaagtctgaaatttggaaatataaaacaaaagctataagtggtccacagcctttaataagttattttttattccttcctctttagtaataaaagcacttttaaaaatctgatcatttcata

SEQ ID NO: 165857 - DNA, 604 bp, Homo sapiens
gtctataaacaatagaaaaattctttaggccaaccgccgtggctcacgcctgtaatcccaacactttgggaggccaaggcgatcggatcgcttgagcccaagagttggagatgagccygggcaaaacagcaaaactccatctatagaaaaaaaaggaaaaaattagctggcagtggtggcacatacctctagtcccagccactcaggaggctgtggtgggaggatcgcttgggccttggaggtggaagttgcagtgagccgagatcgcagcaccactgcactccagccttggtgacagagtgagaccctgtctcaaaaaaaaaaaaaagtatttaacctcatgggtagccaaacactttatattttttaaatatatcaaattttcaagtatttaaaataataactaaagccaggatcatgcactaaagtcaatattcttgaacatgtacattagtataaaactttacgtatggtagagggagagaagtctgaaatttggaaatataaaacaaaagctataagtggtccacagcctttaataagttattttttattccttcctctttagtaataaaagcacttttaaaaatctgatcatttcata

SEQ ID NO: 165858 - DNA, 541 bp, Homo sapiens
atttaacaatattatcaatgaagatcttgatactgcacatcagcaaaaaattatcattgaatcctatgaatctgatagagtactttggaatttacttttcatcaaaatgcagacatgtaaaaaattcatcatttaactataaattaaaataggttatggatggagatttgaaaatgaattttgaaaatactaaataattatggcatccacctgtaatcccaggctccatgggttaattttgtataaaagttaaaaataattatattttcatttactctttggatgctttaatctcattactatgaattaatcctgaagatacacctccaaccatgataaatatatgcacaatgttatttattttaagattgtttgtaattgcaaatattgaaactgcctaaatatccaagcctaggatgctggttaaatatacaatgaatamacatgcacggtgcagtactatgcaactacaaagaaataatgaggaagatctctataaatggttttggagtacctttcaagagatataattaagtggaga

SEQ ID NO: 165859 - DNA, 633 bp, Homo sapiens
gttatttgaattaggaggtgctacatccaaaggtgttataaagactatcacacattatcccaactttaaataatataatgcttcacccaaaaaatgtggagtttgggctcagtgccatgttggttgggacttctgttttattttcatttattaattaatttatttttttgagatggattttcgcttttactgcccaggctggagtgcagtggcgcgctctcagctcactgcaacttctgcctcccaggttcaagcaattctcctgcctcagcctcctgagtagctaagattacaggtgcgtgccatcatgcccggctaattttgtatttttagtagagatggggtttcaacatgttggtcaggctcgtcttgaactcctgacctcagctgatctgcccacctcagcctcccaaagtgttgggattacaggcrtgagccaccacacccggccctgttttatgtgccttcattagtgggtgagtgtattttgtctacagatgaaagaatgagccaaatatttgagtacaagatttagtcattatggtggtcataaaaactatttactatttctgatttcttccttccaggaaaatgttagatagcatttcctgatcctaccttaccaggtgggac

SEQ ID NO: 165860 - DNA, 591 bp, Homo sapiens
ggcacttgttttcagaatgctagccacctagaaaagccctccaggtctctactcagagtccaaaagagttgtttttcaagttacatagttgtgtcttaaagtaattcacatacaaatggaaaatcataccccatggaattacatattaaatcatttttccttagttatattttatattttttagagtgatcatagttttccatgagaatttgcctagttgtgaggccttgtagatactaattaactcatgctgtatgatgatyctgtataaagaaagcttaaatcaatacgtacgttctgaagaaaaaaaaaaatctctttgcagtacacaaagagaaaaaaacaaacctaaaaagagttcctgaaaatgactagtaactaagtggtttgaaagagttaatattgtttcctacaggcctgattaataaagacattacctatccctatattgaaaaagtggacatggtttctagttctgtttcaggttgatttatgtggggagagtgtgatgacatttatgtactaaatacttagtgcttttaattcagtttacatttaatctataaatgcaaaccatgttaaaggatgctt

SEQ ID NO: 165861 - DNA, 426 bp, Homo sapiens
agacactgtacacccaactctcttgaactatcactcttactattagtaataaaaataatatggcattaattaagtgatcaatctgtgacatctctgtgttactttacatgttttaactcattgaatacttatagctctgtaggtgatcgccatttttctctttattttacaaagaggaaattgaggcttagagcattyagtaattgcccaaggcttagtaagcagcaaaaccaaacacaaacacagggctatctaatgtcaaagtctgctctctcaactagtgctttcctttaccacagaaaattgtttttaatatttgagaatgatttacctatgaagttttctatatgaaaagtaatctctttttccttccagaaccccctgctgcccttcctaataatatctcacaattttgtagatactatg

SEQ ID NO: 165862 - DNA, 426 bp, Homo sapiens
agacactgtacacccaactctcttgaactatcactcttactattagtaataaaaataatatggcattaattaagtgatcaatctgtgacatctctgtgttactttacatgttttaactcattgaatacttatagctctgtaggtgatcgccatttttctctttattttacaaagaggaaattgaggcttagagcatttagtaattgcccaaggcttagtaagcagcaaaaccaaacacaaacacagggctatctaatgtcaaagtctgctctctcaactagtgctttcctttaccacagaaaattgtttttaatatttgagaatgatttaccyatgaagttttctatatgaaaagtaatctctttttccttccagaaccccctgctgcccttcctaataatatctcacaattttgtagatactatg

SEQ ID NO: 165863 - DNA, 603 bp, Homo sapiens
ttagtgaataggggagattaattttcccaaacattttttttttttacagaataggtcctctatcattattctaaagaatgaatacctttgaaatgtttccaacttctaactgagcttaatttgttacaaatgaatgagagagataaatgaaaagaaggcatacttgctgattaatcaaaataaaggagaagcatatattttaactttgtcttaaggtagcttatcatcttagcgagcagattaatagcttttcatgccattagttattttggctatggtggctctaaaatattgataaaagaaaaagactgacctcacagccatgaattgcccatataagtatatatgtgcagttagagaatgtccttcagcaatgtatttgttttaaacttataraaatatatttaagtcactagggagtaagggcacatgcactgcctgtcagagagcatggacaaaagagataaagacagaaagcagatgaaagagaaataatttcatcttactgcctttggaagcagtttttacatatacaaacttctatttatggattacgagtttaaccctttagaaataatgtaatttctttaagagatataggta

SEQ ID NO: 165864 - DNA, 603 bp, Homo sapiens
ttagtgaataggggagattaattttcccaaacattttttttttttacagaataggtcctctatcattattctaaagaatgaatacctttgaaatgtttccaacttctaactgagcttaatttgttacaaatgaatgagagagataaatgaaaagaaggcatacttgctgattaatcaaaataaaggagaagcatatattttaactttgtcttaaggtagcttatcatcttagcgagcagattaatagcttttcatgccattagttattttggctatggtggctctaaaatattgataaaagaaaaagactgacctcacagccatgaattgcccatataagtatatatgtgcagttagagaatgtccttcagcaatgtatttgttttaaacttatagaaatatatttaagtcactagggagtaagggcacatgyactgcctgtcagagagcatggacaaaagagataaagacagaaagcagatgaaagagaaataatttcatcttactgcctttggaagcagtttttacatatacaaacttctatttatggattacgagtttaaccctttagaaataatgtaatttctttaagagatataggta

SEQ ID NO: 165865 - DNA, 490 bp, Homo sapiens
catctcaggtgagaagaaagctatgactaaatcaatcttaaacttatatctgaaaattcaaacaaggaattgcagaattggattgactgatctttatcatattctgcttaggaatgtgcaaaggggtcgaatgactgcttggtgaatattcatagttgttcaacaatctcaaatttttaatatttcagagggatgttcaaaatcgttccagaagctggtaattaaaggaaagcaataaaaatcttttttttttcaatgggaaagtacaatactgttctgctaaaatttctgattccaaggacatttctaatgrtaaaagatcttaagaaaaatgaaggaggtgaagatagggctgcttctattttaagtagaagcatatgtttatacttctcggtgggaaacttctaggcagcaatcaagggaacttaccttacaagtactgtataagtgaagagtttaaaatagtttttagttgaaaaaagaacaggaa

SEQ ID NO: 165866 - DNA, 579 bp, Homo sapiens
tacaaatctccacaagtcctttcataccatttgaagcaaggcagcccaaaagaaaagctagaaccaagaggtattacactcgagtaataaataaccctacgagccactttattagcaaaccaaatgatagtactatttgtttttggtatcttttgcttttcattatttttcatgtaaaagctgaacttgtgctgttggttttttttttttttttcctctctctctcttttttactttgcagcagtgacaatttatggattcaataatttctcatattctacytgaaaaatgtttccttatccaaaggttaactcctttaggagtacaaacctctaaattttctctttcgctgtattagtcggtacaactagattcactagactcataaatctatcaattttctagtctataactgtgtaatccctgaaatctcatagatataaatggaattgctaattttcaataaatctacagaaacaggtaatagtgtcatggacccccagttccaatcattttagctataataaatgataccacaggggactcactttgggtcataaaatttactgatcaggatac

SEQ ID NO: 165867 - DNA, 632 bp, Homo sapiens
catatgatattattatgtctattttatacatgaggcaaccgagaaccaggaaggaaggtaatttgcccyaggtcacctagagaggctttgagccaagatttaaactaaggtccttgtgattccaaagctcatagttttcctgggtaatccccatgtttgaggaaatggcttcatctacaatgagctaaactttgagacacattaggatctcagaaatcagccctcaagtgaagaagtcaactttcaaattgctgtctgaagttggccgggcatcaaaattaccttgttgaaaaagaatataggaaagagtgtgatctcattaatgagactatgggactcttcaggcagtggcaatatgaaaagaaaaaataagtagtttgcactttttggggaaaaatgagcaaaaaaatgctcacttttaacccatttcaatttaaataaagtagtgtgcaaactaggttattcttaccttactgatgtctcaaacttctccaattagagataatattttctctttagaagtaataagggtctttctaattatcagttgtcatcaaagaggaaacatttagcgtaatctatgctggccataatttgtaaacacgaaaatacattataggcaacactagtaa

SEQ ID NO: 165868 - DNA, 632 bp, Homo sapiens
catatgatattattatgtctattttatacatgaggcaaccgagaaccaggaaggaaggtaatttgccctaggtcacctagagaggctttgagccaagatttaaactaaggtccttgtgattccaaagctcatrgttttcctgggtaatccccatgtttgaggaaatggcttcatctacaatgagctaaactttgagacacattaggatctcagaaatcagccctcaagtgaagaagtcaactttcaaattgctgtctgaagttggccgggcatcaaaattaccttgttgaaaaagaatataggaaagagtgtgatctcattaatgagactatgggactcttcaggcagtggcaatatgaaaagaaaaaataagtagtttgcactttttggggaaaaatgagcaaaaaaatgctcacttttaacccatttcaatttaaataaagtagtgtgcaaactaggttattcttaccttactgatgtctcaaacttctccaattagagataatattttctctttagaagtaataagggtctttctaattatcagttgtcatcaaagaggaaacatttagcgtaatctatgctggccataatttgtaaacacgaaaatacattataggcaacactagtaa

SEQ ID NO: 165869 - DNA, 632 bp, Homo sapiens
catatgatattattatgtctattttatacatgaggcaaccgagaaccaggaaggaaggtaatttgccctaggtcacctagagaggctttgagccaagatttaaactaaggtccttgtgattccaaagctcatagttttcctgggtaatccccatgtttgaggaaatggcttcatctacaatgagctaaactttgagacacattaggatctcagaaatcagccctcaagtgaagaagtcaactttcaaattgctgtctgaagttggccgggcatcaaaattaccttgttgaaaaagaatataggaaagagtgtgatctcattaatgagactatgggactcttcaggcagtggcaatatgaaaagaaaaaataagtagtttgcactttttggggaaaaatgagcaaaaaaatgctcacttttaacccatttcaatttaaataaagtagtgtgcaaactaggttattcttaccttactgatgtctcaaacttctccaattagagataatattttctctttagaagtaataagggtctttctaattatcagttgtcatcaaagaggaaacatttagcgtaatctatgctggccrtaatttgtaaacacgaaaatacattataggcaacactagtaa

SEQ ID NO: 165870 - DNA, 601 bp, Homo sapiens
aacaaatataaagagcccctctccccaaaattgaagaaatccaaatgtccatcaactgctaaatgaacaaaatgtggtttatctatgcaattgaatattattctgcaataaagtaaatgaatgaaggatacatgctgcaccatagaggaaccttgaaaacactgtgctcagtgaaagaatccagtcacaaaagaccacatgttgtattamtctacttatattaaaggtccagaataaataaatccatcagacagaaagtagacttggattgttaggggttgaatggagcgtaactgctaatggggtgataaaaaataggaaaattagagtggtgatggttgcacaattctgggaacattctaataaccactcaattgtatatttttaaattgtgagttttatgataggtaaattatatctcattgctgttattaaaatgttctaaaattatcaaatatcttttgcctacattctgcaaatttatcccatattttcccaatgtgcttctttctcacatagatagatatatagatatattcattacaggtaatgccaactttgattacttgagggcaaatttccctactttattattattttt

SEQ ID NO: 165871 - DNA, 477 bp, Homo sapiens
ttgagggcaaatttccctactttattattatttttcccctttatgcttaataaatatcttaataaatatattttggatagtgttaatgtcccattttttggcataacaactttacttagttttagcttgggagtgtgtgtgtgtgtgtgtgtgtgtgtgtacctgtgtgttagtagaaaggattggagagtagttgtcaaagtataggggataaaaaaactaaatgtccaaacctatttttttattctgattaagcccttactaaattgaatttcatatgactttcaaatctgggaaaatgaattatagtaactctggatagtggttttagcagtaaaaatgctaagagaartataaaattgaataattgataccatggaattaaaaaactaaggcaatatcttatttaacagagttctgcagctttctttttattaaattctgtgtttatgcttcttaaatatcgtgtgttgcttc

SEQ ID NO: 165872 - DNA, 530 bp, Homo sapiens
aatatatatcagtggctagaatttgtgtgtgattaggttaacataaataggctaaactttggtgctatcctttggatttgttcttaatatttagcaattcatgtgtataaacagttaaaacaataagacccaaattgtctgcacattaaacagcataacagattttcaacaaattgccatcatcctgctttattttgcttatctcattgatgtatttgtccctttgatgtttgatttatgcattttattcagtccaccttttgttttgagctaatagtaaagctagctttactgtttttaatgtggacatktagaaaagttcacataattttttagtagttgaaatggcaccttggaacttgaaaagcataagaccaatggggattcgctttggttttaaaatttatgccctacaaaatggaagacatgacatgctgagactccaactcatttggttttgttgaatataattcttataccattttttgtggattaattaaaactctacttttcatttgaaagtatataaa

SEQ ID NO: 165873 - DNA, 644 bp, Homo sapiens
ttgggttaaagcataagcagctttttcatatttgaaagaatgactgtcactgtgtctcaatttgggatgcaatacaaacttatcttaaattcaaagatcacccattgaaccagattatgtggcaaattgctggggtagggctgataaaaaaaattccctaatgtttctggctcctgaaagactcaaccactggcttctctaaaagcaagtgcaatccagggcatggatctcttccttaagaggtactctatgagaatactgtggaggagaaaaacaaaaacaaaacaaaaagcattgctaaataatctgttttgtcttgtcttgtctttggtgcacagtattttagcaccattctagagtctattaatttgtttgctataatacaaaagctttcttagagctactccacttctatcacttactttagttctacaactccaaaaagacataggatctagtctaatttaaaaagaaactttttttttatttgaagaaatgtttttgcrtatggcttccaaaagtatctatgagcttcaaataaatcttttgacctaaacattattatgggtcattgtaattctgagaggcagtcgactgccagctcagactcaatcagtattcatctagaggcatattctacatgt

SEQ ID NO: 165874 - DNA, 542 bp, Homo sapiens
gtctccttactgtattttgtcccagtaaaaacttaattttgtgaaaacataagacaaatttcaacacccccctgcacaaaaccctttaaaggtttacaaggcccttattatttggtttctggctacccacttaccttagctaaataagcttctttcctcttccttgaacacatcagacaacttcctacctcaggcccttcgcacttgccattccttcttccctaaatgctttttctccagagatctgtagggcatgctttctctttttattcaagattctactaaaaagcatctcttcagagaggccttttctaactccattatctaaaataccatacccttattttgtatcttctcacttgttttttttccactaatttccacctgaatttatcttgtacattatttgtttagattttttgttttaatcagttggttttttttccacaggaatgtaagcaccataaggtcaggcatgttaatttactgctctattcatatttcytaaaataaggttgggaacagagtaaagtgcaaataaa

SEQ ID NO: 165875 - DNA, 584 bp, Homo sapiens
ctagtatttcccatttctcagaagacaaaagtgaggctcaaagaaattaaatgatttttctccagttttgctaaggtaataactaatgaatttggggttcaaaacaagtcatacattattgtaaattccctgctatttctgctatattattgttgcaaaacatatattttaaaaagcaaattttaacatgcaataaatggtaaaaagaaaaaagactccacaaacttaaaagccttgtatcagactttgaaacttgttctaaagccttaaaattaaattacactttcaatgatcctggaaggagcctttggcattacttcattattctttcaaaatttaactaatttaaaggtgacatgaataaaatattcattaaaactacagcagccatttatctatgacctttaacaaagctgctattaactttcaattgactcacagttgtagattgaaccttacctaatraagtatccattcctttctaaaccttcctggtagagttttgatttacatccaaaaactgtctataaatattgtaccttagccagctccatgcttcctacttcttatttcttaaatcactg

SEQ ID NO: 165876 - DNA, 547 bp, Homo sapiens
ataataattaaacatgcagaaggaggtaaaggaggtaaagatatgatagcaaacagaaattccrggtctttttgctccagatagctgccactctccacctttctctaccttgctttgctcctttcccagagagattaacctggtgtccacccaaacagtggtttcccacattctctgatctctggttaggtttggttaatgggggcttagaaagaagaaaggggattcatgtcagggtattctgggtatttattttgctagctctttccctacaggattttcttggattcagttgtgatcgtccaactaatattattgttccttccaaagtgattttctgtgtatacctcttttcttctagttctggtaatgtttcctttctctctttgtctctttagttctaaagagttacagcagcctcgcagctactcatgtcagattactgcactattccttttggttctcctttactcacacagagtgtctttgtaaataactcattcttggtttactataatttaagtgtaccgtttctttccttttggga

SEQ ID NO: 165877 - DNA, 547 bp, Homo sapiens
ataataattaaacatgcagaaggaggtaaaggaggtaaagatatgatagcaaacagaaattccgggtctttttgctccagatagctgccactctccacctttctctaccttgctttgctcctttcccagagagattaacctggtgtccacccaaacagtggtttcccacattctctgatctctggttaggtttggttaatgggggcttagaaagaagaaaggggattcatgtcagggtattctgggtatttattttgctagctctttccctacaggattttcttggattcagttgtgatcstccaactaatattattgttccttccaaagtgattttctgtgtatacctcttttcttctagttctggtaatgtttcctttctctctttgtctctttagttctaaagagttacagcagcctcgcagctactcatgtcagattactgcactattccttttggttctcctttactcacacagagtgtctttgtaaataactcattcttggtttactataatttaagtgtaccgtttctttccttttggga

SEQ ID NO: 165878 - DNA, 547 bp, Homo sapiens
ataataattaaacatgcagaaggaggtaaaggaggtaaagatatgatagcaaacagaaattccgggtctttttgctccagatagctgccactctccacctttctctaccttgctttgctcctttcccagagagattaacctggtgtccacccaaacagtggtttcccacattctctgatctctggttaggtttggttaatgggggcttagaaagaagaaaggggattcatgtcagggtattctgggtatttattttgctagctctttccctacaggattttcttggattcagttgtgatcgtccaactaatattattgttccttccaaagtgattttctgtgtatacctcttttcttctagttctggtaatgtttcctttctctctttgtctctttagttctaaagagttacagcagcctcrcagctactcatgtcagattactgcactattccttttggttctcctttactcacacagagtgtctttgtaaataactcattcttggtttactataatttaagtgtaccgtttctttccttttggga

SEQ ID NO: 165879 - DNA, 540 bp, Homo sapiens
agcattggaaggatgtgctcatcaacctagctcaaaagcctgagatttttgtaattatgttatgcaggtttaagacaaaagaccaggcgagatgagtggtgaagccatgaaaaaaaatgacacgcacaaccaaagcaaaaccagcaggcttctggagtttgccaattcttctttgtgaagaaaacgtctggcagtttgcctaaaatcttagccgtgaacagctgccactccagtttaaattgctgttaaaaaacaaaaccaaaaagcaaaacaaaacaaaacaaaaatctataccacctgtccagaaaattgcctgtgcctggagtcccgcaaactgaaaamccggagcgcacacccctgcttcccttcactgttaggtcgaatctgtcctaagcctcagtttacctagcttgcagcccaaatgccaacaatcttggggccaaataactttctctgtggtttcagtctgggtagcagtgaccactttcaataaacttaagagtgagagatctttgtttaaacaatgaatgttatgaattc

SEQ ID NO: 165880 - DNA, 540 bp, Homo sapiens
agcattggaaggatgtgctcatcaacctagctcaaaagcctgagatttttgtaattatgttatgcaggtttaagacaaaagaccaggcgagatgagtggtgaagccatgaaaaaaaatgacacgcacaaccaaagcaaaaccagcaggcttctggagtttgccaattcttctttgtgaagaaaacgtctggcagtttgcctaaaatcttagccgtgaacagctgccactccagtttaaattgctgttaaaaaacaaaaccaaaaagcaaaacaaaacaaaacaaaaatctataccacctgtccagaaaattgcctgtgcctggagtcccgcaaactgaaaaaccrgagcgcacacccctgcttcccttcactgttaggtcgaatctgtcctaagcctcagtttacctagcttgcagcccaaatgccaacaatcttggggccaaataactttctctgtggtttcagtctgggtagcagtgaccactttcaataaacttaagagtgagagatctttgtttaaacaatgaatgttatgaattc

SEQ ID NO: 165881 - DNA, 597 bp, Homo sapiens
tggcatggagacctcagaggagatcaactataaatgacaaagtacagtccagatcactcaagtacagacacctcctgcactcagcatctctcagccaccactggaagatactgtgtttgcataaaaggtataggagtcctgcgactttccttcttggggaaaaacagtttggagggttgcagagatttgaacttctttgcaaaagtttcatttggcctttgagagggaccacgcttattctggtatgcttttccatacatcaagttccctcagctacctcccaagcctatagtagaggctatgaaacaccatgacgtacgaaagtgaagtctgggcagacaaagcaaaaggtttccacgtgtggtaggcgaagacagcgttggactgctactcttgaaagatgtcccctcagtgtgtcccacaacacctctatcatggcayatgactgtccactgaggggtttcagatatgaccagcagcaggggcaacagtgatcctaagccctctatgaggttcaggaaggaacacagaacaacaacaacaaaatcctaaaaaaacacccagtagggagaacactcaagggctgacatgaaacaa

SEQ ID NO: 165882 - DNA, 597 bp, Homo sapiens
tggcatggagacctcagaggagatcaactataaatgacaaagtacagtccagatcactcaagtacagacacctcctgcactcagcatctctcagccaccactggaagatactgtgtttgcataaaaggtataggagtcctgcgactttccttcttggggaaaaacagtttggagggttgcagagatttgaacttctttgcaaaagtttcatttggcctttgagagggaccacgcttattctggtatgcttttccatacatcaagttccctcagctacctcccaagcctatagtagaggctatgaaacaccatgacgtacgaaagtgaagtctgggcagacaaagcaaaaggtttccacgtgtggtaggcgaagacagcgttggactgctactcttgaaagatgtcccctcagtgtgtcccacaacacctctatcatggcacatgactgtccactgargggtttcagatatgaccagcagcaggggcaacagtgatcctaagccctctatgaggttcaggaaggaacacagaacaacaacaacaaaatcctaaaaaaacacccagtagggagaacactcaagggctgacatgaaacaa

SEQ ID NO: 165883 - DNA, 441 bp, Homo sapiens
tgtagaagctgccttgcaggaggagtggcacaaacagaggaaagtgataccaaccgagatgcttaatgaatgccttcctgttcctaggaaaaggaaagcccattggccatcagcagcagtcagggtggtcaaatttgcaaagatgaatgaatgtacagtattttcaaccttgaaaatcggttcaatatgttctatttgggtctaaccgaaatactctggagtaataagtccaattttgcaaactgtgcaggggtaatgctgtgtatttttataatgccatgctctagtttcctttttccattatggggtctggtgtcmttccacaaactgatttagcatacaacttaaatatctatgcctattatcagttaagttcttccagtatggcctcttgattaaggatctgtaaacgttttacaaaatctcagctaatgaagtatt

SEQ ID NO: 165884 - DNA, 441 bp, Homo sapiens
tgtagaagctgccttgcaggaggagtggcacaaacagaggaaagtgataccaaccgagatgcttaatgaatgccttcctgttcctaggaaaaggaaagcccattggccatcagcagcagtcagggtggtcaaatttgcaaagatgaatgaatgtacagtattttcaaccttgaaaatcggttcaatatgttctatttgggtctaaccgaaatactctggagtaataagtccaattttgcaaactgtgcaggggtaatgctgtgtatttttataatgccatgctctagtttcctttttccattatggggtctggtgtccttccacaaactgatttagcrtacaacttaaatatctatgcctattatcagttaagttcttccagtatggcctcttgattaaggatctgtaaacgttttacaaaatctcagctaatgaagtatt

SEQ ID NO: 165885 - DNA, 405 bp, Homo sapiens
ggaattctgggttatgttaaagtttgcaattgttcctgaatgcaggagagaagagaagggtgatacccttcaaaggaccttaaaaagatgggaagagaatttcatttatgaggagaaaaggaaagcagacagacatgtacacaagacacaagtccatgtgctccttgaggctgtgaacatggtgttacagaagcaaagaatatgccccgctttggctagcacaggagacctctcctggatgaattattcattaaactcatgacaaaggtatcaagaacaatttctgggaacacctttctgcatatttccaggactcagcatggtatgcgatccactagcaatcccactyttacatacaaacacctataggtaagaaatgtagatgaagactagcacagcaatgtt

SEQ ID NO: 165886 - DNA, 465 bp, Homo sapiens
ttcctgcacatggttttttatagttcccaggcagttgggtgtaattccaacagcctttcctttattatctatctaatagattatcctgcttcatatctccgtggcaccagatggcattatctccttagactggctgttgccttgttaatacagagttacatagaaacattaaaggtcaggaggaaaccatatggtctatcctgtcctgcccttttatgcccgggaaaggccaaatcatcatcgtaatgttcccctctacccggagtgcagccaatagctgcatatatttgattctmtttttgactcatgattccatttctattgaaatactataatcaataattccttcaacttctacaacctggtcgttgcttttatattccaagcacgtcattttactgaaaactaagtgataaaacaaattttacttggtttcttaaaataatactgctatttgtttttata

SEQ ID NO: 165887 - DNA, 613 bp, Homo sapiens
aagttattctttactaattatacattatataggttaagaagaaattatgattgaaaaaatcagcaggtgttctatcctacccaagcatcataagtgtaatttaaatctaaatttggagaaaagcttaaccatgatgctttgctttgtgtcaaaatgacacacagaggaaagtttgacttaggagaaattttattcagaagtcaccaagaattacatgcaatcactttcatcagaaggataatttgcatttatgtgggttgtaggtaaaatggatttcttctcagctctttctrgccctggtgttttatgttagataaaagtatccacattttaaacagaatacctatttgtttgctatacacacataggtacctttcttattgcaatattaagtaataaaacatacatctcattttaaccatcccacattaaattttatacatagtcacatgcttcaaaatgacatttcagtcaataacaaaccacatatactaaaatggtcccataagattataattgaactaaaaaatccctgtcacttagtaatattgtagatgtcgtagcagcaattatgctgtagtgcaacacattactcgtgtttgtggtgatactg

SEQ ID NO: 165888 - DNA, 624 bp, Homo sapiens
tagcagaacatacattcattcaaggtttgtagagtaagcctttgacttgtagagtaagagttattgttataggaaaggccaaatgtaactccctaaaactgcctctcaccacccccagaaacaattttcataataaaactatattacactgggggagaattggcgtgaccctcaaaaatttaaggacttcaggaattgtagtatctattatattcatatcatatttaattcacaagtctggcctcttcaaatattagaccaatcatagtaaatgacattgtacaaaagtaaacaagtaggaatttcaattgcacttgctatgccaaattccattatacgtttatagcttgatcagaatttgctgttattctcaaaattagtatgagagacaaatcgtatattaaagacaagattgactaatgcactacaastgttcattttaaaatttgattctccaatatgtggagcagcattttataggaaacatgatggctcattctacagggttgcttggaatgggaagcaatacgataagctcatataattctcagttatgaattgtagaaaaatatgtttcatatgggaattcttcatgtgacaattcttgttgacatatttacatat

SEQ ID NO: 165889 - DNA, 397 bp, Homo sapiens
ccagcaccctgctgctaatactatatgagcaccttgcctctaggtacaaggactatcatggaagaggtgaacacatgagattgtgaggaccaaatttgaaggacagaattagttcagactctcccaatcaaggacaggcacacagatgcctaaacagctarcaaattgggacactttgactcctgggcaattatgtggatccttttcatcccaactataaagaacttcctgcttcccatagaattaaaaaaaaattactgagaggatattgagaaacctagtgacaaagcctcctgggtatagctgttctcagttataagattcatgcaaacagatatctattaagaaatttattggccaccttagaacaaattactaaagagaccacaaaaagcat

SEQ ID NO: 165890 - DNA, 397 bp, Homo sapiens
ccagcaccctgctgctaatactatatgagcaccttgcctctaggtacaaggactatcatggaagaggtgaacacatgagattgtgaggaccaaatttgaaggacagaattagttcagactctcccaatcaaggacaggcacacagatgcctaaacagctagmaaattgggacactttgactcctgggcaattatgtggatccttttcatcccaactataaagaacttcctgcttcccatagaattaaaaaaaaattactgagaggatattgagaaacctagtgacaaagcctcctgggtatagctgttctcagttataagattcatgcaaacagatatctattaagaaatttattggccaccttagaacaaattactaaagagaccacaaaaagcat

SEQ ID NO: 165891 - DNA, 617 bp, Homo sapiens
ctggccatgtgggtaaacaaaaacaaaaaaaaamcacattttcaggtgaggaattcaagcaggctacagaaatgtacgtaagtaaaaagccaaggctaatatctaaaacaatggaggaaagcccttaaaggcatttcagaggccttcatcacaacctcttccattacaggcctggagccctaggagaactgaatggtttcatgggccaggcccagggcactgctcccctgtgtagccccagtacactgctacctacatcttagctgcttcagctccagctgtggctcaaaggggctcaggtacaacttgggctgctgcttcagagtgtgcaagccctaaaccttggtgacttccatgtggtgttaagcctatgggtatacagagggtaagagttgaggcttgggagccaccacccaaatttcagaacacgtatggaaaagcctgcgttcccaggcagaagcctgcagcatgggtggagccctcatgaagaaactctactaaggtagtgcagaggggaaatgtggagttagagaccccacacagagtccccactgtggtactgcttagcagagctgtgagaagggtaccacaatcctccagaccccaggatggtagat

SEQ ID NO: 165892 - DNA, 445 bp, Homo sapiens
ttattcagcttttgaaagttaatgacaattggattctcttatctctactagccctttcatttacctgtcttcatgacagttgttttcttttccagtaacatccataatttattaggatgttttgctaggggtggcaaatatctgagtctcatgccaccaaatatgttactggtggaaggtatctgagctatcagcagkgagtccatatgggtctgcagcaacctcagttcttgccgcctcagaagaaagaatttgactgaggggcataagacagaaaaagagactgaggcaagtttcagagcagaagttgaagtttattttaaaagggtttacaacaggaaagaaaggaaagtatgcttggaagagacccaagggggcaacctgaagaacaagtgcagtgttgaactttgatcctaggactttagaggcttgtgtctttcctagg

SEQ ID NO: 165893 - DNA, 445 bp, Homo sapiens
ttattcagcttttgaaagttaatgacaattggattctcttatctctactagccctttcatttacctgtcttcatgacagttgttttcttttccagtaacatccataatttattaggatgttttgctaggggtggcaaatatctgagtctcatgccaccaaatatgttactggtggaaggtatctgagctatcagcagtgagtccatatgggtctgcagcaacytcagttcttgccgcctcagaagaaagaatttgactgaggggcataagacagaaaaagagactgaggcaagtttcagagcagaagttgaagtttattttaaaagggtttacaacaggaaagaaaggaaagtatgcttggaagagacccaagggggcaacctgaagaacaagtgcagtgttgaactttgatcctaggactttagaggcttgtgtctttcctagg

SEQ ID NO: 165894 - DNA, 445 bp, Homo sapiens
ttattcagcttttgaaagttaatgacaattggattctcttatctctactagccctttcatttacctgtcttcatgacagttgttttcttttccagtaacatccataatttattaggatgttttgctaggggtggcaaatatctgagtctcatgccaccaaatatgttactggtggaaggtatctgagctatcagcagtgagtccatatgggtctgcagcaacctcagttcttgccgcctcagaagaaagaatttgactgaggggcataaracagaaaaagagactgaggcaagtttcagagcagaagttgaagtttattttaaaagggtttacaacaggaaagaaaggaaagtatgcttggaagagacccaagggggcaacctgaagaacaagtgcagtgttgaactttgatcctaggactttagaggcttgtgtctttcctagg

SEQ ID NO: 165895 - DNA, 622 bp, Homo sapiens
ggtccgtttgatattccattacttccccctacttcctcatgtacaaatactgattctrtgtaggttttgtagttgatagtttatcccttcccactcagatattgagttacatgagaatattttcctcctaactattaaattcattttccatgactttttagtttcattgtcctgttttttttttctctcttagctgttctgtttaattttatgggaaaaatataaaaaatttcaagaactgtgctgccacaattgctttcttaccaaaatcctaattccaagaagtttttttttaaagtcctccatctctgttcttgatgttcccgtagtacaaaacagcacttacctcagagtcactattttatcttttccatgtctatacattatatattattaatttgttgagtgacacctaaaacccaagtactctttataagtgctagcagaacaaagaagtaaattgtgatacctatctttgctctcagattgaggaaatatgaggtagatacataaagaaatatttttcatgtgatatgataaatgcacacaggttctttttactttgcctaattaactcctctttcttcaaggcttgtttcagaaaccaattttcctctgaaaa

SEQ ID NO: 165896 - DNA, 622 bp, Homo sapiens
ggtccgtttgatattccattacttccccctacttcctcatgtacaaatactgattctatgtaggttttgtagttgatrgtttatcccttcccactcagatattgagttacatgagaatattttcctcctaactattaaattcattttccatgactttttagtttcattgtcctgttttttttttctctcttagctgttctgtttaattttatgggaaaaatataaaaaatttcaagaactgtgctgccacaattgctttcttaccaaaatcctaattccaagaagtttttttttaaagtcctccatctctgttcttgatgttcccgtagtacaaaacagcacttacctcagagtcactattttatcttttccatgtctatacattatatattattaatttgttgagtgacacctaaaacccaagtactctttataagtgctagcagaacaaagaagtaaattgtgatacctatctttgctctcagattgaggaaatatgaggtagatacataaagaaatatttttcatgtgatatgataaatgcacacaggttctttttactttgcctaattaactcctctttcttcaaggcttgtttcagaaaccaattttcctctgaaaa

SEQ ID NO: 165897 - DNA, 570 bp, Homo sapiens
tcctgtcatttccagtaacgtggaaagaactgcaggttattatgttgaatggaataagctaggcacagaaaaacaaatattacatatgttctcacttatataagggagctgaaaaagtggatctcatggaggtggagagtggaatggtggttaccagaggctgggmagggtagattacatgtttgctttcagaaatatctatgctgttaggtaccctcaagccttaatataattgtgccattttttaatcattagcaattcctttttaagttaattaagttatgttgttacattattttgagttgttagttaaatgactctaatgccacttggggataatataaaatgctacaggaaggcatttcaagacgaaaactgcttctaagaagtaaaacaagagatcacttttaagctacatttgattgccagctctgaatttgctaagttaaatttcatatagctttataatgtagagtaattagagtgtctaaagaaagcaaacacagcaccttcagaattaatgagaacatatcagtatatatcttcatcttaatcttgcaaaggaaggct

SEQ ID NO: 165898 - DNA, 538 bp, Homo sapiens
tgtcctaaacgcacattcttcaggttgtctcccttgatatctctagattggattacatgccttctctaattgcttcagagcatcaacattcaggacttcctcgatcaagtacttacatcataattgcttacttagtagactgtttctacccaacartacaacaaactatatgaggcaaaggaccacaactgtgtagctcacacttagctggctcaatgaatatcaaaaagatgaatttggaaaagaaaaggaattatactgatatgcttataaaataagaatttctaagacacacatgcacttgcctacaaatttataaatgtgtttttgataatgtgataaaaataaatttgccatctaggtttgcctcttttttttttttttactttaagtttcgggatacatgatatatgtatagaacgtgcaggtttgttacataggtaaacatgtgccatggtggtttgctgcacccatcaacccctcacttaggtattaactatttgtgccaatgctcttcctcccctagccaccgccaaca

SEQ ID NO: 165899 - DNA, 538 bp, Homo sapiens
tgtcctaaacgcacattcttcaggttgtctcccttgatatctctagattggattacatgccttctctaattgcttcagagcatcaacattcaggacttcctcgatcaagtacttacatcataattgcttacttagtagactgtttctacccaacaatacaacaaactatatgaggcaaaggaccacaactgtgtagctcacacttagctggctcaatgaatatcaaaaagatgaatttggaaaagaaaaggaattatactgatatgcttataaaataagaatttctaagacacacatgcacttgcctacaaatttataaatgtgtttttgataatgtgataaaaataaatttgccatctaggtttgcctcttttttttttttttactttaagtttcgggatacatgatatatgtatagaacgtgcaggtttgttacataggtaaacatgtgccatggtggtttgctgcacccatcaacccctcactyaggtattaactatttgtgccaatgctcttcctcccctagccaccgccaaca

SEQ ID NO: 165900 - DNA, 580 bp, Homo sapiens
ctgttttaaattacttgtttttatcgtaggggcttgtgatgagtaattttatgtgtcaccttggctaggatacggtgcccagatgtttggtcaaacactagtctacgtgttgctatgaaggtattttgtgtatatagctaacatccgcaatcaattgactttacataaagcagattactcttgataatatgaatgggtgccatccaaccaattgaagccattgagagcaaaacctaaggttttccagaaaaagaattctgcctcgaaactgtgacataggattcctgcctggatttctagcttgccagcctgccatatgtattttagaatcaaaactgcgacatcaactcttgcctgagtttccaaactgttagtcttccccatggatttcaaatttgccagtgttcatatataatcccatataacattgattctgtttctctagggaaccctgactgatatagggctctatactacgataagagattgaattatttragataacttaaaattgtactcacaaaatctcttcttttaattcctcaacttttgatttaatattagctgggactgtctgagc

SEQ ID NO: 165901 - DNA, 691 bp, Homo sapiens
agtactaaatatcttttcaataaaaattctgaagtacctatctgatatggtttggctctgtgtccccatccaaatctcatctcagattggaatcccacatrttgagggagggacttctaatccccatatatggagggagggaggtgattgaatcatggggctggtttcccccatgctgttctcatgatggtgagtgagttctcacgggacctgatggttttataagcatttaacatttcccctgctcacacttctctctcctgccaccaagtgaaaaggtctttgcttccccctttgccttctgccatgactgtaagttccctgaggcctccccagctgtgtagaactgtgagtcagttaaacctctttcctttataaattacacagtctcaagtattgctttatgacagtgtgaaaacagactaatacactatcaatattagttttgtcaattaatattctaaggtaaaatacattgtgtgaattatgctatcatttccctgaaattaatttagccagtaattatgatggtaagactcaatattttattatccctcctcaaattatgattcaatggtgtcattctaaaatgcatactcagatttttacttctgtgatgatttaaaccattgatatgatgacttagaaattgcctttagaagaacaggaatgacacaagagcaggtgtgag

SEQ ID NO: 165902 - DNA, 691 bp, Homo sapiens
agtactaaatatcttttcaataaaaattctgaagtacctatctgatatggtttggctctgtgtccccatccaaatctcatctcagattggaatcccacatgttgagggagggacttctaatccccatrtatggagggagggaggtgattgaatcatggggctggtttcccccatgctgttctcatgatggtgagtgagttctcacgggacctgatggttttataagcatttaacatttcccctgctcacacttctctctcctgccaccaagtgaaaaggtctttgcttccccctttgccttctgccatgactgtaagttccctgaggcctccccagctgtgtagaactgtgagtcagttaaacctctttcctttataaattacacagtctcaagtattgctttatgacagtgtgaaaacagactaatacactatcaatattagttttgtcaattaatattctaaggtaaaatacattgtgtgaattatgctatcatttccctgaaattaatttagccagtaattatgatggtaagactcaatattttattatccctcctcaaattatgattcaatggtgtcattctaaaatgcatactcagatttttacttctgtgatgatttaaaccattgatatgatgacttagaaattgcctttagaagaacaggaatgacacaagagcaggtgtgag

SEQ ID NO: 165903 - DNA, 691 bp, Homo sapiens
agtactaaatatcttttcaataaaaattctgaagtacctatctgatatggtttggctctgtgtccccatccaaatctcatctcagattggaatcccacatgttgagggagggacttctaatccccatatatggagggagggasgtgattgaatcatggggctggtttcccccatgctgttctcatgatggtgagtgagttctcacgggacctgatggttttataagcatttaacatttcccctgctcacacttctctctcctgccaccaagtgaaaaggtctttgcttccccctttgccttctgccatgactgtaagttccctgaggcctccccagctgtgtagaactgtgagtcagttaaacctctttcctttataaattacacagtctcaagtattgctttatgacagtgtgaaaacagactaatacactatcaatattagttttgtcaattaatattctaaggtaaaatacattgtgtgaattatgctatcatttccctgaaattaatttagccagtaattatgatggtaagactcaatattttattatccctcctcaaattatgattcaatggtgtcattctaaaatgcatactcagatttttacttctgtgatgatttaaaccattgatatgatgacttagaaattgcctttagaagaacaggaatgacacaagagcaggtgtgag

SEQ ID NO: 165904 - DNA, 691 bp, Homo sapiens
agtactaaatatcttttcaataaaaattctgaagtacctatctgatatggtttggctctgtgtccccatccaaatctcatctcagattggaatcccacatgttgagggagggacttctaatccccatatatggagggagggaggtgattgaatcatggggctggtttcccccatgctgttctcatgatggtgagtgagttctcacgggacctgatggttttataagcatttaacatttcccctgctcacacttctctctcctgccaccaagtgaaaaggtctttgcttccccctttgccttctgccatgactgtaagttccctgaggcctccccagctgtgtagaactgtgagtcagttaaacctctttcctttataaattacacagtctcaagtattgctttatgacagtgtgaaaacagactaatacactatcaatattagttttgtcaattaatattctaaggtaaaatacattgtgtgaattatkctatcatttccctgaaattaatttagccagtaattatgatggtaagactcaatattttattatccctcctcaaattatgattcaatggtgtcattctaaaatgcatactcagatttttacttctgtgatgatttaaaccattgatatgatgacttagaaattgcctttagaagaacaggaatgacacaagagcaggtgtgag

SEQ ID NO: 165905 - DNA, 308 bp, Homo sapiens
ggtgtctctcttgaaactattcaggttaaagcacgtcgcccaacttggcaattattctttgctcaattaaatgctgtaaaatttaatttgcctaaactttttctgtaacatgacaaatatactaattaccctgatttgattattacacattatatgcatgtracaaaatatcacatgtaccctgtaaataggcacagtaattatgtatcgataaaaaactgagaaaaaaagatgagttttcttttaggacctagagctacccataaaaaaaggcttctttcacatgcaatagccttctcctaggatag

SEQ ID NO: 165906 - DNA, 308 bp, Homo sapiens
ggtgtctctcttgaaactattcaggttaaagcacgtcgcccaacttggcaattattctttgctcaattaaatgctgtaaaatttaatttgcctaaactttttctgtaacatgacaaatatactaattaccctgatttgattattacacattatatgcatgtaacaaaatatcacatgtaccctgtaaataggcacagtaattatgtatcgataaaaaactgagaaaaaaagatgagttttcttttaggacctagagctacccataaaaaaaggcttstttcacatgcaatagccttctcctaggatag

SEQ ID NO: 165907 - DNA, 521 bp, Homo sapiens
gatagtaatttcatattaaagagaatgatttagtagaaattgttggaattatgaatggatagacaagagggatggatttcattagawcatggagaaattcagctcatctaggaggaaggaaggaaacgtgttcacaactgtgctaaacgtctgtagatgtcctgtactgattcattttatttttttctaagagaagtaggcagcaagataaatggctgagtcaaaactaaatacttgatgcttgaaaaaaaaaagaaataaaatagtcaaatagtagactattatggttacaaatggggcacaattgtgtggcaggcatgaacttactagggatttggatgaaaacaggctggggtttgacaaagacagaaaatgacaaagacagtttatgatgaagacagaaaatgtcaagagcactgtgggtttatggaagggttcatgaaatgcagtaataactggtatggccaacagcatataatctcaacagcaaaagaagttgaggacatgaggaggaacagata

SEQ ID NO: 165908 - DNA, 530 bp, Homo sapiens
tattaaagagaatgatttagtagaaattgttggaattatgaatggatagacaagagggatggatttcattagatcatggagaaattcagctcatctaggaggaaggaaggaaacgtgttcacaactgtgctaaacgtctgtagatgtccwgtactgattcattttatttttttctaagagaagtaggcagcaagataaatggctgagtcaaaactaaatacttgatgcttgaaaaaaaaaagaaataaaatagtcaaatagtagactattatggttacaaatggggcacaattgtgtggcaggcatgaacttactagggatttggatgaaaacaggctggggtttgacaaagacagaaaatgacaaagacagtttatgatgaagacagaaaatgtcaagagcactgtgggtttatggaagggttcatgaaatgcagtaataactggtatggccaacagcatataatctcaacagcaaaagaagttgaggacatgaggaggaacagatagcagaataatggtaggaccaat

SEQ ID NO: 165909 - DNA, 631 bp, Homo sapiens
tgcctcctgaccttgtcttgtattggaggaaaaaaaaatggcaaaattcaaaagtcctcacatgatttccacttagtttatgtagaaagatgtctatggtctggaaaaacgcttttcaataatttccatctttttgattcaaacatttaaaggtacatctatggaccatcataactttcatggcatgaattataaatccatctcttgctatctcttaaagaacgtgtatagaatgcaagtgcttgaaagtgacattattggtagtgtagccttgaatttattccacatgataaamgtaacaaaccaatcaaactttatgtcacagtgaatcaatggtaagttgggaaactgcaaacagtagccactgtgctagagtgagtgcaatgaatatattctgagaattttatgtggcaaaatggaacagactcagaatttgtaatgtgaagatgttttgacaatattttcatattttggaatgttataaatctaaagtaacatacagtttttgaaattaaactgttttgattggcagttgtagttacattttgttattaatgtgctcagaacattaaaaatgacatgatgtttctctgtaaatatctcaaaattaacttataatgttttctcttgt

SEQ ID NO: 165910 - DNA, 631 bp, Homo sapiens
tgcctcctgaccttgtcttgtattggaggaaaaaaaaatggcaaaattcaaaagtcctcacatgatttccacttagtttatgtagaaagatgtctatggtctggaaaaacgcttttcaataatttccatctttttgattcaaacatttaaaggtacatctatggaccatcataactttcatggcatgaattataaatccatctcttgctatctcttaaagaacgtgtatagaatgcaagtgcttgaaagtgacattattggtagtgtagccttgaatttattccacatgataaacgtaacaaaccaatcaaactttatgtcacagtgaatcaatggtaagttgggaaactgcaaacagtagccactgtgctagagtgagtgcaatgaatatattctgagaattttatgtggcaaaatggaacagactcrgaatttgtaatgtgaagatgttttgacaatattttcatattttggaatgttataaatctaaagtaacatacagtttttgaaattaaactgttttgattggcagttgtagttacattttgttattaatgtgctcagaacattaaaaatgacatgatgtttctctgtaaatatctcaaaattaacttataatgttttctcttgt

SEQ ID NO: 165911 - DNA, 631 bp, Homo sapiens
tgcctcctgaccttgtcttgtattggaggaaaaaaaaatggcaaaattcaaaagtcctcacatgatttccacttagtttatgtagaaagatgtctatggtctggaaaaacgcttttcaataatttccatctttttgattcaaacatttaaaggtacatctatggaccatcataactttcatggcatgaattataaatccatctcttgctatctcttaaagaacgtgtatagaatgcaagtgcttgaaagtgacattattggtagtgtagccttgaatttattccacatgataaacgtaacaaaccaatcaaactttatgtcacagtgaatcaatggtaagttgggaaactgcaaacagtagccactgtgctagagtgagtgcaatgaatatattctgagaattttatgtggcaaaatggaacagactcagaatttgtaatgtgaagatgttttgacaatattttcatattttggaatgttataaatctaaagtaacatacagtttttkaaattaaactgttttgattggcagttgtagttacattttgttattaatgtgctcagaacattaaaaatgacatgatgtttctctgtaaatatctcaaaattaacttataatgttttctcttgt

SEQ ID NO: 165912 - DNA, 525 bp, Homo sapiens
gaaaatacccatttaagattagtctataaaatacaatcccaaatatatgttgaaatgtgacagtaagacagccagcctacaaatacaaattttgagatgaattaaatttgtataaaaccccccaaaaacrgcattcaaaaacctatatgacgaatatatttttatcctcaaagaaataagggaataatactatcaataagaaaacaagtaattactggggtggggtgtgacctggttcaagtaaaataagcaaggagccataaaaagtgatagattaaaaatactgtaaatacagtaataaaaacagcatggtattggcaaaagaatagacacatagatcaatggaacagaataaaggacccagaaatagatccactcaagtatagttaggtgatctttgccaaagacacaaatgaaatacaatgaagaaaataatcttttcaacaaatgctgctggagcaactgtacatttacttacaaattttaaaaaatgaagctagacacagacccttcacaaaaattaac

SEQ ID NO: 165913 - DNA, 565 bp, Homo sapiens
ttgttatcaacccaggtgaaaacactgtctccacaaaaatctgtacatggatgtttatagaagctttattcacaattgccaaaaacttgaaagcaaccaatatgtccttcagtaagtgactagataaataaactgcggaacatttgatgcatggcaggcaaktcccaaattggggcttggccttggagggttcttggcttcacttaggcaaaaattcaagaacaagctgatggtagaaggaaacagctttattaaggtggcagtgttatagctccgtgactgctcctacagagaggaaccactccctacatggtgtatcaagagcagcagctcaagggcagctctgcagtcagatttatatcaacttttaattacatgcaaactaacgggtctattatgcagaaatttccagaaaaaaaaggggcataacttccagataatcaagtcattgccatggaaaggggaggtaacttctgggtgttgccatagcaatgataaactgatgtggcactggtgggcatgtcttatggagaggtgcttttgcttcctccatttcagctagtcc

SEQ ID NO: 165914 - DNA, 514 bp, Homo sapiens
ttaatacatagtacttttttaaaagtcccctattttctgggaggggrtacactcactttttgtagaattcatagttcaaaatgtatttttaaaataaaccttattacttttattaatatgttgccatattattccttattctttaattactttgagatagatatgtctctacaaatttctccttgtacttctaagagttttagctttacgtacattttaagcactgattttggcacagaaaggtttcctggtgctctgtcaccacacaaacttctagtttttacacattcaaatagtgtccttcacctcagtctcatttgatgctctcattcttaaattctacatagtcctctattaatattacaattcatgtttttctttttgcttgcatttgccttgttacatttttatatgaatttgttttaggtatgtcttaagtaaatagacgataactggactttgctttattaacatacaaatttgaggatctcctctagaataattgagtttatct

SEQ ID NO: 165915 - DNA, 437 bp, Homo sapiens
gttcacttgtgtgcgctcttagacaggaagatgaattcaaatagcctcaaatattcaggaaaataaattcacacaataattatatgtgagttgtgcattgaggaaaaaggagagggtgggtgtatttctatttgggggagaaacagagcagagagagctgctacaataaggagaggcatccaggagtgaggttgggaacagtcagcatgatcagaaagaagttatgggaaacacacgtgctgcaggatatcttgatatttacaatcagaaggaggaccaggaawaatggaaggcttgaaggtattgagaaaataattgcaatgggacatgaagatgttttactcctggtgatttttggagctatataacgagacatacttctctaacatacctacttcctttatagctgcaggcaacatgcttatagttaaatcacc

SEQ ID NO: 165916 - DNA, 619 bp, Homo sapiens
ctatccaaagcctacagtagacttttgattttttgacttctaacctctgagtacaaataatgtctgtacttgaagttttcctttgagtacattagtcagtatagattcaacacttgacacaagggcacatgcatgagagtacatgtgtccactgttaatgttctttgatgacgacagagaaattccatcacatatgatacatttacattctttcattaactactctataccagatgacctccacaattttacaggaagtgctgatctccattttctaattttattctacttttgaaagaactgagaccatattgtcataattaaacattattctggaggttcaggtaaggccttctctctaagaggtgattttcacataaaggagaaaactggccttggttttagaagacttagattcacttctggctctgccactactcgctgggaaacttgagcaaacaacttamtctctcagcttcaacagaatacttacacatcgtgcaggattataatgagtatcaagtgaggtaatgtgggtaaacacatattaaaactagttaaagttctgctcaagtgtaattcaacaatttccacagccagtttaccttggtgaataaac

SEQ ID NO: 165917 - DNA, 619 bp, Homo sapiens
agatctgcatggtcacaaaactatagcatagtggggaaataccatactggggatggccttttcaacaaacgatggtcaatatatatacagaaaaaattaaatgacctctacctcagaaatcaattccacatgaattttaaatatatatgtgaaaaacaaaacaacttagcttctagaagataatatagaatatatttatgaccatgycacaaaaaagtgtttgcaacaagatacaaaacactctaaatacaataaaatattataatgaattttaccattttgacattaagaatttctcttcatcaaaatatttctgtgggtgcctgaatttttaaaatgctccatccccaagacttaattccccaatccctggaacctgtggatgcgatgagatatcgctcctatgattgtgttatggtatatggcatgtttcatttgtcaaaacagagattatccagggctaatcacatgagcccttaaaagcagggaaattttggtggcagaaaaagaaggcataagaagtcagagagatttgaggagtgagaaacactacacacacgattgctgcctttgaacttggagggagtcatctgagatggaatgcgggtggcagtaagga

SEQ ID NO: 165918 - DNA, 480 bp, Homo sapiens
atatttatgaccatgccacawaaaagtgtttgcaacaagatacaaaacactctaaatacaataaaatattataatgaattttaccattttgacattaagaatttctcttcatcaaaatatttctgtgggtgcctgaatttttaaaatgctccatccccaagacttaattccccaatccctggaacctgtggatgcgatgagatatcgctcctatgattgtgttatggtatatggcatgtttcatttgtcaaaacagagattatccagggctaatcacatgagcccttaaaagcagggaaattttggtggcagaaaaagaaggcataagaagtcagagagatttgaggagtgagaaacactacacacacgattgctgcctttgaacttggagggagtcatctgagatggaatgcgggtggcagtaaggaaagggaaactcagatctaccaccacatggagctgtactctaccaacaaccta

SEQ ID NO: 165919 - DNA, 362 bp, Homo sapiens
tattcttagggtatttgtctactatgggactttggaaaggttgactggaatgaatcactgaggggcagagagtgaattgtgttatctagcctccaacatacttcccagtgattccttgtgtattcctgtattacattgtcccatggtttgtctgtgtgcrtggtaaaatattgcagatatgatggtatgccaattctgaaattgggatataaaagtcattttggcttctgccttactctttctctttttggaatacaatttttggggaatccatttgtcatattatgagcagccctatgataagtccatgtggtcaggagctgaacccttttatcaacaaccatgttagtaagcttgggagc

SEQ ID NO: 165920 - DNA, 362 bp, Homo sapiens
tattcttagggtatttgtctactatgggactttggaaaggttgactggaatgaatcactgaggggcagagagtgaattgtgttatctagcctccaacatacttcccagtgattccttgtgtattcctgtattacattgtcccatggtttgtctgtgtgcatggtaaaatattgcagatatgatggtatgccaattctgaaattgggatataaaagtcattttggcttctgccttactcyttctctttttggaatacaatttttggggaatccatttgtcatattatgagcagccctatgataagtccatgtggtcaggagctgaacccttttatcaacaaccatgttagtaagcttgggagc

SEQ ID NO: 165921 - DNA, 474 bp, Homo sapiens
ggtcactggtgctgtatttagtacatttggtgaagtcatgtttttttctggatagtcttcacaattgtggatttttgtctgtctgagtattgaaaagttaagtatttattgtgatcttcatagtctgggcctatttgtacccattctccttgggaaggcattgcaagtattcaaaagaaattgagtgttgttatctaactcttttgtcattgcagtagtatctgcattaggggacacctcaagcccattgatgctgtgaatcttgcagaatmataggggtacatccttggtggtctactaggcagagactcttgtcctcttcccttactttcccccagacaaatggagactctttttccatgctgagctgtctggtgcgggggaaggggtaacacaaacacccctgtggccaccaccactaggactgtgctgggtcagacttgaagccaacataacactgcctctcatccaagg

SEQ ID NO: 165922 - DNA, 314 bp, Homo sapiens
acccaagccacaagacaaactccttcccatccttccctttccttttctcatacagggaactcttttctcattgctaccactaccccagactcagggtgaatacttcttgactatcactgatgtttattcaaggctcaagggtctttcaagtaactagtggtgaatactgctgggtctaggtctctcccttcaggtcagtgggctccaytctggcccaggaaactttcagaaatgacatctaggagccaaggtcttaaataagggaccccagtaatccccttgttgttctacccctctgtgactgagctgatgtt

SEQ ID NO: 165923 - DNA, 363 bp, Homo sapiens
gactggtaattgctacagcagaatcatttcagaagtgctaaagaaatgctacatttaattctagtaaataaaaaaatgtctttttgctagccgttgatatatgagaatgtgggaaagccatgaaactccttgcgtatgaaacaaagtcttattgtamttttcttggggtacataaaaagtaccttaagaaaagggtacagcagcaggtgaaaaaccatttgaaatgaaagattgactagcactgataaaaaagtattaaaacaatgatgtcttttggatttatttttataaactgtctttgaaaatgtttattagtaaaagaatgatagttatgtattaggggtatagtggacagtagatttc

SEQ ID NO: 165924 - DNA, 541 bp, Homo sapiens
aaagaaatgctacatttaattctagtaaataaaaaaatgtctttttgctagccgttgatatatgagaatgtgggaaagccatgaaactccttgcgtatgaaacaaagtcttattgtacttttcttggggtacataaaaagtaccttaagaaaagggtacagcagcaggtgaaaaaccatttgaaatgaaagattgactagcactgataaaaaagtattaaaacaatgatgtcttttggatttatttttataaactgtctttgaaaatgtttattagtaaaagaatgatagttatgtattaggggtatagtggacagtagatttcaaagggaagacagtagaaacagaatgattacattttctaactcatgagaaggaagcaattagccaagycacagatggagaatataaagggagagatagattttagaaacattttaaagtcttggacttgctgactggccacctgtgagaatgagagtagtgaaatttatggcttgaacaatctgtagattttgtgacattaacagatagcaaccaca

SEQ ID NO: 165925 - DNA, 424 bp, Homo sapiens
aaattaaatattgtgctaagagtgaagatattttaaaagtccataacataatattgaataagtgycaagtatgatttaattcttgtagcaggaacaggagaaggaacctcattgtttttattacattataagatatctccagttcttctcaatttggttttgtgttttactaaagagtcatagctttgtgtgagcaagtaattctgattaatttttcagaaaacttctaaaccacgttgatccaatatgtagacacataattcttcaggttcttttgagacacattaaggtgatatgaggggatttttcaaataattttatatgtttctgagtaaagtagctaagtcctcaagtaattgattttaaatgtgtgacagtctctatttattgtatgctgtgatataatacgaaatttttggtcatt

SEQ ID NO: 165926 - DNA, 518 bp, Homo sapiens
tttctgccaatatcaactgcaaacagtttcagggttttatttttaaaggaaaaaatataatttcacttgcaattttgcaatggcagctttgtagtgctccacatagcctgttttatatatactggtgagtcttgattttaaatttaagcagttaaacagcttgtggatctttcggttgcattctatgagaatccggataattcagtattattttactacctattctatagacacattcrttctgtttttcatattctgttggtaaattagctggatttctaactagacaccatctccaaaaggcaggttgacaaatttacttgatgtatgatgagtaggcattttatagatatgccatattctacttcatatatcaagaagtgtcagaatgaaaatttctccaaaggctctgtgagaagaaaaacagatgctgacccagagatctgctttcctaatgcaaatgtaaagcaatttgaagacgtccctttagatgtccattttttaaaaaaccttgcagc

SEQ ID NO: 165927 - DNA, 477 bp, Homo sapiens
tgatcctttttgagctaatttttgaatatattgaggtccaactttattgttcagtatgtgtatatctaattttttcagcatcatttattgaaagactgtcctttccatatcgaatttccttggaacttttaatcaaaaaccatttgatcatatacatgagggttcctttctgggctctgtattctattccattggtctatatgtctgcctttatgccagttctgtactgactgttttgattataggagttttgtagtcactcttaaaaatcagcaaatatctttcagcgatattctcctttactcaagattgttttggctattaagggtccttagagatcacatacattttaagatgtttttctcctttttacaaaaagaaaagtcagtggaattttgatagggattgcattgaaaytgtagatgttttgggtagtattgatatcttaacaatattacatctttgaacacaggatgc

SEQ ID NO: 165928 - DNA, 559 bp, Homo sapiens
gtgtaggctcctattctgccatcttgctctgccttaatttttattttagattcagggtgtacatatgcagtttcattgcatgggtatattgcctaatgctgatatttgagttatgaataatcccatcacccagatagtgagcatagtacccaatatctgctagaagctttattttttttagatatgcaggtcagtggccatttttttgagaaattgtatcttctgacatttagttctatctttctatttgctgttgytgcttttagaaagaatttagttgatacattgtctctttttatatattttgccttttattctagtttccttcaaaatattctccttgtattagaaattctataggtttaccaaaatatctttacatgttaattttttatttcaccacatcctgtgtttttgtatctattaatttatatctttcatcatattttgacaattctaatcattgtatcatcaaatattccatttcctgcattttctttagtcagtctttcttacattatgatttgatttgcttcaggtatttttctatacttatttt

SEQ ID NO: 165929 - DNA, 599 bp, Homo sapiens
aggttaccagcaacagggaggataggccagtgtgtaggtgagtgtggataattgctaccctctaggcatcactgttacatcagagaaagctgcattggcacccaggggtggcaactgccaagttcactgggatgcagggatataaggatgaaagaaaaaaaggggatgccttttttttttatctccctcacataccctggrtatttgctgggaagagaaagaaatgaagggacgtcttttttccctcttccagatgggtaaccaactatcttcagtctgtgcttctctcaagtgcatcctgaatcactgagactccacggaaaaaaaaaagccttcttttccccattttctcctctgtcctctcttcacagctgggtaatcacatcttcataccatagtacactcccctgggatgcatccccaaactaggaaaggtttaatttccccaaaccttaaaatctttggcataaaaatgaactgggaagaaattacagatctaacagagcaaatctcttgaggatggacaacttttacagtaggcgaataaactctttgtctgctccccctttacaggacgccagggtcaagagggctccata

SEQ ID NO: 165930 - DNA, 599 bp, Homo sapiens
aggttaccagcaacagggaggataggccagtgtgtaggtgagtgtggataattgctaccctctaggcatcactgttacatcagagaaagctgcattggcacccaggggtggcaactgccaagttcactgggatgcagggatataaggatgaaagaaaaaaaggggatgccttttttttttatctccctcacataccctgggtatttgctgggaagagaaagaaatgaagggacgtcttttttccctcttccagatgggtaaccaactatcttcagtctgtgcttctctcaagtgcatcctgaatcactgagactccackgaaaaaaaaaagccttcttttccccattttctcctctgtcctctcttcacagctgggtaatcacatcttcataccatagtacactcccctgggatgcatccccaaactaggaaaggtttaatttccccaaaccttaaaatctttggcataaaaatgaactgggaagaaattacagatctaacagagcaaatctcttgaggatggacaacttttacagtaggcgaataaactctttgtctgctccccctttacaggacgccagggtcaagagggctccata

SEQ ID NO: 165931 - DNA, 599 bp, Homo sapiens
aggttaccagcaacagggaggataggccagtgtgtaggtgagtgtggataattgctaccctctaggcatcactgttacatcagagaaagctgcattggcacccaggggtggcaactgccaagttcactgggatgcagggatataaggatgaaagaaaaaaaggggatgccttttttttttatctccctcacataccctgggtatttgctgggaagagaaagaaatgaagggacgtcttttttccctcttccagatgggtaaccaactatcttcagtctgtgcttctctcaagtgcatcctgaatcactgagactccacggaaaaaaaaaagccttcttttccccattttctcctctgtcctctcttcacagctgggtaatcacatcttcataccatagkacactcccctgggatgcatccccaaactaggaaaggtttaatttccccaaaccttaaaatctttggcataaaaatgaactgggaagaaattacagatctaacagagcaaatctcttgaggatggacaacttttacagtaggcgaataaactctttgtctgctccccctttacaggacgccagggtcaagagggctccata

SEQ ID NO: 165932 - DNA, 564 bp, Homo sapiens
aaggattttgccttgttttaaaatttttgagtcatcattttggctaaataaatgacttttgtaatttggaattctatttcataatatcaagtgttttaaacctctaacttatttaatagtcttcccaaaatcaaatttcagcttcaaatgttgtctttcctggcccctaaattttggttgctaaagagggcccctggagaatccaaaagagaggtaaacaggattatttgacatgtttagtgaaatgggattgcaaaataaaaataaagttgaatcctctttagattatattataattaayaatattaatacattttccaaaattatatgggatttctaaaattctaatgtctgaagatacagtatcaatcatgaagtaattatgctaagttattataaaccccacaaattaccaaatttttttgccaattgtaattttgaatgtaactaccctggacattttgtcattcatagacaattgttgtcttgctttgattatcttcaaaatatggtttataatcaactatatgattttgataggtgcttataaaagcaggtttctaa

SEQ ID NO: 165933 - DNA, 536 bp, Homo sapiens
ttggataatctctatatttcagagttagcaaataggtgcaccagttaggatttgtcagagaatcagagtcactatgagtaacatagagtaagaggtttatagtacgaattaggcaaaaacaacaacaacaacaacaamaaaaaaaaaaactgtggaagctagttaaaagctctatgtaaaattgacttatgtgtctaatatgggctggaagttaacaagcttgtagttgaatagaagaaatagacatagagtgaaggagatcagggaaaacctgaaacccccagggttttttgggaacccatgcattcaaactggaaaccacatttgtcttccactaactcaaatttcaataatgtcagtgatctgcagaagttggtactcttcacaatgggtttacatacacacctgactcagagtttggaaataattgaatgatatgacccagtgggaactgggggaactgcaggtctggctgctgcttcatgacagtgagttgaggcagtggatcagcagctgtatgtgtgcactgcaacagc

SEQ ID NO: 165934 - DNA, 371 bp, Homo sapiens
ctctgtgaacagggtgaactattttttcccctttttccttgaactgtggtgacatcaatttaccctaaagttttgcrtttcaattttagaattttgacataattgcagattacagaaaagttgctaggatccaacaaagaacatttttactatacggtatttgctttattctctctttctttctctctattgttttttcggaactgtttgggagaaagttgctggtatgaatcctgttactcctaaatacttcaaagtgtgttttcctaaggcaagcacattctcttacataaccacaacacactgattaaaatcaggaatttaatattaaaacaatactattatctcatttacagaccttcttcagattt

SEQ ID NO: 165935 - DNA, 366 bp, Homo sapiens
tggcgtgtgccctcaaggagagtctctgtgaacagggtgaactattttttcccctttttccttgaactgtggtgacatcaatttaccctaaagttttgcgtttcaattttagaattttgacataattkcagattacagaaaagttgctaggatccaacaaagaacatttttactatacggtatttgctttattctctctttctttctctctattgttttttcggaactgtttgggagaaagttgctggtatgaatcctgttactcctaaatacttcaaagtgtgttttcctaaggcaagcacattctcttacataaccacaacacactgattaaaatcaggaatttaatattaaaacaatactatt

SEQ ID NO: 165936 - DNA, 371 bp, Homo sapiens
ctctgtgaacagggtgaactattttttcccctttttccttgaactgtggtgacatcaatttaccctaaagttttgcgtttcaattttagaattttgacataattgcagattacagaaaagttgctaggatccaacaaagaacatttttactatacggtatttgctttattctctctttctttctctctattgttttttcggaactgtttgggagaaagttgctggyatgaatcctgttactcctaaatacttcaaagtgtgttttcctaaggcaagcacattctcttacataaccacaacacactgattaaaatcaggaatttaatattaaaacaatactattatctcatttacagaccttcttcagattt

SEQ ID NO: 165937 - DNA, 544 bp, Homo sapiens
tgactggctgaaatgaagtacatctatcagactttcctagtgttcagatgagcgaatggatgaaattaaagaagatattaatgaatatgtttcctgtttgaaataaagagtgttttaatgagtgaaatagtttaagtgaaaattttttaatatcatttaaattcttaaactaaggttccatttaattatagaaatgcargtaacttttactttaatgtacctgttgaagtaaccatcatctcgtggtagccaaagttacttctaaaatgtatttgacaaattttattagtgtgataatttgtttcaagatattagcatgtttgttaccttgaaacactttattctgattatataacacatatgattaattttccattggctttagcatttcaactgctaagttgaaataattcctactgaattatgaactttgtgaataaaatcagtaaatgttctggtgaagaggcaaattggctatacagttacaggataactttgtaaacctgctgagctaccatgaatcattatgttctatttgctgtac

SEQ ID NO: 165938 - DNA, 580 bp, Homo sapiens
aaggactcaattttttttaaagattgatctccctctattcaataacccatgtgtgaaatttcaattatacaaaactagagggaaaagtatgtgtttagaacatggtgtagggaaacactgtgagcaaagctgctgattgggtctgaaactgcaaaatgggtgtgacagaatctactcggagccatgtgacctccagggtgataaggatacaatgtgcctctcaccctgtgcccctcctacttggaaagctttcagtggttggctgccaagcagagcgcagggtcctctgggacctggcctgygtgcttcctcagcgtggtttctcgtccgccttctgtctgtgctccagcagcactgccctgtttgctctcccctgcacacatgacaccgtttctcacaccccagtccctgtgctcatgcttctcacctttgtagaacacctcagtgattttctggtttcatactataacaaaccccacaggccagcttttcacatagttgttaccagcacttggccaacagttgttttttcatcagtgggtggagcagcttttcttgcccccaaaaaacagtcaaccac

SEQ ID NO: 165939 - DNA, 380 bp, Homo sapiens
ttaatttgatccccagtggaaagatgagtcacagagggagtctctgtgcctctctcatgtactggagtttcattcacttttgtcagccagacrttgtcacagggcctgtttgcccatgttctccttggaatctggagtgtccttcatgattccaagggacttccattttccctatgaaatgaaagctcacagagttgatcttttatgcactatcttgctatttccaagtggctgaggcatgctaaatgcttctaatccatcatcttgggggaaaaaactagatatttttagttttgttgaagtttttatgtttttttgttctttattttattaactttttattgttattaattcctcctttcttgttgctttcaattggt

SEQ ID NO: 165940 - DNA, 381 bp, Homo sapiens
gagcttgaaaacttgtctttcaaactaacacagtcrgacaaaaataaagaaaaaagaatttaagaaataaggcctttgagaaatatgggattatgtaaaatgaccaaactatgaattatttggattcccaagagagaaggaatggaaaacttttaagggaataattcaaatcaatttccctaatatttttagggaggtaggcatgtagatacaagaaatccagaaaatacttgtgagataccatgcaaaattaacatcaccaaagcatactgtcactagattgtctaaagtcaatgcttaaaaaaaaaatcaggagagattgggggcctattttctgcattcttaaagaaaagaaattccaaccaagaatttcatatcctg

SEQ ID NO: 165941 - DNA, 521 bp, Homo sapiens
gtgcaaatttttcttgttataaggacaccagtaatattggagtagggcgcatcttacttcaatataatgtcatcttaagtaattacatctgcagtagctctattttcaaataagttcacatactgtggtatggtagacaaggacatgaatatatgaatttggagagtaaacaacacaatgcgtaacaggaattaagataacttgttcatgtgttacacaaaatcaatcatccacaacatacataggacaaaaaaatcaaattagagggaggaactmtacatatcaaagttatatagatttaatacatcttaataatttattcatacttgcattccagaaaacctattgaataatatcaacaatgtaaaggcacaatgcaggataaatgcttattcaacatttatttagtgtggtagaaattaactgatgtccattaatggatgaatggattaaaactatgtagtatatatatacaattggaatactatttagcctttttttttttttttttttttactgtt

SEQ ID NO: 165942 - DNA, 622 bp, Homo sapiens
ttagaatgaacattagttcgaagaactaaaccaaaagacaaggtaggggattattttaagagggaaaaaaagaaaaatcagcacctaactgctctaaatgaattcctagcctatagtaaatacatatatgtatgtgtaggtatatataattattttctaacctacagaactgtgagaacctgcaaaatagttaagtgaactgttactaatcagagaagaactatggtgaatgagagaggaactaaaagatgaagacaatttagtcatcgttcagtatgcatgggggattggttccaagaccccttaccaaatctgcagatgctcaattaycttatataaagtgatgtagtatttcaaataacctacacacatcctcttgtatattttaaatcatctctcgattacttataatacctaacacaatgcctacacgtcatttgcatggattcaacatagtacttggtgtgtggcaaattgaagttttgctttttgaaactctatggaattttttctgaatacttttgatccatgattggctgaatccatggacgtgaaactcagggataaggagggccacctgcactctcccagtgttctaaaaagaagatggatcataaagatc

SEQ ID NO: 165943 - DNA, 437 bp, Homo sapiens
gaatgacagctggtgggctgcaaagactgaaaagacccagcacattgctcagtgacattaaagcaatgacacctacacatgtgtgagattgccgcacgccctactcaatccacaggtagaacaaaaacgatgcgagggtggatgaaacaaatgcttcaagaaccttctaatgccataaataaaaatcactccatgcagtaagtacctcctaatgcaacattttayctcaagatgctactactactaattagaatcatgaaattagctccctagacctgctggtataccgtgaccactgccatgcaaggtgtgatgggcatacagatgaatataagaaaactccacgaagacttcaaaaccactccagcgtttttaaaagttcagtttccaaaatctgaacagcctgatcttatcccagtcactcaccagatgcagat

SEQ ID NO: 165944 - DNA, 607 bp, Homo sapiens
tgacctataaagaaatctactaagttcagactgaaggccttcgtattaaggcttagttaaaatgaaaatatataggagagtggttcaccaaccacagggataaattccaccgggaaattcacttaataagttcaagggggattcaatttggtacctggggaaattaagagagttttttcttttgctaattgtattcacttggaagtcaacaaaaggccaactcatgtaatgattctcttactgaacgttaaacgaagagacagaaatcagttgccatctggggttaaattgagccaacaattcagaactttccaacctctacaagatcaaattctggcttttgaaaataatttccatctgcaaagtacaaatcacattatcacctaataaaaggaaagtctaaatgcagagacaaataaggatagatgagaactataaaataaacagcaatcacgaatgctggacacaatgcacttgatctacagtactatggtgtttttctaatccccagagcgtcaagtgataatcttcccaccyggcagtggccaccagcagcatcctaaagctagaacccagcgcccatcagagcggccaccgagaaacacaa

SEQ ID NO: 165945 - DNA, 582 bp, Homo sapiens
tggtaggcctggcgtggcatcaaaacggctcacaaatgctgagcactggagtccaagctagggttgggaaccagcatcttgtcctgccaagagcaaggcaggcccccccatcctggagctctataagctgctgsgacaggcactcagggtcagggaagtggtgacagggtgtgcatgcctcatctttagagtgctaagtcagagctcttcaaatgttgacgttaaagatttttgggactaaatctatgtgggattgaggaagggacacgggaaaaagacggtctgtagaagctggaagatttgttttatacaacgttagctttacttcaggaccagaattaaccacagggacctaggtcaattacagaagctgaactggtgtaggctggcatcagaacaaaccatctctttgactcaaccctgcataccattgtttgcttgtttcactcacaaaggccaatcttgtactctaaacaggtctggcccactaaagtggtgctctggtccagaacccaggctggctttggccttcttagtgacattctgagctgtcactcaactaatctgatattattaagcaca

SEQ ID NO: 165946 - DNA, 557 bp, Homo sapiens
ggctatttagaaaataattacggatttagagactttcctcataccatatacctaattaagttaaacaaaaaataaagtagaagaaaatgaaggtggttattgatcccagtctctggatctcaggatagaaaacattttatacacttaaaagcaatgggaaaaaaatcccaacatttatgrttagtaaatttgacaatataagcattttatatctctcctttaataaacattaactgaatttaaaagactttaaaaagtagcattgaaatttattagtcgcaaatatgacagaaaaaaatagtattgtttatacgtaaatatctagtatttttctttaagaaaatcaataagaaacaaaacaaaatggaaaaatctagcctctatagcatctagagcaaactattaaaaggttattgcagagacggctaattgtttcccaatattcatcctctcctacttctttggtaatggaaccactaatttttagctgggcatatggttgtccaaaataaaatttacattttagtcttccttatagagacacatggccataggac

SEQ ID NO: 165947 - DNA, 591 bp, Homo sapiens
ctctgaaaaacaaatcaatgtaaaatctatctatgcctaatgaatttttttccaaaaaccttaaatggttaaggtgaacaagaggttaggaacatgattcctatatggcggaagtaaatgtataactaatgttttaacctaaacagaacgaaaacttcatctagcacatagtaaatagtaatttttttggttgatgataatgaaatggagaaaagatagaaaaatcaagttgacatagtagaaatattattaattcatttagtttatttatttwttttttctagagacaaggctttactctgttgcccaggctggagtgcagtggtgaaattatacctcactgcagccttgaactcctgggctcaagtgatcctcattctatagcctcctgaatagtttccattctatttaaaatatataactagatatctcacaaatgcttcaaactcatcagttttcacctataccatatttactccttctttgaaattcagtttcttgcaaaatgtcatccccattctctctatcatacctgacaggaacttaggagtcattattaacttctcaaattcacacttccagtcaccaaat

SEQ ID NO: 165948 - DNA, 566 bp, Homo sapiens
atatacattgatgtttaagttcagtcttaaaatctgttctttagctcgagaatttagttggttgtatttagactgatttgtaatataattggattcacttttatatgttgttttcctaccgattctaagtattctttttcttatttcttgccttctttggaattaattttgtctcatgatacatttttcttgctaccccagtatttktaaggtatacacttttttttcaactgtggtagggattaccatggcaattacaaaatacacattttcaacattgaactctaatcagtatcattgctttcttccaagatcatataaaaccaacagaatgatttaatttgctctactcataacaacttacttctgttcaatattttaattctacatatataactctgttaaacattacattatatgttttactcagtaactagtcatttagatatactcatatatttatcactttgtgtactttctttcttccattaattttaccccttcatcggggtcctctttctttttgtctagagtagtggtccccaaccttttggcatcagggactg

SEQ ID NO: 165949 - DNA, 636 bp, Homo sapiens
gtatctgcaacagatattttttaaaatgtatcaattccagagatagttgaagccttatgttcaagacattagtcatttctttgtcatctcttccttcccagtgttaatcaccatcttgaaattaatgtttctgttgttcgtgcatgtgtacacatttactacgtatgagcatatacaaaaataagaatgtgtagatgtgaaagttttcattgttataaaaatatattcttatattcattgcattctacaaattgattttatatcctaattatttttatatttttctatattaacacataatcctagttttgtttatttttatacaagtatttgtagatatttatgaggtaaatttaatctcttgtcagatgaatagtttgcaaatgtgctcaccrgtttaacaggttgcttctttactctattgattttttcctttgctgagcagaagctctttggtttaatttaatatagtcccattgactatttttgtttatgttgcatgtgcttttgaggttttagccataaaatctttgcctagatcaatgaactagtgtttcccctgcattttcttttaatagtttcatatttttttgtcttacatttaagtctttaatccatcttgagtaaatttttata

SEQ ID NO: 165950 - DNA, 554 bp, Homo sapiens
ctaatgtttctttgttaattttctctctacctaatctgtctaatgctgagagcagagtgttgaagttcccaactattgttgtacttgagtctagctatcccttatatgtgataatgattgctttatatatctgagtgctccactattgggtgcacatatgtctagaattcttatatcatctcactgaattgatacatttgtcattatataatgacctttttgtcttcttttacttttttgacttaaaaactgttttatctaatgtaggtatagccattcctactggattttggtttctgtttacatgaaatatctttcccatcccaacattttcagtctgtatatttctttacaagtaagataattttcttgtaggcagcatctagttaggttttttttgttttgttttgttttgttttgttttttaatggagtctccctcygtcacccaggctggagttcagtggcaccatcttggctcactgcaacctctgcctcccgggttcaagcgattattctgcctcagcctcccaagtagctggtactacaggcaca

SEQ ID NO: 165951 - DNA, 594 bp, Homo sapiens
tgagtcatttttctcatttgtgtgttctttgtaccagtgggttttatagttttgtgtgttttcatgatggtaagtatcattcttcacttattttgtgtaggactcccttaagcatttcctctaggcctatcttagtgatgatgaattcctttaacttttgtttttctaggaaatactttatttcttcttcatttattaaggatagcttttctggctgtagtatcttggctagcaggtgtctttttgtttgttcatttttgtttttgttttttttttccagcacattaaatatatcatcttattatccgttgacctgtaaagtgtctgctgaagaattcattgttcattttatggcagttctgctacaagtaactacaaggctttctcttgctgtttttagaattctttatttgtctttgacctttcacagtttgaccatamtgtgctatggagaagaccttaaattgtatctatctggagatctttgagctttcttatctgtatgtctaaatctcttgctagaatttttttctagtgattattttgttaaattgctttctattactttgatatttctcttcactttctgggaca

SEQ ID NO: 165952 - DNA, 573 bp, Homo sapiens
aagacttaggcttatataattagtaaagatgatttgatagacatatacaaaaatagtgaactcaaattttcactcagaaaatgtaaacttaaactatacttcaaggaaaatttttagcattatatgagaaaagaaagactaagaatcagtgatctaaacattcatcccaagaagtcaagaaaagaaatcttagcaaattaaacaaagaaaacaaagtgaaagaaacaaaataaaactaaaggcagcaatctgtgaaaaagaaccaaactctcaaaagaaagaatagactaataagatgtataacttgctgggaagactgatcaattatattgttttcttagagaagattgacttttgcttgtggcctgaaacttttctggggctaaattatcctcagtccaattacggactgagatggttaaratactgactctattccttgtaactactagcttatttctgcttcactctcattcctggattggagtgctttggggctcccatcagaagcctacagttttttatttttttatttttttaaaccagaggcccatgcttctcagacccctaact

SEQ ID NO: 165953 - DNA, 627 bp, Homo sapiens
tctgcatttctactgtagtcttctccatctcatgcgatagtgtgccaggttatcrctgcccttgttgaaaaccagaggggtctattttcactgatgttctattgtttcatctaaatgactagaagggagctgaggccctcaactccagtcatctacacaaaattgtatggtaaagtgactatgttccctagagctatcagcctctctgttgattaaaaggaaggccctgtgttctgcaatttagaaatgttaataaactaagggtttaaaagctagataaaatgtcatgattaaggttttatgttaagattttaatttccactctcctatgcaattggctttctctttaaaatttttttttctgcttaaactcctgattacaacttgttttcttaaaattttatgattctcaaaagcccactaaaattaagtatgcgctaatgacattttgcctgtaaacatagatgttatttatagaatcttaaaacgcaggacaatacatcatatagataaatatgttacacactgcatatatttgacaaatatatggaagaactaaatctgtattgctttgaagcatcagtatatccagaattaatacaaaagtgataacatttatgtattgag

SEQ ID NO: 165954 - DNA, 598 bp, Homo sapiens
caattgtttactaaattttaaatcatctgaattttgaatttggaaatttcaagccaaaagaactgactaaatayaatttgccttttttggatatttttgttttgctcatatttttttttctaagtagactgtttcatgcccaattttcttcattcaacatattttacaaaaagcatatggaaaagctgttttatatctcccatcaggcatgtggaggttggtgaaaaaacagatcataagaaaacatttaaaaattacatgaaatacattcaagatgtgaaagagaaaccaacggcagattttgcatggcctggcatttaggagtgacaaaaacattggctccaaagttataattacacttttgctgaaattactaaaaataaattaaattgtatagcaatatttattttctgctttctataattttcatggtccaaaaaaaatattcaattaccttttgagataggttactgatttttaatatattttaggtgtctgctaatatttaaatgaaacagaaaaagcaaatacagttcttctggaccaacagctatataacaatcatatcatttggattagaaactgaaaaccggtggga

SEQ ID NO: 165955 - DNA, 600 bp, Homo sapiens
gactggtagactctgcttctaggccagccatctctgcacaaaaagtgactttcatctctgtacctaagctttcttttgtagttgtgattttcatgccagaagaagaggatacagtggaaagttacaacacacccatttgtctttaagttgaaaatgaccaagtaattgtataatcacttttgttgtgtcccattggcaggagcttagttgcatagacacacctgaatagaagggaggytaagatacatccagctaaaacccagagaggatggggtgagtgtgaacatggacagggagcatagtgcttactactaaaaggaaaatggtgagaatgaatcctgggggacagtttaactgtatctcctacaggtgggagtataccaggtgaactaaagcagttccaatgttagtgaaaataacaagcctgagtagacttaatggatcctttaaagcacttctgagggaggctactcacctaaagaggactgcaatattttaaatttaacattccagaaataagttaatggttcaacttatttttaaagaaaagtttaagaaaagacagaataaactttctttattttcctgggtggaaaggtt

SEQ ID NO: 165956 - DNA, 560 bp, Homo sapiens
cctttatgcatgcggttactaaatgagtactgcaaacagctaacattatcattttgtttaagaaaaaaaaaaratgctagtcagcttcattgtccaactcctagtagtttgtacgctactctaaagtactttgatacaggctgaacagcggagtataatagttcctggtttacatcttaagcaggttaataggtcttcagacttcatttagcaccacattttcagaccatcgtaagttttaaacttacttccatgctgacagcttaatgttcaaataagcaaggagttaacttacttttaacttctaaaccttaggacctctcacttagagctataaaattgacatttcagcatggatatttttcatgatgtatctttcaaacttgcacatactacaatttctaaaacagctgtccatgtttacattaaagacctttcaaaacattttttttctttaggatgccatttgtgcagaaaggaaaataagcaaatcaattgcttttttccttccttccttccttttcctcccattctcctctttctgatttttttctttcctt

SEQ ID NO: 165957 - DNA, 560 bp, Homo sapiens
cctttatgcatgcggttactaaatgagtactgcaaacagctaacattatcattttgtttaagaaaaaaaaaagatgctagtcagcttcattgtccaactcctagtagtttgtacgctactctaaagtactttgatacakgctgaacagcggagtataatagttcctggtttacatcttaagcaggttaataggtcttcagacttcatttagcaccacattttcagaccatcgtaagttttaaacttacttccatgctgacagcttaatgttcaaataagcaaggagttaacttacttttaacttctaaaccttaggacctctcacttagagctataaaattgacatttcagcatggatatttttcatgatgtatctttcaaacttgcacatactacaatttctaaaacagctgtccatgtttacattaaagacctttcaaaacattttttttctttaggatgccatttgtgcagaaaggaaaataagcaaatcaattgcttttttccttccttccttccttttcctcccattctcctctttctgatttttttctttcctt

SEQ ID NO: 165958 - DNA, 609 bp, Homo sapiens
gaattctactaaacatttaaaggaaaaactaataaatgagatattccatgtttatggatcagaagacaatattgtcaaggtgacagttctttccaactggatatttagattaaatacaactccaatcaaaatcccagcaaattatttcacagaaattgacaaaattgatcctaaagtttatatagatgcaaaagactcagagcaatcaatacaatattgaaatagaacaaagttgaaaaactgacactacctractttcatacttactatgtacatatagtaagagaatgtagtattaccaaaatgataaacaagtcaatagaacagaatatatagtccagaaataaatccatataaatacagtccaccgatctttgataaaggagggaagacaacacatgcagcaaagacattctttttaacaaatgatactcgaacaactagacattcacatgcaaagaaaacagatctagacacagaccttacattcattacaaaaaattaactcaaaatggactgtaaaccaaaatgtaaaagtcctagcgatagcataggaaaaacatctagataaacttggatatcaatatgacttttttcagatacaacact

SEQ ID NO: 165959 - DNA, 530 bp, Homo sapiens
tggggaaaatttcatggatagtagctgaaaatgcagaaatagaaaatattctctaaataatgtctctgaaatagtaggaagagaggtacctagagcataggatagattaccgttttttttctttcttttttcttttctttctttcttttttttttttttttagatggagtctccctctgtcacccagactggagtgcaatggtgtgatcttggctcactgcaacctccgcctcccgagttcaagtgattctcctgtctcagcctcctgagtagctgggattacaggcgcctgccatcatgtgccggctaattttggtatttttagtagagatgtggtttcaccatatcggccaggttggtctcaaactcctgacctcaggtgatcagcccgcctctgcatcccaaactgctgggattacaggcgtgaggccaccacacccagcccsgattacccttaagtaggaggtacattctcttccattgaaaaagagagagagcagagaatagatgcacaggcaagcagatctgta

SEQ ID NO: 165960 - DNA, 488 bp, Homo sapiens
ataactgcaacagtcttttgcttgagttcaaacataccaattakgtttaggatattaattttggatagatgtcattagatgaggtattgaatgtttcactgtcttgttagaagtaagctaaattagaaataacttggaaagacagaaatacgtataagctgaatcgtaataatagtcaaatttagtgaagaaggcctgaaagtgaaaaatatgattattaaacaagtattattatatattaaaatcaaaatactttctattgtaagccatctctaaatggaaagcaattcttaattagagggaaccattctgctaataattaatctttaatgagaatatacattaaatttaattctgtaatttatctgtgaacatctctgaatgttttcacagttatgatgaaatccatcactatattaaagttatgtgggggacagatagatagatctcattaaaaagtgtgcattcaaaaaaaacttctccacagt

SEQ ID NO: 165961 - DNA, 488 bp, Homo sapiens
ataactgcaacagtcttttgcttgagttcaaacataccaattaggtttaggatattaattttggatagatgtcattagatgaggtattgaatgtttcactgtcttgttagaagtaagctaaattagaaataacttggaaagacagaaatacgtataagctgaatcgtaataatagtcaaatttagtgaagaaggcctgaaagtgaaaaatatgattattaaacaagtattattatatattaaaatcaaaatastttctattgtaagccatctctaaatggaaagcaattcttaattagagggaaccattctgctaataattaatctttaatgagaatatacattaaatttaattctgtaatttatctgtgaacatctctgaatgttttcacagttatgatgaaatccatcactatattaaagttatgtgggggacagatagatagatctcattaaaaagtgtgcattcaaaaaaaacttctccacagt

SEQ ID NO: 165962 - DNA, 485 bp, Homo sapiens
tgcaacccacaaaactgatataaagctattaggtttttgtcatacctctataaatgtattaggctgttcttactgtaaagaaatacatgaggctagcctggcatggtggtccatgcctgtcatcccagcactttgggaggcctaggtggacagawcagctgaggttgggagttcgagaccagcctgaccaacgtggaaaaaccctgtctctactaaaaatacaaaattagccaggcatggtggtgcatgcctgtaatcccagctacttgggaggctgaggcaggaaaatcacttgaatccaggaggtggaggttgtggtgagccgagatcacaccgttgcactccactgcagcctggatgacagggcgaaactccatctaaaaaaaaaaaaaaagaaagaaagaaaagaaaagaaaaagaaatacctgaggctgggtaatttataaagaaaagaggtttaattagctcacagtttctccggctgg

SEQ ID NO: 165963 - DNA, 199 bp, Homo sapiens
atggctcgcaattagcttctggattcagcaaataaaagtttygctaccaattgtctgtgagtgagaagatggagccggcaaaatgtattttattggtttcagggaactccaggttgtttttctcactttgcttgaccttttaaattatttctctctgaaaatctctgttggttcttatcgaccttgataaagccaggca

SEQ ID NO: 165964 - DNA, 524 bp, Homo sapiens
tagctatctaattttcagcaaattgcatccagtttgacattgtaaagcccaaataaaaggattaaaataagcataacctggttatccttctattgtctcagagagtactaaagcatatatattatttcaataacaataaaaaatctgaatacttacctttggtggaacttacccagcactgtcttatcccattgggattacatattgaaaattaagtgccagtgacaagtcacctgcacagagaatttttgcctttggcattgacaaaactttgaatagtaatgtgaccatgatctcagagttaaaccctagtttttagttgatagaacctgtgaatattacttcctctgttttgcaccttctgtgtgtaataaaatatagcaaaagtgttaatacstatggaatttattgaacattctaaagaaccttttatattgtccctatgtttctagaaagtctgatggcatggtaattttggagagcattgtgtgcactattagtgcagtagattttaagtataaaag

SEQ ID NO: 165965 - DNA, 524 bp, Homo sapiens
tagctatctaattttcagcaaattgcatccagtttgacattgtaaagcccaaataaaaggattaaaataagcataacctggttatccttctattgtctcagagagtactaaagcatatatattatttcaataacaataaaaaatctgaatacttacctttggtggaacttacccagcactgtcttatcccattgggattacatattgaaaattaagtgccagtgacaagtcacctgcacagagaatttttgcctttggcattgacaaaactttgaatagtaatgtgaccatgatctcagagttaaaccctagtttttagttgatagaacctgtgaatattacttcctctgttttgcaccttctgtgtgtaataaaatatagcaaaagtgttaatacctatggaatttattgaacattctaaagaaccttttatatygtccctatgtttctagaaagtctgatggcatggtaattttggagagcattgtgtgcactattagtgcagtagattttaagtataaaag

SEQ ID NO: 165966 - DNA, 575 bp, Homo sapiens
tatacacaacaattaaatttatgaattatttaaggtgaataacctaaaatgttaataactagatattaaaaaaacaacttatttattaacctgaaaacaatgtaatatatagcaaaaatgtataaaacaatactatttcttgaaagttgttttatatttaaaaggagtcataacctttaaaaagccttcagaattatccagaagaaacaataaccattattgacttccagagatagattagaaaaagagctattataaataaagagattgataattgaattagggatgctatattttgtacttcgtatgcctactatatcatcattcrgccaatttaatttgccttgaaaagagttgcatggcttaattgatttttcaaataagttttccactctcaaagttactctgccaaagctttatttaaatctgtacgccactttcaattacagatacagttatgccaacagaataaggcattttattctgcttaattctttccaagatggaaatgaaaaaaatgaacttttaggaattggtaacattttcacttaccatagccgatgggtaatgagatc

SEQ ID NO: 165967 - DNA, 571 bp, Homo sapiens
tcctttgtgttgtgaacattaaaattcttcccttctagctattaaataatctattgttagctacaatttctctactgtacatactacaacttattccttctatctaaccgtatttttatacccattaacaacttctctaggggaatcattttaaagagactcaataaacccttcaccaaagaaaaagggactcaacacaattatatacctgttaaaggtgtttgtttctgattttaaactaatctaataattaaagcagttgcaggaaaatctctacttaaaaacactatagtaatgggtaacatgaatttaagagaaaattgagcatatcattatgctcaattcactagttcagacatgtcttcatcataattagtttgaattagtaagatcttactatattattgactaaaatgcatgtgaaatcagttttctcctgaagcaaatattcatattttttaaaaatttgaggaagtgcctaaaactgcacaatgtgaactgcytaaaatgtaagtccatatctgaatggttaaagagggcccccaaaacacacttgtgtatggtggctgta

SEQ ID NO: 165968 - DNA, 645 bp, Homo sapiens
aaaagaattaagttacatgaaattccagaaagtagaaaacctttctgaggtaagcagtctatcactggatattttcttctttggggatacttgtcttattacagatggaagggaacaaaggaatgagcttggtccacaaagagtgacttttctagaaaaaaaaagaagccagcaatgtgttggtgatyatacaaagctggtataacaatttggaaatttcaagtgtcctaatgtgtggctaattaatcacaatatatttgctatattctgatgctgtctggagaggcaggaaacttctataaaataggatgaaattttctgtagtcttgtagtagataggagactactttctactaaaagaacaatacctgccaaatctgtaaacagtatgggaggccaaagagtaaagttccaaagagcagactgaatcacccaatctttagaggttaatgaggtaaagacctagcaaattatcagtcaaaagtacagaagggttaagtctaatgaataaggaagaacaaaagacagaatgaattttactaaaccagcaatcaaaactgactcagctgacagaacagaattaatcagcccctaatcttatccatatgacaaaggaaaagggaattcatttctagaagaaaagca

SEQ ID NO: 165969 - DNA, 552 bp, Homo sapiens
aaggacatccaaattgaagaggaggaagtcgaaatatctgtttgcagaaaacatgatcttatatatagaaaaagctaaaggctccatcaaacaaactcttagagctaataaatcagtaaagttgcagaatacaaaaccaacatacaacaactaccagcatttctatacaccaataatgaacaagctggaagagaaatcaagaaagcaatcctatttatagtagctacaaagaatataaaatatttaaaaataaatatcaaattttatctgataaaatttattttrccaaattttatctgataaaatttattttgccaaattttatctgataaaatttattttgccaaattttatctgataaaatttattttgccaaatgttatctgataaaattgattttgccaaatgttatctgataaaattgattttgccaaatgttatctgataaaatttattttgccaaattttatctgataaaattgattttgccaaattttatctgataaaattgattttgccaaatgttatctgataaaatttattttgccaaat

SEQ ID NO: 165970 - DNA, 588 bp, Homo sapiens
atttattttgccaaattttatctgataaaatttattttgccaaattttatctgataaaatttattttgccaaatgttatctgataaaattgattttgccaaatgttatctgataaaattkattttgccaaatgttatctgataaaatttattttgccaaattttatctgataaaattgattttgccaaattttatctgataaaattgattttgccaaatgttatctgataaaatttattttgccaaattttctacaagagatcttgtagaaagatctctacaatgaaaactatgaaacactgataaaggaacttgaagaggacaccaaaaaatggaaagacattccgtgatcatgaattggaagaattaatattgttaaaatgacacactacccaaaacattctacagattcaactcaatccccataaaaataccaatgacattctttgcagaaatagcaaaaacaatcctatattttgcatacaatcacaaaataccccaaatagccaaagaaaccctgaacaaaaaaaatgaaaaatgaaaaataaggccaggggcattacactacctaatgtcaaaatatactgc

SEQ ID NO: 165971 - DNA, 494 bp, Homo sapiens
tggctttagcctttgggtgactgtcagacctggacagagcagggcaggcttgcctatgagacagggccagtccaatttgagtgacctcctgtctgctggcctcttctaggtccccagcctggctatkctcactttcagtgcagcctcagatgtcaaatcacagtgcttcctgggggcctgcatcatagctccttggtcaggaactcatacctaaccattagagagctccagcagacgggcttctgctgacaagaacagcccactcacagcctcatcccactgcagcctcccccaccatgttctggcatgccctgaccatggacgctgtattagtctgttctcatgctgctaataaagacatacccaagactgagtaatttataaaggaaaggtttgattgactcacagttccacatggctccagaggtctcacaatcatggcggaaggcaaaggaggagcaaagtcacatcttacatggtgacaggcaagagag

SEQ ID NO: 165972 - DNA, 516 bp, Homo sapiens
tatatgtgtatatatatatatgtgtgtgtatatatatatatatatacacacacacacacaaaggaatattattctgccataaaaaatgatgaaatcatgtcatttgcagcaacatggatgcaactggaggtcactatgttaagtgaaataaggcaagcaaagaaagacaaatattgcatattctcactcacctgtggttgcttwaaaaagtggatctcaggaagagagagagtagaatagtggttatcagaccattggaaaggtagcagggaaggagagataaagagaggttaattaatgagtacaaatgtgtcaatgtaagttcatcaattataacaaatataccaccctggttagggatgttgataatgagatggctaagcatgtgtaggaactggaagtacatgggaaatctctacacattccatttgattttgctgtaaacctacaactgttctaaaaaaaatctgtattgtaaaaagatgttaacaataaaaatgtgtaaaagtctagtag

SEQ ID NO: 165973 - DNA, 516 bp, Homo sapiens
tatatgtgtatatatatatatgtgtgtgtatatatatatatatatacacacacacacacaaaggaatattattctgccataaaaaatgatgaaatcatgtcatttgcagcaacatggatgcaactggaggtcactatgttaagtgaaataaggcaagcaaagaaagacaaatattgcatattctcactcacctgtggttgctttaaaaagtggatctcaggaagagagagagtagaatagtggttatcagaccattggaaaggtagcagggaaggagagataaagagaggttaattaatgagtacaaatgtgtcaatgtaagttcatcaattataacaaatataccaccctggttagggatgttgataatgagatggctaagcatgtgtaggractggaagtacatgggaaatctctacacattccatttgattttgctgtaaacctacaactgttctaaaaaaaatctgtattgtaaaaagatgttaacaataaaaatgtgtaaaagtctagtag

SEQ ID NO: 165974 - DNA, 516 bp, Homo sapiens
tatatgtgtatatatatatatgtgtgtgtatatatatatatatatacacacacacacacaaaggaatattattctgccataaaaaatgatgaaatcatgtcatttgcagcaacatggatgcaactggaggtcactatgttaagtgaaataaggcaagcaaagaaagacaaatattgcatattctcactcacctgtggttgctttaaaaagtggatctcaggaagagagagagtagaatagtggttatcagaccattggaaaggtagcagggaaggagagataaagagaggttaattaatgagtacaaatgtgtcaatgtaagttcatcaattataacaaatataccaccctggttagggatgttgataatgagatggctaagcatgtgtaggaactggaagtacatgggaaatctctacacattccatttgattttgctgtaaacctacaackgttctaaaaaaaatctgtattgtaaaaagatgttaacaataaaaatgtgtaaaagtctagtag

SEQ ID NO: 165975 - DNA, 424 bp, Homo sapiens
atttgataagaggcttatttytaaactccttatctgccccaaagcagaacctcctcccaaaactcaattgtcataaatcccttcccacagatttttctgcaaccagagaaagttgactctaataccaaagagaagcccacagcacacctaaacaggcattgtcacaaaactatcatctcccatctattctcctaaaggcccatgatctttcttaaaagtaatttatttttccttaagtgcccttctcctcctccccttctcttgttcagatggcacataagccccaaattgtaagtgcccccttgaggcatattttcctgagaactcccatacataatgaacagaagcctgtcttttcttttgcagcccccaaaacactgaacttaagagggtaaaggaacagtttttccttccttcgtttctt

SEQ ID NO: 165976 - DNA, 585 bp, Homo sapiens
cagttgcagctgtgcaaactgtagctcagctgatccggctgtgaacagcagcaaagaagcagggaaacagagaaacggtagaatggtcctgagtccacacgaacccaggctgtacttgttggtggttcagggtctatcctgtgtatatagatctcccaatagtctgcatctggwttttgcaccaaggcagggtttgatgaggattgattgaaaagaataacagctttaaaggccagtactagagcttttgcaaatattcactgtgtcctgccccatccttctgaacacatctgaaggataactctgtaaaggaaacagtaccagtagaacaacttcactcccacgaatttgcctttccaactgggtaagtcagttaggagtgaattgattccgcttctatcttttcggtgcacttgcttaaacttatagtcctgctagctacagaaagtagtaacttaagcactttaactaaaacttgtgattgcctccttcattttcccatatgcactgtgggaaagccccatgacgtcagctgcaataagccaaggaatgattagcaggccagttctgtggcttgacaagctc

SEQ ID NO: 165977 - DNA, 581 bp, Homo sapiens
gacagccagagctctcctgtatgtggtgtctgttgactcctgctgggaggtatctcccagtcaggaggcatgggggtcagggacccacttgaagcagagtgtcccttagcagagcttgagcactgtgctgggagatccactgctctcttcagagctgtcagacagaaacgtttaagcctgctgaagctgtctccatagctgccccttcccccaggtgctctgtcccagggagatgggagttttacttataggcccctgactggggctgctgcstttctttcagagatgccctgcccagagaggaggaagctagagaggcagtctggctacagtggctttgctgagctgcggttcaaacttccccatggctttgtttacactgtgaagggaaaactgcctactcaagcctcagcaatggtggacgcccctcccctgaccaagctcaagcgtcccaggtggacttcaggctgctgttctggcaatgagaatttcaagccagtggatcttagcttgctaggctctctgggggtgggatccgctgagctagaccacttggctccctggcttcagccccctttcca

SEQ ID NO: 165978 - DNA, 581 bp, Homo sapiens
gacagccagagctctcctgtatgtggtgtctgttgactcctgctgggaggtatctcccagtcaggaggcatgggggtcagggacccacttgaagcagagtgtcccttagcagagcttgagcactgtgctgggagatccactgctctcttcagagctgtcagacagaaacgtttaagcctgctgaagctgtctccatagctgccccttcccccaggtgctctgtcccagggagatgggagttttacttataggcccctgactggggctgctgcctttctttcagagatgccctgcccagagaggaggaagctagagaggcagtctggctacagtggctttgctgagctgcggttcaaacttccccatggctttgtttacactgtgaagggaaaactgcctactcaagcctcagcaatggtggacgcccckcccctgaccaagctcaagcgtcccaggtggacttcaggctgctgttctggcaatgagaatttcaagccagtggatcttagcttgctaggctctctgggggtgggatccgctgagctagaccacttggctccctggcttcagccccctttcca

SEQ ID NO: 165979 - DNA, 497 bp, Homo sapiens
acatttgaaattttttagagaaaactaatttgtgtgagtttaacaattatattacatagaaaatatatgaacaactgtcattaattttatttactatttatgtatttgattttttaaataattacttagtaaacaaacagtaatagttggtgattacatgttgagtatcttccttagtataattaaagtatgattgcttttttaaaaatttgccttcataatattgaaaatataatttttaagaattttttaattatwagattattctgcaagcatgtaaattttaatctgcaatgaacactgaactattcatcttaaaacttgactgtaaatgttacatcaataaatgaaaaatatacttactttagcaatatttctatagataagtagaaagagagcaagccagaatttcatattgctgtaacaaacctgcatcgtggaaaagatcagactagtgtactagaaaatgcctgcaagccgcaaatctggatgctcat

SEQ ID NO: 165980 - DNA, 474 bp, Homo sapiens
tcaaattctaatgtagtttctctttaaatactgtattatatataacaactatcttattaattgcacacttagaattcttacacattcctgttgaaaagtttcttttataatcacaatctttgtctctcatgctacatttttatttaaggtttactrtatctccttaacatagctatactagctcttttaggaaatgtttgaaaggtttctcatacttatgctttcaaacattttgtgttcttacatttgaaaattgcttttgaagaaaaatagcatataattgtcttttctctttatttagatttaccatctttattggtatgtatggagctttatgttgaatgtcattacttctataatttaatttaaacctagtggctcgatagtaaatgtttaacaagtgtgacctttttaagtcacagatagtgaaaaaatgagtatttttctttacctaggacactgtgttccagccat

SEQ ID NO: 165981 - DNA, 546 bp, Homo sapiens
ccggccactaaatcaagaaagctgacctaactgattaggttcatagtaaactaccagtgaagaaactgatttggagatcatcaggagagtttcaactttaaactgcacatcataagtcttgcacttaccttagctaagagtcaaaaacaggatatcctggaatccccagaracagagatgaggctttttcagcccagctgtaaatcagctgtgtatccacagtgcatgtggcagaatgactgtgcaggcttctgcaggcatccacatggtagagagaaaggctgtccaaggcataaagcaaaagatttgagatatagctgagcaaggagttttaatgataactctcaagtattatctgtcggtgtgctgatgatcacaaaaggtggggataagaatgtgtaaaatgaggcatgaaaaatattcaacacgtagaaaaaggattcattgtcttttattgcaagggcccttagattatattacttgtattttatacataaaaacttaacatttcttaatagatagctttttagttatcttacagaaaca

SEQ ID NO: 165982 - DNA, 505 bp, Homo sapiens
ttcacttacttcaacacttactttgcatatgtttttaaaataaaaagaatatgatcagtaaaaacaatattgggtaatctcatgaaataataatatttgwccttagctaactttactccttatattctatttatagtaaatataaaatttaaacaataattaaatgattaatcaaaagtatttgctgtcatagaaaggtatttattggcatttgtgacattcttccatacttacttgaataatatttgaattatttaataaacgtaaaaccaaaactgatccctgctatgtgtttgtcccagaaaatgagagcattaaaagaactgtcagtttagttaggtgcataactttgtatgtatggtatctatagtatatttaagcatgaaaaataaatgaattaaaatttacttattcaattttctgttacatttgttatggctcataggttaatattcctataacgttttcagagtatttaccaaatattttgttcattttgtagtgt

SEQ ID NO: 165983 - DNA, 505 bp, Homo sapiens
ttcacttacttcaacacttactttgcatatgtttttaaaataaaaagaatatgatcagtaaaaacaatattgggtaatctcatgaaataataatatttgtccttagctaactttactccttatattctatttatagtaaatataaaatttaaacaataattaaatgattaatcaaaagtatttgctgtcatagaaaggtatttattggcatttgtgacattcttccatacttacttgaataatatttgaattatttaatraacgtaaaaccaaaactgatccctgctatgtgtttgtcccagaaaatgagagcattaaaagaactgtcagtttagttaggtgcataactttgtatgtatggtatctatagtatatttaagcatgaaaaataaatgaattaaaatttacttattcaattttctgttacatttgttatggctcataggttaatattcctataacgttttcagagtatttaccaaatattttgttcattttgtagtgt

SEQ ID NO: 165984 - DNA, 576 bp, Homo sapiens
gtttatttttaccatatatttttacagttttaaaaataaatgtacttacactctctttagtcacataataatcattaatattagaaattgaaaaaatagatttcatataatayagcaaatttgcagggcatttttaattcttacacagtaaaaaaagttacatactttgaacagactgtcttaaaatattttcttaaaatcattagacaagtttagatctttgtttaaatcatgtatttttcattatctttcaaaatgaaagtatgattgctattccaaataaattcaaatatgcatttataagaggaattatagatttttcactgtaaattttattttattttctgttgttagtaattaaattttttcttttataaaaaatagcattgtgaagatactttactagatatgttaagataagatttttttttttttttggcttccaagtgttgtatttcactaaatgattattttcttaaatggtagtttttttttgacagtcaaaattcttgtctgctaaaaataattgtggattgaataaaaatagtggacatgaaatgtaatttatttaaaaaa

SEQ ID NO: 165985 - DNA, 576 bp, Homo sapiens
gtttatttttaccatatatttttacagttttaaaaataaatgtacttacactctctttagtcacataataatcattaatattagaaattgaaaaaatagatttcatataatacagcaaatttgcagggcatttttaattyttacacagtaaaaaaagttacatactttgaacagactgtcttaaaatattttcttaaaatcattagacaagtttagatctttgtttaaatcatgtatttttcattatctttcaaaatgaaagtatgattgctattccaaataaattcaaatatgcatttataagaggaattatagatttttcactgtaaattttattttattttctgttgttagtaattaaattttttcttttataaaaaatagcattgtgaagatactttactagatatgttaagataagatttttttttttttttggcttccaagtgttgtatttcactaaatgattattttcttaaatggtagtttttttttgacagtcaaaattcttgtctgctaaaaataattgtggattgaataaaaatagtggacatgaaatgtaatttatttaaaaaa

SEQ ID NO: 165986 - DNA, 399 bp, Homo sapiens
ctttgtttaaatcatgtatttttcattatctttcaaaatgaaagtatgattgctattccaaataaattyaaatatgcatttataagaggaattatagatttttcactgtaaattttattttattttctgttgttagtaattaaattttttcttttataaaaaatagcattgtgaagatactttactagatatgttaagataagatttttttttttttttggcttccaagtgttgtatttcactaaatgattattttcttaaatggtagtttttttttgacagtcaaaattcttgtctgctaaaaataattgtggattgaataaaaatagtggacatgaaatgtaatttatttaaaaaacattgatttaattaacaaaatttaaaatataagttacattc

SEQ ID NO: 165987 - DNA, 510 bp, Homo sapiens
attgcctgtcttttgtatagagtccattttaactgggtgagatggtatcacattgtagtttgatatacactactctgatgatgaatgatgttgagcacattttcgtatgcctgtttctcatttgcacatcttgttttgagaaatkgctattcaaatattttaccatttttaaattggattatgatatttctttcctatacagcttcttgagctcctcatatactctggttattaatccctcatcaaatgggtagtttgcaaatatttcctcccattctgtgggttgtctcttccctttattgtttcttttgctgtgcagaagctttttaacttgatgtgatcccatttgtcaatttttactttgattgcctgtgcttgtgtggtattactcaggaaatttttgccaagactaaaatttttcctggagagtttctccattttgtgtgtgtgtgtgtgtgtgtgtgtgtgtgttgtagtagttccatagtttgaggtcttagatttaagtct

SEQ ID NO: 165988 - DNA, 551 bp, Homo sapiens
agcttcttaacttgttacaagatttctcacaatgctattctggttgttaatgttgtttatccagtgtttctgtggcagagcaaagactagaagctttctaccttgccgcctttctgatgtcacgcactgtataaaagtattttaatctatgatagtacaagaacatttttaaatctaaaaataaatctttagtcagcacatgaaattatgaaggaaaactcaccacaaggcagaaagcaaatataaatgagctaagttaactatagttaagacagttgggagtcctaaaatagaatgagggaaatgggaagtggcacatataaagaaagataaacagttatataaatgaaaccaaattacattaaacaaaaaggaaaggagatatgtkatttgtagaaagatttaagagaatacgtagaactgtaagttttaggaattctgatgaacggtagaggaaggctgtcccagaatatcttgggttcttagattattgcacagacaagctacatttttagagaagtgttgttctaagtcgtaaagttaaggcatct

SEQ ID NO: 165989 - DNA, 626 bp, Homo sapiens
aataataataaaataaaaagcagtacattaaaaaaaatcacatcaaacttgccatcttattatttcattgcctagttcttacakaataacaactttgtatgtaatccctgattttatgatttatgttattagccatagttaccagctctagttatttgcccaaatagggctcacatgcctttgacatctggactaggaaaatgaccctcaagcacagtctggctttttgtggctactataattcaatagtttattgggatttgatgagaagagatgctaacacttaagagtccttaaatattttaaataattttgtctttgagatatctgcaacaggactgccttacatgatacttgcctacagatattactcttttcagaaagagtttactaaatatgtattaatacattaaaaatgttatggtaattttaggcctgataagttacagaaaattcataattagcattccttggcctcagatgataaactcttctcactgtatatttaaattaaaacactgaagtagagaaaaatgctgatattgtgcttgacatgtgaataatgatgctttgccctaaaaccataactagtttgtttacatatatctgtgcaattactagtaatt

SEQ ID NO: 165990 - DNA, 626 bp, Homo sapiens
aataataataaaataaaaagcagtacattaaaaaaaatcacatcaaacttgccatcttattatttcattgcctagttcttacataataacaactttgtatgtaatccctgattttatgatttatgttattagccatagttaccagctctagttatttgcccaaatagggctcacatgcctttgacatctggactaggaaaatgaccctcaagcacagtctggctttttgtggctactataattcaatagtttattgggatttgatgagaagagatgctaacacttaagagtccttaaatattttaaataattttgtctttgagatatctgcaacaggactgccttacatgatacttgcctacagatattactcttttcagaaagagtttactaaatatgtattaatacattaaaaatgttatggtaattttaggcctgataagttacagaaaattcatawttagcattccttggcctcagatgataaactcttctcactgtatatttaaattaaaacactgaagtagagaaaaatgctgatattgtgcttgacatgtgaataatgatgctttgccctaaaaccataactagtttgtttacatatatctgtgcaattactagtaatt

SEQ ID NO: 165991 - DNA, 582 bp, Homo sapiens
cagtgttggtggtggtgggttaatatcagtgttgctgtcagaaaggaagagatccttgaattgatgagaacatgtgaggcaattccagccattatcatggcataggttatagcaagagcactgaaagtgaaaaagtcacycaggtgaacaaatctgcgtggttaataagtgtaaaggagaatgaaagctggagatcgccaatgcctatgaaaagagcacagggagaggagctttccaaatgaggcttacaatcaatgtaagataaaataaaaagagagggaatgtaattgctgaaccaagttgtcacagagctgttaggcaagggaagcactgacataagtacactggatttggcaagcaggcttttcctggcttatgggaaagcttttttttaaatagaatatggtagaaatgtaatcagcaagtataaacaacaattttaagaatcttttctgtgatgacagggaaagatagaatagtaattagagggaatgtatggttagtagggtacattcctttttcttaacttttaaaaatgagagacgctgaggtgtgagtatgtactttaggagaaaaaatagt

SEQ ID NO: 165992 - DNA, 562 bp, Homo sapiens
gagctaggatttcaatgtattcatttcatgggaacacaggcattcatatcataacaccaggtatgtatattttatgtcttaaacaaaagcattcccagagaattcccagagattcccagagaatcttagtaatggaattttcaggatgaaatatttaggaggtcaactgtcatacgaatgtactctctacctctctaaaaagctcagttgaaccatcccgatgaaagaaaactgaattataccttaattttttgcctgataatttagtttttggaaagccaatagttataagaaatctatatagatatgaaataaaaccttataaatttaatcagccacaaaaacagcttaaaaagctacagcccattaaaayttactgcctattcattttcagaacatttcataaaatttcagactttatgcagatgccaaaataaaatatttactaattttaaaaagaagtgaataaaaacaccttgaatttgaatacaaacctaaaacctttctgagtcttagataaacatgagaaatatgaaacattaaaatggaaagttatattgtt

SEQ ID NO: 165993 - DNA, 562 bp, Homo sapiens
gagctaggatttcaatgtattcatttcatgggaacacaggcattcatatcataacaccaggtatgtatattttatgtcttaaacaaaagcattcccagagaattcccagagattcccagagaatcttagtaatggaattttcaggatgaaatatttaggaggtcaactgtcatacgaatgtactctctacctctctaaaaagctcagttgaaccatcccgatgaaagaaaactgaattataccttaattttttgcctgataatttagtttttggaaagccaatagttataagaaatctatatagatatgaaataaaaccttataaatttaatcagccacaaaaacagcttaaaaagctacagcccattaaaacttactgcctattcattttcagaacatttcataaaatttcagactttatgcagatgccaaaataaaatatttastaattttaaaaagaagtgaataaaaacaccttgaatttgaatacaaacctaaaacctttctgagtcttagataaacatgagaaatatgaaacattaaaatggaaagttatattgtt

SEQ ID NO: 165994 - DNA, 520 bp, Homo sapiens
aaataaaatatttactaattttaaaaagaagtgaataaaaacaccttgaatttgaatacaaacctaaaacctttctgagtcttagataaacatgagaaatatgaaacattaaaatggaaagttatattgtttgtagttcttcagtaaatgtcactatcattattcttacacgaaatttgttggcataataatggatcttctgaaagggttagggatgawataccaaaagctgacatatttttaataacactttccatttctcacatgcttctataatcttctcccttaatcacgtttgccagggatgttgttattctatttaatcatgcaatctcaaagcactcattttttatttgaatttggtacagagtatctcatgttctcttttagaaaaaataatcagattcatctatttttctgtctctgagtatttgtaaatggcaaaaacagaggcagcaagcacatatttagagtaacttttatcgtcttccaactatacccaaaggcatcgcaaacagct

SEQ ID NO: 165995 - DNA, 520 bp, Homo sapiens
aaataaaatatttactaattttaaaaagaagtgaataaaaacaccttgaatttgaatacaaacctaaaacctttctgagtcttagataaacatgagaaatatgaaacattaaaatggaaagttatattgtttgtagttcttcagtaaatgtcactatcattattcttacacgaaatttgttggcataataatggatcttctgaaagggttagggatgatataccaaaagctgacatatttttaataacactttccatttctcacatgcttctataatcttytcccttaatcacgtttgccagggatgttgttattctatttaatcatgcaatctcaaagcactcattttttatttgaatttggtacagagtatctcatgttctcttttagaaaaaataatcagattcatctatttttctgtctctgagtatttgtaaatggcaaaaacagaggcagcaagcacatatttagagtaacttttatcgtcttccaactatacccaaaggcatcgcaaacagct

SEQ ID NO: 165996 - DNA, 520 bp, Homo sapiens
aaataaaatatttactaattttaaaaagaagtgaataaaaacaccttgaatttgaatacaaacctaaaacctttctgagtcttagataaacatgagaaatatgaaacattaaaatggaaagttatattgtttgtagttcttcagtaaatgtcactatcattattcttacacgaaatttgttggcataataatggatcttctgaaagggttagggatgatataccaaaagctgacatatttttaataacactttccatttctcacatgcttctataatcttctcccttaatcacrtttgccagggatgttgttattctatttaatcatgcaatctcaaagcactcattttttatttgaatttggtacagagtatctcatgttctcttttagaaaaaataatcagattcatctatttttctgtctctgagtatttgtaaatggcaaaaacagaggcagcaagcacatatttagagtaacttttatcgtcttccaactatacccaaaggcatcgcaaacagct

SEQ ID NO: 165997 - DNA, 520 bp, Homo sapiens
aaataaaatatttactaattttaaaaagaagtgaataaaaacaccttgaatttgaatacaaacctaaaacctttctgagtcttagataaacatgagaaatatgaaacattaaaatggaaagttatattgtttgtagttcttcagtaaatgtcactatcattattcttacacgaaatttgttggcataataatggatcttctgaaagggttagggatgatataccaaaagctgacatatttttaataacactttccatttctcacatgcttctataatcttctcccttaatcacgtttgccagggatgttgttattctatttaatcatgcaatctcaaagcactcattttttatttgaatttggtacagagtatctcatgttctcytttagaaaaaataatcagattcatctatttttctgtctctgagtatttgtaaatggcaaaaacagaggcagcaagcacatatttagagtaacttttatcgtcttccaactatacccaaaggcatcgcaaacagct

SEQ ID NO: 165998 - DNA, 497 bp, Homo sapiens
tcaagccgtcctctttcttaaatatatctctttgcctcttcatgtttaattcatgctcatatttgcccacatttaaagctaggctggcttcacattggaattgaaaatagccctaggagcatgaggaaccctgagagcctgggtgtcctcagctgtcacaactgggtacctgcccctttgtgtttgctgccctctctgcctggctagaggcggccccaggcttcctgggcatttttaaattactgaaacaagagtattataataaaacacttaacattttaatacatagtttttttttgctattgttgcttttgtgtgttttggggatgtctgaggcctctgcccttgactgcaattggtccttctgctgtggcctgcccctctctgtgtcacaagttgcagctgctgacaggacgcaacttctattgccccaygtgccaccagaatcattgttcaagctcccagtactctcagacagatttgtgattgaagaatca

SEQ ID NO: 165999 - DNA, 470 bp, Homo sapiens
catcttctgggtcaaaaacaaaatcaagattgaagtaaaaaaattcttcgaactgaatgacaataatgacacaatctatcaaaatctctgggctaatgcaaargcggtgccaagaggaaagttcatagccctaagtgcctacatcaaaaaaaatgaaagagcacaaactgacattctaaggtcacatctcaaggaaatagaaaaacaagaataatccaaacccaaacccagcagaagaaaggaaattaccaagatcagagcagaactaaatgaaattgaaaccaaaagaagtacaaaaaataaatgaaacaaaaagctggttctttgaaaagataaataaaattaatagaccattagcaagattaaccaagaaaagaagagagaaaatccaaataacctcactgagaaatgaaacaggagatattacaactgacaccactggaatgcaaaagatcattcaaggctactat

SEQ ID NO: 166000 - DNA, 468 bp, Homo sapiens
cttctgggtcaaaaacaaaatcaagattgaagtaaaaaaattcttcgaactgaatgacaataatgacacaatctatcaaaatctctgggctaatgcaaaggcggtgccaagaggaaagttcatagccctaagtgcctacatcaaaaaaaatgaaagagcacaaactgacattctaaggtcacatctcaaggaaatagaaaaacaagaataatccaaacccaaacccagcagaagaaaggaaattaccaagatcagagcagaactaaatgaaattgaaaccaaaagaagtacaaaaaataaatgaaacaaaaagctggttstttgaaaagataaataaaattaatagaccattagcaagattaaccaagaaaagaagagagaaaatccaaataacctcactgagaaatgaaacaggagatattacaactgacaccactggaatgcaaaagatcattcaaggctactatg

SEQ ID NO: 166001 - DNA, 570 bp, Homo sapiens
ccccctccccggccagagctcctggggcctccctcgccaggcgggtggcccrcctcccccgcctccccggaggcccggcgcgcggtctgcgctgcagcagagctcggcgcccccgccgccacctctgcgcgccccccggctttcccgacgctgccagggaggatgccccgctccccgccccgagtccccagcggcccggcgcgaagttccccaaagtgacccgggcgccgagaacccccgccccctcccctcgggcttccccggagactccgcccgccgccccctcccgcgccttcggaaaagttgcgagcgacgccccaaactccggcccccccgcctcgcgccgcgcgcgccctgggcgcccccgcgctcggccgccgcgcaggggcgcagttccccctaccccagccccggcgccatgacgcggggagcgcagcgggggccaccggtggcggcggcggcgcagaggcggccaagtgcggggcgtgggcggcagcgcggggcgcacgtgcgccgggccgggggccggggccgggcggggggccgcttacctgttggaggtagaggaag

SEQ ID NO: 166002 - DNA, 590 bp, Homo sapiens
ataagcacatctctctcttgcaagttcctctcccctcgggggcccaggagccggaggaatgcgctcagagaaggggctgtgggtgccgctcactctgctccttccactccgcactgttgccaagctttatttattttaaatgagcccccaggacttctcccttctcctcttctgtggaaggcgagcgagctctacaccgagcaaaaggaacatctgaaagcagccagcactgtgatgttccaccccagggctcggtgggtaagaggmcttggaagctgcggccctggaaagctcgttgcaagctcctgctgcatctgggccatgagctcctggcaaggagacagcctaggctgagcagagcctgggagaaacagatctttggtcttcagtgccagctgtggccaagccaccgtttggcaaactgggcccagaatcccacagaagccaaaggaagaggggggcactttgatttctgtctctcatctgaaggctcaagagcctggccatttgcttaaacttcccaggaacagaagcacacaaagggggagaatggcaatttattattactgattgctaactgtaacaatacc

SEQ ID NO: 166003 - DNA, 591 bp, Homo sapiens
cagtgccagctgtggccaagccaccgtttggcaaactgggcccagaatcccacagaagccaaaggaagaggggggcactttgatttctgtctctcatctgaaggctcaagagcctggccatttgcttaaacttcccaggaacagaagcacacaaagggggagaatggcaatttattattactgattgctaactgtaacaataccttgtatctgctcagtgctttcctaaccttttcaaagagccttcatgtatctcacctgatcatcacaagttaggtagggaaggtgtaatgatgcccattcgatatatgatgacccttttaggatcacagaggtggtccaaggtcacacaaccagttagaggcagcgtctgggccagaaggcaagacttggaacttggatttaygggagcccttttcttcccttcgactactgtgctgggctcatgcccttctgtgaacatgctcgtcgttagcccttggctctctctcctaacaggatcaaccccaaaccaaatccgttaatgtaatagtcatttgcaatagcttgggcgtttactaatcacaccaccgctccgtctgtgcagcaatt

SEQ ID NO: 166004 - DNA, 600 bp, Homo sapiens
gtgatcaaatatgaccttcttaacagccacatagaatctgccattttgtaggactgctctggctcttgacctaacatttgtagtcactctcagcgtttaccaggggtttcaaatgtaactgcctgcatgttcaggtaggaaagtaaaggcatgaagtggggctgatataagatattaaggagtggtggtgactctggtaaaggagggtatctatacctatctccacaacaaccatcacttagtttccactgagttccggtgcacagtaatgttggccagagattctgagtatcctgtatagactccttatttgtgaatggaaaaaaaacaaaaaaacaaaaaagcaaaaacaaaactgtgagctaggagttgccttcaagttactagtttggaacttctgktatagttaggaaaatctgtaaatctgtgaagcagatttgttgcccgagcaaacaacaatattatccttgattccaagaagatagcaattggtcaggttttctttgtttctgttttcttcaaaaatcctcaatttaatcaaaatgatttaaatcagcgttcagttgtgcagtgaaattgatggtaaagcaaagaaaaaat

SEQ ID NO: 166005 - DNA, 474 bp, Homo sapiens
gacttattttataggcttcagcaatgttttatcttcctaagaaacataagaaattattctggaaaaaaaaaacccacttcaataaaatttaaggaaaaccactaagggcatttcrtttttttataaacaatatacacagctgtagcgatgttggcaggaacacatgccagagagctacgtacttgcttctacaaactgttctgttcaccctttatccagtaacagctggtaaaatggtatttaagaacagtttgatttaatctaatgagaaactatgctgcaatgcctgatattgcctgtggaaaataattggacaaacattgattttttatgttgctataataggtacatttccaataaatagaaatttatatgcatacttatttggcaacattcgtctcctgtgaaagctagtgtttggttcttcatacacatatacaggcacatacacatacatgtatatacatatacatg

SEQ ID NO: 166006 - DNA, 474 bp, Homo sapiens
gacttattttataggcttcagcaatgttttatcttcctaagaaacataagaaattattctggaaaaaaaaaacccacttcaataaaatttaaggaaaaccactaagggcatttcgtttttttataaacaatatacacagctgtagcgatgttggcaggaacacatgccagagagctacgtacttgcttctacaaactgttctgttcaccctttatccagtaacagctggtaaaatgstatttaagaacagtttgatttaatctaatgagaaactatgctgcaatgcctgatattgcctgtggaaaataattggacaaacattgattttttatgttgctataataggtacatttccaataaatagaaatttatatgcatacttatttggcaacattcgtctcctgtgaaagctagtgtttggttcttcatacacatatacaggcacatacacatacatgtatatacatatacatg

SEQ ID NO: 166007 - DNA, 452 bp, Homo sapiens
atgccttttaacttctctttcatattttcctcctttctgtctctgtactacgttctgaataatttcttttgacttactttccattccaccacgtttcctctccttctgtatctaatctgcttttatacttaatcattgggtttgcactttcaattattatatcttatttctatgagttctgtttggtcctttttttcagtcttctagttcagggtttgttgttgtttagtttactgttccctgtagatatttgatatttgaacaactttctttttcaagtgttataacaataattattacaawgtaagaaatctttgtgggattcagtctgttatctgtatttcttcccgttgattctaatttcagtgttgtgttgcctgtattacgtgatcttttatggggagtcgttttattgaaaaatcattgtgaagattctttgaagccttcaataa

SEQ ID NO: 166008 - DNA, 548 bp, Homo sapiens
tactacatactgaaaaggaaatataggggasaaatgagtttgcaaatctatttccagaacaacctataaaagagaatatgagagaaattcttctattaatggctattaagtaattcagatcacacttactaggaaaaaaacacttaaaaaatttatttgaaagcatcagagaagttataagatagtggggggaggggaagcagatgaaaaccaaagaaagaacagaggcctgaggtaggggatgatactgcggggtcacatttgctcagagtgtacttgggaatcagcaggggctgatttgaggctgaaaaaccgagtaataggtttgatagactgtagagctgagaggcaggattcaagtgtagagtctgtcaaatacagagcctggataaaccatcatcatgttgaggtgagactctcaaaaggcataatctggtagcatagattaaccaaagagataggatgtggttcagcttcaaattatttcaatccaagaaattggcttaaaatgatccagatagttgtcacatgttgtttactaaattaaa

SEQ ID NO: 166009 - DNA, 616 bp, Homo sapiens
tgttctccatggtggctgtactaatttacattcccaccaatggtgtacaagagttcccttttctccacatcctcgccagcatttgtatgaaacccttaaaagttaaaatcatggtccctgagaactcacagacatatttagtgacactgaaaatataataggattagcagttcataggaagcagggaagtttatctctaatcccagataaaattgtctttaccttcaaaaagcctaagctgacttgtggttttacctgagacatgtaaagatcttggaagtcatcactttcacccttacatgaaaacatgaacaaacggaaaatcaatggctattctttcacccttcggagtgctgaggtagcagggtaaactgactggtgccttcatatctagggagacaggtaaatccmgaaagatacagcaattgagatctgctgacctgtagtgaaaactgctggaaccataaactggtagaaacacttatagcgattttggcaaaaaaaagttgggactgactttataatttttcccattcacatgggtgaaggagagtttcagtgcaaaacaatgaaattcctctagtacagacttacaaagagagaatttcttctcagg

SEQ ID NO: 166010 - DNA, 564 bp, Homo sapiens
agggctgcctgcccagtctggccccacccatcttggtctcccagggctgagcagtgagatcagaccactgtgcactccatggattagcccattgtatgaggtgacagagatctctcagtaaacaagagtcaagtatataccacctgtattggctatagctggctcttactcataagagtcatttactggtctagaggttgaacagcagtacaaaacaataggaaatctgrcacaagtgcattaacattggggaataagataatattcctgagactgctgccacctgggacccacaggacactgtgattctgctcaaatgcctagtacatcactaccacaactagcatttgggtaagccaccatataagggctatacataatcaaggaacttacacagactctttccctctgaaaatacccgaaaccagagatctaaccctcagcatgatctgcctctaatggaggggggtgcatagctcaccagtctgtcttggatcaaaggaaacatgggagtggcacaagctcctggaggaagcaccattatagtctagtaatagatgtaga

SEQ ID NO: 166011 - DNA, 600 bp, Homo sapiens
gggccttggcaccttgaaagcacacagaattgaagccaataaatgatrtacaatgtacaccacagtcacacaccaaggaaaaaagaataaaaatagaaaagccctatacaaatgatagcaaattcaaataaaaaaggaagcatcagctagctctctcagatgagaaggaaccagcataaggactctggcaatacaaaaatccagagtgtttcatcatctccatggatctcacaagctctcaaacaatggatcacaacttgaatgaaatgtctgaaatgacagatatagaattcacaatatgaatggcaaaaagatgcaatgagatccaatagaaagttgaaatccaatacgaaggaaacagaaaaaatgatccaagatttaaaagatgatatagctatattaagaaagaaccaaacagaacttctggaattgaaaaattcactacaggaatttcaaaatacacttggaagccttaacaaaatactaaaccacgcagaagaaagaatttcagggctcaaagactagtcctttgaatcaacccaatcagacaaaaataagaaaagagaattaaaaaaaatgaaaaaaccctttgagaaacat

SEQ ID NO: 166012 - DNA, 594 bp, Homo sapiens
ttttgtaaggctatataaactgatcttaattttgttatactgacccctaaaggcacttcccattgtaaaatagtctattaagaattggtctatatttgggaaagcaataatattaagttcattatggctttttgcagtccaggcactaatgtagcttgtgtaatcctcttaaggttttaatgggttaaagctattttaagaatttttgcaatcaaactatataggtatgcttagaaaggtacttgtcttccaggccctttaaaatatatataagataattatgttaaattgattcatgttaaaaatgtaacacacccagtcaaaaagccttaataagacagacttctgaataaggtagtattattaccmaatctcagctaaagaaacttgattttaagagccacacatggccgatctgttgcaagtatgtaacagtatataattatcattaaaccaagttactttcattgtggaaaatataagtgaaaacagataaacaaacaaaacaaacaattaaaatcttattctcctcataatggaatcctgctgaatgcatatttttgagcacacttttaaaaagtaacaatatatcct

SEQ ID NO: 166013 - DNA, 594 bp, Homo sapiens
ttttgtaaggctatataaactgatcttaattttgttatactgacccctaaaggcacttcccattgtaaaatagtctattaagaattggtctatatttgggaaagcaataatattaagttcattatggctttttgcagtccaggcactaatgtagcttgtgtaatcctcttaaggttttaatgggttaaagctattttaagaatttttgcaatcaaactatataggtatgcttagaaaggtacttgtcttccaggccctttaaaatatatataagataattatgttaaattgattcatgttaaaaatgtaacacacccagtcaaaaagccttaataagacagacttctgaataaggtagtattattacccratctcagctaaagaaacttgattttaagagccacacatggccgatctgttgcaagtatgtaacagtatataattatcattaaaccaagttactttcattgtggaaaatataagtgaaaacagataaacaaacaaaacaaacaattaaaatcttattctcctcataatggaatcctgctgaatgcatatttttgagcacacttttaaaaagtaacaatatatcct

SEQ ID NO: 166014 - DNA, 391 bp, Homo sapiens
gggcattccactaagttccagtatatggcatacttctttcagtaactctttgataggagctcacccactcaacatatatttattgtatgttatctgtatatcaggccttatatagcttctgggactttaacctaaaatggaatatactctgtcctctcaaagagctcatagtgtggtagggaaaagttcaggtaaattaaagtatactaaayggtgctcaataaatgcttggtgaataataactgccatgatagtggtaatatggaaggatatatgagagtaaagaaaggatgtctcaaaaagacttgaggcagttggttatcaggaaagacttcctggaaattagctagatgaacataatgactgaaggcgtattctatgagaaggtaat

SEQ ID NO: 166015 - DNA, 632 bp, Homo sapiens
tcttttcatgctgcatctttccctgggctccaggaaaatatctatttacagctttcatgactaaaacttattcccaatccaaaggtcatttacctctgaaatatcatgtgaaattccattccctctttgttagagaagggagcaatattgggaaaggacctagttgtcctctaattgctcttactaggctctgggcaggaaaagtgaatgcctcttgtcttcttttttatacaatccagctaccacttctaccccaggtgaagctaccacatcatccatgcgtgctgamggcttactttcaatttttccaatgcagaaggtaagagatcaaaatctttactcttaactaaacagggtcaaaaaggcaatagacattatttttagaacattgtttttgaaaagaagatgatagaatgcattataatgcagctctttaatacatgggatttacgtgtgctgaaggtcaaatgatatgttctgaagctactgaaagccagtaagactgctagtagatcagttatttcagttccctcagtacagctttattgtgtttttgctttatttgtgtggtacagtgtgctttgttattatccttagggttctgattgctgttattttcatcttttcaattt

SEQ ID NO: 166016 - DNA, 589 bp, Homo sapiens
aaatagttacctctttctgaagacccatttctcagaggtcttgccacatggcttggccccaaatgggtcggtggccaactwgccacttctgtatttttcaggtagttcaccacaaggttaagcctcaatagactgcccagctattggtacagattaccataggtgtcacctccttggtgatcaccatctatactgctctaagttcagcccattggttctttgtccacacccagtttcaaaccacatgatgtcagtactagattggactgcaacagtggttcaggcagcagtagcacctcagctagacccatctgtgaactgtgtctctcaggaatgggtggatgcccttccttaaatggcgaaggctcagggtccaggttcagggtctagataaggcccatggccttaccttccattaggaatacaggtcccaagacctcttgcaactgtgctgctaagggacttgtactcagcatactctgctgttccaagtaggcaccccactttgccaaagtggatatctgtgctgtcccagtccagggggtcattacccatgaatgcatccatcctgctattgggtaagtcgtcc

SEQ ID NO: 166017 - DNA, 589 bp, Homo sapiens
aaatagttacctctttctgaagacccatttctcagaggtcttgccacatggcttggccccaaatgggtcggtggccaactagccacttctgtatttttcaggtagttcaccacaaggttaagcctcaatagactgcccagctattggtacagattaccataggtgtcacctccttggtgatcaccatctatactgctctaagttcagcccattggttctttgtccacacccagtttcaaaccacatgatgtcagtactagrttggactgcaacagtggttcaggcagcagtagcacctcagctagacccatctgtgaactgtgtctctcaggaatgggtggatgcccttccttaaatggcgaaggctcagggtccaggttcagggtctagataaggcccatggccttaccttccattaggaatacaggtcccaagacctcttgcaactgtgctgctaagggacttgtactcagcatactctgctgttccaagtaggcaccccactttgccaaagtggatatctgtgctgtcccagtccagggggtcattacccatgaatgcatccatcctgctattgggtaagtcgtcc

SEQ ID NO: 166018 - DNA, 682 bp, Homo sapiens
ctggtggctggcattgtaataatttttgctaccttctatgtagttggatacctctgccagcttcgacaacaagtacatgttgttatgctcaacagttactctgataccaaagccagtaaagataaaacaagaaaagaaaactgcagacaaatatcccttattaacattgaagcaaaaatcctcaataaaatactagcaaacagaattcaacagtatttttaaatggttatgtgccatgactgctgtggtttgaatgtgtctctcaaattccatgtgttggaaacttaatccccaaattcatatgttgataatatttgaagatggagaattggagaggtaattaggattaggattagattaaatcatcaggtggtctcctrtattaggactagtggctttacaagaagaagagacacaagagctggcacactcttgctctattgccatttgatgtcttccaccataatataatgcagcaagaaggccctcgcaggatgccagtgccatgctcttgaactttccagcctcaagaactgtgacctgactaaatcttttttctttataaattaccaagtctgtggtattttgttagagcaacagaaaatggactaagaaaatgaccaaatggggtttaattcttggaaggaaaagatggttcaacatataaaaatcaatcaatgta

SEQ ID NO: 166019 - DNA, 599 bp, Homo sapiens
agcctgttctcgtgctgctaataaagacatacttaagactgggtaatttataaaggaaagaggtttaattgactcacagtttcacatggccaggaaagcctcacaatcatggaggaaggcgaatgaggagcaaagtcatgtcttacatggcggcaggcaagacagcrtgtgcaggggaacacctctttagaaaaccataagatctcatgcaacttattcactatcatgagatcagcacagaaaagacccaccctcatttttccattacctcccactggttctctcccatgacagatgggaattatgggagctacaattcaagatgagatttgggtggggacacagccaaaccatatcagacctttaaaacaaaagacagattagcaggagaaaggcatacaaatgtatttaataaaagttttacatatcaagaaagccttcaaaaatgaaggcctaaaggtatagaaaaaaactgtatttttatggttagctttgatgaaaagtagatagtcatgtagaagtatgatgggacaaaagggggtatcatctaatggtaataaactaaaggaaacttcataaggctgtttgttcagattctt

SEQ ID NO: 166020 - DNA, 599 bp, Homo sapiens
agcctgttctcgtgctgctaataaagacatacttaagactgggtaatttataaaggaaagaggtttaattgactcacagtttcacatggccaggaaagcctcacaatcatggaggaaggcgaatgaggagcaaagtcatgtcttacatggcggcaggcaagacagcgtgtgcaggggaacacctctttagaaaaccataagatctcatgcaacttattcactatcatgagatcagcacagaaaagacccaccctcatttttccattacctcccactggttctctcccatgacagatgggaattatrggagctacaattcaagatgagatttgggtggggacacagccaaaccatatcagacctttaaaacaaaagacagattagcaggagaaaggcatacaaatgtatttaataaaagttttacatatcaagaaagccttcaaaaatgaaggcctaaaggtatagaaaaaaactgtatttttatggttagctttgatgaaaagtagatagtcatgtagaagtatgatgggacaaaagggggtatcatctaatggtaataaactaaaggaaacttcataaggctgtttgttcagattctt

SEQ ID NO: 166021 - DNA, 559 bp, Homo sapiens
tcagtgtagtaggaacccatgcgtgtatgggagatgtgagaattagaakggcagaaagtggagcaggggacgtaaagagggggccagttcatgaagttgtgaggacttttttctttctgtaataagtaggcagcagttgcagtggtttaggtgggatatcatagttccatttacatttatgtttcaggatggtcactcgggctatgtacagagtgggagaaagggaagtaagatcagaaacagtaagaaggaagatatcacatcttatagtagttccctgttcagcatataaatcttccattgaaatgctgcacccagacctggtcaaggattgggcacatggctcaaatccagccaattatatactctattcatggagttttaccctggagataaatgacaaaaaactgcaaaattttgatgttcactcaaataaacagaggcattattcattcctgcaatctcaattcctgttcctattcttcttgagccaaatcatccacctgtcccatgcttctgagagctgccttggatcttcgccataaacacatagtctttg

SEQ ID NO: 166022 - DNA, 628 bp, Homo sapiens
tctaatgccacattctaggtgaaaagaagaaccattatctgagataagacacagcaagagaaaggtaaggaatgtaatgcattcagtttcagacaaatgaactcgaggtggctgcaggacatttaattaaaggtgagtgatatgcatttgaatatagtgaaatatagaacagaagtctggatgggcgaacatatatgtggaagttgttaatccactgaagctgataccttaagaacaggctactagcatcaaaatcgcagcagacaaaacctactgaatggactgtcagtttccagtcttaatagttctctttttttatctattggtttttcaattatttttcctcagtcatttctttttcatgaatgcttaaaaaaccctcaatattttaagtaaaaacatactcatatgacaagtaatataagttccttttctttccctctcttctggaaaacatcatttttatctgagaatatgtttattawttttaatacttaagaaatttggacttttttgttgtttttatattgtctcttaatgaaatttgacatccttgaaggtcgtgatgctgtttttctttttttttttttttttagttccaaacaggatctattacactgtgaagcat

SEQ ID NO: 166023 - DNA, 586 bp, Homo sapiens
actctggttcatcgtggtgttcttgtcccctgctaaggtcaaataaaagaaatacctctaagaagaataccactgtagtttctataaaaagttccactgtgaatgctggtcagtattttattcagtggcccttattttcaaaggaaaaacaaacacttgcaagttttactttcagaactgtggaacaaaaaaaaaaatgctgtgtttttctgatgaattgatatgcttgcttcaagataaaaagagatctgtatcctataatatttccctttttgcttgggctacttggaaccccagagttaaatttggttttaattgcaataccttcagcatgatttttgaaatactatcttgtccttttgctttgatgattgttttttcccactaagttaagatcctttttgtttgtttgtttgtttgcaaaaaagccattagtctagcttatgtttctaaagtaagtttaatataaataaatacataaaaatataccagrtgaaactagcatgcaaagtcatcattctatttatagacaaactaagaaaaataataatgcctagaaggcaaatgagtttcaaaaatgtaaatt

SEQ ID NO: 166024 - DNA, 560 bp, Homo sapiens
tctttgtcatagtgattataggagataattaataaatgctggttgttcataattgaagtttattaatttgactttttaaaaatataataggaaataacagttttcggtattgatagttaccgtaatataaatgaggttgttggtgagcctggcagttcttttctgatttacacaaatctggcattacacaatatagaggtattttgatgtgttaccttttgcagtttggctttatgtcctgtatgtgtgcgaggctgcatttgtgggttccttgatgttgcagtcacatatgactgttccccagcaactgatrtctggttcaataggaatcctttgacctctcatcaggagtaaatctctcaatccacctgaaatggaagctctaagtcttcttactcccaaatgtctctaagtattgtctcttcctttctacctctactgccttgtataagtgtattagtctgttctcacattgatatgaagaactatctgatactgggtaatttataaagaaagaaggtttaattggctgacagttccataaactgtacaggaagctt

SEQ ID NO: 166025 - DNA, 617 bp, Homo sapiens
aaatagttgccatttcaatgtacctatatgccaggtttgaggctaaatagttcacatatttatgtttatgaaagtttgaaactaccctacagtatttgccatggactgaattgtgtctcaaaatttgtatgttgaagccttaacacccaatgtgatcatttttacaggtggggctccttggaggtaattagatttgggtgaaatcatgaaggtagggctcccatgatgagattagcactttcgaaagtaaaagaagggagaccagagatcactttttctctaccatgtgaagatataataagaaagcggccatctgcaagccaggaagagggccctgacgcagaatggcattagccagccccttggtcttagactactcagcctctgaaactgtgagaaaccaatgtctgctgtttgatccaacaggtctatggtattttgttatggtagcccaagctgattaacacaggatttttatctccattgtatgyaacttgccttgggtcactctgctagtaagggaaagctatggtttgcatattagcccccaacccaaacctcatgttgaaatttgatcctcactgttagaagtgtggcctaattgggggagatgtttg

SEQ ID NO: 166026 - DNA, 472 bp, Homo sapiens
atgcttaacagttaggattttccgtattaggctcagagagaattggctaagttgaacatttagtaagtggaaatctttgacactgcagattaaactcaaatattttaattctatatctagtcctccttccatcgtatttctccatcaaactttttaatgcctcattatctgttgcttaatacgaagagaagaaaacccaccccatttttatatctgcaataatggctgaagaatttcttctatgtcttctctgggcaaagcatttgctgagcacttgatatggtattaccttcaaagaaactctgccagttacagggacattaagtaatttccccaaatccatacagcaaaaataagggcagagcaagccatctgccctgaaattccttgccctttccagttcaccaaattgcatctttgaagtcggatcaagatttkcgtacatatcctaccagtctaagcacgtttgaat

SEQ ID NO: 166027 - DNA, 468 bp, Homo sapiens
ttcccaccaaataaatcaggtctcagcttatgatcatttgtcatctgctgcttcttctccgggaccgcccctaacagcctagcagagctctgggctgtattccatgatctcttttaattccttgttggcggcttgctggccctttctctttaccttcctgccaggtttaatgccttttagcgtgccagctctgtttttcacaatttttccaaaatgaggtggaaaatcaaatctctagctcctaattctcagtgggcaatattttcagagaatccttcaacatcattcactctctcaattcctcatcttctgagcttctccatccataaaacaatcagaaatgtcttcctcttaataacatagctcttctggtattggggagtgrtgggactagaaaagagtagaggtgtaagcaatgcaatatgagttcattcatgcaaataaaaatcacactccctggacagaatc

SEQ ID NO: 166028 - DNA, 402 bp, Homo sapiens
tatttcttcccttgtttttcttcctgtctcccttgctcttcctcctcaaccctataagctcttaatgaagcagtaccccagggactacatttagactttccagtttgtctgcactcacactctcactggttttacycagtctcatggctttatgattaacactgacagctcccaaaagtatagctcctcttaggacctctctcctgccctccagactcatacatccaattgcctgcttggcaactctgttgggtatctcaaacttgtcaggttcaaaacagagctcccgatatttcttactcccaaatatgctccttctttactctccccccatttcaggacaggtgaagtcttataattagtgaggtcaaaaatgttagtatcatgattgtcttttctttt

SEQ ID NO: 166029 - DNA, 368 bp, Homo sapiens
ctctgtgtctgcacccaaatctcacctcaaattgtaattctgacatgtcaaatgaggggcctgctgggaggtgaatgaatcatggaggtggtctctaatggtttagcaccattgccctagtgctgtgtcctgagttctcatgagatctggctgtttaaaagtgttcagcattccctgtgtctcgctctctctccactgctccaccatgggaagaygtgccttgcttctccttcaccttctgccatgattgtaagtttcctgaggcctccccagccatgcaaactgtgagtcaattaaacccattttcttcttaaattacccagtctcgggtagttctttaaagcagtgcgaaaatggactaatacaaa

SEQ ID NO: 166030 - DNA, 581 bp, Homo sapiens
tgtggtcttttgtgtttggtttctttcacttagtataatattttcaaggttcaacaatgttgtagcatgtattcgtactttattcctttttattgccagtgtttgctagtattttattgagaaattttgtgtctacatttataagagatackgctctctagttttcttttcttgtgctgtttttacctggttttggcataaggataatgctagctcctagaatgggtttggaaatattcctttgtcttctcttttttgaaagagtttgtaaagaattattactaattcttctttaaatgtttaatcgaattcaccagcaaagccatctggaattgggctttaagttgtgggaaatgttttcgtttgaaattaaaacattttacttgtaataagtttattcagattttctatttcactttgaatcaatggtggttgtttctggttgtctttctagaaatttgtcatgtcatctaagctacctaatttgttggcacacaaatgttcacagcattcctatatgatccttttttatttctgtaaggttggtagtgatgtctccactcccatttttgattttatca

SEQ ID NO: 166031 - DNA, 516 bp, Homo sapiens
atatctaccctccagtcctttgtatcactaaagcaatttccaaagatggaactgtctgcagaaaagaataacacaattaaatgtattattgatgcatcaggcagaaattagaacacaacacaaatgmataatgatataatttcttagctgtaccactctgaaaaataaagataaaagatgctagtgagctatttatgatgggactacagaataataagattaatgaaaagaactcaggtaatttattttcatcataggttttaaacagtcactgaattacctatgattgcagcaataaaggttttttgaaaagtcattggagaactcaacatggcaaggccctacttcctattcaattggaagggtattgatttagtgctggaaggagtttttttttttttttttttcaactctatgttcataaactgagtgtttatgtggctgggattctctctttttctttctttcttttactcgatacaaaagtactgagttatcactcattgccaagcacag

SEQ ID NO: 166032 - DNA, 576 bp, Homo sapiens
ggagaaaaaaacatacttggtccctatcctctgtaatttacagcttagaaggggggacagtttttaataagttattactcacttgtgaagagtgtcatgaaggaataaaattggggactataagagagaattaaaggaagcataatttgccttctgtcctttgactatttaaacctcatacatagttcgaaatacagagaagcagctgcttcttamatgtagcttcttgtttcttattttccttgcttacagtatttagtctgcttatccaattcaacccttttgcattaatattttatttcttgcttccccagttagattgtggtctagactatgcctcatatgctttttttgccctttaaggctcagcttagctattaccttctctagaacccttgccttactatccttttctccgaccctgaacatgtatatatatatgtacatatatacatacacatgtatatatatacatgtgtatatgtacatgtatatatgtatctatacacatatatatgtatctatacatatatgtatctgtatagatacatatatgtatatatgtatctgtataga

SEQ ID NO: 166033 - DNA, 584 bp, Homo sapiens
taggcatggcactgtgtcatgctggctttggcagattcaaaagattgagaactgtggtttttttgaaattttaaaatttatgtatatgttatgctcacacaaaatttctttcttcaagattcataatcaataaacacaggaaatagctgtcctggaatcttctattccccaaaagtaacctgtcatagaggtagcaatatgcagctttatttttcctttggaatttatgagtaccagtcttggattgtatctatgggtagggaggttaaatggacaagaaycagggaccgatgatgctatcagcctttaaggaattgtatgacatgaggagaaactgtaatagaaagctggttttagcagcagctgaaatgacccattgcaagagaagagagactagcgacagataaagtactaaagagaaattttcgatgaggctatgaatttagcatattctcaggcactctaatctaatttgttgtgaccatggggacttcggtgaaaaagagctccctccttccagtgcccattattaatgtagtttaccctctttgactgatcaagttttcaagcacagaattgcttcc

SEQ ID NO: 166034 - DNA, 407 bp, Homo sapiens
tttagtatgagtataattatgaaataatatgccaattaggaaatgcaaataccttttaagaaaaacaaacattttagaatatgttatgtcttctcctagaaagcatacattagtgaatcagagaggaaaaagaatatacaatctttcggttcatggcaagttagtttctgtttctctctcttcgaattacatctatctgtcttggtctcttgctatctctgatttattttctttgctttatatgaactagggctcaaactccctgtgaagagtcaactttttgcttttccttagtttagactacccattcaatataaatcttgtaatcctgatagaaagtctgtgagaattctaagaattctaagaatggcccccaataacmcctcacccttgcaaaataattgtgg

SEQ ID NO: 166035 - DNA, 637 bp, Homo sapiens
ggtgatgcttcaaaagccattttaaaaatatcactcaagtagatattagcataatttagccattatttatgaagggtttagggtatgtcaactgttcttcctttttaatctttaatccttacaatagcctccgaaggttaaagtcactatagataaaaatggaacactaataggtaagaaatctgagtctcagagaggcttagtaacttacccaaggtcattgaggtggctaagtggctaacctaggagtcgaaatccaaatagatggtaaactcagctcttttcacccacactatactgcttctaaattggatcatggaatacgagtgtggagccaaagataaaaatagttacgcaatttcaaataaatccaaagactttccaaaaaaaaaaggcattgatttaaggttttatttacagaaaaacttcaaacaaaacatcaaagcaatgtaaaaaatggaatggaatmtgcttctggtgtgcatttcctaccagaactatttcattcaataataaaaaatatggaggctgaggttgattgtcacaaacttgccatgagcatttcttcaataatatatattgaattaaagaggaacgaaggagaagggcaaggatatccaataaatttaaaaaaaaa

SEQ ID NO: 166036 - DNA, 570 bp, Homo sapiens
ttcatcttcactgtattagtcagtgttctctaaagggacacaactaacaggatagatgaatatatgaagaggattttattagaattgactcacacagtcacaaggtgaagtgccacaaaaggctgtctgcaagctgaggagccaggaagccagtccgaatcccaacaactcaaaagttgggaagccsatagtgcagtcttcagtctgtggccaaaggccacagagagcccctggcaaagcactggggtaagtccaagagtccaacagctgaagaacttagagtctgatgtttgaacttaggaagcatccagcacaggagaaagatggtggctggaagactcagcaagtctgctctttccatgcctgcttttatgctggcagctgattagatggtgcccacccagattgagggtgggtctgcatctcccagcccactgactcaaatgtgaatctcctctggcaacacccttacagatacacacaggaacaatactgtgcatccttcaattcaatcaagttgacactcaatatcaaccatcaggttcacacagccttgtccctgtgtatatg

SEQ ID NO: 166037 - DNA, 500 bp, Homo sapiens
ggtatgaaatacaacaattacgtcctcaaaagccaaagacattttgctaacacacgtggtttgttgaagttggatgaaaacttaaaacacagggcatattttcacttgaaagtatcttttaaatctctttagggttttaaatgctaaaaacttgaaggaaaaacaaatataaacaagacacaaatgtaacaatgaaacgtgacaagagatagtacacgtgttttctttcacctgttttccttttcctcratgaactcgtggtcactgagctctgggtactgcactacgttgacacggacaggatgcgcactctgaagaagccttcgcacatcctgcacccttaaatcttcactccatattaatgacatgacctcgtgattcatgtcattcatgccatcatctttctcctcagtttctgtacctgaaggaacatctgatgagagcacctgagtaacagatttattataataataatttcaaaagcagttaacgtgcatttg

SEQ ID NO: 166038 - DNA, 500 bp, Homo sapiens
ggtatgaaatacaacaattacgtcctcaaaagccaaagacattttgctaacacacgtggtttgttgaagttggatgaaaacttaaaacacagggcatattttcacttgaaagtatcttttaaatctctttagggttttaaatgctaaaaacttgaaggaaaaacaaatataaacaagacacaaatgtaacaatgaaacgtgacaagagatagtacacgtgttttctttcacctgttttccttttcctcgatgaactcgtggtcactgagctctgggtactgcactacgttgacacggacaggatgcgcactctgaagaagccttcgcrcatcctgcacccttaaatcttcactccatattaatgacatgacctcgtgattcatgtcattcatgccatcatctttctcctcagtttctgtacctgaaggaacatctgatgagagcacctgagtaacagatttattataataataatttcaaaagcagttaacgtgcatttg

SEQ ID NO: 166039 - DNA, 245 bp, Homo sapiens
aaggctttaaataatataaactacagtataactgaagaaacataaaaccagaataacaccatgtctgttaaataaattaaattaataaataaaaatcttccaaaaaagaaaaatccygggctaattaccttcattggtaaattatataaaatatttcaagaaaaaataatacttttacacaaaatttttccaaaaaattagtggaaaatacctaaaactcattttaggaattcatcattgtagac

SEQ ID NO: 166040 - DNA, 402 bp, Homo sapiens
aaatggaacacaagttttgatgcagataaatacaaagaaatccatttaggaaacaaacctaactgtacctaaatgaaaactcagacctcatagagatatactccagaattcattctagattagctatttaaataaaaacactaaaatcagaaagytaaaagagtattaggcatcactaagaaggctggtggggggggaaatctatgatataccactcttataaaagccttgatgccttaaaatacaaaatgaaaccaagaaaaaacagaaaaaaatgtaaaagggagaactatgacatttagagtcaattaacatttattgagtgctgaaggcctgtgtcagcaatgttcaagatacttttcccatgttaccaatttctacacagatttaagaaatttagaa

SEQ ID NO: 166041 - DNA, 423 bp, Homo sapiens
aaatggaacacaagttttgatgcagataaatacaaagaaatccatttaggaaacaaacctaactgtacctaaatgaaaactcagacctcatagagatatactccagaattcattctagattagctatttaaataaaaacactaaaatcagaaagctaaaagagtattaggcatcactaagaaggctggtggggggggaaatctatgatataccactcttataaaagccttgatgccttaaaatamaaaatgaaaccaagaaaaaacagaaaaaaatgtaaaagggagaactatgacatttagagtcaattaacatttattgagtgctgaaggcctgtgtcagcaatgttcaagatacttttcccatgttaccaatttctacacagatttaagaaatttagaatgggaataaagtagataaagg

SEQ ID NO: 166042 - DNA, 427 bp, Homo sapiens
aaaatggaacacaagttttgatgcagataaatacaaagaaatccatttaggaaacaaacctaactgtacctaaatgaaaactcagacctcatagagatatactccagaattcattctagattagctatttaaataaaaacactaaaatcagaaagctaaaagagtattaggcatcactaagaaggctggtggggggggaaatctatgatataccactcttataaaagccttgatgccttaaaatacaaaatgaaaccaagaaaaaacagaaaaaaatgtaaaagggagaactatracatttagagtcaattaacatttattgagtgctgaaggcctgtgtcagcaatgttcaagatacttttcccatgttaccaatttctacacagatttaagaaatttagaatgggaataaagtagataaaggata

SEQ ID NO: 166043 - DNA, 589 bp, Homo sapiens
tctgcctgccccacttttgccgtctaattattccttagggtcctaactactttagactactctactttgtatcaccagcagggacacagttgctcatggaattacaggaaactgaagttaaattcagaagtcttaatgcctgattatgggacaaatttcttgtgttggaaacttatctgagtcaagaatatagagcaaaatatgtgctgaccccgccaagggaatgagattgcttcctaccctcatttatcgtaactatttccttatttcaaacactactgcactggcagtcragtactgtgcaaataataaagcaaactaataaaagaagtctgaatctgtcatcagtttatcctcaccgagattaaggaaacaaatggtggtttttaaatggagttaataattgctagcttgcaaaactcgttttctatttttgctatgaaattaagtaaatcttcaccgatttgaagatcaataataaaatcactatttgttacagtgtcaagatatggtgtgactgtccttgctgctaaatgtaaacattaacttacagtattttactttattatatatatattacttattatat

SEQ ID NO: 166044 - DNA, 589 bp, Homo sapiens
tctgcctgccccacttttgccgtctaattattccttagggtcctaactactttagactactctactttgtatcaccagcagggacacagttgctcatggaattacaggaaactgaagttaaattcagaagtcttaatgcctgattatgggacaaatttcttgtgttggaaacttatctgagtcaagaatatagagcaaaatatgtgctgaccccgccaagggaatgagattgcttcctaccctcatttatcgtaactatttccttatttcaaacactactgcactggcagtcaagtactgtgcaaataataaagcaaactaataaaagaagtctgaatctgtcatcagtttatcctcaccragattaaggaaacaaatggtggtttttaaatggagttaataattgctagcttgcaaaactcgttttctatttttgctatgaaattaagtaaatcttcaccgatttgaagatcaataataaaatcactatttgttacagtgtcaagatatggtgtgactgtccttgctgctaaatgtaaacattaacttacagtattttactttattatatatatattacttattatat

SEQ ID NO: 166045 - DNA, 574 bp, Homo sapiens
aaacagcaaaaaactagtaatgtaattaaacttcaagtttaaatgattaaatggaacaatctttgcccttatcagaaaataytttttttgagaatctcagaaaaattgggtgcttagaattcatcatatcttagtattcagcttaatggataaattttttttatctgtttctgtattctgaaaaatacaatcaggtgataatactattaatttttaaaactattataaaaaaattcaaacacaaaattaggtatttattagttgtaaagctttgtaatattagaaattaagattatatgtgattctaaaaaacccaactgaaaacctagaaaataaagaaaaatagctttaataaaaaaatcaattagtaaagaataatatggaatatttagtttattagtatagatcagtgtttggggctctgtgaagaagaatccatccttttctgaataaaaatgaaagttattcatatataaagttgataattttttcttttttgctccaaaacagtccctaacaatgacactgcaacattaatgaagaggaaagtcaaactaggggcagtaactactga

SEQ ID NO: 166046 - DNA, 574 bp, Homo sapiens
aaacagcaaaaaactagtaatgtaattaaacttcaagtttaaatgattaaatggaacaatctttgcccttatcagaaaatattttttttgagaatctcagaaaaattgsgtgcttagaattcatcatatcttagtattcagcttaatggataaattttttttatctgtttctgtattctgaaaaatacaatcaggtgataatactattaatttttaaaactattataaaaaaattcaaacacaaaattaggtatttattagttgtaaagctttgtaatattagaaattaagattatatgtgattctaaaaaacccaactgaaaacctagaaaataaagaaaaatagctttaataaaaaaatcaattagtaaagaataatatggaatatttagtttattagtatagatcagtgtttggggctctgtgaagaagaatccatccttttctgaataaaaatgaaagttattcatatataaagttgataattttttcttttttgctccaaaacagtccctaacaatgacactgcaacattaatgaagaggaaagtcaaactaggggcagtaactactga

SEQ ID NO: 166047 - DNA, 430 bp, Homo sapiens
aataagttgagtacaagacgttatgycatgtcttaagtctattaattaaaaacaaattctaagattcaaggagttttcagtgttccacatttctccctttagaaaaagtaaatgtgtgcagaattaacaaagtgtttaaaaatagatatttattactttactatttggatgaatgtgtagggcagtgcttccttggcactggggatatttcattgagcaaaactaaaaatatcttccctcatggagtttatgttatagtaagacatacatgtacatctataataactattacattagaaggtgtgaagtattgtgaaaaatatgtagagctgtagtggagcgggaagaaatgttttgaaatagagcttgagattcttgattgtcttgccctctacttgaacagtgtgccttactgttttcctccaccacc

SEQ ID NO: 166048 - DNA, 499 bp, Homo sapiens
ggattaaaagccaggtgctgtggtgcatacctgtaatcccagctactcaggaggctgaggcaggaggatcacttcagcccaggagtttgagaccagcctgggcagcatagcaagacccttactcaaaagaaaaagaaaaatgwcccaactctatgatgtctgcaataagttcatttcaaacataatgatacagacaggttaaatgtaaaaagatatacaaacataatcaaaagaaaacataaatggctatattaataccacctaaagaagacttcagagcaaagaaaattaccagtgacagaattggacattatatagtgataagagggtcaagaagacatggcaattcaaaatatataagcactagacaacagaacagcaagatatgtgaaataaaaaactgatagaactggaaggagaaatagatcaattcaaaataatagttggagacttcaacacccatctatcaatgattgatagaacaactagacaaaatcag

SEQ ID NO: 166049 - DNA, 499 bp, Homo sapiens
ggattaaaagccaggtgctgtggtgcatacctgtaatcccagctactcaggaggctgaggcaggaggatcacttcagcccaggagtttgagaccagcctgggcagcatagcaagacccttactcaaaagaaaaagaaaaatgtcccaactctatgatgtctgcaataagttcatttcaaacataatgatacagacaggttaaatgtaaaaagatatrcaaacataatcaaaagaaaacataaatggctatattaataccacctaaagaagacttcagagcaaagaaaattaccagtgacagaattggacattatatagtgataagagggtcaagaagacatggcaattcaaaatatataagcactagacaacagaacagcaagatatgtgaaataaaaaactgatagaactggaaggagaaatagatcaattcaaaataatagttggagacttcaacacccatctatcaatgattgatagaacaactagacaaaatcag

SEQ ID NO: 166050 - DNA, 499 bp, Homo sapiens
ggattaaaagccaggtgctgtggtgcatacctgtaatcccagctactcaggaggctgaggcaggaggatcacttcagcccaggagtttgagaccagcctgggcagcatagcaagacccttactcaaaagaaaaagaaaaatgtcccaactctatgatgtctgcaataagttcatttcaaacataatgatacagacaggttaaatgtaaaaagatatacaaacataatcaaaagaaaacataaatggctatattaataccacctaaagaagacttcagagcaaagaaaattaccagtgacagaattggacrttatatagtgataagagggtcaagaagacatggcaattcaaaatatataagcactagacaacagaacagcaagatatgtgaaataaaaaactgatagaactggaaggagaaatagatcaattcaaaataatagttggagacttcaacacccatctatcaatgattgatagaacaactagacaaaatcag

SEQ ID NO: 166051 - DNA, 499 bp, Homo sapiens
ggattaaaagccaggtgctgtggtgcatacctgtaatcccagctactcaggaggctgaggcaggaggatcacttcagcccaggagtttgagaccagcctgggcagcatagcaagacccttactcaaaagaaaaagaaaaatgtcccaactctatgatgtctgcaataagttcatttcaaacataatgatacagacaggttaaatgtaaaaagatatacaaacataatcaaaagaaaacataaatggctatattaataccacctaaagaagacttcagagcaaagaaaattaccagtgacagaattggacattatatagtgataagagggtcaagaagacatggcaattcaaaatatataagcactagacaacagaacagcaagatatgtgaaataaaaaactgatagaactggaaggagaaatagatcaattcaaaataatagttggagayttcaacacccatctatcaatgattgatagaacaactagacaaaatcag

SEQ ID NO: 166052 - DNA, 570 bp, Homo sapiens
gcaaattggagtgtggggccatctgaaatagtggtatgtctaattaatcaaaatatgaactaaatgtaataaatcaaattaattggataacaaatgtttccaagtaaatgtatttttcaggaatttattagtgaatagaatgattcatgggttattaatatcatcgagacatataatttcttgactttaaaaatccttaaaaatgcttgttctctgaaataaattctgtcagtgtgatgctattagtttgatttattttgttagtaaaacctttattgttatataatacaaagctgtacaaatagtaaaagtgaattcatcacrctgtaaattaatgagaagagttggattgtatactagacataatcaaatccattttttcttatttttacataaaaagagggccttatttttctgaaattctatttgccaataagtgatggattcaaaacaagctatggcggtttgaatcattgttcataagccatcatgccctctctgtgttacaattatacttttctattctctagcatgagactctctgatagcatccactggagtgggcaaagc

SEQ ID NO: 166053 - DNA, 489 bp, Homo sapiens
atacaattactgggtcaaagagtatgcacataaacctctctatacacatttcctgccaacaccttgaaaagttcaccagtatttatacccattaatggcagaaaagcgctcacttatttactgtgtatctgccaactgtgaacattgttacttataattttaatcttattttaacatgcattttgattgctaatgaaatgattttcatttatttaatcatcatctctatgtactgatttgagaattcttattcttrttcttcaatagtcatgacaaaatgtattaatttatatttgcatcaggttctatgctgagaatctggaatgtagaggtgaacaaaacaaacaagaaccatgtctacaagaagcttacaatttagtgaggacagaagatgtgaacatgtcatctcatgggtgtgaaaggatttgaaatgctctaatgcttcaagagatttattctgatctagagagactggaaaggccccattaa

SEQ ID NO: 166054 - DNA, 489 bp, Homo sapiens
atacaattactgggtcaaagagtatgcacataaacctctctatacacatttcctgccaacaccttgaaaagttcaccagtatttatacccattaatggcagaaaagcgctcacttatttactgtgtatctgccaactgtgaacattgttacttataattttaatcttattttaacatgcattttgattgctaatgaaatgattttcatttatttaatcatcatctctatgtactgatttgagaattcttattcttgttcttcaatagtcatgacaaaatgtattaatttatatytgcatcaggttctatgctgagaatctggaatgtagaggtgaacaaaacaaacaagaaccatgtctacaagaagcttacaatttagtgaggacagaagatgtgaacatgtcatctcatgggtgtgaaaggatttgaaatgctctaatgcttcaagagatttattctgatctagagagactggaaaggccccattaa

SEQ ID NO: 166055 - DNA, 582 bp, Homo sapiens
atttttgtcatactgctaaaatcatgtctcatacataaagaaataaaatctagtggaaattgctaaaaatttttagtaattcatatttaccaaaatataactagtgttatctgttttctctagtccatttcttagatattcccatgttaaacatcctaagtttagtatttattcaacttatctgcatagaatactaggttawgttacccagatggtaacccaaggcaacttttatttggcaccaacactaagactggtaagattcttatttccttcaagtgtcttcaagacttagtctggtttttacatcttagttcaatccctctgtctctgagttttttactacttcttttttatggtcagcaatatatttgtcagtcctgctctgttcctttaattaataaatgaaaaggcccatttcttcctccccattggtttctttctatgctgcactgacctgcagttactcctcctgctaaggtctctctgtcactgactcctaaaaactgtcttccctgctcttatttccacatggcttgacttttatctgcagcatagtccagctatgaagattgactggtg

SEQ ID NO: 166056 - DNA, 511 bp, Homo sapiens
ttgaatcactaagacaatgtatatttccagtctcaggttgatcttaactttcagctgtcatcaaaacagaggtttcagccttactctggacctaaggctgatcattctccagaagatgcagcatattgcctcataagaaggcatttcttctggagacttattttgtgacctgattttattaaaaaaaaaaacacacaatgttttcaaatcctaagagtacagatgaagaatagaaaaatagtgtaaatttgaaataacaagtaacactctcagctgagggcaagaacaagagggtggctctcctmttaagccttcttaaatttgaccaatgtcacttttatcaaataacctttcctaatccccctgttgaattactttcattttttcccctaactgtataacacttgcttttatcattcttatagtatttgtcatgtatttttttaatatcgtcttcaccggtgtcccagtgttttctcctagagtaaaaccttcttgagggcatagctgc

SEQ ID NO: 166057 - DNA, 559 bp, Homo sapiens
atcagataaaactataaagaagaaacaaagaaggtcattatacaatgataaaggagtcaattctgcaagagtatatagaaattgtaaacatatttgctcccaacactggagtacccagatatataaaacaatrttatcagagacagagagagatacctcaatagaataatagctggagacttcaacaccccactttgagcattagacagatctttctgacaggaaatcaacaaagaaatgttgaacataatctgcactatagagcaaatgaacctaagagatatttacagaacatttcacccaacagctgcagaatatagatgcttttccccagcacatagatcattctcaaagataagctgtgttaggtcacaaaacaagtctcttgtatgttgtgtgtacaacatacacaaaattgaaataatatcaagcaacttttctgaccacagtggaataaaactacaaataaataagaggaattttgcaaactatacaaatcatggaaattaattgcttctgaatgactggttggtcaatgaagaaattaagaaggaaattt

SEQ ID NO: 166058 - DNA, 559 bp, Homo sapiens
atcagataaaactataaagaagaaacaaagaaggtcattatacaatgataaaggagtcaattctgcaagagtatatagaaattgtaaacatatttgctcccaacactggagtacccagatatataaaacaatattatcagagacagagagagatacctcaatagaataatagctggagacttcaacaccccactttgagcattagacagatctttctgacaggaaatcaacaaagaaatgttgaacwtaatctgcactatagagcaaatgaacctaagagatatttacagaacatttcacccaacagctgcagaatatagatgcttttccccagcacatagatcattctcaaagataagctgtgttaggtcacaaaacaagtctcttgtatgttgtgtgtacaacatacacaaaattgaaataatatcaagcaacttttctgaccacagtggaataaaactacaaataaataagaggaattttgcaaactatacaaatcatggaaattaattgcttctgaatgactggttggtcaatgaagaaattaagaaggaaattt

SEQ ID NO: 166059 - DNA, 551 bp, Homo sapiens
ctacaccaatcgtgcatgcaaactttttaaaatatatgaggttaaacattggaagctaggaaaacccttttctatgattttaaaaatggaaagtgtgggtactaggatgttaaataatttgtcctggaggcccataatcaccaagtgatctgagtcaaaatagatgtcctaatctgttatctggttatcttgaaaacaatttgtaaataatgagtacatttaaactcgagatcttaaatgcctttatgtaacgttaagttacaatttgttaggcaatacacctacctattagtctttattgaaagagtggatgtttaattcccattaattcatacttctataacaagtcagccaatgtttagaggaatttcagtggagaagaaatagctttatgaggtggtggctgagaaagtcarcattgacttttcacttgtttccttcctaagtgacattttggcaggagtaatgaatgagaaaattccctgttatatttaaaagttgacatttttagggcaatttgagttttctatatattatgcatgtttatttct

SEQ ID NO: 166060 - DNA, 436 bp, Homo sapiens
ctctggtgatagaccaagcctggaataaagacagttcaggagggcaggcaggttccagctgaaccctttaacagcagcagaattgatagccccctgctgtctcattgctgtggtgaagatatggacctatgctcatgtcctcacaaaaaaggttgtcctttttttaaaaagctgattcaaaaaaaaaaaaaaaaaacctactttttttttccacacccaacatcattcagggtctgtgtccaacaagaagagcatctgctccatgcagctgaragggcacatggggtgtttctatcttggcataatttgccagatctgagttcctaatgtcttcatgggacctgattttttttttttttataaataagctgcttcaaaaacaaaaatagaacccacaaaacagaagataaatttataaaatcaatccaggtcagta

SEQ ID NO: 166061 - DNA, 533 bp, Homo sapiens
tttcttatactccccctttttccagtagctcccatggcttacatatggcagcaaccataagaaatttaaaaacaaaaacaaaaaaacccttagtaataaatttttaaaaagacattaacaaccttccaatttgttgatcaatgaatgatagaatctccaaatattactgtgaaaaatatttctactaaaggagatcaggaaatgccaccacaaaatatgcwgcttgggcatgctgactaatggaaactgagggcacttggggaacagcaaacgcaggaagggactttctctgaacttccttaatctgcctaaagacagattgcccagaacgagcacaattgtcacgaaacccctccgcaggaacctcatcaactcagatggttaggaaaggttaactcaagaggagaagaaactggaggtgacgtcatgcctagacagaatttgtcacaggctgtcacctcttcttttgagggctcattcatctttctcaaaaatcatttattctcatctaaattgcctacctctcccttcca

SEQ ID NO: 166062 - DNA, 544 bp, Homo sapiens
ggggaagtgaaggaggagtgtgaatagagaatattataaagacataacttagagtatttggagataatagattgcgtaacaaatagcataagacaatggtatattttgcttgcataactaggtagacagcgaggatattcactgacataagaaattcaggaaaacagcaagttgaaaacaatatagtaagttggtttttagayacgatgacattgaggcacttacgggctctcatagcaggtagctctaaacagatctcaagagtcgaattcttattcaacatgcacttggaaataatagaaatagcaatcctgaatttaagtatacttaatccataaaatgtttgaaataataaaatcaaaatttactggtgattactataggccaagacatttactgatatatttgtatgaataatcccacaagttacacaaaacaacccctgagacaggtactatatggttcccattccacatattagggaaatgtttttaaaagcttaagtaattgcccaaagtcactgtcttagtccattttctgttgc

SEQ ID NO: 166063 - DNA, 622 bp, Homo sapiens
tttgtatttggcactagcttatatttgaaactgggtttttttttttagttttagttataaattaatgtgtttcacaagatccttagggtttcaatctctcttttacacacagtggaagatccagggagcgtaggagaaactatcaaagattatatggttgaaattattgagtatagtttcaattattgagtatagtctcaattattattgagaattgagtatagtgaacattggacattctctctcaaatgccacactagaaatttcagtcaaacctaaatcttaatggagtagagagttggttgtaagcagtgacgaagaaagattttgtatgtatttcaaattgttatgcacctgtcattmttttagctattaacatccaatttccatcaggtatgggtctcaaagatttcataaattaaacctgttgaggcagttatatgatatggcttgtcaagaatcaggggaaaatattatacattttatattaatcaagtcatctgttactcagcacacattcaataagaatccaccatggctgcagcaactctattaggcaagaaaaacagagaagaatcaaagggtagagttcctcctcttacagactaagaaaataaagctt

SEQ ID NO: 166064 - DNA, 407 bp, Homo sapiens
gaattcattttcattcactattagcactttctatacctccctatttctaaattgggtaagggttgaggtctttttaaagcatagaactatttgtatttaaagagggccaactcatcttgattttatataactrctatcactcatagtcagtctaggtgagcctttgaagtcctgtgtatctgcttcttttatgccattgccatccgtgctgcacttgggcgcaggaacactcagatggagtcctggcatcttcaggactgcctccctcatgctctattctgccattccccttagacatctcctacattgaagtgatactgtttccactagttacagaaccacaaagtcacatcctattttgaatcttggaaaactttcctcactcatccataatcccaagacaaggg

SEQ ID NO: 166065 - DNA, 401 bp, Homo sapiens
tctatacctccctatttctaaattgggtaagggttgaggtctttttaaagcatagaactatttgtatttaaagagggccaactcatcttgattttatataactgctatcactcatagtcagtctaggtgagcctttgaagtcctgtgtatctgcttcttttatgccattgccatccgtgctgcacttgggcgcaggaacactcagatggagtyctggcatcttcaggactgcctccctcatgctctattctgccattccccttagacatctcctacattgaagtgatactgtttccactagttacagaaccacaaagtcacatcctattttgaatcttggaaaactttcctcactcatccataatcccaagacaagggggaagcctctggaaagagaattc

SEQ ID NO: 166066 - DNA, 604 bp, Homo sapiens
attctatgtacaattgtatggcaacaaattaaataacctagataaaatggacaaatacctagaaacacactaactactaggactgactcaagaagaaataaaaaatatgaatagtcacaatggcaaaaacatggaatcaactcaggcacccatcaatggtggattggatttttgaaatgtggtacatgtacaccatggaatactacrcagccataaaaagaatgaaatcgtgtcttgtgcagcaacatgaatccagctgaaggtcataatcctaagtgaactaatgcagaaacagaaaaccaaatactgcatgttctcacttagcagtagtagctaaacttcttcccatatagatgggaagaataaacacttgggactactggagaggagagaaaagggaagagggaagggcggaaaaactacctattgggtactatgctcactgcctgggtgacgggttcaatcacacttcgaacctcagtgtcacacaatgtacctttgtaacaaacctgcacatgtacccctgattctaaaataaaaactgaaaaataaaaataaaatctgaatagacctataaaagtaaagatactgaattagtaattca

SEQ ID NO: 166067 - DNA, 427 bp, Homo sapiens
cttatggcacagtaaagcctgcgggtgccactgagactgcttctgctgagattagacacagtggtttggcaccaagtctgtgaccagtgcctgtttttagcaacayggctagtaaatattgactctgtggcatgaaaatggaaagcagagatgactatgtcaactcactcagaggatagaagttcaccaacctctgataagatgtagttatacaacgcataggtgtgtcactaataaataagttgtttgggggcagggagaatggaaaacaagacaaggaagcattccatgggcaattaacagctgctttcctgtctgcactgtctggctggcttattcatttgttcgctttaaaatgaatggatacttacatacacactggcatgtaggaaaaaaaggctagaaagaaatacaccgaagcattcac

SEQ ID NO: 166068 - DNA, 573 bp, Homo sapiens
catctgcaatactcagtatgctgtagtggttgagagctgttctgcttgggtttgaatcctgactctatttactagctatgggactgtgggcaagttgcttaacctctctgagcctttgtttcttwaagtgtgaaatagaaaaatgttagtccttagatcataggatattgtgatgattaaatgagataatgtgcataaggcatgtaacatagagtatgtgttcaatgaatattaattgctattattatgttgttagagtaaaaatacaggttttaaggcctcactgctggagaatctaatttgttaaagtctatggtgggatctggaaatctgcattttaaaacaagttctccaagtgatcccaaggtcctggatcccttggcctagaacccttcctgagatctttccctttgggcccatggctttatttcagccccagtggagcacatgctggctggataccccagcttctgtcagaggattgtaaaccaaaaattaaattctaagccccctcaaccaactgaatagacccctctctcagccaaggagattccaaagtaaacctgaaaaact

SEQ ID NO: 166069 - DNA, 406 bp, Homo sapiens
cagatacttaatgtgtaaagtcctctaactttgatcaattctatgacctgtttgctggggagatcccttcatttttctatccagaaatccctgtggtctttcaagcatggtgctgggtgcttgggtattgctgctgatacaaaattcactgaggccctgtctgagattacttcatcttttccaggaaccttagtgtaggagatagaaaaaccagcaactctaagtactatgctagaaggaagcccagggtgggtggggaggctaaaggaggggacatctaagtccaaccgggrtatcagagagggctccctggaaaaagtgctatgtagttgagttctgaaggattggtaggaaatagaagaagagaagggccttataaggaagaaaggccagcagaatacatggt

SEQ ID NO: 166070 - DNA, 560 bp, Homo sapiens
agataagggttcaggtgagcagagaagtgaggtaagcatgtacttgtttcagagtgatccctctggctgggaggatggataggctggagacagcctggaggctggggctcagctaggaggctaaagcaataatctaggtaagatgtgaggagaggacagagtcaagatcttttgcagaggtcaatctgaggattgattaggtgcctaattagaggtagagatgaaggaggggacagggttctggatgacacccaagttctggcttgtgcccctggcccagagagggtctggcatgtccattatctcacagtggctatgccagggcatgagctcagttcccatatgagtccctaccccagctcttactctactctgcctgatagggtgaccttctatgagtccccttagcatggtcctccttccttaggctcactgtcactttttttttttttttaatagagatagtctcgctctgtcacccarctggaacacagtggtgtgatcacagctcactgcagcctcgacttcctgggctcaatctatccacttgccttagcctc

SEQ ID NO: 166071 - DNA, 565 bp, Homo sapiens
tgctcggtaatagtagctgttattgttattccccttctcagaatagaggaaaaggaaatagaacttttgttacagtgttgtgggccccatagactaggaaaacaaaccctgtgagtacagttctgttaataaattgtccagcagagagctgagttggttgctaggtagaactgctggcgagggctggtgaggctccggggctaacctggacattttccattacctggaaacagtctgggttttctctggatgcatgtgaggtgaggatgctgccagtccccaccatggccaggtatccttagagttgtgaggacctgagctttctgattcttccacccgtgggtcccttggcctaggcccacctgggcaacttcaggaagtgatgagtagctggaactcagaaggattacctcakgatcgggtacatgtttcctggagccagaatgtgggtatgcatgcctcctggctggaacattctgtctcctggaggggatcatgcaattaagatccagctggtagcttagaggaggcttcttggttctgtgttgtttcccaccatataaaa

SEQ ID NO: 166072 - DNA, 634 bp, Homo sapiens
aaagtagaacttatgcctggagctatttccatactaaaacctgaaggcatgaagtggaggtaagacttggtagaaatcgaactggcaagatytgttaggatgagactgtaaaggttcaggtccagaccaaagagtttctatcagcagtcacagcatggaagtctttttccctcaaaactttttattgggaaaaaaatttcagaacatttgaagaaattgggagaatacaatagacatcattaaaccctctccttacattcaacattcagccatatttgctttaccatattaacattcccattttgcaagtgagggacccaaggctgaaagagatgagtgacttgccaagatcacagagctaggatgggtagaagtggaatcgaactcctatctacctaaggatggggccctctgtagcattggttttctaaacactggaccccagctgattttgacttccttgcaggcttgctttgaagtcatgcatcttggagccaactcctggtgagttggatttagttggtttgggaattccgataggcaattagcacagatggggggcccctaaagcacagctaggtcctcagaatgcctgaatccaggcccaggctcctcactggttagatgggagcaa

SEQ ID NO: 166073 - DNA, 634 bp, Homo sapiens
aaagtagaacttatgcctggagctatttccatactaaaacctgaaggcatgaagtggaggtaagacttggtagaaatcgaactggcaagatctgttaggatgagactgtaaaggttcaggtccagaccaaagagtttctatcagcagtcacagcatggaagtctttttccctcaaaactttttattgggaaaaaaatttcagaacatttgaagaaattgggagaatacaatagacatcattaaaccctctccttacattcaacattcagccatatttgctttaccatattaacattcccattttgcaagtgagggacccaaggctgaaagmgatgagtgacttgccaagatcacagagctaggatgggtagaagtggaatcgaactcctatctacctaaggatggggccctctgtagcattggttttctaaacactggaccccagctgattttgacttccttgcaggcttgctttgaagtcatgcatcttggagccaactcctggtgagttggatttagttggtttgggaattccgataggcaattagcacagatggggggcccctaaagcacagctaggtcctcagaatgcctgaatccaggcccaggctcctcactggttagatgggagcaa

SEQ ID NO: 166074 - DNA, 634 bp, Homo sapiens
aaagtagaacttatgcctggagctatttccatactaaaacctgaaggcatgaagtggaggtaagacttggtagaaatcgaactggcaagatctgttaggatgagactgtaaaggttcaggtccagaccaaagagtttctatcagcagtcacagcatggaagtctttttccctcaaaactttttattgggaaaaaaatttcagaacatttgaagaaattgggagaatacaatagacatcattaaaccctctccttacattcaacattcagccatatttgctttaccatattaacattcccattttgcaagtgagggacccaaggctgaaagagatgagtgacttgccaagatcacagagctaggatgggtagaagtggaatcgaactcctatctacctaaggatggggccctctgtagcattggttttctaaacactggaccccarctgattttgacttccttgcaggcttgctttgaagtcatgcatcttggagccaactcctggtgagttggatttagttggtttgggaattccgataggcaattagcacagatggggggcccctaaagcacagctaggtcctcagaatgcctgaatccaggcccaggctcctcactggttagatgggagcaa

SEQ ID NO: 166075 - DNA, 569 bp, Homo sapiens
aaaggtagactcacaagaatgagcaagcaacaagaggtgtcaaaaatgaccagatgaattttaaaaagaacaggatratagaactttaaagaatttaattgttgaaatgtaaaactctgtgaatgggttaaacagcagattgtatacagctaaggagagagttgaagaattgaaagagctgaaacaaattagctagagcaccatagagtgacaaagacatagaaatatgaaagagaggataagcaaaagaggataaaaagaaaacttatcatagatctctttggaattctaaaaggaggaaatagatacaaaaagaaaaaaaggagaagcactatttgaagagaatggctgagaattttcagaactgcatccatgcatccacagacacagaaaggacaatatataccaggcagaaaaaaacaaaaatcttacctagacacattatagtgaaactgaagggtaccaagacaaagcagtcagggaagacaaatacctgcaaaagaacaataattagatctacagcatatttctcaaaacaacaatggaagccagtatccagtggaatatta

SEQ ID NO: 166076 - DNA, 607 bp, Homo sapiens
ggggggacagagtccacctccccacaccaaaggtcagattttcttttctcccgccttcttggcagccaggacatggacatgtgacttgagatcagccgactagagatctcagctaggactaggaagctggagtgagtcacacaaaaatgagaaatcactctggcagtagcggagacaacagaagtcacatctagcttccaggagcagcagggccagcagttcaggtgactcctgtagcaatgatccacttggagttgcatgtcagtagtgtcctcaccagacagtccctaaggcatggttttgtctttggacctgctgcccggcttctgtttctacttggccaggacgagctcaggcastagataaaactgagtccgaatcactcactgcctggagcagagagaagctgaaggtccaggctaataagtatgaactccaggaggacagacaatggctgatgtatctttgtgtccttggcacccaagacagtgcctgggtccagactttgggagctaggcagttctgcatcaggagttcactcacatggtttgcaaattgctgctggttgttgttgggaggcctcagctgcactccgtgtggaattctc

SEQ ID NO: 166077 - DNA, 607 bp, Homo sapiens
ggggggacagagtccacctccccacaccaaaggtcagattttcttttctcccgccttcttggcagccaggacatggacatgtgacttgagatcagccgactagagatctcagctaggactaggaagctggagtgagtcacacaaaaatgagaaatcactctggcagtagcggagacaacagaagtcacatctagcttccaggagcagcagggccagcagttcaggtgactcctgtagcaatgatccacttggagttgcatgtcagtagtgtcctcaccagacagtccctaaggcatggttttgtctttggacctgctgcccggcttctgtttctacttggccaggacgagctcaggcagtagataaaactgagyccgaatcactcactgcctggagcagagagaagctgaaggtccaggctaataagtatgaactccaggaggacagacaatggctgatgtatctttgtgtccttggcacccaagacagtgcctgggtccagactttgggagctaggcagttctgcatcaggagttcactcacatggtttgcaaattgctgctggttgttgttgggaggcctcagctgcactccgtgtggaattctc

SEQ ID NO: 166078 - DNA, 607 bp, Homo sapiens
ggggggacagagtccacctccccacaccaaaggtcagattttcttttctcccgccttcttggcagccaggacatggacatgtgacttgagatcagccgactagagatctcagctaggactaggaagctggagtgagtcacacaaaaatgagaaatcactctggcagtagcggagacaacagaagtcacatctagcttccaggagcagcagggccagcagttcaggtgactcctgtagcaatgatccacttggagttgcatgtcagtagtgtcctcaccagacagtccctaaggcatggttttgtctttggacctgctgcccggcttctgtttctacttggccaggacgagctcaggcagtagataaaactgagtccgaatcactcactgcctggagcagagagaagctgaaggtccaggctaataagtatgaactccaggaggacagacaatggctgatgtatctttgtgtccttggcacccaagacagtgcctgggtccagactttgggagctaggcagttctgcatcaggagttcactcacatggtttgcaaattgstgctggttgttgttgggaggcctcagctgcactccgtgtggaattctc

SEQ ID NO: 166079 - DNA, 404 bp, Homo sapiens
gactgtaactctgtgagtctcaacttcctgatctctataatggggakagcactgactgtgcagggtgttgagatactgtctgaggccaatatatgaaaagtgcttcataaagaacctgcatatagggtagagttgatatcacctggtgaaagcatgtgagtatttttatggttcttttttaaaaaaacagatataatttatatacaattcacccatttatagtgtcctaaagccattagtacattcgcatatagtgtattaaagccattaaatggctttaatgtattcagagttgtgtgaccatcatcatcatcaattttagaacatttcattaccaaaaaacccccttacccattagcagtcactctctgcttctcccaaacccactagccctaggcaaccac

SEQ ID NO: 166080 - DNA, 420 bp, Homo sapiens
caaattggctctgtgactgtaactctgtgagtctcaacttcctgatctctataatggggagagcactgactgtgcagggtgttgagatactgtctgaggccaatatatgaaaagtgcttcataaagaacctgcatatagggtagagttgatatcacctggtgaaagcatgtgagtatttttatggttcttttttaaaaaaacagatataatttatatacaattcacccatttatagtgtcctaaagccattagtacattcgcatayagtgtattaaagccattaaatggctttaatgtattcagagttgtgtgaccatcatcatcatcaattttagaacatttcattaccaaaaaacccccttacccattagcagtcactctctgcttctcccaaacccactagccctaggcaaccacta

SEQ ID NO: 166081 - DNA, 419 bp, Homo sapiens
aaattggctctgtgactgtaactctgtgagtctcaacttcctgatctctataatggggagagcactgactgtgcagggtgttgagatactgtctgaggccaatatatgaaaagtgcttcataaagaacctgcatatagggtagagttgatatcacctggtgaaagcatgtgagtatttttatggttcttttttaaaaaaacagatataatttatatacaattcacccatttatagtgtcctaaagccattagtacattcgcatatagtgtattaaagccattaaatggctttaatgtrttcagagttgtgtgaccatcatcatcatcaattttagaacatttcattaccaaaaaacccccttacccattagcagtcactctctgcttctcccaaacccactagccctaggcaaccacta

SEQ ID NO: 166082 - DNA, 502 bp, Homo sapiens
attggtttgacattcaaaatcaatcaacgtaatttaccatttttacaaacaataacaaaaaatgtgtacaactggccgggtgcagtggctcatgcctgtaatcccagcactttgggaggccaaggcaggcagatcacttgaggtcaggagttcaagaccagtctggacaacatattgaaactcctatctctactaaaaatacaaatattagccaggtgtggtggcacacccctgtagtcccagctacttgtgaggctaaagcacgagaattgtttgattctcgtgccttaggcagaggttgcagtgagttgagtttgtgccactgtattccagcctgggcgacagactgaaactctgtaaaaaaaaaaaaaaaaaaagkatacgattattccaacagatcaagaaaaagcatttgacaaaatcccaacatccaatattaatttctgataaaaaccctcagtaacttgaaatacaggagaacttcttcaacctgataaaaaat

SEQ ID NO: 166083 - DNA, 496 bp, Homo sapiens
gcgagcttcctgggtgtgtgacctattagttgcacagggaccccactcccactccaaatttaagatactctgttgttgccatattacatttcttaatgattattgaacgaggtaacattttcattttgtactgagtcccccaaattatgtagcaggtcctgtgcaattcatgtaatcaattaccagagcttaaacgaaagagtatcatgagccctatgtggtataataatagtaatagagaagaactttatgggtattaacttktttgagccttgaaaaacatcactacaagataagtattatcattagctccattttacagatggagaaattaaaatacaaagaggataatgaaattgcccaaaatcactggtaattgtggggccagaattagatcccagacaatttgactgcagagaccgttatgctaaaaacagtgaatactgtttaaagggaacttcagaatcacctggcttccataacacagctctacccc

SEQ ID NO: 166084 - DNA, 508 bp, Homo sapiens
gtctgaggtgctgggcgtgtattattttgatttaattctaatgctccacaaggcattattatccccattgcatgggagaggaatgggctcagagaagttaagtaacttgtgcagggtcacatagaactgtggcaagcagcagagctgagatactcaggtttgcttgactcccaagctcattctccgtccacttagcacatggaatgatctagccagagggcaaaaggcttgtaagcaggtaattgaagttcagtgtaataagtgcaggtataaaatggccagggcaaggagctgctgaattaacgaggaagaaatggagatagctgttcaggctatgggttttaaatgctctatcatgtcaacattacactgttaaattattcattcatcaacgttgtttagacccttcaatttgctaggatactagtggcaatagatacaaacatgagcaaagcaakatcatttttaaaaagaactcatgatctttttgggaggagagattagatgg

SEQ ID NO: 166085 - DNA, 508 bp, Homo sapiens
gtctgaggtgctgggcgtgtattattttgatttaattctaatgctccacaaggcattattatccccattgcatgggagaggaatgggctcagagaagttaagtaacttgtgcagggtcacatagaactgtggcaagcagcagagctgagatactcaggtttgcttgactcccaagctcattctccgtccacttagcacatggaatgatctagccagagggcaaaaggcttgtaagcaggtaattgaagttcagtgtaataagtgcaggtataaaatggccagggcaaggagctgctgaattaacgaggaagaaatggagatagctgttcaggctatgggttttaaatgctctatcatgtcaacattacactgttaaattattcattcatcaacgttgtttagacccttcaatttgctaggatactagtggcaatagatacaaacatgagcaaagcaataycatttttaaaaagaactcatgatctttttgggaggagagattagatgg

SEQ ID NO: 166086 - DNA, 459 bp, Homo sapiens
ctgctaaccctgagaagtacgtaagtaacttgataagcaagaaggtaatagtagcctaaaacaatagccaaggaarttggggtctggaggcttttggtttccctacttaaagataacatcttaacacatgtccatgagttgtctttcagaaacttggaccccctctcactggatccgcagacctcaaataagggggaactgaagactgaaaacttgaccagggttctttgctctaaatgtcttccagaggggcctagagggagtcacattttcaagccagttaatattcttttctgctaaccccaagtttttaaacaattgcaaatcagaaaatctttgaacgtacctactacccgtaagctccctcatgccctacaacttcaagatattttggccttttaggccaaaaccaaagtttaactccatgtattgatttataattttgccctctagcttctg

SEQ ID NO: 166087 - DNA, 380 bp, Homo sapiens
caactcaactgcatatgcataaccacatattatggtgaattgtaactcagttatgagaaaaagttacagatagtgaagagaaattacactcaatccgaaatttaccttatctttatagtagcccatgagaatgtctcacagatartagagtctatcatagaagcaaaaaacaagactgacagctttatgttagatatttatacagcatatactactggaaaatttgacacactacctgatacaaaaaaattcaattggaaaaaataggaataataattaagtttttaaaaattaccttatacatcttgcccttgatccttagggatatacctaataaagttatccaatcaattattaaacttaaatcacatttacatagg

SEQ ID NO: 166088 - DNA, 501 bp, Homo sapiens
ttattttaatataatattatttgtattcatcttaggtcaattcaaggtagtttatattgtacttagcataaaatgttcactaagaaatagcctaaattaaatcagtaattcttcctgtgccactgctattaggttcaattacttgagaacagagaattaatattaggactaataatagtttcttatatatcattatatcttaatgagtttgaaktattatctaacattggaagagagagttatgccatgaaactagtacacattaatttaagaactacattgtaatcacaccccaaatcaaatagtccagactccttgacaagggcgtaattcaaatgtgaagccccatggcatcaagaggcactgcaatgaaccttaaaagttttcacagattcattaatttgttaacataagtatgtggaagttaatttgaactttcaaacagattttattgaagcattctctatgtcacatgaggcttattattaagagaaatataat

SEQ ID NO: 166089 - DNA, 604 bp, Homo sapiens
tatatgactggccagttttcccagtacaatttattgaaaaggtgtcctttcctcattgtttattttcgttgactctgtcaaacatcagtttgttgtgggtgtgtggttttatttctgagttctccttcctgttctattgatctatatgcctatttttgtacaataccgtgctgttttggttattagaaactagtagtatagtttgaaatggagtagtgtgaagcctgctcctttgctccctttgctttgccttgactattggacatgtttttggtcccatatggattttacaattaatttgactaattctgtgaaaaattatgttagtaattttatgggaattgcattgaatctgcacgttgctttgggtagtgtgggcatttaaacaatattgcttcttccaatccatgagcatggaatgtttttccatttgtttgtgtcataaataatttatttcagcagtgttttgtaattctccttgtagagctctttcacctccttggttagatgtattcctaggtattttttttttttgatggctattgyaagtaggattgcaccctttatttggttctcagcttgaactgtattgatgtatagaaat

SEQ ID NO: 166090 - DNA, 565 bp, Homo sapiens
aaatattgggagaagagtgggtacaccagttccttgacctgagttagcagaaatgtgatccatttccctatcatgcayctgttttgagtctaacaatcttctgtttttataaaggctttctcctttgattcctggccttagtacagctgtgggctgcagatccacctctctgaagactatagctagaatagggcttggagcagaacctcttccccaagaccagagcaggaaactccacagtctctccttagtttctggggcactgctgttcagtgaagggaaaggaagttgggcctcacttttcatggaagcgtgagcagatgccagtttactttcagtggagtggaggctctaggaaagtgggaaaagttctttctttccatgagtactcagtggctcgatgggaagaactgctgttgcatgtgtaacagtgtattgggggtgtgtgggcagaaggagggtaaaagatgaccgcctctccacatccattgccaggcattagtgttgcctccttcattggtttataccatgctcacatttcctttgtatcaaagagggtttgggt

SEQ ID NO: 166091 - DNA, 647 bp, Homo sapiens
gtgtaatattcattgctttcaaatacatatttagaatggttatttttgaagcatttgggaaaagattgattctggatgctgattgttctacgtatttagggcttaaaattttctgtgatggagttctacacagttttattttataagtgtttcaaatgccttgtgcattatcctatccttaaagagagggagtgtagacagtggataaagaatggtctttggaatccacagacttggatttgagtccttcttttgctattagctctggaatctttgtcaatactgacttcagtttcctctcactcagttatagtattatatagttaaaattgtactttaaaaatatttctggattcaaatattcccatagtatgctgcataatatagtttaaatcagttaaagaaatatttattgagcacttctgtgtcccagaacttattttraacactggtaggttttgagctactttattttttgtatcagttttgtgttcatttctcctgaaaaaaattcattatgacttcataacacattttgaatcctggagtatttacagtacagtaatttaacatctgcattactcatccccttgggacagaggaatttataaaataattataaagattcaatgagggtatagttcaaa

SEQ ID NO: 166092 - DNA, 519 bp, Homo sapiens
aggagaccaagcaagggatgatagcttgagcccaggagttccagaccagcctgggcaacatagaaagatcccatctctacaaaaaaataaataaataaataaataaaataaataaataaataagacaggtatagtggcaygcacctgtggtccagcaactcagaaggctgatatgggaggatcacttgggcctgggaggttgaggctgcagatgagctactgtactccaagctgtgacagagcaagaccttgtctcaaaaaaaaaaaaaaaaaagataggtaaaattatatttgatattttttaagaaattcatctgtttactttttatgaatgaataaaaatcaaatgaacacaaaaattaaaatatttttactcattaccacaaatgcatagaaatatattctgattaaacttttctgtaccaacattttaaagttggagaggaattttgaaatcttttttttactttttcaaacagatttaccaaacaacataaatgaagctgacatgaagtttac

SEQ ID NO: 166093 - DNA, 598 bp, Homo sapiens
caaaaatcatgtttgtcagttctaggaaccttttggcagagtctagtgttttctaagtaaagaatattgtcagcaaagagagatagtttgacttcttctttttctgtttggatgtctttttttttctttctcttgcctgttgctctggctaggacattcagtactatgttgaataggagtgatgaaagtgggcatccttgtcttgttccagttctcaagtggaatgttacaagctattccccattcagtatgatgttggctatgggttatttattttattattatactttaagttctgggttacatgtgcagaacgtgcagttttgttacataggtatacacgwgcaatggtggtttgctgcacccatcaacccatcacctacattagctatttctcctaatattatccctcccctagcccctcaccccccaacaggccccagtgtgtgatgttcccttccctgtggccatgtcttccattgttcaactccccacttatgagtgagaacatgcagtgtttggttttctgttcttatggtagttggctgagaatgatggtttccagcttcatccatgtccctgcaaacgacataaactc

SEQ ID NO: 166094 - DNA, 566 bp, Homo sapiens
tgttcatattgttctctgagaatcttttgtatgtctgtgaaatcagttgtaatgttatgtttattatttttgattttacttgtttgggtattgtctttttttttcgttaatctagctatcagtatatcactcttgtttactttttgaggaaccaactcaatttcattgacttttcaatgaatatttgtatctcaatttcattcagttcttctgtattttagttatttttttttctgctaacttaagggatggtttgttctttttttttttttstaatttctctatgttcaaagtcagattgtaattttagatttctctaccttgttcatgaagagatttagcactacaaacttttaacactgctttagctgcatctcagtgatttttttgtatattgtatttcaatttttattaatttcaaataatttttgttttttcccttattttcgatgtttacccgagttattcaggagcaagttgtttgatttccatgaattggtgtagttttgatagatcttcttgatactgatatctgttttaatttcactgtggtctgagagtgtgct

SEQ ID NO: 166095 - DNA, 466 bp, Homo sapiens
agctattttagcataatttagctactgctaacacattaatgggttaacctgaaattttgaaacagaggtaaaataatttatcagcaaaaaattctgtatttttaaagaaataaatgataggcaattttaagcttcctctggtattttacaaataaatacatctagaaagattaataatgtaatgtttttaaatgacaaagatgtggaaatttttttataagcatggtcgttgatatgagtaactaaatatcaatgtcctctagaaacatttttccatggaacaaatcactttttttccggcagaatacttcttgatgcttaatgaaagtgtttcccaatagatatccatctttgagatcagattttatttctctgcctgatttccaaaaatacaatctgatttcatgaggatataggccaatggaccartaaatgactgttgtagtatgtatcaaaaatggtcaca

SEQ ID NO: 166096 - DNA, 551 bp, Homo sapiens
caaggtcacatggagaggccatgacagttctagctgaggctcaagtcaacagccagcaccaaccaccagactgtgattgggaaaacctttgaaatgatgccagccccaggttccaaytgagaattgtccaggtgaacacagtcaacccccagaactgtgaacgataataataaagtaattgttactattttgtcactaaaatttagaatgacctgtttgcagcaataagtaatgaactgacacctaaaaaccaaaaaggcttagcaacagtctagtagaaaataaagatataaaataatgaaaatgacatgggaaatttttcactcatcaaaatgacctcatgagaaagcctgacatttgtctggaagaaatgaacttgttagctgatgggtggacattcgagattggcatattgtgaggatagggatgttatgatcacatggttgggggcgggatggtgcagttttactaattatcactgttgggaaaatcctaatgtattttggtagggaggagcacttcttaggttccatccatagctactaatacca

SEQ ID NO: 166097 - DNA, 491 bp, Homo sapiens
ctcggaagcatggtatgagggccttgtaggaaggcacagattatatggtggaggcaggcagtaggaattggtctctagccaacatcatcaatagtggaaagcagaaattcaccaaaaagaaactagggagactttacatagaataatatatgagaatttttaaaagtgtctggaaagagatgagaattagaagcaattactaatgtagaaggaaaaagatagaccaatcagaatttttaaaattctatatatttatgtaggtttttacatattttatgataaaattgcactcatgcatggcttgtgtattctttaaaaatatgtcctaaaattatatttaaaaaagaacatttgcctttaagagttggaagtatctactcacagcacttttaaattttcacgggaataattgatgaaaatcctgcttcagcaaaattcaasgaaggagaaatcttcctgggactgtagaaatttcaccgttggctaatcta

SEQ ID NO: 166098 - DNA, 568 bp, Homo sapiens
atatagggcagctctctgcatctctcacttactgaggcttcacttacttttgtcaggcagatgccatcattgggatttttgccagcattctctctgagatcttggatgcttttcattatttcagtagattcctgttttccttcttgaattaacactgagtttatctttatgcactatctgtctatttccaaatggctgaggcatggtaaaagcatataatctagcatcttkggaaaaaatggaagcaaaattatgtaagttttgaataccatgttgtaggataataatatagatgtatttttgcttaaagccaaacttttttatgttgtgttgtcattgttgtggggtttatttgtttactaaactctgcaagaggtaaaatcagattacactgtaatatttgctatatgagatattttcttctactaattgcaagctaaaaataagttaaccaatggctccctgttaggaaattaaaaatacaatttcatatgtttcttacgaggactaaagaaccataaacctcttctttgcgtataaggatggcaaagagctcaatttttttctg

SEQ ID NO: 166099 - DNA, 509 bp, Homo sapiens
tgccttctacgtaaactctatgtcttagtccatctgaattgctataaagcaataactaaagttgggtaatttataaagaggtgtatttggctcatggttttgcaggctcttcaagaagcatggagccagaatctgtttctggtgagagtttcaggaagcttccactcagggcagacagcctgagtgtcacacggtgggagagggaacaagaaagagggcaggggtcgccagcctctttttaacaatcctattggaactaatagaacaaaaacccgttaccctgggaggacagcaccaagccattcatgagagatcctcccccatgacccaaacacttcttaccaggccccacctccaacactgggaatcaaatttcaacatgaaattcgaaggggacaagtatccaaactatatctttctgttacctcgggattggtcttcgttttttccrtattatttattttcttattgtacagtttgtattttttgaagctatttcaaattctctt

SEQ ID NO: 166100 - DNA, 565 bp, Homo sapiens
caatctcaattttaaaactcagcaagttattgtgtagataacaaactgattgtaaggttcatatggagaggcagaacacccagaatagccaacacaatgttaaagcagaagaacaaaatcagatggctgacactacataacttcaagatttactataaagctacagtagtcaagacaatgtgttgttggcaaaagaatgaacaagtagatcaatggaacagaatacagggccaagaaataggcccacataaatatggtcaactgatcttttgcaaaagagtgaaggcaatacaatagaacaaggatggtctcttcaacaaatgatgctggaacaactgaacatctacatgcaaaatataaatcttagatacacacttaacatctttcacagaaattaactcaaaatggatgatcaacataaatttaaaatacaaactataaaactgtagaagataagctaaaataaaatttaaatgatccyggaaatagtaatgactttttagataaaacaccaaaggcatgatccatacgagaaataattgataagttggacttcattaaaatt

SEQ ID NO: 166101 - DNA, 288 bp, Homo sapiens
gattatgtgtcaatgacaccaacatcctttatacttaagagtggaggctctrgttaaaattattcagccagaaaaccattcataatgctgggtgagttgtagccaaaatggcacctattatcctgtacccaaaattacctgatggctaagacccaggaggaagaagcaaggagtccaatttaatagccaaaattgatctccccaaagtaaaagctcctaataccttaagttgaaggcagagaataagtgacatatggtagaaataatgaataacttaaccataggcaa

SEQ ID NO: 166102 - DNA, 538 bp, Homo sapiens
tattttgtgtctctgtgtcacattttggcaattcttgcaatgtttcaaactttttcattattattttatctgttcttgtgatctgtgatcggtgaacatttatgttaccattgtaattgttttggggtgccacaaactgcaccatataagagagtgaaatttattgataaatgttgtgtgtgctctaattgttccaccaactgatcgttcccttgtcttgtctctctcccttttcttcagcctctctattctctgagacacaatattgaaattaggcaaattgttaccttacatgacctctaagtattcaagtgaaaggaggcatttcacatctcccactttaagtcaaaacttagaaatgattaagcttaggraggaaggcatgtcagaagcaaagacaggctgaaagctaggcctcttgcaccagctagtcaagtagtgaacacaaaggaaaagtttttgaagaaaattaaaagcactactccagtgatcccaggaataataagaaagcaaaacagcctaattgctgatatgaaga

SEQ ID NO: 166103 - DNA, 575 bp, Homo sapiens
  misc_feature (1)...(575): n = A,T,C or G
aactttcatcaagtaactaaaacagacttttcaatcaatacttaccattttattgaataagaatacccaagttctcagataaacctctgtatgccacttctttcccnaagatgatgtcctgtgtaggtgctggaacttgtgacctggccacttggtatttgtttggacctaatagccttcctgtctgacttgaactgtctcagtctttgctgacaatgtrgacctctctagaatgtggctgagattaaattgcttcctaactcttcaactttggtattaggtgccttattctcactctcacaaacctctctggcaagcttttcatagttaattctggaaaaaagggtggctcgggaaggcaacatttcaggatctccttttgactgaccatactgtccaggcaagttgaccttagattggtctaaggcagtcttcaaagggacttcttcccagactctcgaataagaagcagaagttgagaggtgaagggttcccttttaccctatgcattccttttacttatgtatacagcccagagaagggaaacatccatgtaccttaactatacttctttg

SEQ ID NO: 166104 - DNA, 365 bp, Homo sapiens
cctatctaacagagcttttggaacctgtgatcattatttccccattcttgccaactcctagcttctgtaaccaccattctattctctatatctrtgagtttgattactttagattccacatataagtaagaacatgctatatttgtctttccgtgcctggcttatttcacttagcataacattctccatttccatccacattgtcacaaatgacagaatttccttcttttttaaggctgaatagtatatgctccacattttctttatccattcatctgttgatggacatttagattgtttccataacttggctaatttgaatagtgctgcaatgaatatggaagtgcagacgtctgttcaacaaa

SEQ ID NO: 166105 - DNA, 602 bp, Homo sapiens
ataactttcaaacactactgatggaaacgtaaaatggaacaactttagaaaaagtatgatcgtttcttaaaaatttaaatgtaacttacaacgtatgatctaatcattcctcttgtagtatttacccaaaagagaattgaaagcaaatgttcatacaaagattgtcgacagatgttcaaaatagcattatttgtaataaacaaaaactgggagcagtaaaggaattgyggtatgtccatacactgatatactactaaacagtaaaaacaatgattgatgtacatactgagtgaaaaaagccaaacgaaacagtgttggcaatttgtgattctgtttatacaaaattttagaaaatgtaacttaatgttttgtggtaaacagatcagcagttaaatggggatgagttggagggcaatctgagaggaattccagtggtccaatggatgtatggcagcttttggaagataaatacatattcattattttgatggcttcacaactgtatatgaatgttaaaacttaacaaattgtacactttaagtatgttcagtttattctatctcaattatgctttaatatagctggattttaaaaaatctgtg

SEQ ID NO: 166106 - DNA, 492 bp, Homo sapiens
aatctcacttggtcatgatgaaagatttttctattgggttgttgaattcagtttgctagtattttgttgaagacttttgcatcaatatttatcagaaatattggcctgtagtttgattttctttgtgtttctgatgtgttgttggttttggtatcrtggtaatactggcctagtagaatgagtttgaaagtattctctcctcctctatttttcagaatagtttgagtcagatttgtactagctctactttaaatgtttgataaaagtcatcaatgagtccatcaagtcacaggcttttctttattggaagactttattactgtttcaatctcattacttgttattggtctgttcaggttttggatttctttattattcaatcttggcaggttgtatgtatgtaggaatgtgttcatttattatagagttttcaatatgctggcttactgttgctcataatagcctagtatgatccttttgaatttttgtaat

SEQ ID NO: 166107 - DNA, 492 bp, Homo sapiens
aatctcacttggtcatgatgaaagatttttctattgggttgttgaattcagtttgctagtattttgttgaagacttttgcatcaatatttatcagaaatattggcctgtagtttgattttctttgtgtttctgatgtgttgttggttttggtatcatggtaatactggcctagtagaatgagtttgaaagtattctctcctcctctatttttcagaatagtttgagtcagatttgtactagctctactttaaatgtttgataaaagtcatcaatgagkccatcaagtcacaggcttttctttattggaagactttattactgtttcaatctcattacttgttattggtctgttcaggttttggatttctttattattcaatcttggcaggttgtatgtatgtaggaatgtgttcatttattatagagttttcaatatgctggcttactgttgctcataatagcctagtatgatccttttgaatttttgtaat

SEQ ID NO: 166108 - DNA, 532 bp, Homo sapiens
taggacttagttttaaaatcatgacatccccaggcaaactatataattactctgggactaaaaaagtttccagacatgggaattttagtgctaaacagggaaagttgaaaacaaaccaggtaaattgktcacccaagaactaaggcagatacgtaaatatatatatttacatatatatatgtatatatattcacacacatatatatgtatatgtgtgtgtgtgtacatacacatatataataagcatacatatttcctgtgtttatttgatagggagaatctggtctctttaaaatggtatgtttcaactatcattctgaattaggtgtctaatttaatttcctcctaaattttatactgtagatcatattcatattttctacaacaccatgctatattcagattatgtattagtattattcccagtctggtacatctcaaagtttttaggaatttctcttaaatccctgaaaatatagaagaaaactaaaactgtaattgtaaaataagaaactatttgctttcttttaca

SEQ ID NO: 166109 - DNA, 532 bp, Homo sapiens
taggacttagttttaaaatcatgacatccccaggcaaactatataattactctgggactaaaaaagtttccagacatgggaattttagtgctaaacagggaaagttgaaaacaaaccaggtaaattggtcacccaagaactaaggcagatacgtaaatatatatatttacatatatatatgtatatatattcacacacatatatatgtatatgtgtgtgtgtgtacatacacatatataataagcatacatatttcctgtgtttatttgatagggagaatctggtctctttaaaatggtatgtttcaactatcattctgaattaggtgtctaatttaatttcctcctaaattttatactgtagatcatattcatattttctacaacaccatgctatattcagattatgtattagtattattcccagtctggtacatctcaaagtttttaggaatttctyttaaatccctgaaaatatagaagaaaactaaaactgtaattgtaaaataagaaactatttgctttcttttaca

SEQ ID NO: 166110 - DNA, 527 bp, Homo sapiens
tatttcaagttcagcaacatcattcattcatttgtattggctacctactgtgtgtcagatatttttccaggacctgaagataccacagtgaacaaaaaagtttcaagtcactatgctgattgagcttacattctagtggtggaaacaaataattgaaggcgaaagggcccattgatggaaaagcattgcatgtagaaagaacagctgtgcaaaggactcaagcatgacttatgtatttagaaaaatgtaaggaggccggtgatacaagaatgtagtgagtgatggaaagagttattaagagaagttagagaggatacaggtccagattttgtagctttccatgtaattgtacacgttggacatttgatgaatgagagagatagccactggagaatatcaaactgaagartataaagggatcactttggctcctgtgatgagaaaaatattttgggatgcaaagatagaagaagatgcattattgcagtaatgcaagtagtttggtagtagtttagtacagtatggta

SEQ ID NO: 166111 - DNA, 565 bp, Homo sapiens
ttacccaccttctgaagcctacctctgtcaattcgtcaaactcattctctgtccagttttgtttccctggtcatgaggagctgaaatcctttgaaggaaaagaggtcttctggtttttggaatkttcagcgttttggcactcgtttttcctcatcttcgtagatttatcagcctttggcctttgacgttggtgacctttggatgggtttctttgtggacctcctttttgttgatgttgagagtattcctttctgtttgttagttttccttctaatagtcagggccctctgctgtagatctgctggagtttgctggaggtccactccagaccctgtttgcctgggtatcaccagcagaggctgcagaacagcaaagtttgctgcctatttcttcctctggaagcttcatcccagagggacacctgccagaagcaagttggagctctcttgtatgtgatgtctgtcaacccctgctgggaggtgtctcccattcagtaggcacgggggtcagggacccacttgaggagacagtctgtcctttagcagagctcgagcactttactggg

SEQ ID NO: 166112 - DNA, 510 bp, Homo sapiens
ttactatcaggagaatagaatgggaaaactgcccyatgatttgattacctcctaccgattccctcccaccacaagtggggattataggaactataattgaaggtgagatttgggtggggacacagccaaaccatattaattgtattgcaaaatactaataagaaaataggagaaatttgtgtcttattctgtatctatgttacacaaatcataaacctaaaattgagctaaaatatccttttgtcttaaagctacgaaaatccaaaagtataaaaactcttccactgttgacaatttagaagaggttacagtcgtacaggccagagaataagtatggtgggccaagcaaagagaccattgctagtccctccctatctctacctctgaggctggaaccaaacttaagcaacgggagctctcccaaaggagttaagcatgccaaggccagaaatgagcaagggcagtatgacaaaggactttagaggtggttgggtctccttggctttcatt

SEQ ID NO: 166113 - DNA, 574 bp, Homo sapiens
ctctactaaaaatgcaaaaattagccagatgtggtggtgggtgcctgtaattccagctacttgggagactgaggcaggagaatcgcttgaaccccggagcagaggttgtggtaagctgagatcacgccactgcactccagcccgggtgacagagtgagactccataccccatcccccctccaaaaaaaagaaaaagaaatcttgaytttgaaaccatgataacagtgttgacatgccccctaatctaggttttagtggatcattgctttatgttgcttttgcaccatttgcacaaattgttaggtgagtcagtttccatattacagactactttttgcataatatacataataataccaactatccagcttcatttatttttcaaatgtaggataaataatccagcacattacttttcctagctcaagttttttgagcatatggattttttctaaaccaggcctttacaagtgctatttcttcactcttagatcctctttcctctacttatattgcctcactcttctggcctccttcttcaagcctctgtataaatagttccttatagaattca

SEQ ID NO: 166114 - DNA, 585 bp, Homo sapiens
aaagagtgtgcttggtatgatttcaatttcttgaatgtattgagcttgctttataatgggtcatgtggtcaatcttagaatatgttttgtgtgtagatgagaagaatgtatattctatggttgttgggtggactgttctatagatacctattaatttcaattggtcaagtgtcaagttaaagtctagygattctttgtaagttttctgctttggcaatctatcttgcactgtcacgtcactggggtgttgaagatttctgttattattgtgggattgtctatgtctttttataagccaagaagagcttattttatgaacctgggtgctccaatgttggatatatatatatatatatatatgatagttaagtcttcttgttggattgtactctttatcattatataatgccctttattatctttcttaatatttgttggtttaaagtatgtttttcctgacatgcgattagcaactcctgctcttttacttttctgtttgcatggtataattttctctgtctctttaatctgagcatgtggatgctgttacatgtgagatggatctcttgaagggaaaagatgttg

SEQ ID NO: 166115 - DNA, 336 bp, Homo sapiens
ctttgtcaggaagtcaaggagcttctgctttgtccrcctctgggtctgtccagccagctgtttccatccctgaccctctgcagcatggtaactatttagtaacggagacttactcggcttctggttccctcgtgcaaccttccactgcaggctttgatccacttctcacacaaaatgtgatagtgacagaaagggtgatctgtcccatttccagtgttcctggcaacctagctggcccaacgcagctacgagggtcacatactatgctctgtacagaggatccttgctcccgtctaatatgaccagaatgagctggaataccacactgaccaaatc

SEQ ID NO: 166116 - DNA, 516 bp, Homo sapiens
caccagaaacgcttgcatcacctttgctcccaggtaaaaacttagccacacctcgattcctaaagcaatgaaatcctttgttggaagctgaaagaaaagttcacaggctaaagacaaagtttaataggaaggtaccagatgaataataaattaatcatgatgtggaagtgcaaaagctagtccggactacactttgtcagtgttgatgtcttatggctgaatctagttgactatggttacaatgaaaaccgaaaagcaaagcaaaacrtacaaaatcccccaaaatctaacttgtaaaagagcatttattttcagcctgagtatgtgtgggtagatctaaagttaagcaaaatgtagatgttaagcaatgatatattttattgaaaggcactaaaaatatgaagaagaaaaacatcccattaagcaactatgaatgtaggctttgaataaaaaaaaaaaaagaaataaaattgaacagttatatggtgccttgaatatttgaaatatataaataat

SEQ ID NO: 166117 - DNA, 516 bp, Homo sapiens
caccagaaacgcttgcatcacctttgctcccaggtaaaaacttagccacacctcgattcctaaagcaatgaaatcctttgttggaagctgaaagaaaagttcacaggctaaagacaaagtttaataggaaggtaccagatgaataataaattaatcatgatgtggaagtgcaaaagctagtccggactacactttgtcagtgttgatgtcttatggctgaatctagttgactatggttacaatgaaaaccgaaaagcaaagcaaaacgtacaaaatcccccaaaatctaacttgtaaaagagcatttattttcagcctgagtatgtgtgggtagatctaaagttaagcaaaatgtagatgttaagcaatgatatattttattgaaaggcactaaaaatatgaagaagaaaaacatcccattaagcaactatgaatrtaggctttgaataaaaaaaaaaaaagaaataaaattgaacagttatatggtgccttgaatatttgaaatatataaataat

SEQ ID NO: 166118 - DNA, 554 bp, Homo sapiens
tattaatctgttctcatgctgctaataaagacaaacctgagactgggtaatttataaaggaaagaggtttagtagactcacagttctacatggctggggaggcctcacaatcatggcaaaagagaagcaraggcatgtcttacatggagggagacaagagagaatgacagccaagcaaaagaggaaacccattataaaaccatcagatctcgtgagacttattcactaccatgagaacagtatgggggacactgcccccatgattcaattatctcccaccaggtccctcccacaaaacgtgggaattatgggagctaaaattcaagatgagatttaggtgggggacacagcgaaaccatatcagagggaaagcttttttgtcaatatgctgagtttgatatccctacaaaattattatggaagtgtgaggttcccatgaaatatccaaatagtgaggtcccatgatttgagcttgagaaagaaagctaagtttacacaatgaaagtgaccacagaatcatacctgctactaagtaagaagaaaagaagcaaagt

SEQ ID NO: 166119 - DNA, 459 bp, Homo sapiens
ttcctacaggacccagttgttagacttacagtgtacgaatttaaaaataattgtgaaattttatgttcaaaaaaatagattgtaagtggaagaattacacaattttaaaaaaactattattttttaaaaattaaatttttacaacagaaaaaaatgttacagttaaaattaaaattaagatcctgataaaggatttaccagaarattaagcacaggaagagagggttactcaacatgatcgtaagacaagttgaaatgttcaggtggaagtctgaagaattaagaagatagaaaatactgaaacgagtataagagaccttacagacatgatgaaaacttctaacatttgcatattttggagtcacaaattattgagtagaagcagtgtttgaaagataagggctctgggagaattttttccaagctgattcaaccatcaagccacagattaaaaggatc

SEQ ID NO: 166120 - DNA, 459 bp, Homo sapiens
ttcctacaggacccagttgttagacttacagtgtacgaatttaaaaataattgtgaaattttatgttcaaaaaaatagattgtaagtggaagaattacacaattttaaaaaaactattattttttaaaaattaaatttttacaacagaaaaaaatgttacagttaaaattaaaattaagatcctgataaaggatttaccagaaaattaagcacaggaagagagggttactcaacatgatcgtaagacaagttgaaatgttcaggtggaagtctgaagaattaagaagatagaaaatactgaaaygagtataagagaccttacagacatgatgaaaacttctaacatttgcatattttggagtcacaaattattgagtagaagcagtgtttgaaagataagggctctgggagaattttttccaagctgattcaaccatcaagccacagattaaaaggatc

SEQ ID NO: 166121 - DNA, 596 bp, Homo sapiens
gaatgatctaacaggcaaacaaatcagcaaatcagcatagaggcagaaattgagggtttggagacttgaaagcatctataaatagacacagaatattacttctcaagcttcgttgtggcatgaaatcactttggaatcttgtaaaatgaagattatgattttgtaagtctcagatgggagttgaagttctgcatttctaaaaactacagcctattccagtgctgctggtcctgctgccactcactgagtggcaatggcatcaagtatgatttaactcgacaaacataaatacaaatgaaggttaaactgacattgtttcttcatgaaagarttgacagtttatcatgaaattacaagtgaggtcactgctgagaaatagtatggaaagctagaagagtattcagaggagagaaagactaaagagaatgagacttgttttcaaaaaagaaaatgagtaaaatagttttaatgaaactttgcaaacatctgctattacggaaagtatgaagacattgagtccatacaatggaaagtcgatattcaaataaattaacactttcaaaatatcatctacaaacttttagtgtttttgtttt

SEQ ID NO: 166122 - DNA, 596 bp, Homo sapiens
gaatgatctaacaggcaaacaaatcagcaaatcagcatagaggcagaaattgagggtttggagacttgaaagcatctataaatagacacagaatattacttctcaagcttcgttgtggcatgaaatcactttggaatcttgtaaaatgaagattatgattttgtaagtctcagatgggagttgaagttctgcatttctaaaaactacagcctattccagtgctgctggtcctgctgccactcactgagtggcaatggcatcaagtatgatttaactcgacaaacataaatacaaatgaaggttaaactgacattgtttcttcatgaaagagttgacagtttatcatgaaattacaagtgaggtcactgctgagaaatagtatggaaagctagaagagtattcagaggagagaaagactaaagagaatgagacttgttttcaaaaaagaaaatgagtaaaatagttttaatgaaactttgcaaacatctgctattacggaaagtatgaagacattgagtccatacaatggaragtcgatattcaaataaattaacactttcaaaatatcatctacaaacttttagtgtttttgtttt

SEQ ID NO: 166123 - DNA, 460 bp, Homo sapiens
agaataagataagtacaatcaccataattacattattgattttagaaaagcacttcataaatgcacttgtgaaatacagtttaaatatatttttaaatagaarcaaaaataatcacttgtaaagggaattgatttttttaaaagtgaaaactacaaaactgttatcatgagaaaaagtcactgtttttcagtgttaattgacatattttaagcaatacattagcaatctgtgttatttaatctaaataaatgaatttgtaattaattgctttaaaattaaatctacgagaattttaaagtctaggtctcaccttccctaacattttttaaaaaattacgcagatctctgataaacagtattttcttccttgacattccatttctagtcagaaacttcaattctcataccatagtattttttaaaaattttccttttgtcctatagttcttattcagatgt

SEQ ID NO: 166124 - DNA, 460 bp, Homo sapiens
agaataagataagtacaatcaccataattacattattgattttagaaaagcacttcataaatgcacttgtgaaatacagtttaaatatatttttaaatagaagcaaaaataatcacttgtaaagggaattgatttttttaaaagtgaaaactacaaaactgttatcatgagaaaaagtcactgtttttcagtgttaattgacatattttaagcaatacattagcaatctgtgttatttaatctaaataaatgaatttgtaattaattgctttaaaattaaatctacgaraattttaaagtctaggtctcaccttccctaacattttttaaaaaattacgcagatctctgataaacagtattttcttccttgacattccatttctagtcagaaacttcaattctcataccatagtattttttaaaaattttccttttgtcctatagttcttattcagatgt

SEQ ID NO: 166125 - DNA, 594 bp, Homo sapiens
tgaaactattctaagaataactaggccctgtttattcatagtatagactatcatttattcatctaggactctcataaaagtgaagaaaatgtaaaactttgagttacatttagagaaatgtacagtgtctcatttgtacttaattacaaaataacagatctatttattaattccaaataattgaatataaagttcaacagtattaagataggagtgctgtgcagaacttgatagaatgtatcatgtgtaaaataaacagaakagaatgctacaggaaagtcagagaaaggagagcagtgttaccaaaacctccaaaaaattcaatagtaagaaaagagagatccagtcgaatggccagtttgacttgttttccctcttactaagcatgtcttccttttttggttcaagaagcgtattactttttccattcaactttcagttcaaggacaatatcctgcaggaagcctgtgctaaccattacaagagaatgtggatttctcacatctctacttgtccactctctatggctcattttcattcctatctagtattgctggcagattgacttttataaaattatctacaatgtcacta

SEQ ID NO: 166126 - DNA, 457 bp, Homo sapiens
tcattttgtttcacaattttgcagatttgtgggcttttttcataatgaaatatattcttattaaaaactaataaaataaccatagtttccacttattaaatgactacaacatgccggacactgtgacaaaggctttatatttctcatcacatttaacctactagaatataagtcccctgcggacagtgaggtctacctgttttgctcattcttgccttcttagtatgtataacagtcttcgagtcagttgccacttcaccattattcattaaatatgagattaatcctcacaaaacccctatgcatgggcattatttgcccctcttcgcttgttgagaaactaaggcttaacaagtttgagcaacttsctgaaaacagtatagctggtgacagagttcacagccaggccacagccctgtgattctggagtctgtatctttagcttttcctgcctcca

SEQ ID NO: 166127 - DNA, 457 bp, Homo sapiens
tcattttgtttcacaattttgcagatttgtgggcttttttcataatgaaatatattcttattaaaaactaataaaataaccatagtttccacttattaaatgactacaacatgccggacactgtgacaaaggctttatatttctcatcacatttaacctactagaatataagtcccctgcggacagtgaggtctacctgttttgctcattcttgccttcttagtatgtataacagtcttcgagtcagttgccacttcaccattattcattaaatatgagattaatcctcacaaaacccctatgcatgggcattatttgcccctcttcgcttgttgagaaactaaggcttaacaagtttgagcaacttcctgaaaacagtatagctggtgacagagttcacagccaggycacagccctgtgattctggagtctgtatctttagcttttcctgcctcca

SEQ ID NO: 166128 - DNA, 578 bp, Homo sapiens
tgggtgggacaaatatctaaaccatgttattcttccccaggtccctcaaatttcatatccttcttacatttcgaaatacaaccattcatcctcaatagtccaccaaaagtctgaactcaatttagtatcactcgaaagtccaaagtccaaattctcatctgagctgagttccttccacccataagcctgtaaaatcagaayaagttatttattttcaaggtacaatggggtaccagcactgggctgacatccccattccaaaagggagaaaacagtcaaaataaagggtctacatgccccacacaaatccaaaactcagcagggcagtaattaaatcttaaagctcaaaaataatttcccttgactccatgtcccagatatttggcacactggtgcaagaggtgggctcctaaggccttaaacagttccaccctctggcttttcagggttcaccccctaaggctactctcaggggctggagttgattgcctgtggcttttccaggatcagggtataagcagccaatggctctaccattctgggaggctttaggatggtggctccttaccacagactca

SEQ ID NO: 166129 - DNA, 513 bp, Homo sapiens
gatgaatttttgtgccaaaataccacgttactaggtcacttgaaaatgttaattttctgagattaaatttatgccaactttagacaaacaggaaaatttaaacatatatgtatcagtccattctcacactgctatgaaaaaatatatgagactgggtaccttataaaggaaaaagatttaatcgactcacagttgtgtgtgkctgggaggcctcaggaaacttacaattatggaggaaggggaagcaaacatatacttctttataaggcagcaggaaggagaagaataagagcccagcaaagggaaaagctccttataaaactatcagatcttgtgagaactaattcactagtatgagaacagcatggaggtaactgcccccatgattcaattatgtcccactgggtcctactcatggggattatgagaactacaattcaagatgagatttgagtgagaacatggccagactatatcaatatattttatactctctggaaagagtaattcatt

SEQ ID NO: 166130 - DNA, 512 bp, Homo sapiens
actatttctttaggaattaagtaaacataaagaaaacaagaaagaaagtaagaaatctggcttaagtacatcttgggtattcacaaaagaggtcagcattgcttagcaactaaaatttacatatctggacaaaataaattcaaattaaaatagtagctctctttcagtgaagaattttaagcaaggctttccctttcaccttatgcaaaattcttataaaagattaaatctttgttactgatacatttttgtgtcagcattccacaaagtttaatttaaaatatgtagaaacttgagtgccttgatggtatccttccaaggctggaaatgttattctctgctttctttcatttataaaaattaataagttcaggaccattacaatgttttttggcaagaagccagattctattccaagctcctagtttgcgacaatactaaagagagttgcttkagtgtctgtgctttccaaaagcattttctgattgtgttgaagtgtttctgaattttct

SEQ ID NO: 166131 - DNA, 415 bp, Homo sapiens
  misc_feature (1)...(415): n = A,T,C or G
nnnnnnnnnnnnnnnnnnnnnnnnnnnnnnnnggtgtatatgtactacattttctttatccagtttactrtgaatgggcacctaggttgaatccatgccttcctattgtgaatagtgccacaatgaacatgtgagttcatgtgtctttttggtagaatgatttgttttcttttggatatatgccagtaatgagattcctgggtcaaatggtagttctgttttaacttctttgagaaatcccctaactgcttttcacagtggctgaactaatttacattcctaccaacagtgtataggtattgccctttctctgcaaccccaccagcatctattcttttgtctttttaataataaccattctgactgacatgagaaggtgtctcattgtggttttgatttgcatttctcaaattat

SEQ ID NO: 166132 - DNA, 415 bp, Homo sapiens
  misc_feature (1)...(415): n = A,T,C or G
nnnnnnnnnnnnnnnnnnnnnnnnnnnnnnnnggtgtatatgtactacattttctttatccagtttactatgaatgggcacctaggttgaatccatgccttcctattgtgaatagtgccacaatgaacatgtgagttcatgtgtctttttggtagaatgatttgttttcttttggatatatgccagtaatgagattcctgggtcaaatggtagttctgttttaacttctttgagaaatcccctaactgcttttcacagtggctgaactaatttacattcctaccaacagtgtataggtattgccctttctctgcaaccccaccagcatctattcttttgtctttttaataataaccattctgactgacatgagawggtgtctcattgtggttttgatttgcatttctcaaattat

SEQ ID NO: 166133 - DNA, 445 bp, Homo sapiens
ccacctttacagttgttgatgttcataacaatgtaaaatatgagatcttaacttagtcaaaaattgaatcaaatattattcattctggaattaggatgttcgtgaatcaygcatctatagtgcaaatgttgaggctatcagattatatattcagctttaatgctcttctgtagttatattgacctaaaataaaagttaagacatgttattttacaaggaaaatctgtgcaaatatcagacaatagtgaattgttctgaatattctttatttgttcctatagctccactctctacccttcatgctctgcgaagatgaccctgtggactgcatcaattgggccccattgacttctgacttccaatgagaggcaccagtagaaaatagccccattcattttcctgctttctttactgcttggatgtaagtggcaagtttctgtttttc

SEQ ID NO: 166134 - DNA, 445 bp, Homo sapiens
ccacctttacagttgttgatgttcataacaatgtaaaatatgagatcttaacttagtcaaaaattgaatcaaatattattcattctggaattaggatgttcgtgaatcacgcatctatagtgcaaatgttgrggctatcagattatatattcagctttaatgctcttctgtagttatattgacctaaaataaaagttaagacatgttattttacaaggaaaatctgtgcaaatatcagacaatagtgaattgttctgaatattctttatttgttcctatagctccactctctacccttcatgctctgcgaagatgaccctgtggactgcatcaattgggccccattgacttctgacttccaatgagaggcaccagtagaaaatagccccattcattttcctgctttctttactgcttggatgtaagtggcaagtttctgtttttc

SEQ ID NO: 166135 - DNA, 426 bp, Homo sapiens
cagccctttagaagcatcttctcattaattactctaggcaactctttactatygttgtgcctcttttacagaagagaaaactgaggctgagaggttttgtgactgaccctaggtcacatagctagggagtgccaaagccaggagtcagtgtgatgccacatcccacatttctagccacgacatcatatctccctcctaaaaacagaaatccattcatttgggctgaaagtggtaaatgccagcctgctcattacagcaaaacaaacaataccaaggtactgatttgagcagtgctggctgcctcggaagcgttggccgattggtagtggtcagtctctgattaggaatagaagtgatcaggcttaatttaagctttgttcaaacagccagcagagtggtagaacacagccaggaattcctgggctc

SEQ ID NO: 166136 - DNA, 427 bp, Homo sapiens
tgaattctgctgcatttgttgagaccacagacctggtaccttataatcccaccttaggtagggttagttgacgtgttttttaaaaaaaaaatccacaaagtaagagctatttaggccaggtgcrgtggctcagacctgtaatcccagcagtttgggaggctgaggtgggaggattgcttgagcccataagtttgagaccagcctgggcagaagcatgagacctcatctctacaaaaaatacaaaaattagccaggcatggtggtacatgcttgtagtcccaactattcaggaggatgaggtgggaggatcacttgagcccaggaggcagaggctgcggtgagccaagatcacaccactgcactccacctaggcaacagagccagaccctgtctcaaaaaaaaaagaaaaaaagaaaaaaagaactat

SEQ ID NO: 166137 - DNA, 411 bp, Homo sapiens
gtaccttataatcccaccttaggtagggttagttgacgtgttttttaaaaaaaaaatccacaaagtaagagctatttaggccaggtgcggtggctcagacctgtaatcccagcagtttgggaggctgaggtgggaggattgcttgagcccataagtttgagaccagcctgggcagaagcatgagacctcatctctacaaaaaatacaaaaattagccaggcatggtggtacaygcttgtagtcccaactattcaggaggatgaggtgggaggatcacttgagcccaggaggcagaggctgcggtgagccaagatcacaccactgcactccacctaggcaacagagccagaccctgtctcaaaaaaaaaagaaaaaaagaaaaaaagaactatttagtagtattgtgaattc

SEQ ID NO: 166138 - DNA, 591 bp, Homo sapiens
aagctttagaggtgtaatcttccctaagggtttcgcatttgaactggttttgcgtatctgattcaacaaaaaatgagagaagctgatggataatggtgaattgaggagttgacctgtggaagctgtaaacccctcctgtgcccccctagacctaaacaatagactccttcacctgccaggcygggcgggcagtcaagatggtctcctggccctctccccaggggtccaggacacagcagctgaggtcctctgccacgctggtcccaagggtttgcgagttgtctcctggtggcaggaatcatttctggttcattcgggtcctcctaagcctggccccatatcctcaggctgtgccctagtgcccactcctgggtctctttcccagggcctctgacaggaggcaaccaactctgatggggaatgagcagtcagtgtagcacgcccaggtccccgcggccccttctgctcaccccagctgccggattccagcaccgcacatggtgagggcccctcctccacagaaaggcagaggggctgtttctgggcctttcctgcccacaccccatttaagcctcctggccattcatccct

SEQ ID NO: 166139 - DNA, 551 bp, Homo sapiens
tgattcaacaaaaaatgagagaagctgatggataatggtgaattgaggagttgacctgtggaagctgtaaacccctcctgtgcccccctagacctaaacaatagactccttcacctgccaggctgggcgggcagtcaagatggtctcctggccctctccccaggggtccaggacacagcagctgaggtcctctgccacgctggtcccaagggtttgcgagttgtctcctggtggcaggaatcatttctggttcattcgggtcctcctaagcctggccccatatcctcaggctgtgccctagtgcccactcctgggyctctttcccagggcctctgacaggaggcaaccaactctgatggggaatgagcagtcagtgtagcacgcccaggtccccgcggccccttctgctcaccccagctgccggattccagcaccgcacatggtgagggcccctcctccacagaaaggcagaggggctgtttctgggcctttcctgcccacaccccatttaagcctcctggccattcatcccttcctcaggtccacttcaa

SEQ ID NO: 166140 - DNA, 574 bp, Homo sapiens
ctaacatgccacaatgtttctgctgaagaatctcatcacttgggtcatatttgttaacatttctgagactgttattgttgagtcatagaattccttgacataaataccagatttctgctcagagttaagaagcacattttcctattctgtagtaagagatgagtttgccatgaaatcaggactgcaataatttactctaaattcttagacaattaatttgaatacatcatatagaatacatgaaatttgtttatttctacctttacataagagtgccaacaactggaaaaacttcaatttatatgtggacacatagtctctggataaaaatatagaaagaacatagcctgagataaaatcatgaaatttaagaaaaggaacctaattaaatgagaataaaaagaaaagaaggagtcacttcaagacagtgtacagtattgtaccagtaagaatactagatagactctgacattcaatttctatgaggccatggataaatcacttactaacattgagccccattttacttmttttttaaaaatgttttgaaataatttcaaacaagtaatttctt

SEQ ID NO: 166141 - DNA, 564 bp, Homo sapiens
acattttaaaagctctttgaacgaggcctgcattggatttaccatactttaagtatttcttaaataaataatacacagggacaaataattttcataaatgactcataattggcttctaaagccaaatgaaaacaagacaaaacaaaaaaaatttttaaatattttgaatacaaaccacatcattagaataagaaaatgacctttcccaaggtgaccacttagaacaagcattaatttgaatgtatcaataagtagaggcatgtttcttaaaagctgttttctcttgaatcccaccacatatgatggcctagttctgtctgataatcatatcaaagattttgttttagttgttcaaattcctctggaagaggaagagagctttgaaatcagaaaagtgaaatttagtgcattagacacartaagagattcttctttttaaaactaatgaaatgtcattacctttatagttaaaatcaaaaatgaataggatgaagaagagctattaggagtcagagatagaatttattacaactaactagaaatatagaaacactagaattactt

SEQ ID NO: 166142 - DNA, 486 bp, Homo sapiens
atacaggtggatggggctctttgattgggagagggactgctctttacaaaagctgttgcaagctgaaatgctgcagcttcacctggctgcacacctttgctgctccaattgctccacattgggtcagtcttcctcctgatattatttcccagtcttctgcagccatgcttccattacttgaaattgttcttcaatgtgtctgtggcatgttccttcagmctgccctatttgagatctcctcagttcagctcaccatacaacagctggccaggtgtcctcctgctgtcatccattttttatacttgtttagtccagtggagcagtattgtagcaaagaataacttcactgctgttgcactggctgtgttccaggacttcctgttggtgaatatgtttctacttgtgatgctaactaaaatcaaggttaaacataatgatcaatattttgctcatttttttgttatggcatattagtaaacatctatg

SEQ ID NO: 166143 - DNA, 590 bp, Homo sapiens
gctcattgcaacctctgcatctcatgctcaagcaatcctcctgcctcagcctcctgagtagctgggatcacagatgcacaccatcacacctggctattttttttgtatttttttgtagagatggggttttgcagtgtttcttgggctggtctcaaactcctgagctcatgctatccacctgcttcagcctcacaaagtgctgagattacaggcctgagccaatgcacctggccgactatatactattcactttggtagtcactaaagaaaaagagacatgaataarccgacaaccttgtccttgcagagatcacagcctctcttatctgcagcggtcacagaaaactgatgtattaacaaataagtacagtgaattgagaaatactgtcataaacaaatgtcctgtgttccagggccacagaataagcatccaatattttgtgtagttgggaaaatataaagtttgaataaataaggcttcacagaggaagcaatattagacaccacttgaaagatgaataggaattttcgtggctgaaaaggaggccaagaggaagggcattggggatatgactcaaaagcgaaaagga

SEQ ID NO: 166144 - DNA, 373 bp, Homo sapiens
agcaagcattactgcctgagctctacttcctgtcagattagtggtggaagtagattctcataggattgtgaaccttcttgtgagctgagcatgcaagaggtctaggttgtatattmcttatgagaatgtaatgcctgatgacctgaatatagttaccagacccactatgtcaacattaaagaaaaacatcttaaagactgatagacaaaaagttcagatcacatacaaaaggaagcccattaggctaagagtgggcttctcagcagaaatattacaagccagaaggggcttattttcagcattctgaaagaaaaaaaacaaaaacaaaaacacctccagccaaaaatatcatatcctgccaaactaagctaca

SEQ ID NO: 166145 - DNA, 491 bp, Homo sapiens
aatctgaaatactccaataagtatttaccttgagtgtcatggtggcattccaaaagtttctggttttggagtatttcagattttggacatttagatttgggatattcaacacttatacaattttttgtgctgaataaattacattttatttataaattttctttctccaaggcatgccaagccaatccttcctattrtagtacctaagctattaatcactacgtatatactatttttttacaattgttgacataattttatgtgccagcaggttggttatctatgtagagaatgcaatattacacattatttacataaatactaatagtcacaggaaccacaaattgaaatatagagcagaaactaaatacgttagtcagtaaaagagcaatattgttaatttttcatttaagacctacaacatattttgatatatgtattgttgtgaaatgattccctcaatcaagctacctaacatttcctcacatact

SEQ ID NO: 166146 - DNA, 614 bp, Homo sapiens
caataatttattcattagctttcacttcaattgatcaaaaattgcttcttcagagtgtttattcctgtctttttgagttgcactttctgtgggcccttcctgctttgtccttggcggaaatcatgggggagggatggaggatggacagctgggatattagtaataaarggatgaaaagcgcaccctgaactcaatccatatgcaccctgcattaaatcttctcagttacttagtcttcatggtctctacaaatgacgtaatatgcagcggtcagcgaaataagctacagaagctacaatcatctttactccaactagcccccaggttgttagtgatatttttcaactcacatttctaccaccaattctagatatgccagcccttcaagcagcatttcatctggtcttcgttgcttgcctgatggagtgatccagatcttcatctctgagaagtccaagcccttgagatccttaaccctaacttcaattgctccagctgtttttccctatgatgctaggcatggaagacgaccagaggcccaagaggatgttcccatgtcaacacatactccctgccactattatgtaatagagaaccctgttctactgtgttcc

SEQ ID NO: 166147 - DNA, 379 bp, Homo sapiens
gaagttctctttcaatatccataatgaaagtcagtttactggcgagcacacctgggtttggcttcctagttattcctccagtarcactgtattgcatgtcttaggaaaaactatttgatgagcttagatttacaaattaaagtattcttccacttacttcagataacgatactgcaagatcgttaatattgacctagaagaagtctggctcagccttctgattgatgagctgtggtggctgtgaatgctaacataaccttaatctaaaatcatgagcctctaccaagggaggtagtagttcctctgaatgctacacagatcatgtcacttttgaagtcatggtttttgtcttggactgcctatgccctaaggggaacac

SEQ ID NO: 166148 - DNA, 379 bp, Homo sapiens
gaagttctctttcaatatccataatgaaagtcagtttactggcgagcacacctgggtttggcttcctagttattcctccagtaacaytgtattgcatgtcttaggaaaaactatttgatgagcttagatttacaaattaaagtattcttccacttacttcagataacgatactgcaagatcgttaatattgacctagaagaagtctggctcagccttctgattgatgagctgtggtggctgtgaatgctaacataaccttaatctaaaatcatgagcctctaccaagggaggtagtagttcctctgaatgctacacagatcatgtcacttttgaagtcatggtttttgtcttggactgcctatgccctaaggggaacac

SEQ ID NO: 166149 - DNA, 561 bp, Homo sapiens
ttactcaatgaataaatatactttcaggttaaaatacaagagcagtaaaggaggaggaggatcacaccgttaattaaagacagcagaaaaacaagattcactaagttgttgagtaaataataataatacatgcatatatgtatattcaatgacaggaacagaggaaaagtttaaaaaacaaaaacaaaaaaaggcacaatggctcacacctataatcccagcactttaagaggcagagacaagtggatagctagagcccaggagtttgagaccagcctggacaatatagaaagactccgtctctactaaaaattaaaaattktttggaaaaaattagctgggcatagtggtgcacacctgtagtcccagttacttgggagtctaaggtgggaggattgcttgagcccaagaagtcgagcctgcattgagtcatgattgcaccactgcacttcagcctgggttaaagaatgagatgggaaaggaaagacagaagggaagcagaagggaggggaggggaggggaggtatgaggctaataaaaaatttccaagtaaatacagca

SEQ ID NO: 166150 - DNA, 573 bp, Homo sapiens
caggaaaggaaatttctcaaagagtgtcatcaggtctcacattgataatgtagtatcataggctgtgaggcaacatgagaaggattaaaggtgaaagaaagaatctaaacaatgttaaaactataattttaggggccaggcatggtggttcatgtctataatcccagcactttgggagactaaggcaggcagattgcaagagcagcctggtcaacatacgggaaaccccatctctaccgaaaaaaaaaaaaaaagtttttaattggccgagtgtggggacacatgcctgaagtcccaggtacttggtaggctaagacaggaagatggtaagatcccaggagtttgaggctgcagtgagctatgatcatgccactgcactccagcctgggcaacaaagcaagatcccatctcaacaaacaaacaaaaacaaacaataacaaataagaaactctataattttacatactaaatatcaaaatgtaaatacttaccttttcatgtamccttttaattacctctttatatataacaagttctgttttaaaaacgttttaatactggttgttgttcatt

SEQ ID NO: 166151 - DNA, 567 bp, Homo sapiens
catttttaaaaaacaagaatttgttattagagcagttagaaagatattggtaatgattatgtcaatacgtagttcatgtcaaaacagctaaatgggagggcaagaggcttacagaaagaaacagatgattttttttcttccagtagatctgcagttttctagcatttcataagtattctgacacataaaaagctcattgctcagattgtatgagagaattgggcatatttaaacccttttaaatcactttgttgttgttgtgcttccctgagaggactcttagtggtaaaaagacaactcatatgtcaagccagacagtaaattgatacctgatgtcactttcatttataccacccttactagtatrgctttaatctaattgacttttattcccatcataataatacttcaaaaacattaatcagtgttgtttcactttaagcatatttaaaatttccctaaacttaagaagttaacattatttcaataattaatatcatttttattcttcagcctaattagttatctaaaaggggagctgtactgttttaatatgaaattcgacct

SEQ ID NO: 166152 - DNA, 452 bp, Homo sapiens
tctattactgacagctgtcaactatgcatatagggtcaaaataaataaataartaaataaaaagaaagggaaggaaggaggaagcagtaaaagaaggcagacaacaaaataaaccattaaccactgacttttaaccatggttcatactttgtggccaccaacttacatgattacccttttgagaaggatcacccaattttcttctaccagaagggtaaaggaaaatgggtgcattttacatgtaaataattctcatgaatatttttattaatttaaaaccccacagcttcctgattataaaccaagtagaattttaagcctcttttaaatattccctggatttaagttggttgttggcaagctaccactataaggttttacaatttgtggcctttactctcaatctgatggcttttaatctatattttaacaattttaactcacttgaagca

SEQ ID NO: 166153 - DNA, 385 bp, Homo sapiens
gaattcattggattgaagtgaatatattttttccaaatttcttaaccacatcactcggccattgtaataagaccctcctagacttgcagaaacacttggaaccacatcagagtagatgaacagaaatggtaatctctaccacagaatctctatgctgatgtgcacagactggggggaaaaaaaaaaamaacaaacctttttactttatagaactggtctggtagttattgaatatattactttgctcctgaaatttgctagttttttttttttttttaagtattgggagatggaataatgtagtggtcaagagagactgtgtcagatgcatttggttttgagtcttatctcttccatttatgccctgtgaccataatcatctgtg

SEQ ID NO: 166154 - DNA, 466 bp, Homo sapiens
taccaggtgtcagaaaggttattrgagatagttgggtagatagtatttattgagtgagacaatgttataatcatataatcagtagtctgatttacacatcgtttatggtaataagtatccccaggcaataatctcccccccttcaataattagcaaaggacttaatgtatcaaataattattttttaaaaaaattttgttaaatttccagattaggctgttagcacccttaatatcaatgacctttttgaagtttgctaattttttttcctacctcagataaatctgcttttcactgtcagcattacttatgtttcatcctgtgttcgtgtgctttctcgctgttgctacattcaacatccaaattgtaatttatatttataactgcctctcatctaattatattctttctcgtttttaaaacacagcaaaatcaactttagctagccattatactaaaacatact

SEQ ID NO: 166155 - DNA, 570 bp, Homo sapiens
gtgtgtgttgtatttgtgtcagtcttctttcatttagcataatgtttttgaggttcatctgtgttgttcacatattgataattcattcccctttattgagtggtattccactgtatggatgtacagcatttaagaaaatcccttgataaacatttgtattgtttacaatttttggctattgtggacaataactgctgtgaacatttccattcagctctttgtatggatatctcttccccaagagaaatgaaaacatcagggataaaattgcattgtgtagtgagaaacttccaaactgttttcccaaatgactgtactattgcattttctaccagcagtggattaaaaggggttctgatttcttcatatccttgtcaacacttyagataattttactggttgtgtagaatatttcattgtggtttcaatttccattttcctaataactaatgatgttgagtattttttcatgtacttttccttattgtatatctcatggtgagttgcagaatatgttgcccatttaaaaataattgaattatttgtcctattattaagttgtaagagatc

SEQ ID NO: 166156 - DNA, 543 bp, Homo sapiens
tttaatgatgccctttctagctctagagttcaattcttccttcacacattaagacagtgtcaaaaaattataatgactaatgcaaggttgaattttagcactccttgttaaatccaagtttccaaagcatgtagtttctttctcattttatagcagctcccttcagttacagaaaaaaaaaatagtatccaggttttagtggcttaaaaattaaaattatctgctattatccttggaaacatatattcaattatataaaatcttattcttaatatatgacattgctttctaataaaaaaattcagacatgtcatttggtctgtacgatgtgttacaaaattcacttttctttgctatttgcaaaataaaaatcaacttcatcagactggttgctgaagacagaaaaataaagacattatctcatcaargaccagtgtaactcttcccctccttgaagatcctaaagagaacactgaaggtgtagaacctaattaaaatgtaactcggaagtataaaatttgtttttagatttcttaagctaag

SEQ ID NO: 166157 - DNA, 467 bp, Homo sapiens
cttttcttttccctccagaagcagccttcccccttccctccttccttccttgaatgttctgttgttcaagaggccctacctttctcacttyagaaatagtaactgggaaaaataccctattctccagagatagttattgatacagggcaaagaatcgggatttatacaccctgagacagattatctctttccttctaggcaatcctggcactccttaagagctttctcttctttatgaacacacatttaaatcttcttttctacagaaactatcatcaactgaaatagtatatatgtcattcatttatttattgtttgtttgtcttcctttactagaattcaagctcttctgtagaataagttagtcctggcactctctatgaacattctctcctctacagataatttcttcccactgaatttatcaccatctgagatattacatatgctaaacaatcatttattat

SEQ ID NO: 166158 - DNA, 433 bp, Homo sapiens
ttttccctccagaagcagccttcccccttccctccttccttccttgaatgttctgttgttcaagaggccctacctttctcacttcagaaatagtaactgggaaaaataccctattctccagagatagttattgatasagggcaaagaatcgggatttatacaccctgagacagattatctctttccttctaggcaatcctggcactccttaagagctttctcttctttatgaacacacatttaaatcttcttttctacagaaactatcatcaactgaaatagtatatatgtcattcatttatttattgtttgtttgtcttcctttactagaattcaagctcttctgtagaataagttagtcctggcactctctatgaacattctctcctctacagataatttcttcccactgaatttatcaccatctgagata

SEQ ID NO: 166159 - DNA, 433 bp, Homo sapiens
ttttccctccagaagcagccttcccccttccctccttccttccttgaatgttctgttgttcaagaggccctacctttctcacttcagaaatagtaactgggaaaaataccctattctccagagatagttattgatacagggcaaagaatcgggatttatacaccctgagacagattatctctttccttctaggcaatcctggcactccttaagagctttctcttctttatgaacacacatttaaatcttcttttctacagaaactatcatcaactgaaatagtatatatgtcattcatttatttattgtttgtttgtcttcctttactagaattcaagctcttctgtagaataagttagtcctggcactctctrtgaacattctctcctctacagataatttcttcccactgaatttatcaccatctgagata

SEQ ID NO: 166160 - DNA, 455 bp, Homo sapiens
ttttcttcttgcagaaagcctataaatggacatgcaagtaggaaacatattgctaaattcttttcttagcaaagaatattaatmttaaaaccctgggaaaagaatgctttcctggagagaggtctataaaccgccgctctgggaatgtctgttttgttcagttgagataaagactgagataagccctggtgtcctgcagaaccctcaggtttactagggtggggaaaaactccaccctggtaaatttgtggtcagactggttctctaatctcaaacgctgttttctgttgtttgagatgtttatcaagacaatacgtgattggtctgggagccaagatggccgaataggaacagctccggtctacagctcccagcgtgagcgacacagaagacgggtgatttctgcatttccatctgaggtaccgggttcatctcactagggagtgccagacagt

SEQ ID NO: 166161 - DNA, 571 bp, Homo sapiens
aacattcaagttcagcaaggcaggaacaagaagatcttgagaagatcaagagaaataagcccttgagaatattttgagaaaagcattcgatttccatacaggtggtaataggagcctctaattaaccttaatttcttaggatgagtttaggacacttgtttttgatagcacctccaacacagataatggccagtagttaggattttaagcagaagattgygattatacttcctcttgatatagaactcttctcaaactcagattaacaaaaaaaaaaattaaaaatttgccaagtttccactcacatttgcatcttgatgatcttaaaaggcatacaatagaaaaatgctacttttcagaaactgaaacattataaaatgacaataaacttgaagaagcaatctttacaaactattacgtaaaaaagcaagtgtttattgacctagattgtatttaatattagctgaaatgagtcataaagttctagcatttaaaagatattttttaaaagcagataattgattataactgatgtaagatacctgtttgtcactttggaaggtgatagtgc

SEQ ID NO: 166162 - DNA, 571 bp, Homo sapiens
aacattcaagttcagcaaggcaggaacaagaagatcttgagaagatcaagagaaataagcccttgagaatattttgagaaaagcattcgatttccatacaggtggtaataggagcctctaattaaccttaatttcttaggatgagtttaggacacttgtttttgatagcacctccaacacagataatggccagtagttaggattttaagcagaagattgcgattatacttcctcttgatmtagaactcttctcaaactcagattaacaaaaaaaaaaattaaaaatttgccaagtttccactcacatttgcatcttgatgatcttaaaaggcatacaatagaaaaatgctacttttcagaaactgaaacattataaaatgacaataaacttgaagaagcaatctttacaaactattacgtaaaaaagcaagtgtttattgacctagattgtatttaatattagctgaaatgagtcataaagttctagcatttaaaagatattttttaaaagcagataattgattataactgatgtaagatacctgtttgtcactttggaaggtgatagtgc

SEQ ID NO: 166163 - DNA, 426 bp, Homo sapiens
agttgggcgagtgggctcaagcatgatcattaagaggcaaagtgatggagtttaaatggtatcatcaccttcctctaggaattctagaccagcaagtgaagaacgcttcaagtaagcatgtgtacaactccagcaaacacactgaacatgctctccgcacaagtgctagcaggccactgaacatgcagacagcccacgccaagggaagaatcagagaagtaatgcaggatcttggaagtacgccarcgtataaaaccccaagtcaaaaggtcaaactgtgctcttgatctctcaagttgcccacttggccctcttccaagggtactttacttccttttattcctgctctacaactttttaataaacttacactcctgctctaaaacatgctttggtttctccttctgagtctttcttctgaggaag

SEQ ID NO: 166164 - DNA, 495 bp, Homo sapiens
gaattctaaggactcagagttgatgatgcctttctcttcatgggtatttcctagtagcttgcatttttttccccagaccacataggtagtgtaaatgaaaaacccagaactagttttgtctatactcmtaaattcctgggggagactattatatttttaacaattttttcccacctggatctacaggtagaaatatgctggttttcctgtaggtttttgtcactgccagttttttcctagtccaacctattactgaggggataattcttccaacagtctcagatgtgtgtggcaactgtagtttgctcttccattttgtgtagactcaagcaaggcctagtcttccatttctcctcagcattaatccctgaagctatatgttctttgtataggcatttgtacccacagcacccacagcttccatgttatttattgctctggtttcatctgattattattttgacacttgaggattcccttatttctgtgagccct

SEQ ID NO: 166165 - DNA, 557 bp, Homo sapiens
tcttttggtaccacgccttcaaaatccagtgtgctttttacatatgagcacattgcaattcagactagccacacgaggtctaaagattaccgtatttaacagcgcaggtccagatttgaccactcagcgtgagatcttggacaagtcttttgatatcgctattgctcactttccacccctctaaaatgatgggcggatagcagacaatcactgaaatgcctttccattgattttctctgcctctttgagcctttatgttctccgaaagtcagrctttgtttctggcccagaaatcggagcccaggcccgagggtcggttcccaggactcaccaagtcaaaatacagcaaccaccgccgagggtctccagagagagcaatgcctggtcgggagtagaaagtactcggtagcgcggaatgtttcctgttgctgcgtagcaaccagctggcctctacggaagcactgcgccactgagtaacacgtcgccaggcaacgcctcaaccagccacagctttcggtccaggagcgcgccaggcaatcgagccaattagtgtctcc

SEQ ID NO: 166166 - DNA, 594 bp, Homo sapiens
ttctaatggaaaagatagaaaagcaaaatcagttgggaaatgtcaacagagaggtggaaaatacaattacaaatcgaacaaaaatgctagaaataaaaaaaacagtataagagataaagaatgcctttaaagggtttaacacagccacggaatgaatgaacttgaagataagtgagtataaattccagaaactgacacacagagaaaaaagagggaaaagaaaaaaaaaaaaaaacagagcatccaagacctgtgggacaatgtcaaacagcctaaagtacatatcayagaaatcatagaaggagaagagagacagaaaacagagcagaagaaatgcttgaaaaataacagctgcaaaaattttcaaaattaaaaacaaacaccaaatcacagatccaagaaactcagagaacatcaagcaaaataaatttgaacagtaacaatagcacatgcacacctaggcatactctactcctaactgatgagaatcaagatgaagagaaaatcttgaaagtagccagaccaaaaaaaaaaaaaaaaaaaaaaaaaagggacacaacatctatagaacaatgagaatttaaaactacagca

SEQ ID NO: 166167 - DNA, 594 bp, Homo sapiens
ttctaatggaaaagatagaaaagcaaaatcagttgggaaatgtcaacagagaggtggaaaatacaattacaaatcgaacaaaaatgctagaaataaaaaaaacagtataagagataaagaatgcctttaaagggtttaacacagccacggaatgaatgaacttgaagataagtgagtataaattccagaaactgacacacagagaaaaaagagggaaaagaaaaaaaaaaaaaaacagagcatccaagacctgtgggacaatgtcaaacagcctaaagtacatatcacagaaatcatagaaggagaagagagacagaaaacagagcagaagaaatgcttgaaaaataacagctgcaaaaattttcaaaattaaaaacaaacaccaaatcacagatccaagaaactcagagaacatcaagcaaaataaatttgaacagtaacaatagcacatgcacacctaggcatackctactcctaactgatgagaatcaagatgaagagaaaatcttgaaagtagccagaccaaaaaaaaaaaaaaaaaaaaaaaaaagggacacaacatctatagaacaatgagaatttaaaactacagca

SEQ ID NO: 166168 - DNA, 528 bp, Homo sapiens
gttttggattgaggactaacgacttcatgcagaagaggtttgccccaaatctgctttattattcaaagtaatgctggtgaaagggtggtataaaacctgcaatgactaactaattcacaaaattacttttttaggagggtaagattgagaaaaagaaaaaaaatccattttatattcattcctacaaagcagtcagccttgtttcaarttagagacacagggaaatacacttggaattgacttgcatttgctattatttaatatatatcgtaacctcgtacgaaatttacatttccctcctttgttctttgtagtacacatttttattagagcaggtttaaaaaatgctttgaaaaatggcagataacaagccggctggagtataatctctgtttgtgccctccactatgtggatttcattaaataagtatgacatattttattttaagaacactgaatcgctttgcttatcaagatatatcagcacaaattggttatgctagttgattgctttgaaaaagtacctac

SEQ ID NO: 166169 - DNA, 528 bp, Homo sapiens
gttttggattgaggactaacgacttcatgcagaagaggtttgccccaaatctgctttattattcaaagtaatgctggtgaaagggtggtataaaacctgcaatgactaactaattcacaaaattacttttttaggagggtaagattgagaaaaagaaaaaaaatccattttatattcattcctacaaagcagtcagccttgtttcaagttagagacacagggaaatacacytggaattgacttgcatttgctattatttaatatatatcgtaacctcgtacgaaatttacatttccctcctttgttctttgtagtacacatttttattagagcaggtttaaaaaatgctttgaaaaatggcagataacaagccggctggagtataatctctgtttgtgccctccactatgtggatttcattaaataagtatgacatattttattttaagaacactgaatcgctttgcttatcaagatatatcagcacaaattggttatgctagttgattgctttgaaaaagtacctac

SEQ ID NO: 166170 - DNA, 528 bp, Homo sapiens
gttttggattgaggactaacgacttcatgcagaagaggtttgccccaaatctgctttattattcaaagtaatgctggtgaaagggtggtataaaacctgcaatgactaactaattcacaaaattacttttttaggagggtaagattgagaaaaagaaaaaaaatccattttatattcattcctacaaagcagtcagccttgtttcaagttagagacacagggaaatacacttggaattgacttgcatttgctattatttaatrtatatcgtaacctcgtacgaaatttacatttccctcctttgttctttgtagtacacatttttattagagcaggtttaaaaaatgctttgaaaaatggcagataacaagccggctggagtataatctctgtttgtgccctccactatgtggatttcattaaataagtatgacatattttattttaagaacactgaatcgctttgcttatcaagatatatcagcacaaattggttatgctagttgattgctttgaaaaagtacctac

SEQ ID NO: 166171 - DNA, 528 bp, Homo sapiens
gttttggattgaggactaacgacttcatgcagaagaggtttgccccaaatctgctttattattcaaagtaatgctggtgaaagggtggtataaaacctgcaatgactaactaattcacaaaattacttttttaggagggtaagattgagaaaaagaaaaaaaatccattttatattcattcctacaaagcagtcagccttgtttcaagttagagacacagggaaatacacttggaattgacttgcatttgctattatttaatatatatcgtaacctcrtacgaaatttacatttccctcctttgttctttgtagtacacatttttattagagcaggtttaaaaaatgctttgaaaaatggcagataacaagccggctggagtataatctctgtttgtgccctccactatgtggatttcattaaataagtatgacatattttattttaagaacactgaatcgctttgcttatcaagatatatcagcacaaattggttatgctagttgattgctttgaaaaagtacctac

SEQ ID NO: 166172 - DNA, 565 bp, Homo sapiens
taagacccagttgctgctccttcgggttgctcttctggaattctgcctttcctgacgtcttgagtctctgaaaatactaggataaactgcaaggtttcacatccacacactatattccttgatacaacatcagtgctatcagggccactaactgccctttggcaacataagaaccatgcacccagcaggaaygcatttggtcttttcctcaatctaaccaacttctaatgttattttttgaagcatctacaaatctcaggtttcattgagattgtacacagtcctctaaccccgtatttatatttctaattaatatatgtggtctttaaataaatatggaaagagaagatactttgagtggtagggaatgtgtctcatttcaaccatggcataagaatgggagtggaaataattattgtcatttattggttcatgatcgattcagtttaaaacttgcttaagagggatactttgatggataaactagagatgttttctttatattcctatttactgcacacagtgactgcaaagcttttccttgatggaatttctctattttatt

SEQ ID NO: 166173 - DNA, 617 bp, Homo sapiens
tcaaaatggtaacaaaattaagtaagtgttaggtgttgcctcccttattctctattctccctcatattaacatatgtaaattacctccagacctgggtttcccatcctcccacatatacctgagaaagagatatgattacatgcccagaagctttgtagggagccaatgttatgattttagaaacattttgtaaggtgtaattcacggctcacaattccacactgttataccaaagcagttttcctcattttcaaacataacaacagttttagtttgaatgcttttgatagaacacatcaggtaagaaacaagccataaaagaccacagattacagggaatttaaaaaagrgggtaaaactttctagaaaagttttcaaagtatcttaacgctttggaaataacaggagtcattttgcaactatgtctatatatatatactatgtgcagaatatattagatatctgtttcagagttcaattcttctacattactccttcagaagggtttaaattcccctttccctcttttctttgctaggagccctctgtgccattagctatgtttactctgctcatttctttctgttctttgttacctcttcctgtaactaggaat

SEQ ID NO: 166174 - DNA, 408 bp, Homo sapiens
attatatcagccctgaccctatttcctaataatgtctcattctgaatgtcctgtggatgtgactatgggaggaacaaagggacaattttcaattcactacagatggattaccgctgacttttatttccttctctatgcaatagggtgtttcttctatgtctgtatgttgtttttatagtcagaaattgtaacacttataatttgaaaaaatacctaatcagacatgggtattagagggtattaaattcaaaggtattgaatacatggataataaatacaaatattcagatggacattaaactggaaagtcctgttatgaytggatgacacacaggatgtttaagccatcctctcagttttccttttccagggcactgcttcttgggacactgagtccagcttattatt

SEQ ID NO: 166175 - DNA, 589 bp, Homo sapiens
gttttggttactatcggcttctagtaaaatttgaaggcaggtaaagtgatgccttaagttttattctttttgcttaggattgccttggctattcacactcttgtttagtttcatttacattgtaagacagttttattctcattctgtgaagaattaattgatagtttgatagcaataacaatgcatctataaattgcttcaggcagtatgaccattttaacaayactgagtcttcctatccgtgagcatagaatggttttctgttcgtttgtgtcacctctgatttctttgagcagtgttttgtaattcttgttgtagagatattttacctctctggttagatgcattcctaggtatatattttcttctttttgttgctattgtgaatgggattgaattcttgatttctcagtttgggtgttgttggtatatagaaatgctactaatttttgtacattgattttgtatcctgaaactttcctgaagctgcttatcatatcaaggagcttttgggcagagactatgggtttttctaggtatggagtcacattgtctgcaaggagagatactttgacatcttcacttccta

SEQ ID NO: 166176 - DNA, 589 bp, Homo sapiens
gttttggttactatcggcttctagtaaaatttgaaggcaggtaaagtgatgccttaagttttattctttttgcttaggattgccttggctattcacactcttgtttagtttcatttacattgtaagacagttttattctcattctgtgaagaattaattgatagtttgatagcaataacaatgcatctataaattgcttcaggcagtatgaccattttaacaacactgagtcttcctatccgtgagcatagaatggttttctgttcgtttgtgtcacctctgatttctttgagcagtgttttgtaattcttgttgtagagatattttacctctctggttagatgcattcctaggtatatattttcttctttttgttgctattgtgaatgggattgaattcttgatttctcagtttgggtgttgtyggtatatagaaatgctactaatttttgtacattgattttgtatcctgaaactttcctgaagctgcttatcatatcaaggagcttttgggcagagactatgggtttttctaggtatggagtcacattgtctgcaaggagagatactttgacatcttcacttccta

SEQ ID NO: 166177 - DNA, 577 bp, Homo sapiens
agtcttcttggtctcccagtccctcggtggcagatgttcctcctagctggtctagtcggccatcttgcctccatctctccagttccctttttggaagtcaaatttatttggtataatatagtcattccagtcttccagtacttactttgcacagtttaattttcaatcatatgtacttttttattgygttgttttggttaaagcatgtctcttgcaaacagcatatagttgatattgctttttcattcattatgaaaatattttaattagagtgtttaatttgataaaatttaaagtagctaacaatgcagttaatttagttccaccattttataattgatttcctttaggcttcttgttttctgtttctccttctgtgttttctttgagagtaactgaatatttaaaattctatttaatttatctttggaatgtttagctctgtatctttgtattatatcatgatggttactctacaggttaacatatatatccataagtttgtataatctacttataattaatgttgtggtccttaatgggaaatatcaaaatcttttaatcatatagagttatc

SEQ ID NO: 166178 - DNA, 630 bp, Homo sapiens
tagacttaggctgtgaaaatttatcaagattatttccttcatgaaagtaagttttatatgtattaacatagcaactatggaatacaaacaaaacagaaaactctgcaataaaataaaacttaaaaatacctaggaggagaggtggagcaagatgacagattagaagactctatgaattgttcctcctgcaaggacaccaatttaaccactatctacacacacataaaaaaaagcaccttcatgaaaataaaaaatcagatgagcactcagagtatctggttttaccttcatgttgctgaaagaggcactgaagagatagggaaaacagtcctgaatcgccaacaccatccctctcctatcccctggcagtggcagcatgggacagagatcacttctatgcaccagggagagggagrgtgcagcaattatgagtcgttgaactcaatgctacgttattatagcagaaagtaaaacaaaaccaaactcaactgatacagagggagcatttaaaccagctggggtggagttatgaatcccagcagttggaacttcagttcctacaagcttcaccactgtgagataaaattctctggggccctaaataaacttggaaggtagtctagaccacaa

SEQ ID NO: 166179 - DNA, 592 bp, Homo sapiens
tctttctacttaggcttagaacatcattttagatgcttctcctggctgagcagagatttagaaactggaaatcattttcaaamaaacacagtaccggctggcatgtaactattaaattcatcagggcaatacatttcaaatgaaaagtttgtagtataaaaataaagtaaaatgatttttacaattcatgtactggtactgcaatctatataggtagataaaaaggaattggaaaacagtaaacaaactatacattaatttaaactaaaatgaacacacactttcttatatctacttccttacattaagattattagtatcagacttacaaaaggcgagtgtgtgtatcttgaaacaaaaatgcagttcataagctttgaatatgcaatgaatagatgtagactttgtccttatcagttgaaaataaaattaacaggtttttgtatattaaagttgggatttctgttacagttagaaaacacaatttagagtcatgaaataaaattccttccactaaggtttttgaaattaaaaaccccagttatttgctatgtgtccttctcattccaaaagttatatctctgaagaaacc

SEQ ID NO: 166180 - DNA, 592 bp, Homo sapiens
tctttctacttaggcttagaacatcattttagatgcttctcctggctgagcagagatttagaaactggaaatcattttcaaacaaacacagtaccggctggcatgtaactattaaattcatcagggcaatacatttcaaatgaaaagtttgtagtataaaaataaagtaaaatgatttttacaattcatgtactggtactgcaatctatataggtagataaaaaggaattggaaaacagtaaacaaactatacattaatttaaactaaaatgaacacacactttcttatatctacttccttacattaagattattagtatcagacttacaaaaggcgagtgtgtgtatcttgaaacaaaaatgcwgttcataagctttgaatatgcaatgaatagatgtagactttgtccttatcagttgaaaataaaattaacaggtttttgtatattaaagttgggatttctgttacagttagaaaacacaatttagagtcatgaaataaaattccttccactaaggtttttgaaattaaaaaccccagttatttgctatgtgtccttctcattccaaaagttatatctctgaagaaacc

SEQ ID NO: 166181 - DNA, 434 bp, Homo sapiens
tcagtaacttgccctattggtatacttcttaaagattcagtttaaatcaagcaccttttcaggattccagtaagatcctacctctcccttggttcattctactctataccagctttatttcctgtctgctccttacctaaattcagctgagacttcgttgttactacagctgggggtcttgcagatrtagtactaaccacattgcaacacccaagacagctcaagcctgttgcaaacatagtgaagtaaaacaatattatgttatttgagaaattccttaattctaagtgttgtgtattattcaaatcatttgtctcatgcactaagcccttctgttaaaactttgagagaataagtatgttttaacatatttggtcacaaatatcttagctaggattggtttgctgaattaatttctaatgagatatcaggga

SEQ ID NO: 166182 - DNA, 578 bp, Homo sapiens
ctctctgagacattgttcagaaaatgtaaatgcaaaccacagcctgacagaaaatatttgcaaaaaaaatgtgatgaaaggcttgtatttgaaatacaaataattcctaaaaataagaaaacaaatgaatgaaatagttgaattgatttgtacagattcttctccaragaacatatacaagttgcaaataaacacatgaaatgatgaacaacaaggagtcactatgaagagggaagaaaaatccacacctctctatacccatcagaatggccaaaattaaaaaagcctgacaataccaagtgtggacaagaatgtgaagcaaatgaatagcacatagattacttatgggaatgcaaagtagtacagctatgttggaatatattttgcagtttttacaaatttaaaattcacttgccatacaccacagtaattgtatccctaggtatttacccaagagaaatgacagcatatgtccccacaaaacttatatgcaaatgttcacagtatctgtattcatcattccttaaaactggaaagagtccagatgtctattatatctgtggataaacaaactatgg

SEQ ID NO: 166183 - DNA, 572 bp, Homo sapiens
ttacagtcacagttgatatgttttaatgtcacctgtgaaatgtatgcaaacattctacctaagacttaagtcgagatattataatggtaatacaagacttactatacaacaaatattttattctatgtttctactaaatttttaagattatatatttaatagactatatattagactataatagattatatatttaatatatttatttaatatatttacatagacttttttgttgtaaatttccttctcagaactgcttttgctgcgtccaaaatttggcwtgttatgttttcattttggttcttttaaagatagtttttgattttcatcctgattttttctttgactcattggtttttatacacatgtggaagaagaacaatggattctatctcacaatatatacaaaaatcatgtcaaaatggattaaagatctgaattataatgattaattaaattaaaacaccatatatataattaaggtctttattatggtctttgtaatattacttatttctaagtatctttgtagccatttttaatgaaatttttttcactaatttttggacagt

SEQ ID NO: 166184 - DNA, 572 bp, Homo sapiens
ttacagtcacagttgatatgttttaatgtcacctgtgaaatgtatgcaaacattctacctaagacttaagtcgagatattataatggtaatacaagacttactatacaacaaatattttattctatgtttctactaaatttttaagattatatatttaatagactatatattagactataatagattatatatttaatatatttatttaatatatttacatagacttttttgttgtaaatttccttctcagaactgcttttgctgcgtccaaaatttggcttgttatgttttcattttggttcttttaaagatagtttttgattttcatcctgatttttyctttgactcattggtttttatacacatgtggaagaagaacaatggattctatctcacaatatatacaaaaatcatgtcaaaatggattaaagatctgaattataatgattaattaaattaaaacaccatatatataattaaggtctttattatggtctttgtaatattacttatttctaagtatctttgtagccatttttaatgaaatttttttcactaatttttggacagt

SEQ ID NO: 166185 - DNA, 504 bp, Homo sapiens
agtttgaacagaactctaaccaagacattaaatacttgtcagcatgccaggtatggatagctgtaaggttagtgaggtagagtgaataaatatacaatgaaccataaagcatctattatagatatactatactgaggcagatatattttaggcctaaaggataacacaaaatgttttctagtgcatctcaattacaatgagcatatctcgaagctctgaaaagtcttagtgagctggaccctcttagatgctgtgggggagccagtgctgcaggattgagttgcaccttctctgtgccctgaatacgaatactccacattttgctatttttagagagttttgttctcatttaattaagtatacattgtactgtgtatttcagtcttgcatacatttttcttgattattaaagtatatttttaagggatatgaagggcracaccacaggaatttaaacaagttttgatctttgcttggaaatttaaattttttcaaagatttgtt

SEQ ID NO: 166186 - DNA, 449 bp, Homo sapiens
agtcctcaggggcatgtaggaataaaatctgtgcctaaatgaaaatctaggaataaataatgaagaattatattcccaagatactcccattgtagaaaactgctgtggaaacctagctatataatactggaaaacaaaaatgtaatgaattttgtgtagatcagaaagtaacaaaacgtgaacacwaacatcttgtagatttcttgtttgaaataaaatttccattcatttcttaccaagcattactacttcagtttcaatattcttgcttctccctttgtaaattatatttaaatcagtgaaattaatttaaatacacaacagcttctttgtaaacagctaagttgaattattttttcagtaaaaaaaaagaagtaactaattttaattattaaatagttgtgttaggagtaaaaaggcttattggaataaagaaaaataaaataaag

SEQ ID NO: 166187 - DNA, 577 bp, Homo sapiens
ctgtgcctaaatgaaaatctaggaataaataatgaagaattatattcccaagatactcccattgtagaaaactgctgtggaaacctagctatataatactggaaaacaaaaatgtaatgaattttgtgtagatcagaaagtaacaaaacgtgaacacaaacatcttgtagatttcttgtttgaaataaaatttccattcatttcttaccaagcattactacttcagtttcaatrttcttgcttctccctttgtaaattatatttaaatcagtgaaattaatttaaatacacaacagcttctttgtaaacagctaagttgaattattttttcagtaaaaaaaaagaagtaactaattttaattattaaatagttgtgttaggagtaaaaaggcttattggaataaagaaaaataaaataaagtgaaatgattgtgttgtttttaagagtttattttgcagcagttgcttacatcaaagtattttaaaaataaaaaaaatcattaaaataaaaactggcccattcatatggagaggaaattttccaagcagtattaattctatagcccaaattcacaaa

SEQ ID NO: 166188 - DNA, 620 bp, Homo sapiens
tcacaattagcctgtccaatggttgtatcgattcaggtgtctacaagaaaagtaattaaatacccaacagagtaatgagaaaagtaaaaggatgaattacaaatgaaatcaacaaggagaggagaaacaccccacaaccagcctagaagcaagaagagggaagagttacctttaccactattgcaagggagagctatggctccagcaatgggagagccacctgataggaactttcatcctcaagaaagaagtggaaccactgacatccctgagtccaggaagcaagaggtcaatggaacaaagacaccattctcattctcattctcctttcccccacaacctccagcttgttttgctcattggttgaacccaaactaaagacggggyaaacatccttttgttttcataatagccagcagcccaggagatgaagcaaagcgaagacaggtgagatgaagggacaaggagaatttccaggaccatgacattttttgtgtttccagtctttctgccataacacagatgcctgaatatacattggcaatagcaagacagaaatgtttctctcctgtgtaagtctccaaaggtggatagtccagcaggggtaagtttcctctgtt

SEQ ID NO: 166189 - DNA, 670 bp, Homo sapiens
gtctgttaaattaatttcatgttttaaaaaaccctatttttaaaagtccagatttttctctgtattattttaaggtaatactggcatttgcaatgtaagagtttcttctaggcatattttattaaaatatttaaacagggaaaagtaaaaatttattacattgcaacagtctgttttaaatttttctttatcgtaaagtctaagggtttctggaatcatttcatagcgtctgtgtaataaagactcattttctagaggcrtttaatcaacaagagttgagatcactttttaaatgagctcttctcatcctgacacatagattcgaaataccttatctgaacatgattttccaagtttatgcttttgattacacctgggtagaaactgtgtttcctccctctaatctgttgcctcatattcttttcagcaaatgaaacagcatatgttaaggcaataaggcatggccaccctctgggctttcatatgccagaataaagaaaatgaatgttaatgccaaaaataaagaagcatattaaaatgaagatgttttggaatagtatttccctctaacttatggtttaaagttaccattttatgtgattcagaaaactcagactggaataatgaatgttattttccgtggatttttgcaaaaaagaaaacatgactg

SEQ ID NO: 166190 - DNA, 576 bp, Homo sapiens
tttatttaatggagaattaatcattaattttattattaataataaataaatatwaattaattatttttaaatttgtttatttatttaatggattattgggattagaaataaataaagaagaaaattaaaattttctcagtaggatcctatttattactaatcccaataatctattttctacctcattctgtaagcataaaaacacatgggtatatgcagtcactatacaaaaggcagctaatgaacattcatctcttgcatgtggttggcaagtttttaaattccttagttggtagaaaaatgttaaagagcatgtatccttgaaagaggtaatgctatggtaacattatgctggcacagatttaacccagtttaaaacatccttactgtgagtcaccaataattgcttgatatatagctgatgtcagattttgaggaattaactaaagtagaacatttaaatacaaagtattaaacataaattagtatggatattacttatttagtcattaattcaaccaagatttatataggcttcactatgtgccacacagtgatgcaggtgcgggtgatacc

SEQ ID NO: 166191 - DNA, 576 bp, Homo sapiens
tttatttaatggagaattaatcattaattttattattaataataaataaatataaattaattatttttaaatttgtttatttatttaatggattattgggattagaaataaataaagaagaaaattaaaattttctcagtaggatcctatttattactaaycccaataatctattttctacctcattctgtaagcataaaaacacatgggtatatgcagtcactatacaaaaggcagctaatgaacattcatctcttgcatgtggttggcaagtttttaaattccttagttggtagaaaaatgttaaagagcatgtatccttgaaagaggtaatgctatggtaacattatgctggcacagatttaacccagtttaaaacatccttactgtgagtcaccaataattgcttgatatatagctgatgtcagattttgaggaattaactaaagtagaacatttaaatacaaagtattaaacataaattagtatggatattacttatttagtcattaattcaaccaagatttatataggcttcactatgtgccacacagtgatgcaggtgcgggtgatacc

SEQ ID NO: 166192 - DNA, 541 bp, Homo sapiens
tctattgaaaatggaagcataacttagctgaacaagaataagtcttgtaacaygagaaaaatgaagggaggtaaatagttgctgcaaagcaagctggagtgtcaatagagcaaactgtttatggtagcaaggatagccttaatacagctctgaattttgatgggctaaatttccgtggctgtgttttagtgacatctgtcattattttccagattaatttctagatttgagaaattcctgagactcatcaacttgaattttttttttgattgaatggatgccccgtaataagaataaagtcatctatttatttttgcttgggatatgtaaattttggtatcaacttcttgaaattttactgtacctagtaaggcccttttcaacgatgttcattgaaatagagtttctctctaatattatttccagaagttcaataccacaggatcaatctatatagatatttaagaaaggcaacttgaacctgttagtgatactgcagtatttatctcttgaagtatttagtcacactagtccaagtaac

SEQ ID NO: 166193 - DNA, 495 bp, Homo sapiens
aaaatggaagcataacttagctgaacaagaataagtcttgtaacatgagaaaaatgaagggaggtaaatagttgctgcaaagcaagctggagtgtcaatagagcaaactgtttatggtagcaaggatagccttaatacagctctgaattttgatgggctaaatttccgtggctgtgttttagtgacatctgtcattattttccagattaatttctagatttgagaaattcctgagactcatcaacttgaattttttttttgattgaatggatgccccgtaataagaataaagtcatctatttatttttgcttgggatatgtaaattttggtatcaacttcttgaaattttactgtacctagtaaggcccttttcaacgatgttcattgaaatagagtttctctctaatattatttccagaagttcaataycacaggatcaatctatatagatatttaagaaaggcaacttgaacctgttagtgatactgcagtat

SEQ ID NO: 166194 - DNA, 541 bp, Homo sapiens
tctattgaaaatggaagcataacttagctgaacaagaataagtcttgtaacatgagaaaaatgaagggaggtaaatagttgctgcaaagcaagctggagtgtcaatagagcaaactgtttatggtagcaaggatagccttaatacagctctgaattttgatgggctaaatttccgtggctgtgttttagtgacatctgtcattattttccagattaatttctagatttgagaaattcctgagactcatcaacttgaattttttttttgattgaatggatgccccgtaataagaataaagtcatctatttatttttgcttgggatatgtaaattttggtatcaacttcttgaaattttactgtacctagtaaggcccttttcaacgatgttcattgaaatagagtttctctctaatattatttccagaagttcaataccacaggatcaatctatatagatatttaagaaaggcaacttgaacctgttagtgatactgcrgtatttatctcttgaagtatttagtcacactagtccaagtaac

SEQ ID NO: 166195 - DNA, 565 bp, Homo sapiens
cctggctgaatgaacatcagacctagaatcaaattgtygctctgtagtttaccagtttataaaccttgagaaattgatttaattttcttgaaaatatcaaactatgacagtagtaatattactacttatcaaatggatttgatatgttatttaaataaaacatttaaatcaccctgaacagggcaaagcacttgttaactaaatactagagctagaattactattctctagcgaaacgtagaaaaatgcaatttatgtataatatactgacattaaggtacaccttggagatatcgcaggttcagtttcagaccgcaatagcaaatattgtgatgaagagatcacacgaggtttttttgttttttgttttttgttttaacttttggtttcccagtgactgtatgagctatgtttcattgtactttagtctattaagtgtgcaataacagtatgtcttgaaacaatgcacataccttaattttaaaatattgtattgttaaatattcctgcgatcatcatagcctcagcaagttgtaatcttctggctggtggagcgtcttgcctc

SEQ ID NO: 166196 - DNA, 565 bp, Homo sapiens
cctggctgaatgaacatcagacctagaatcaaattgttgctctgtagtttaccagtttataaaccttgagaaattgatttaattttcttgaaaatatcaaactatgacagtagtaatattactacttatcaaatggatttgatatgttatttaaataaaacatttaaatcaccctgracagggcaaagcacttgttaactaaatactagagctagaattactattctctagcgaaacgtagaaaaatgcaatttatgtataatatactgacattaaggtacaccttggagatatcgcaggttcagtttcagaccgcaatagcaaatattgtgatgaagagatcacacgaggtttttttgttttttgttttttgttttaacttttggtttcccagtgactgtatgagctatgtttcattgtactttagtctattaagtgtgcaataacagtatgtcttgaaacaatgcacataccttaattttaaaatattgtattgttaaatattcctgcgatcatcatagcctcagcaagttgtaatcttctggctggtggagcgtcttgcctc

SEQ ID NO: 166197 - DNA, 565 bp, Homo sapiens
cctggctgaatgaacatcagacctagaatcaaattgttgctctgtagtttaccagtttataaaccttgagaaattgatttaattttcttgaaaatatcaaactatgacagtagtaatattactacttatcaaatggatttgatatgttatttaaataaaacatttaaatcaccctgaacagggcaaagcacttgttaactaaatactagagctagaattactattctctagcgaaacgtagaaaaatgcaatttatgtataatatactgacattaaggtacaccttggagatatcgcaggttcagtttcagaccgcaatagcaaatattgtgatgaagagatcacacgaggtttttttgttttttgttttttgttttwacttttggtttcccagtgactgtatgagctatgtttcattgtactttagtctattaagtgtgcaataacagtatgtcttgaaacaatgcacataccttaattttaaaatattgtattgttaaatattcctgcgatcatcatagcctcagcaagttgtaatcttctggctggtggagcgtcttgcctc

SEQ ID NO: 166198 - DNA, 558 bp, Homo sapiens
atgctgaaaaaataatgaatgcattgcagcacattgttagcagtcgttattatgaagaaaatggtttgcctctgtctttcgcaaatagaacgtacaacacgctctggcccagccacactcagtatcatcccatagcggtgagtaccctgcagccagggagcacgtgatggaagsttcgtgctgctaatataaggactagtgctgtgatttgctctgacaggtctgtcattgctacatttctaaaagggtggccaagctggggtgctgtaaaatagaaacagaccttctaattcagtgatatttaatttaacaagaatagtaatttaggatatatatgtctcctgaggggggaaagaacatgaaacaactgaatttgcaggtatattattgaatgcaagactaaattataaagagtattaagatttcaaggatgaagcttttaactgcattaaatatatcaaataaaatttaagctataattatagttatgattatagcaaccatttcccgggtaatctacactgttccagatactctgcttttcacttccagtacacg

SEQ ID NO: 166199 - DNA, 558 bp, Homo sapiens
atgctgaaaaaataatgaatgcattgcagcacattgttagcagtcgttattatgaagaaaatggtttgcctctgtctttcgcaaatagaacgtacaacacgctctggcccagccacactcagtatcatcccatagcggtgagtaccctgcagccagggagcacgtgatggaagcttcgtgctgctaatataaggactagtgctgtgatttgctctgamaggtctgtcattgctacatttctaaaagggtggccaagctggggtgctgtaaaatagaaacagaccttctaattcagtgatatttaatttaacaagaatagtaatttaggatatatatgtctcctgaggggggaaagaacatgaaacaactgaatttgcaggtatattattgaatgcaagactaaattataaagagtattaagatttcaaggatgaagcttttaactgcattaaatatatcaaataaaatttaagctataattatagttatgattatagcaaccatttcccgggtaatctacactgttccagatactctgcttttcacttccagtacacg

SEQ ID NO: 166200 - DNA, 558 bp, Homo sapiens
atgctgaaaaaataatgaatgcattgcagcacattgttagcagtcgttattatgaagaaaatggtttgcctctgtctttcgcaaatagaacgtacaacacgctctggcccagccacactcagtatcatcccatagcggtgagtaccctgcagccagggagcacgtgatggaagcttcgtgctgctaatataaggactagtgctgtgatttgctctgacaggtctgtcattgctacatttctaaaagggtggccaagctggggtgctgtaaaatagaaacagaccttctaattcagtgatatttaatttaacaagaatagtaatttaggatatatatgtctcctgaggggggaaagaacatgaaacaactgaatttgcaggtatattattgaatgcaagactaaattataaagagtattaagatttcaaggatgaagcttttaactgcattaaatatatcaartaaaatttaagctataattatagttatgattatagcaaccatttcccgggtaatctacactgttccagatactctgcttttcacttccagtacacg

SEQ ID NO: 166201 - DNA, 556 bp, Homo sapiens
ttaaagcaaatgtgttttcaacaataaacatggcataaaataagaccctggaacaaaagttgagaaaaggaaaaaaaattaatgttgttatctgaaaacctaatgattttacggataataaaaatggcaaaaataacacatttttatctctaagtgcttgagcaatacgttaagtatcccaaagtattttaggatagacatttgactaagtacttgcctgttatctttcagaaaaaawtaaatatgattttatttgtttccctaattatactgttacagttttttttttaaactgtttttagtttcttaactgttagtttttttcccaaaactaactttactgttttttggagccatctatttaatggaaaatgcaaacctattaatgtaatccaatggaataagacagattacatgccaggaaatggaaagaatcatattgtctagaaagcgattactcctgaaagtttttcactttttgttggaagatggaagagtactagtcatttgaaagcaactgatttctttcctgaattccagtcttgaaatatgcatt

SEQ ID NO: 166202 - DNA, 567 bp, Homo sapiens
aagtttttcactttttgttggaagatggaagagtactagtcatttgaaagcaactgatttctttcctgaattccagtcttgaaatatgcattcatcaataatcaaataaatattcatgatccgtattggtgactcatttgatattttcagtggtttgttgtttgcttaaatatacaaatgttgtattgattttgatgtatcctcaaaatataaatgagaaaaaaatttgtatgtcaaaaggatttgagttttataacaaatttactcaaaagattaatattagtgcaacttcctgttcaaggtttagaactaagaagtgattttttttaattactaaattcagtcatggtggcttacaaagaaaatwaattagtctgtacattttattaagtgggagtggcttgaattagatggtgatatctggataaagaaactaaaattcttaagcatcctgatttcaaataaaagtacagataagatcatcttttagagatatgttgtcaaattgaactaacataatgaataacaaattgtaagaaagacaatatgagcaataattacacgcag

SEQ ID NO: 166203 - DNA, 565 bp, Homo sapiens
ttaattttaaacaaatcatttcatatttcatcacttcaccaccaccaccccccctttataaactatgcaccttggaaaacccaaatactttatttttatttatttttttgagacagagtttcgctcttgcacaggctggagtgcaatagcatgatctcagctcactgcaaactccgcctcctgggttcgagcaattctcctgcctcagtctcccgagtagctgaccacgcctggctaattttgtatttttagtagagacaaagtttcaccatgttagtcaggctggtctcgaactccttgacctcaggtgatctgcccaccttggcctcccaaagtgttgggattacaggcgtgagccactgtgcctggscccagatacttcaagttctttcttggaaaggctggagtacccaaacacttttatttgtttttcttacctggagtccttgcgccttttactcactctgctagaaacattgttttcatctcttatcaatccttacttattttctcattcttcagagcaccttggacatcatctccactgaaaaggctttcttgaacc

SEQ ID NO: 166204 - DNA, 500 bp, Homo sapiens
tggtttattttgtcatcagattacttgtgggtatacctaccccaaaattgttttctcattcacagcattagcatattcagcaaatccatctgtggtgggaattaaaaatattattggtattaaagaaatccattcaccccaaaacttgttttacaggattacaattttaattcaaaatttccagatttgggctatttctgtatgatccaataacttattttgtcacagggcttaatttgccatttttggggatttgtcgactcattttgtctgaattttcacaactggtattatgtcactagctacctgatayggctatttcccttataactcaatagtaccttaacacaaagtataactctgtagagttggtgaatattttagggaaatattagcaaaatgcatgtagtaaagacatcttatgaaaactgtattcatggaatttgatttagcatgctcagttgccagttcccattatcgatactctttctttgcagaat

SEQ ID NO: 166205 - DNA, 563 bp, Homo sapiens
agaataactaacaaggaaagtcatagaaaagtctaaatatagaaacaaattatatgtcacatgtcacatggaatataagcctactattcccaacctaagagtaagtcaaagaataaaacrtaagactgaattcagggattgttgttgttgctgctgctgctgctgctgttttattgttttaagctgggttaggaagaaatggtttagatgcataaaaaagtaaattaacacatgaaaatttaagagtatagctgtcacactgaaactttggcctcaaagagtttatgtgtcttaccaaaacctcaatttaattctgaaaatggttttgaagcataatttatatgctcagaccaacaagactgattccataagccatacccagcaatcaacctaattactgcacaatatttcagacagccccccaaattaatcaaagtcaagtatatccatactaaaacaatcctaaataataaaaatacagttttctctcccatagatagatatggactagtcaagttggttgtaggataatatctataaactaaattccatgttgccattga

SEQ ID NO: 166206 - DNA, 527 bp, Homo sapiens
ttcacaaggcagcaggatagagaatgagtgctgattgaaaggagaagccaagccccttataaaaccatcagatatcatgagaattaatgcactatcatgagaacagcatggggggaaacaccaccatgattcaattatctccaccggtcctgcccttgacactttggaattattacaattcaaggtgagatttgggtgggaacacagagccaaaccgyatcagttctcctatgagtatacaatgtgactgcaaaggctaataagaaattagcaggcccttctacatgagaggcccaaactaattaggctgaggtaagaaacctgctaaactataacaacatcagaagtaatggtaacttctctgagcacctgagtgataaattgcagcatccatattactgtgaaatagaagcaggtagaaatatcccaacagaaaaaaaaggagaaacaatgtgacatcagtggcatgataacccacgacctaaacatgagaaagctctagaaaaataggctatttgaacacattg

SEQ ID NO: 166207 - DNA, 566 bp, Homo sapiens
ggcagtttatattttcagcatgagctagataagatttatagacacactgttattctcatctaaaaatgcttattatttgttcatttacaatatgttgagaatctattttaccttatggaattatagatctgcttatggaagatcatttaraatatagatttgtttctgtgcccgctggtgaatttaatgcaacttataaaataaaaaagttaaatgagaccttttccacatagccacatattaaaatatctttgggtggcatttatttgtattattgcaaaaatggtttttaagaaaaatatttttctggataataataatgtcatcaatggttttggctccataactgtaagatgtagtttggcagtgaaagcttgggtaatgtgagtgtgaaccaccatttttttctgagaaaacatttcaagcatcctgacaattaccaaattactgatgactacaactttgaagaataattttggattatggaggtgactgcgtatctgtcgaagtcacagaaacccacaggatgaggctgaagctggaaagtgctctccggtccctttgct

SEQ ID NO: 166208 - DNA, 570 bp, Homo sapiens
aggaatttaggaaaaatcatattctcagtctctgcttattcttcccaactttgtacatccgtatttcttgccagcttgacctctttccccatctttttatgtgaacacctcaattttgccttggggaactacggctcccccaagtcatgaagccattaatgaacaaaccacctccccccayctttagctaagcaccctcagacgctttcatttgcaggaatttaatcttgagcatggtggtacaaggaaagaagtcagctggccccactggttccagcagtgatgccatggcactgctgccctaacctctggagctcccctgggcctgatcttttccagtctttgatttccaggtttcttgttgggcctgtgcactctcccacattttacctgtaaatttcctcattactcgaatcagctagagtccgttctgctgcaaccaaagaaccttagctcacaagccacctcaccctgctttcagcctagactctacataaaactgtctgagatgatgggatagtccttttgtgactactttttcctgagttcaaggcctcaattaggagcagc

SEQ ID NO: 166209 - DNA, 556 bp, Homo sapiens
ttcctctacccctgctcagctctctaaattgactcagcttcaggtaaagtcagaaacttctcccacaaacagaccttcagtttctccagtggagctgtgtgttcagtacaggaggctctccctttcccaattctgcagttggggcactcccagtatttggggtgtctcccgggttctacaggagcagtctgcttccttcagagggtctgygggtcctctcgggattcctgatttgttcttgaaattgatctggagctaaaattccatattcttttactctgaaaagaaaagaactctcagagcaggaatacattgaacttttcacatttcagtataaaccagtaacagatatgctatttcttatgaatgttcatgaagccagaaatgtactgggtgcattaaactcaatctcagtgtcaccagcaaactgacttcattccccactctgttggtcacaaagaaaaaagacaatcaggttttattcactggcctggaatggagaaggagagactcttgctctaaatggcgcttctccctgaacaatagagggcatggg

SEQ ID NO: 166210 - DNA, 574 bp, Homo sapiens
agcagcacgacctcatacactggtgaggattaatatcaattgcataacaaaccacaaaaaaaatgatttaaacaataacagtcatttatttttgctctcaaatctgcaatttggacagggctcatcagggaaaactcatttctgctccacacagtatcaggagggacagcccagtggagggcaggatgatccacatgcaagacagacagctcwctctcagggcacgtagttggtgccagttgctagctggaaggggctcaggttcttccccacatagcctgggcctccttgaggcatactgtctgggttctcatggagagcgtccacagggaggaagccaggcagaagctgtctcccctcttttttacttagctttggaaatcacatagcatcatttttgtcatactctatctccttttgaaacagttacaaaagcccacccagcttcaaggggaagagacctagactctgccttttgttgggggagtggcagtgacatggtttagctgtgtccccacccaaatgccatctttaattttcacgtgttgtgggagggacccggtgggaagtaatg

SEQ ID NO: 166211 - DNA, 619 bp, Homo sapiens
cgcccgcatccaattccctcacctgttccctcctcctgggtttctgattgaagtccctcccttcctctggcacccaaagcaggaaagctgcctcatccatcatagtcctttcttgtttccaaggcctcrtacctatgctttttcttgtttgatcattccttttcagttcccagagcacctggttactggcagtttcctggttttgaatgacttcctcatttatacatctggaatttgaggttccttctttcttaaatgtctacctggcttccagctcactgttttctcagaccttcattcttttgttgcttccacagataattctatcacctggcttttagaacaaggccattcctgctctagtatgctgacctgctcaaagccacattttacccagagtctagcccatcctcacacctaacatctatccagactcttatccaggcctggatttcacaggcccagtgccaacacaacatgcacaaccagtggccgtctgtgtctgcagggtgacactagtcttttccacttctaccaatagtctgattagtcaacaaggctctaagacacttccaaccccatatgtcttacacagtaatttgttctattttcatagata

SEQ ID NO: 166212 - DNA, 620 bp, Homo sapiens
gtccaagcttcttaggatgacaaagtatttcaaagccaggacttacatagaatgtttcttgraattccatttgcgactgtttcacctgagggggaaaggaggtggaagaggagaaaacaagagattagtcccacttctaacataaaagacttgggagaaaaaggataagctgggtgctatggcctagaaggagcactctaagagagctgaaccttagtggaactgccagagttcctttcttccttattcataaaaagatttgatggttattatgtaaggtgatgaatatgtaaactacctcaattgtaataatcattccacaatgtaaacatatatcaaagcatcatgttgtataccttaaatatatacaatttttatttgtcaattatacctcagtaaagcagggaaaaaagatttgaatctgactaaactcaatgacttcctctgttagaactggtaaccaaaaattgacctaacatagccaagaaggaccattattactttactcactgccagccacatttattctgatgaagagaatgtgccatctgtaagcaatattactttcttgttattagatttttgaatggacaattagtgccacatcttttccttttagt

SEQ ID NO: 166213 - DNA, 581 bp, Homo sapiens
ggttatcaatgtaagacattttcatgtctgtttttctattcttgtatataaagtgtgtgaaataaagaatatttcctacactgtgatctgtagaacaccagtgtcccatgagatgttatctgtgctccatgtgggaaaaggggggttttcaagtcaaataaacctgagaatgttcttgaagttttacaatctaggttagcatattaaaggttatgagaagccgcataataaagaaacccaattaatcagcacctcacaaattatttgagcatgaatcctcctcctttctcttttcaacaatttaataataatagctattatttattgagcatttactatgtatcagacagttttatatacccttttacatgtaatgcaatactcactgaatcctcacaaaaactatatgaggaasatgctattattatctccattttacaaataaaaaaactaaggcttaaaagagttaagtaatttgcccaagaacacaaagctgtggtagaggaagaacttgcattctggcaagcctgactctagaggctccattctgctgcctctacttccttagcagagagctgcgc

SEQ ID NO: 166214 - DNA, 524 bp, Homo sapiens
tgtttggtggatacataggttatatggtttggctttgtgtccccacccaaatctcatcttgaattatacacccataattcccacaygttgtgggaggaacccggtgggagataattgaactatggggacagtttcccccatactgttctcatggtagtgaataagtctcacgtgatctgatggttttattagaggtttctgcttttgcatcttcctcattttctcttattgctgccatgtaagaagtgcctttcacctcccaccatgattctgagccctccccagccaggtggagctataagtccaattaaacctctttttcttcccagtcgtgggtatgtctttatcagcagcatgaaaatggaccaacccgataggtatatacatgtgcgaaaatttatcacactgtacatttaagatacatgaccttactgcatataactcaatagaaatagaagttgttgttgttttctgattacaaagagaatacatgcaaggaaaatacttagatatacaacataaaa

SEQ ID NO: 166215 - DNA, 501 bp, Homo sapiens
aactgagccactaaaccaatgctagcagccacccacctccagatgtcttttgaagcaataaaaataagctcctatttattttagccactgttaggtttcattatatgcatctgaaagcatatggtgtgtgtgtgtgtgtgtatgcatgtatgtataataaaattctggctttagccgttagtttctcctcacaagggaactgacagaagccagaggttgatatggccaagggaatttacttgggcctatttagatttmttctcctttattattttggtttgctgatttagattagttctatattttcctgtgctaaattatacttttaaaaagtatttcagagccttctaagtctttctgaatttgttcagaacttagatttccaatagtgcctttattgatagcacatctttattctcaccattataatactcagatttatggtttgttctcctttgaaatatttaataagattgcagttcagcagctctttattacaga

SEQ ID NO: 166216 - DNA, 633 bp, Homo sapiens
tattgcccaagctgttcttaaattcctgggctcaaccaatctgtccacctcagcctcccaaagtgctgggattacaggcgtgagccaccgcgcccagccaggcaattgtttcaaagcatttttttctttttacccctccctatagtttccagactgataaattaactacataatttataaatttataataactgataaattacctaaaatgttaccacaggttgcacaatgtgaccctcactcattatcttcatgttcctgaaattagtgatacaaagaacaatgtatagccrattaatagcttatgttattttaatgtaaacacttggtataaaaacttaaaaactgccccttttttttccatttaaaacccactcacgatttaatgaagagaatggattaatccaaaagaacgaatcttctcaagaagaaactttgtcagcactcaaaagaaacaatgttttttatatgtagttctcataattgtttgtggtaattaaaaaaaaatcattgacgaattttgttatggttttctacagttttataaacaaatggtacgtctcatatataaaccaatatttttgtatctaaagtcagtgtaatctcaatgtcctagccttgtgtattgtagcc

SEQ ID NO: 166217 - DNA, 633 bp, Homo sapiens
tattgcccaagctgttcttaaattcctgggctcaaccaatctgtccacctcagcctcccaaagtgctgggattacaggcgtgagccaccgcgcccagccaggcaattgtttcaaagcatttttttctttttacccctccctatagtttccagactgataaattaactacataatttataaatttataataactgataaattacctaaaatgttaccacaggttgcacaatgtgaccctcactcattatcttcatgttcctgaaattagtgatacaaagaacaatgtatagccaattaatagcttatgttattttaatgtaaacacttggtataaaaacttaaaaactgccccttttttttccatttaaaacccactcacgatttaatgaagagaatggattaatccaaaagaacgaatcttctcaagaagaaactttgtcagcactcaaaagaaacaatgttttttatatgtagttctcakaattgtttgtggtaattaaaaaaaaatcattgacgaattttgttatggttttctacagttttataaacaaatggtacgtctcatatataaaccaatatttttgtatctaaagtcagtgtaatctcaatgtcctagccttgtgtattgtagcc

SEQ ID NO: 166218 - DNA, 368 bp, Homo sapiens
agaattccctatatatggataatatctccaactggaaggtaaagctgaaaacaccattaactgatctacagmaattttctcacttttaaatatgggtttctatacaagagtgtatgtatgacctcaggcaatgatgaaatagttaataggatcgtgctccataatatgtaacctaaagtatccaaccccatcatttaaacagaatcatacccaaatgtccaatgcctaaaataataggactttaaaattagaatttgcaaacacaatggcacttcagtgaaatgaaatttcagtgaaatgaagcttcagtgaaaatgaaattacatctacgtggtatattctgtgaaatagaaaatgctctagtaagt

SEQ ID NO: 166219 - DNA, 368 bp, Homo sapiens
agaattccctatatatggataatatctccaactggaaggtaaagctgaaaacaccattaactgatctacagaaattttctcacttttaaatatgggtttctatacaagagtgtatgtrtgacctcaggcaatgatgaaatagttaataggatcgtgctccataatatgtaacctaaagtatccaaccccatcatttaaacagaatcatacccaaatgtccaatgcctaaaataataggactttaaaattagaatttgcaaacacaatggcacttcagtgaaatgaaatttcagtgaaatgaagcttcagtgaaaatgaaattacatctacgtggtatattctgtgaaatagaaaatgctctagtaagt

SEQ ID NO: 166220 - DNA, 450 bp, Homo sapiens
gaatcatacccaaatgtccaatgcctaaaataataggactttaaaattagaatttgcaaacacaatggcacttcagtgaaatgaaatttcagtgaaatgaagcttcartgaaaatgaaattacatctacgtggtatattctgtgaaatagaaaatgctctagtaagttttagaaaaagtttcagctatgaaaaaaggtaacagagccttccataatgaaggttttctgcttaagccttagacagccaaacaactaaattgacattatattgtcctgactttcaaattatataggattttactgtacttttcaagttcagcaatatcagttctgagactctgtgtggagtcaataaaatgaagaacattaagttgactgtggctgtgcctactaaatatgcaccttacagggacattgtttccccttcagacagaattttattgaaatatt

SEQ ID NO: 166221 - DNA, 450 bp, Homo sapiens
gaatcatacccaaatgtccaatgcctaaaataataggactttaaaattagaatttgcaaacacaatggcacttcagtgaaatgaaatttcagtgaaatgaagcttcagtgaaaatgaaattacatctacgtggtatattctgtgaaatagaaaatgctctagtaagttttagaaaaagtttcagctatgaaaaaaggtaacasagccttccataatgaaggttttctgcttaagccttagacagccaaacaactaaattgacattatattgtcctgactttcaaattatataggattttactgtacttttcaagttcagcaatatcagttctgagactctgtgtggagtcaataaaatgaagaacattaagttgactgtggctgtgcctactaaatatgcaccttacagggacattgtttccccttcagacagaattttattgaaatatt

SEQ ID NO: 166222 - DNA, 602 bp, Homo sapiens
actggaaggtaaagctgaaaacaccattaactgatctacagaaattttctcacttttaaatatgggtttctatacaagagtgtatgtatgacctcaggcaatgatgaaatagttaataggatcgtgctccataatatgtaacctaaagtatccaaccccatcatttaaacagaatcatacccaaatgtccaatgcctaaaataataggactttaaaattagaatttgcaaacacaatggcacttcagtgaaatgaaatttcagtgaaatgaagcttcagtgaaaatgaaattacatctacgtggtatattctgtgaaatagaaaatgctctagtaagttttagaaaaagtttcagctatgaaaaaaggtaacagagccttccataatgaaggttttctgcttaagccttagacagccaaacaactaaattgacattatattgtcctgactttcaaattatataggattttactgtacttttcaagttcagcaatatcagttctgagactctgtgtggagtcaataaaatgaagaacaytaagttgactgtggctgtgcctactaaatatgcaccttacagggacattgtttccccttcagac

SEQ ID NO: 166223 - DNA, 464 bp, Homo sapiens
aaatgatgtgtctttttgtatgctcataagatgcctggtatcaggcgctcctggatagtctcaggatggtgttggttacccctcctatgtgattagagggttagaacttttagccccatcccctacctccagggaggggagagggactagtattgacttaatcccccatggccagttacttaatcaattatgactctataatgaagcctccataaaacacacacacacacacacacacacacacacacacacacacacacacgagaacaaggtttgaaaatcttccaggttgctgaacacgtgaaggtgctgggaaggtggcatggctgstgaaaacacagaagctctgcacctcttctcacataacttgccctatgtacctcttcatctcactgtttacctgtatcctttgtaatctcgtttatagtaaactggtaaacttaagtgtttgcctaagttctgca

SEQ ID NO: 166224 - DNA, 632 bp, Homo sapiens
aataaagtatcattttgcagttttaagattaaatttctaccctgctgagttttagatttgcttgggctggtcacttctttcttttggcctattttctccttttggaaatcaaaatgtttacccaatacgtctcctaccattttatcttcaaagtagataacttgttttgcattttacaggttcatggctggagggagcytgccttgagactcaaatgagattttgaactttaaacgatcgagttgttgctgaaacaggtaagactttgcagctatagggtgattgtatttcgtacttgaaaaagacatgagtttgaggggccaggggccgaatgctattggtttgactgtgtcccctctgaaacttatgttgaaattggattcccaatttggcagtgtttggaggtgggcctactgcgaggtgtttgaaacatgggagtactgccctcatgaatagattaatgctgtcttaaaggagtaagttcttgctcttgcagaaattaattagttcccatgagagtgggttgttataagtgagcccagcctctcatgcgtgtccctttgcactcatctgctcgccttactgcttgtctgctatgttgtgatgtagcacatggccctaactaaaaggtg

SEQ ID NO: 166225 - DNA, 632 bp, Homo sapiens
aataaagtatcattttgcagttttaagattaaatttctaccctgctgagttttagatttgcttgggctggtcacttctttcttttggcctattttctccttttggaaatcaaaatgtttacccaatacgtctcctaccattttatcttcaaagtagataacttgttttgcattttacaggttcatggctggagggagcttgccttgagactcaaatgagattttgaactttaaacgatcsagttgttgctgaaacaggtaagactttgcagctatagggtgattgtatttcgtacttgaaaaagacatgagtttgaggggccaggggccgaatgctattggtttgactgtgtcccctctgaaacttatgttgaaattggattcccaatttggcagtgtttggaggtgggcctactgcgaggtgtttgaaacatgggagtactgccctcatgaatagattaatgctgtcttaaaggagtaagttcttgctcttgcagaaattaattagttcccatgagagtgggttgttataagtgagcccagcctctcatgcgtgtccctttgcactcatctgctcgccttactgcttgtctgctatgttgtgatgtagcacatggccctaactaaaaggtg

SEQ ID NO: 166226 - DNA, 632 bp, Homo sapiens
aataaagtatcattttgcagttttaagattaaatttctaccctgctgagttttagatttgcttgggctggtcacttctttcttttggcctattttctccttttggaaatcaaaatgtttacccaatacgtctcctaccattttatcttcaaagtagataacttgttttgcattttacaggttcatggctggagggagcttgccttgagactcaaatgagattttgaactttaaacgatcgagttgttgctgaaacaggtaagactttgcagctatagggtgattgtatttcgtacttgaaaaagacatgagtttgaggggccaggggccgaatgctattggtttgactgtgtcccctctgaaacttatgttgaaattkgattcccaatttggcagtgtttggaggtgggcctactgcgaggtgtttgaaacatgggagtactgccctcatgaatagattaatgctgtcttaaaggagtaagttcttgctcttgcagaaattaattagttcccatgagagtgggttgttataagtgagcccagcctctcatgcgtgtccctttgcactcatctgctcgccttactgcttgtctgctatgttgtgatgtagcacatggccctaactaaaaggtg

SEQ ID NO: 166227 - DNA, 604 bp, Homo sapiens
gttctgctgttacatgaggcttacttcagacctcttataacacacagtctatttcaagctggtaacttgaattgcctacaacactgtacacttatatttccccccattttatgtttttgatttcagaatttacatcattttgtaatgagcacctttttacaatttattgtaggtattgtttttcttaatrgttttgtcttttaaccctggaactagtaataaaattgagttacacacaatcgttaaagtcctgaaatattctgaatatggctctgtattacttatgccattgagttttatgcttttgtgtgttttatgctattagttagtaatgttttgtttcagcttaaagtgctctctttcacacttcttgtaatacaggaagtggtaataaactctcttaaattttgtctgagaaacttttatttttccttcatttctgaaagacaggttagctgggaaaatattagttagcagttctttttcaccagcactttgaatatatcatccttctgtcttttgcccaaaatctgctggtagtcatattgtgacttatttgaatacaatgtgtttcttatctcttgttgctctcagaaatttttct

SEQ ID NO: 166228 - DNA, 479 bp, Homo sapiens
gacatgccagaagagattggggccctatgttcagcatctttaaagaatctccaaccaagaatttcatatccagccaaatgaagcttcaaaagcaaagggaaaataaaatccttttcagacaagcagatgctaaggcaatctgttatcaacagacttgccttacaagaagtccttatgggagtgctaaacatggaaactaaagaccattactggtcaatacaaaaacacacttatgtacataaaccattgatactataaagcaactacacaatcaagtatatgtaacaatcagctaacgtgatgacaggaccaaatccacacatatcaatattaatcttgagcattaatggtctaaacacccacttaaaaggcaaagagtgtaaagttggataaagaggcaagacacatctatttgctgtcttcaagagacccatctcacatgcaatgacatycataggttcaaagtaaagggatggaga

SEQ ID NO: 166229 - DNA, 371 bp, Homo sapiens
tcctgtcttctgagcactccaagtctccaggaagttccaaacattcccacgttttcctgtcttcttctcagtcctccaaactcttccaacctctgcctgttacctagttccaaagtcactttcacatgttcgggtatctttacagcagcaccscactccagtgccaatttactgtattagttcatccttacactcctgtaaggacttacctgagactgtgtaatttatagaggaaagaggtttaattgactcacagttccacagggctgggagacctcaggaaacttacaatcatggtgaaagaagcaaatacatgcttcttcacatggcagcagcaaggagaagtgcagagaaaaagggggaaaagtcac

SEQ ID NO: 166230 - DNA, 371 bp, Homo sapiens
tcctgtcttctgagcactccaagtctccaggaagttccaaacattcccacgttttcctgtcttcttctcagtcctccaaactcttccaacctctgcctgttacctagttccaaagtcactttcacatgttcgggtatctttacagcagcaccccactccagtrccaatttactgtattagttcatccttacactcctgtaaggacttacctgagactgtgtaatttatagaggaaagaggtttaattgactcacagttccacagggctgggagacctcaggaaacttacaatcatggtgaaagaagcaaatacatgcttcttcacatggcagcagcaaggagaagtgcagagaaaaagggggaaaagtcac

SEQ ID NO: 166231 - DNA, 558 bp, Homo sapiens
ctgctggtaaaacatgaaaatctgatgacatattttcttggtattcaattaattgtttgttctacttggattagtagctttatacaaggaaattggttatttctgtagtttacaataacttaayataataaccataattataattgatagcatatactcagacatattagaatttaagaaatccttatgattttgtaacatatattaatatcattgactaaaatataaaatgaagattaaacttttttttggacaatgcttcccttataacatgtcaagtaatcctatttacctctcttttggatatttcaagagccttctgcagcatctcaaagttagaagtcagaaaaggctattttgaagatgaaatttgattttgggaggcctatcaaatatgttaaacgtttaaaacattgatattatgaaatagaattccaggttaccataagacattcatttagccaaaatgatgactcaaaaatttaaaaggcaaaaacctttactcattgataggggaagaagacctagctttccaaataattggtctcttgcctttcc

SEQ ID NO: 166232 - DNA, 463 bp, Homo sapiens
tatctcgcattctctgagccaataaggaaaactttggcctagactactatttctttgtacatgtgagatttatcatcaggctgccttcaatgattctacaaatgactcctgagacaaggctttcaaagctatttggtcttccctggggaaccggtaccttgcatgatatcatcattaaataagaaaatgcatccatatgtacctgagaaataatgataacataatgatgataattctttacactttgtgtaatcaaactgtattaagaaaagaaaaatgatgaggctaaagtgattaaaacaatgtaatacaggtacaagataagcaaagatactagtgcaacagaagaaagtgtccagatttagaaccacacactaacctaattcaggtaaaaactactattgcgataaaatagagtctrcaaaataaatgcttaatcaattggctatttcttaaaagcagt

SEQ ID NO: 166233 - DNA, 551 bp, Homo sapiens
aaggtttttactgttctagaattagttggaaaaaatatctttacaaacttctaatatacaagcaagtagtcttaaaaaagatttatatcctgtgttcttgggtaccacaaaggtaatccttgagcaataatacagcattgtgaacccagagctacatgaaagctgcagtgtgctaagtcctttcaaaaacattcctaaaaagaacagtgtaaattgtatgcagctcagatcacataataattatgaaaatcattgtaaatacatttaggatgccttcagttacacattacagtagttttattttcycaaataactgaaaaatctatggaaccaacttcatgcttgtgattttatctaatgaactcaatttggttctgcaaaacactaaagtttcctttacaggtataagtattgcttgtccaaacactattcagaaaggaagaaaacaaaggaaagggcaataaagccaagaaaagcagcaatgcgcaattgggaatgagccagaggagataagcaaagatagtagaaaatagctcaaaagaaaaaaaaaa

SEQ ID NO: 166234 - DNA, 489 bp, Homo sapiens
tttgtctagaatatcacaagctacttatttaagtcctactgtttcttcaaagcccacatcaagtctcaccttctcccagtctttattccagcccagcaacctttgatgtttctcttaaacttattattttattatactatattattacactgacacatagactactgtatatttgttaaatattttaatatatgttccttatttctcattatttctaaaatattcattgactgtaaattgatcactatctctatctcatggacctcatagtctggtgagacttgcaggtcagaaatgaccaatgcaaggaagggaggtaagggcttgtgtagggagctgtggtaacccaggagaggggcattcacaatggawtggggaagtgaagccttctgggagacatcaagagtctggaagaaacaggagggagccaaataaacatgggaaggaggaagggcatttcaaaagctagaacagaactaacaggggcct

SEQ ID NO: 166235 - DNA, 510 bp, Homo sapiens
gggaggcagagagggctcttctgcaccaagctatctgcacaggaggggtatggtgactcaggcaagctggtgctctgaatgccttgaaatctgtttgggcatgcagtaaagagagactcaccacacaaggtctctgcacaagagaggtagggctattcaggttggtagactatacaagtaggygctctgaatgcctggagacctgcctagacaagtgtcagagaggacccctgcaccccatactacaatctatgtccaggaagggttgggtggctcaggctgctggaccaggcaaatgggtgctccagatacctgcatttttgcctgcatgtgaagcagggagagacccactgcaccataatctattttgaggaagggtggagcagctcaagctgctgaactaggaaaatgggtgctccaaatgtctggagatctgcttggtcatggagcagagatagccttgctacaccacaatctatgtacttaaatggtggggtgactcaggctgtt

SEQ ID NO: 166236 - DNA, 561 bp, Homo sapiens
tccagaaaatatcaccagggatcagatcaagcctgacccccattttgtaagtcaacctgtcaactacttgaacatgttcttcgtgttgcataggtaaygtagtggtgaggtatttggatttggagccagaagagtgcatgtaaacacggggaacactccctacaacatagtaaatacacaataagaataaactgttatttttattcatattcctaatttcctcaacttttctttacaatatgatatgcaactttgagcatacagaccttacttttctatatattcaaagtacaaatcttgtcctcatagtgaaattaggtgtcagtattcttagagatagggtggactgagacactcaatcatcacctacccagaacttctgacagttatgctagggctatggagagaattctggagatgagtctcaagtctccaaacactatagatatgaggcttttattatctggctcccatttgcagcctgccattggtgacaggtctattgtaatatgcccagacaattgaaatctttagtaaagttattaaactcatgaaaggtta

SEQ ID NO: 166237 - DNA, 561 bp, Homo sapiens
tccagaaaatatcaccagggatcagatcaagcctgacccccattttgtaagtcaacctgtcaactacttgaacatgttcttcgtgttgcataggtaatgtagtggtgaggtatttggatttggagccagaagagtgcatgtaaacayggggaacactccctacaacatagtaaatacacaataagaataaactgttatttttattcatattcctaatttcctcaacttttctttacaatatgatatgcaactttgagcatacagaccttacttttctatatattcaaagtacaaatcttgtcctcatagtgaaattaggtgtcagtattcttagagatagggtggactgagacactcaatcatcacctacccagaacttctgacagttatgctagggctatggagagaattctggagatgagtctcaagtctccaaacactatagatatgaggcttttattatctggctcccatttgcagcctgccattggtgacaggtctattgtaatatgcccagacaattgaaatctttagtaaagttattaaactcatgaaaggtta

SEQ ID NO: 166238 - DNA, 494 bp, Homo sapiens
gctgaaaaataccatacgtggtaaggtaaattttataattttttccaattctaatttcctatgaaaccacagccttgcttacaattctatctaaaccgggctcttgagagatactgaaggccattcctacaagactagaggtgaaagcaaattgggcctggggtggcagaccactggtccctttactcaaatctagcatagcttcagacaactgactttataattccagaccagcctggggtgtctattttccatgaataaaaataccagtgcatgatttttcttgaaactctatcaactagttgggccttggaattcatcatgaaccacaggagggagaagctcaatgtaatgagcaagmtttatagtgatctgttctcctcatttggcccctgtatctactttgcaattaaggaaaataactgctctggcagcatatttggatcaaaatccatttaatgaagatagtgaagaggccagtgtcgaagaggcca

SEQ ID NO: 166239 - DNA, 484 bp, Homo sapiens
atataggaataaacttctcctagccatttttggccattttaggcamatattctctacttagtctcactattaaactcaattatacaatgtatttgcattaaactaattttagcaagcgatagtaagagtttttagaagactcagctttcaaagaggagttttcttaatggacatatttttaaacagatttcttgaattcatagctttctctccagaatctctgacaggtgagagagcctctgaaagaattgtatggaaaggaacaaagctcacacaaagaatttatcaatttagcgaatgcagttatgactgcagctgactttcttcaaaatgacatactgcatgagcacatagactcaaaagcatccttttctactgaaggcctacagcaggctcacaggcagtaagcaagacaaaaaagaaactcagggggaccaatgagattccaaagggcaaaactcccaagcgtccttcagagagagag

SEQ ID NO: 166240 - DNA, 484 bp, Homo sapiens
atataggaataaacttctcctagccatttttggccattttaggcaaatattctctacttagtctcactattaaactcaattatacaatgtatttgcattaaactaattttagcaagcgatagtaagagtttttagaagactcagctttcaaagaggagttttcttaatggacatatttttaaacagatttcttgawttcatagctttctctccagaatctctgacaggtgagagagcctctgaaagaattgtatggaaaggaacaaagctcacacaaagaatttatcaatttagcgaatgcagttatgactgcagctgactttcttcaaaatgacatactgcatgagcacatagactcaaaagcatccttttctactgaaggcctacagcaggctcacaggcagtaagcaagacaaaaaagaaactcagggggaccaatgagattccaaagggcaaaactcccaagcgtccttcagagagagag

SEQ ID NO: 166241 - DNA, 484 bp, Homo sapiens
atataggaataaacttctcctagccatttttggccattttaggcaaatattctctacttagtctcactattaaactcaattatacaatgtatttgcattaaactaattttagcaagcgatagtaagagtttttagaagactcagctttcaaagaggagttttcttaatggacatatttttaaacagatttcttgaattcatagctttctctccagaatctctgacaggtgagagagcctctgaaagaattgtatggaaaggaacaaagctcacacaaagaatttatcaatttagcraatgcagttatgactgcagctgactttcttcaaaatgacatactgcatgagcacatagactcaaaagcatccttttctactgaaggcctacagcaggctcacaggcagtaagcaagacaaaaaagaaactcagggggaccaatgagattccaaagggcaaaactcccaagcgtccttcagagagagag

SEQ ID NO: 166242 - DNA, 641 bp, Homo sapiens
gttaactattcttaccagaagttaataagcttccaacatttctgtacatgagctaagagagaagaaaaaaaaaagactaggcatgatttcaaattattccagtcatctgtcctgtttgggtgacctgcattccttcagtctaccagtaaaatgctaggcatgcctgactgagtgaaaatggaagacaagccttcaaattccatgttactgaagtgttgaaaccagttttaatgaaacatgggaaaacaatagccaacaaggggaagtctggaatttcatagaattagagacttgaatttcatagaattagagacttcatgtcttccctgttgattccttgaagtcatctcctaatgaaggaaccctttctccaatgacctttaattagtattgtttctgtcccaacctttctgctctgctgccttccatatgatgggaattgggaaagttgagcagccacctggggtgctatgaaagatcaagcacattggaggcccttcagatatccatagcacagtagacattggaaacacaatgaggaaagggcacatagatgtcccataacccattcaccagaacrcagtatggataagagacaggagaagggacagggatatctgtttctgtcttcactgtcaaca

SEQ ID NO: 166243 - DNA, 487 bp, Homo sapiens
cggcagcttagtttctcagagctctcagagattagaattccttgcatccatggctctcatcctcatatcagatgataaggtgtaagatggcagctagagctctgatcactatgcacaaatgttaggcagcagaatgggggaagatataacaaaataaggtgacaagaatgcaatccagatgtatttttaaaataaactatgtaaaagtataacayacaagaaaatgcatacattgtaaattcacaattcgattacaaataccaccaataatcaagacccagaaaattctcgtgaatccagaaaagctcttttggttcttttgcagtcaattatccccaaccacagctcatactaatagacaaaataaggggaaaacataaattaatctcaatatatattttcaaataatttgacaaaatgtaatgctctttttgaataaaattcttaccaaactagagagagaaggaaatgtcctcaacttaataaa

SEQ ID NO: 166244 - DNA, 589 bp, Homo sapiens
tatcactatcttgtcctttaggaaatattgattacatttataatagttgatttaaaattattctcttataattccattatctctgtcacttctgattctgcttattttcttctgttttgaggtaatatagtgtttctttgcttgtctagtgaatttttattaaatatattatgaatgttataataaygggtgttaattattatttttctctaaggagggcttaagtttgtcttgttaggcaattaagttacttgcaaatcatattaatgtattcaaaacttatttttaagctttgttagggttgtccaaagtagccctaactctagggctaattaagcgaaactaccaacacatgattctctaggttctttaccgacttccttgaggctcagtggggtttctcagctctggctggaagggatttgagtatctcttaaccttgcttaaactctaggagttgtgcaggttacagttcccggagtatttttcctgagcagttactatttgtgcagctttgtggagttttgttgtatccatgcatagttaagggggcctttatgcatatttctctacagaaattgttactctc

SEQ ID NO: 166245 - DNA, 394 bp, Homo sapiens
gaccaactggctataaatcagggcttcctacaaccccctccttgggtttggtaatttgctagattgtctcacaaaagttagggaagttactttacttgcatttacctttctaaggcttcctttctaatgttttattataaaagataaaactcaagaacagccagatggaagagatgcctagggcaaagtattggcaagggggttmcatgccctctctggggtgccacacttccagcaacctggaaccccttccattagggtttttactgtaggcttcatgacataggaatgatttgttaaatcattggccaatggtgattaactcggcctccagtttctctcttccctggaggtccgggggtggggctgaaagttgcagccctctgatcgcatg

SEQ ID NO: 166246 - DNA, 660 bp, Homo sapiens
cagtgtacctgaggaaaagtgaggccagggaaatgggcaggggccaggacatgcagaatcctgcaggccatagcaccaagtttacattttactccaagtgcaaggggagctattaaaggtgctaagtaggcaatcagatgtacattattagaatactacgtgggctgctctatgaagcatggattttaaggggaaaagatggaaaaatgaggaccaagaagaaaatattgaagtaatccacatgggcgatgaaagtgatttgggcaaggaagatggtgatggataaagaaaggagtgggaaagtaaaaatatagtttggaggcrgagctcagataagggtctgggtatacacggtatacacattattcagaaagaccagaccatgagcacagaaggccaaaccggatggaaaaggaggaaattccaaagaaggagactttctgttttgtggcctatacctctctagggaaactgtgtttttagagctctcaattagcctactccatgtcttttgatgcatagggaaaggggacatctctgaataaaccatgtcctggccacatatggctaggtaaatgaaaatcaatatattgattcccttgaaaggacacgggaaaccaagatgtgtttcaggcacaagatcatcttgtttcaggctga

SEQ ID NO: 166247 - DNA, 595 bp, Homo sapiens
aagtgcaaggggagctattaaaggtgctaagtaggcaatcagatgtacattattagaatactacgtgggctgctctatgaagcatggattttaaggggaaaagatggaaaaatgaggaccaagaagaaaatattgaagtaatccacatgggcgatgaaagtgatttgggcaaggaagatggtgatggataaagaaaggagtgggaaagtaaaaatatagtttggaggcggagctcagataagggtctgggtatacacggtatacacattattcagaaagaccagaccatgagcacagaaggccaaaccggatggaaaaggaggaaattccaaagaaggagmctttctgttttgtggcctatacctctctagggaaactgtgtttttagagctctcaattagcctactccatgtcttttgatgcatagggaaaggggacatctctgaataaaccatgtcctggccacatatggctaggtaaatgaaaatcaatatattgattcccttgaaaggacacgggaaaccaagatgtgtttcaggcacaagatcatcttgtttcaggctgacccacagacgcctcagttcaattagtgtag

SEQ ID NO: 166248 - DNA, 595 bp, Homo sapiens
aagtgcaaggggagctattaaaggtgctaagtaggcaatcagatgtacattattagaatactacgtgggctgctctatgaagcatggattttaaggggaaaagatggaaaaatgaggaccaagaagaaaatattgaagtaatccacatgggcgatgaaagtgatttgggcaaggaagatggtgatggataaagaaaggagtgggaaagtaaaaatatagtttggaggcggagctcagataagggtctgggtatacacggtatacacattattcagaaagaccagaccatgagcacagaaggccaaaccggatggaaaaggaggaaattccaaagaaggagactttctgttttgtggcctatacctctctagggaaactgtgtttttagagctctcaattagcctactccatgtcttttgatgcatagggaaaggggacatctctgaataaaccatgtcctggccacatatggctaggtaaatgaaaatcaatataktgattcccttgaaaggacacgggaaaccaagatgtgtttcaggcacaagatcatcttgtttcaggctgacccacagacgcctcagttcaattagtgtag

SEQ ID NO: 166249 - DNA, 655 bp, Homo sapiens
tggctgcatgattttggaatacttttttaattcctgagccttggttccctcacctatagattgaagataacctcatttcctaggattattgtgaagattttattagatcatgtatgaagaatgcttggcaaaagtcctgatgtagaattcatgtcaacaagtagcacctattatgactattattgttattatgaaactgaaactgtctcatttcaggggaggctcccacagcatgacagatccaaggtagactcagagcaacagacaatcaaagtcattyggaaaaagtgaggttggaaaatgaaaccaacaattggcctatggatttgcacaagagaaagtaagcaagtaaagactagatcctgggcacccgtttggtggctgagcttacattgcttgagtcaatgccctgaagcccacgtggttagttgttgacaaagaagagaattccttgtctttatcagatgcaaatccccaagaggttcaatttaagagccatttcttggactggctaatataacccagcagttagagccaagattatcttctgtgtgattatagcctggttggaagaatcatggcctgagtctagctaaggagatttagactgttgtcacttatggaatcccagctaatgaactctcacacagcagga

SEQ ID NO: 166250 - DNA, 655 bp, Homo sapiens
tggctgcatgattttggaatacttttttaattcctgagccttggttccctcacctatagattgaagataacctcatttcctaggattattgtgaagattttattagatcatgtatgaagaatgcttggcaaaagtcctgatgtagaattcatgtcaacaagtagcacctattatgactattattgttattatgaaactgaaactgtctcatttcaggggaggctcccacagcatgacagatccaaggtagactcagagcaacagacaatcaaagtcatttggaaaaagtgaggttggaaaatgaaaccaacaattggcctatggatttgcacaagagaaagtaagcaagtaaagactagatcctgggcacccgtttggtggctgagcttacattgcttgagtcaatgccctgaagcccaygtggttagttgttgacaaagaagagaattccttgtctttatcagatgcaaatccccaagaggttcaatttaagagccatttcttggactggctaatataacccagcagttagagccaagattatcttctgtgtgattatagcctggttggaagaatcatggcctgagtctagctaaggagatttagactgttgtcacttatggaatcccagctaatgaactctcacacagcagga

SEQ ID NO: 166251 - DNA, 499 bp, Homo sapiens
agatcttcctgggattctattcttctaccggrgtgtgtacctttgaacaatttttcactgaataggctatttttgaaatttgtagaggtagaggttaacttattagaaaactgatatcattgcaaagattattttttgagtcaaagaattcccatgtgtaacaatgtgaagggataagatacaattgatgcaattggatgtgcttgatttctctctgacggaaaagacagccttgaatattgttgccctttagcatttcaaacatgtttatatctgttcacatatttatctcagaattctttttactgattatatttatccctgttcctctaaatcagtcttaataccttactgattttctttcattatttaagagttgaataaaatcattgacatttggtcattttatatttgtatgtgccaattttttaactttaaaatctttgttatgctttgtattttatatgtcatatgataaatgtaaacaaaaacacataag

SEQ ID NO: 166252 - DNA, 580 bp, Homo sapiens
tattcttctaccggagtgtgtacctttgaacaatttttcaytgaataggctatttttgaaatttgtagaggtagaggttaacttattagaaaactgatatcattgcaaagattattttttgagtcaaagaattcccatgtgtaacaatgtgaagggataagatacaattgatgcaattggatgtgcttgatttctctctgacggaaaagacagccttgaatattgttgccctttagcatttcaaacatgtttatatctgttcacatatttatctcagaattctttttactgattatatttatccctgttcctctaaatcagtcttaataccttactgattttctttcattatttaagagttgaataaaatcattgacatttggtcattttatatttgtatgtgccaattttttaactttaaaatctttgttatgctttgtattttatatgtcatatgataaatgtaaacaaaaacacataagataaatgtaagaaaaagagaaatcagagaactgggttatagtattaccttaagatttgcacctctgcaaggtaagaaatctttctaaaaccacacgga

SEQ ID NO: 166253 - DNA, 499 bp, Homo sapiens
agatcttcctgggattctattcttctaccggagtgtgtacctttgaacaatttttcactgaataggctatttttgaaatttgtagaggtagaggttaacttattagaaaactgatatcattgcaaagattattttttgagtcaaagaaytcccatgtgtaacaatgtgaagggataagatacaattgatgcaattggatgtgcttgatttctctctgacggaaaagacagccttgaatattgttgccctttagcatttcaaacatgtttatatctgttcacatatttatctcagaattctttttactgattatatttatccctgttcctctaaatcagtcttaataccttactgattttctttcattatttaagagttgaataaaatcattgacatttggtcattttatatttgtatgtgccaattttttaactttaaaatctttgttatgctttgtattttatatgtcatatgataaatgtaaacaaaaacacataag

SEQ ID NO: 166254 - DNA, 473 bp, Homo sapiens
atatatatatgtttattaagtattaacccatatgatcacaaggtcccacaacaggccatctgcaggctgaggagcaaggagagccagtccgagttccaaaactgaagaacttggagtttgatgtttgagggcagaaagcatccagcatgggagaaagatgtaggctgggaggctaggccagtttctcttttcacattttcctgcctgcttatattctagctgtgctggcagctgataagataccagattaagggkgggtctgcctttcccagcccactgactccagttttaatctcctttggcaacactctcacagacacacccaggatcaatactttgtatccttcaatccaatcaagttgacactcagtattaaccatcacaatctaggtgtagaagtctcacctcagagcagctcctctctgagtcgccctgacacaaaagctgagcctaacaaagacaagggggatcaa

SEQ ID NO: 166255 - DNA, 473 bp, Homo sapiens
atatatatatgtttattaagtattaacccatatgatcacaaggtcccacaacaggccatctgcaggctgaggagcaaggagagccagtccgagttccaaaactgaagaacttggagtttgatgtttgagggcagaaagcatccagcatgggagaaagatgtaggctgggaggctaggccagtttctcttttcacattttcctgcctgcttatattctagctgtgctggcagctgataagataccagattaagggtgggtctgcctttcccagcccactgactccagttttaatctcctttggcaacactctcacagacayacccaggatcaatactttgtatccttcaatccaatcaagttgacactcagtattaaccatcacaatctaggtgtagaagtctcacctcagagcagctcctctctgagtcgccctgacacaaaagctgagcctaacaaagacaagggggatcaa

SEQ ID NO: 166256 - DNA, 477 bp, Homo sapiens
atatatgtttattaagtattaacccatatgatcacaaggtcccacaacaggccatctgcaggctgaggagcaaggagagccagtccgagttccaaaactgaagaacttggagtttgatgtttgagggcagaaagcatccagcatgggagaaagatgtaggctgggaggctaggccagtttctcttttcacattttcctgcctgcttatattctagctgtgctggcagctgataagataccagattaagggtgggtctgcctttcccagcccactgactccagttttaatctcctttggcaacactctcacagacacacccaggatcaatactttgtatccttcaatccaatcaagttgacactcagtattaaccatcacaatctaggtgtagaagtctcacctcagagcagctcctctctgagtygccctgacacaaaagctgagcctaacaaagacaagggggatcaatggaagca

SEQ ID NO: 166257 - DNA, 534 bp, Homo sapiens
ttttcactctgaggccagatacacatacttgacaataaatgggacttgaaggcaaaaaatcagattctctaggaaaaggaaaacaagatggaagatgatgcgaaagatgaggatttggaggagtttggccaaatgagagaggcgtgcttagccacactgggctgtactcccaaaagccctccttcagaattcttcaggggcagcatctgagtctcatacataatgaaattggtcatgtagcggggaagttcacactcagcaatgttaatggaatgaggctggaccagctggttggcaggggggtttcccctttgggagatgctactgtgattcatatgtgtgggttgactacaaagaagttctgagtaggsaaaggaggggacaggagaagaaaaaagagagagagagggaggacagggatgggcaagttaagacaccacaaagcagcaagcattgaacaggacaagggctgtctttgtcctaggcattctgggggcacaaaggagaatgggacatagcccccattgagaagct

SEQ ID NO: 166258 - DNA, 613 bp, Homo sapiens
ttttctgcctactgattgcaaaggaatgacttgcatctcataaaagatacaggtttgatcattagaatccctgcacgacttctcccctttctgtgccccgatcccttagtgcgtatacagggcatagtcaatttctctgtgcttcattttccttgaaatgagataaatacagaatactctggtgatagtattgggaagaaagaaacattttctagaggtttctatyacattacacattacccagagacaatggggcaacttaaaagaatgaagacatagagaggtttacaagaattttggggaaacactaagcaattaagcagaaaaacctgtagaactacaaagcattttactgtgttctgctagtatcaaaagtctatttttgcttatactattaagtactttgatttgttgctttagctgatattttctagtgctacctgtcaaattataatgattattttcaagaatccactacctctctgcattttaagcaatacctattgtagatatatgtaagctctaacatagtcaaataagaccataggctcttcccagacctatccaccagttctgaatccacatagatcagataatatttttaaatgctgga

SEQ ID NO: 166259 - DNA, 528 bp, Homo sapiens
tcgtttgtccccaccaaccctcatgattaaatttcattcccagtgtagcagtgttaggaggtgaggcataatgagaggtgtttcagtcataggggtggatccctcatgaatagattaatgccttccctggggttggygggggttgggggtggtgaatgagtttccactctattagtttccacaagaattggttgttaaaaaggagctggcacctcctctctccctctcacttcctcttgccatgtaatctttacaggagctggctccccttcaccttttgccatgagtggaaacttctgagatcttcaccagaagacaaccacagtttggtgtcatgcttcttgtatagtctgcaaaacaatgagctaaataaactcttttcctttataaattacccagcctcaggtattcctctatagcaacacaaaatagactaagatagtgaccaagccttgttgattcttatttcacagtgctggttatattcctactgacaacaagctaaatcggactcttttacctttccta

SEQ ID NO: 166260 - DNA, 607 bp, Homo sapiens
gagatcttcaccagaagacaaccacagtttggtgtcatgcttcttgtatagtctgcaaaacaatgagctaaataaactcttttcctttataaattacccagcctcaggtattcctctatagcaacacaaaatagactaagatagtgaccaagccttgttgattcttatttcacagtgctggttatattcctactgacaacaagctaaatcggactcttttacctttcctaggattgctgaaaaggcyccttaatggtttcctcaatttcaacatcagttacctccattctataccccacatctatgtcaaactacctctccccaaaacactgtcagaccatgccactctgccaatcagaagccttccaggactcctcattgcttactggactgtatctaaaaccttcagctcagagttcaagagcctccataatgggcctcaatatacttttactacctccccttccctcaacttgtctacataaaataacaactccagataaacttatttccttactctcttccaaatatacttttatccttccattcatcttcctttttcttagactactttccccaccaaaactgccttcctaacctaatccta

SEQ ID NO: 166261 - DNA, 478 bp, Homo sapiens
aataactggcttagaaaggacatttaacccaacagggacaatgagataccttagagttttcttctgaggtgtttgtgagggaaagagtcactcttattgcttgctggatttgaaactaagaactatcttgctgtcacatggagttgacacttttaagcttacaaaaaaaaaatgaccaagtcaaaatatgatgataataacagttgtgattaactaacctaagcccccaaatctatcattctgaagccctgaatacctttcrttaatacattcccttttctgcttaagcctttttgagtttcctgtcacttattactgacacagactccctgagacaaagctttataaggaccttctttgactcctatcaactgcaaaaacaatatctaataaaaaacataagaaatggctgtgtgggtgatatttatgctggtgttaggaaagctcataccccggcagtagaaaacatagcaattca

SEQ ID NO: 166262 - DNA, 583 bp, Homo sapiens
tctggaggcagggacattcattacagtttgcacaaagacactatggacagtggggctgtggttcacacgggagaggcagtagttagactggcctgattcttaagggctaccaagtaggcggcatgttcccatttcataaaacgaaatctgcagtgcacagcaacctgctacaacagcaagaatgacttttcatctgttcaaaagcaactcaagggagtaaacaagtgttcacagctatggctggcatgctaaggaattcatagagtgggaaatgagaaaagacaaggaaaggaaagataaaaataataaaaacaaaagagaggtaaaggggggtgggatggaggataggcctggcagaagattcccttaatggtcctgatgtcatggctgctgaggactggtgatgtcagtaacaccaagagatgcaggaatgaaaggtacttcatggcagcctaaatcatcaataccatgtttagaaggatgacaagattaagggtaaatagaagaaatttcaaagtcagaggaaatttagggrtgtctggaggagaaaatacagtagtataaccccagaacagaagaacaa

SEQ ID NO: 166263 - DNA, 484 bp, Homo sapiens
agaattaaaaattttgtagctaggaatatattgtttcatattgttaaaatatcaattatttttaaaaagcaaaaaataaaatgcaaaaatgctttattagcaatccccaaatagtggatcaaattagtaactcatattcttctcayacatcaagaggttaaggagggggtggggaaagagggaagcaagcaatgcatgaatgtgtgatctctcttaaatgggggctagggatgacaggagaacagcagtgtgggatggcaactgtcactgacaactggcttgtgcaacattttgacatggaagtcacagactacacagaaaccttaaccatactgccgtatatgattacgtaatgtaatgctttaaacttgcctgtattttagttgaagaagcaccctttctgggcttaggcatctattagcaaattccttaggaaaggcacattccatagctgccagtttccatatgatccatctatagtgat

SEQ ID NO: 166264 - DNA, 613 bp, Homo sapiens
taattgatctcaaacaaatgcattgaaaactttaaaaactagtttcattgagatacaatgaacataccctaatactcacctatggacacgaattttttgttgttaaggcaggcatcaggaagcacgtgtaagctattgatgtaagcagcctggaggtacgcttattctttccagaattctacagttcactgaaaagatcattgtttgttaggacttagaaccagaagagccttgagacctaactctggatgttcacgcatgtgtgtgatgcctacaattaattacaggcatctttatttcacagtaacatcggcacattttcttaacatctcaccgatgttagatgggttagaggtgggaatgacattcacrtgcctctaaaaatgtgcagtgccttttctaaaacactatatttggagactataattttaatcaagtgatgtctaagttacagagcgcctgtctggattgctttattctgcaggtggatacaaagtgtatcatgtttcagtgctagaaaacagtgagacacaaggaggcatctttcttatcactgaggcatctgttaaatatctaccctttcctttggtacttctacttctttgtatccctg

SEQ ID NO: 166265 - DNA, 443 bp, Homo sapiens
ttttacgtaatgctcaaatagacctgggagataagcactgctatgaatccccaatccccatgttacagacaaagaaattagggccaacgagtggtacaactggattaaaacctaggcttctggccccagagccgcacactaaactgctgtgcttgagcgctataaaataaccacatttatttatgtattttctctagtgatacttatttgcaattttccatatcatgaacaaatttcagtgaacttccttatgcctacctcttgtgtgtatgtggacatttcctggggatatatacctccggtggcatacctgtgaaatcctttgcttattttttgagagaacagagcagagcagatgctaaaattgccttttttccttgagaattttttttctctgatagamtacatgttccatgaaggcagggatttttgtctcctttgtc

SEQ ID NO: 166266 - DNA, 334 bp, Homo sapiens
ttgaaggaagatcaaaaggaaaaagtacatgaacttgagactcagacatggcaggggcggtatgagggactgatcgggctgggaccataggcagctgtctgcctgggttgctttgctttgggggaaaagagctagtgaaggggaggtttgtgcttagcactcagatggagctcagggtgagggagggacaaagaggtcaaactggtgcaggctggcagaatatgccaccccaaaatatgccactttgacatagggattacrtcaagtgaaagacacttgcaaaacagcagaggcaagatgagcattctaatcttccccttttcttcctgaaaac

SEQ ID NO: 166267 - DNA, 577 bp, Homo sapiens
tggtgccaggtttttctttttaaggcctgagatataaaatctttacagccagacacaaacctgggttcaaaactgaccattctcatggtctatgtggacttgggcaagttacttatgttcctaagccttaggtgtcatctcttcacagtgaggggaatagcagtgccttccttaaacgtcgtgaatattaaatgagataaatacatatatgcttggtacttggaaagcatttactaaaagggctattgttaagaagtgtgtccttgcctcccaggcagcctacagtatactgacggaggcagacatacaaatttataatctcatggaaagactgacctgttgacaggtaatgtcagatgaacattggtccttgtttttctgtatctttcatgttagggatcaatactattgttgtttactccctgtggacatttgcgacaggttggccagtgtccmcagcagggtgtggtagccctttcatcatcttcctgtatgcctgccaacagggagaagagatggagaagtactttttttcccccccttaatgtggaatccactctaacagactcattttaag

SEQ ID NO: 166268 - DNA, 280 bp, Homo sapiens
ggaatgccaactctcacatcctaccacaggccccaaacacaactcataattatgctcagatagtgtctccgttcatttgtgttgctgtaaaggaataccggaggctggggaatttataaagaaaagaggctaattggctcatggttctgcagggtgcacaaaaagcatggcaccagcaccygcttttggtgaaggcctcaggctgcttccactcatgggggaaggggaaggggagccagtgtgtacagagatcacggggtgagacaggaagccagagaca

SEQ ID NO: 166269 - DNA, 542 bp, Homo sapiens
agtgggttcctttccattttaaaaaatgattatttctattgtaggaaccacagaggggaaagggaaaaaagcaaaacaaaaaacctgcccctgtaccaagcaggcaataaatggctggcagccrtacagcccaaggggaaaacaaaatctgcccatataaatattcacatgaaagcgttgtctaaatctcctaaacaagtcaccccaaatcaaattgcttgagaagaaagggggtgctgaaatggagacaaacaccccaagtcttgttgctgaaaaatattttcactagctgccattttccaaaatagctggatgtactcaatcaagccacctaatatctactgaaaataaagtacttaaacattatttctccctctatatgtacatatatttatttcctagccttacttcccatttcacgaagtaatttaaaatgttttttatttagaaccgccaccaccaaaacatttaatttttttcctgcttcccgccgcccccatcaaccatggctgtcagaggctcccaaaactttctaagagaag

SEQ ID NO: 166270 - DNA, 483 bp, Homo sapiens
gacttaaaatgacaaccattatctcacagtttctatgggtcagaaatctggatgcagcttagctaggtgcctctgcctcaaggtgtctcacagactgcaatccagatatcagctggggttacagtctcatctcaaggtttgaccggggaaggatcccctwccacactcactcacatagttgttggtaggattcagctcctcataggctgttggctggaggccttcctcattagtttcttgccttgtgggcctctccataggacaacttacaacatggcaggttgcttctcccagagcaagagcaaaagagaatgagggagggcaactcaagaccagaaccagtttcttggtaacctaatctagtagccatcacatttgcataatcttttcattagaagtaagtcaccagaacagtccacactcaaggggaggggattcttaagggcatgagtaccaggaagtgggagtcactgggatcatctt

SEQ ID NO: 166271 - DNA, 588 bp, Homo sapiens
ttctggatactagacccttatagatatatgatttgcaaatattttctcccatcttgtgggttgtctttttactttcttggtagtgtcctttggagtacagtttttaattttgatgaagtccaatttattttttctttggatatttatgctttaggtgttatatctaagaaatggttacctaaaccaagttcacaaaactttgtacctattttttattctaagagttttatagtattagcttytacatttaggtttttgatccattttaaaatggcttgaggtaggagtcaaaaatcatttttttacatatgagtatccagttgtcccagcaccatttaaaaaaaagactgttctttccccattgagtgtttttggcactgtattagtccattctcacactgctaataaagacatacccaagactggataatttataaaggaaaaaggtttaattgattcacagttcagcatggctggggaggcctcaggaagtttacaatcatggcagaagaggaagcaaacacgtccttcacatgataggagcaaggagaagtgctgagcaaaagggggaaaagtcccttataaaac

SEQ ID NO: 166272 - DNA, 578 bp, Homo sapiens
acactatctgacaagcacagttgtcaggacaggagaataatgtgaatatttgtgggaaaaaaaatttttttttttttgagataaactcttgctgtgtcacccaggccacagtgcagtggctcaatcatggcttactatagtttcaacctcctgggttcaagcagtcctcccacctcagcctcttgagtaactsagactacaggcgcatgccactacacctggctatggagggaattcttaacatgtaaaaggcaaaatctcatttaatctttacaacaatgattagatgagtcatgttaggcaagttactctgtttgcctcaattgcctcattattaaatagggataataatatcaacttcaaggttttaaggattaaatgagtaaatacatgtgaagtgcttaggatagtgcctggcacataatacgtgttcaagaagtgtgtgttaaatagggagcaacatgaagatggtattgttatgatgattgataaaactgaggatcagctggtttgtggcagagcaaggtttacaactcaatctgtctacctccagagctcaacatgactccaggtttgca

SEQ ID NO: 166273 - DNA, 582 bp, Homo sapiens
acatctgaattttttaaaaaaattttaatctgttttsagaggtactagtcaaatacattgtaagatgtccttctattggaatttgtctgatgtttttctcattagactggagttacaggttttgggcaggaagaccacagaggtaaagtgccattttcatcacatcatatcaagggtacatgctatcaacatgatttatgacttaatattgaccttgactgttcatattgacctgaaatagtgtttgtgaggtttctacagtgaatttacttttttttcccctccttttctatactgtattctttgaagggaagtcactgtttgcagcccacacttaaggaatggggagttccttgatcttagggtggagtacctacctaatttatttgaaattcttgtctctcctttcccatttattagtttagtcaagtatttactgataatagtgtggactcaagtatatttattttatattttaggttacactccaatattacattattttgttgttcaggttgttccagctttgtcctttgggagcttcctgtattcctttaacatacatgtgtgtgtgtgtgcgcg

SEQ ID NO: 166274 - DNA, 467 bp, Homo sapiens
gtccacattccataaaactcaaaaatgtgaaaacagtgattggatgtttggaggtgcaaacagctgaacccaggtatactggataaaaagatakaacggcgccatcatacctgagggaatgatggctgaaaccctgttcctgcatcaggcacctgtagtaggcaggattctaaggtggacctcaaggccctcaaccctggtgtgcttgcctgtgaaatctcctcccctaagcacaggtcccctggggacttgacagcacatcattcctgtgaccacggtgggcaacagggagacggtcctggctgggtttgatcccattatgtgaggtctttaaatgcacagaattttccccagctgactgcacaggagaaagccagacagaggcattcctgctgggctgggtaaaggaggaagaagcatgttgtaaattacccatggggtggctctaggagcggagagtgccccct

SEQ ID NO: 166275 - DNA, 467 bp, Homo sapiens
gtccacattccataaaactcaaaaatgtgaaaacagtgattggatgtttggaggtgcaaacagctgaacccaggtatactggataaaaagatataacrgcgccatcatacctgagggaatgatggctgaaaccctgttcctgcatcaggcacctgtagtaggcaggattctaaggtggacctcaaggccctcaaccctggtgtgcttgcctgtgaaatctcctcccctaagcacaggtcccctggggacttgacagcacatcattcctgtgaccacggtgggcaacagggagacggtcctggctgggtttgatcccattatgtgaggtctttaaatgcacagaattttccccagctgactgcacaggagaaagccagacagaggcattcctgctgggctgggtaaaggaggaagaagcatgttgtaaattacccatggggtggctctaggagcggagagtgccccct

SEQ ID NO: 166276 - DNA, 472 bp, Homo sapiens
agtttgtccacattccataaaactcaaaaatgtgaaaacagtgattggatgtttggaggtgcaaacagctgaacccaggtatactggataaaaagatataacggcgccatcatasctgagggaatgatggctgaaaccctgttcctgcatcaggcacctgtagtaggcaggattctaaggtggacctcaaggccctcaaccctggtgtgcttgcctgtgaaatctcctcccctaagcacaggtcccctggggacttgacagcacatcattcctgtgaccacggtgggcaacagggagacggtcctggctgggtttgatcccattatgtgaggtctttaaatgcacagaattttccccagctgactgcacaggagaaagccagacagaggcattcctgctgggctgggtaaaggaggaagaagcatgttgtaaattacccatggggtggctctaggagcggagagtgccccct

SEQ ID NO: 166277 - DNA, 440 bp, Homo sapiens
gattggatgtttggaggtgcaaacagctgaacccaggtatactggataaaaagatataacggcgccatcatacctgagggaatgatggctgaaaccctgttcctgcatcaggcacctgtagtaggcaggattctaaggtggaccycaaggccctcaaccctggtgtgcttgcctgtgaaatctcctcccctaagcacaggtcccctggggacttgacagcacatcattcctgtgaccacggtgggcaacagggagacggtcctggctgggtttgatcccattatgtgaggtctttaaatgcacagaattttccccagctgactgcacaggagaaagccagacagaggcattcctgctgggctgggtaaaggaggaagaagcatgttgtaaattacccatggggtggctctaggagcggagagtgccccctaggccacagc

SEQ ID NO: 166278 - DNA, 296 bp, Homo sapiens
gcgtcgctgccctgggacccgcctggctcatggcccccgctgaccagcatgtgttgaaggaactggttaatgaatgcagagcatggggcgtacagtgaacagttgctggtgcatttgaaggctacagactccaatgtcatctgcgattcctgctctcaacatcaaacttggcaccagacagaggagggagcttcyggccacagcttgctttcttcattttggtggccagaactcgcagggaatctgagaattggccccatcagacaggccagggccagcctggatgaagtgatgtt

SEQ ID NO: 166279 - DNA, 558 bp, Homo sapiens
catttgcattctttgctccatggcctcctctatcttcaaagccagtaatygttcatcaaatacttctcatacttggaatctctctgacttcctcttcttctaccaatcagataaaactccactttaaaaaaatagatttaggaggtacaagtgcagtattgttacatgtatgtggatatatttcatcatggtgaaatctggacttttgcgtacacgtcactcaaatagtgaacattgtaccaaataggtagttttttaaccttcaccccattcccatctcctcatcttttggagtctctaacatctgctattccactttatatgtccatgcatacccagtgtgtagttcccacttacaagtgagaatatgcagtatttaactttccgtttctgagttatttcacttatgataatgattccaggtccatctatgtaaaactctatatttaaagggctcatatggttaggttaggcccacccagattatatttttattttaacatcaactcattagtgaccgtaaccacataggcaggatttctttgctatatcacttaa

SEQ ID NO: 166280 - DNA, 558 bp, Homo sapiens
catttgcattctttgctccatggcctcctctatcttcaaagccagtaattgttcatcaaatacttctcatacttggaatctctctgacttcctcttcttctaccaatcagataaaactccactttaaaaaaatagatttaggaggtacaagtgcagtattgttacatgtatgtggatatatttcatcatggtgaaatctggacttttgcgtacacgtcactcaaatagtgaacattgtaccaaataggtagttttttaaccttcaccccattcccatctcctcatcttttggagtctctaacatctgctattccactttatatgtccatgcatacccagtgtgtagytcccacttacaagtgagaatatgcagtatttaactttccgtttctgagttatttcacttatgataatgattccaggtccatctatgtaaaactctatatttaaagggctcatatggttaggttaggcccacccagattatatttttattttaacatcaactcattagtgaccgtaaccacataggcaggatttctttgctatatcacttaa

SEQ ID NO: 166281 - DNA, 558 bp, Homo sapiens
catttgcattctttgctccatggcctcctctatcttcaaagccagtaattgttcatcaaatacttctcatacttggaatctctctgacttcctcttcttctaccaatcagataaaactccactttaaaaaaatagatttaggaggtacaagtgcagtattgttacatgtatgtggatatatttcatcatggtgaaatctggacttttgcgtacacgtcactcaaatagtgaacattgtaccaaataggtagttttttaaccttcaccccattcccatctcctcatcttttggagtctctaacatctgctattccactttatatgtccatgcatacccagtgtgtagttcccacttacaagtgagaatatgcagtatttaactttcygtttctgagttatttcacttatgataatgattccaggtccatctatgtaaaactctatatttaaagggctcatatggttaggttaggcccacccagattatatttttattttaacatcaactcattagtgaccgtaaccacataggcaggatttctttgctatatcacttaa

SEQ ID NO: 166282 - DNA, 558 bp, Homo sapiens
catttgcattctttgctccatggcctcctctatcttcaaagccagtaattgttcatcaaatacttctcatacttggaatctctctgacttcctcttcttctaccaatcagataaaactccactttaaaaaaatagatttaggaggtacaagtgcagtattgttacatgtatgtggatatatttcatcatggtgaaatctggacttttgcgtacacgtcactcaaatagtgaacattgtaccaaataggtagttttttaaccttcaccccattcccatctcctcatcttttggagtctctaacatctgctattccactttatatgtccatgcatacccagtgtgtagttcccacttacaagtgagaatatgcagtatttaactttccgtttctgagttatttcacttatgataatgattccaggtccatctatgtaaaactctayatttaaagggctcatatggttaggttaggcccacccagattatatttttattttaacatcaactcattagtgaccgtaaccacataggcaggatttctttgctatatcacttaa

SEQ ID NO: 166283 - DNA, 548 bp, Homo sapiens
atattaatcattgttacttcagagttttccacataaatgtcttcagtggggatttatttctttgataatgcttagttttacagctatctcacattgttattacaatagacttggtaactctccaaatgaggcatcttcttttgacctaagggtccaaatttatcttgtcataaactgagtagtccctgctttcaagaagtctatgctgtttcccaaatacatggtgcaaaactstattctgctgacagtctgagtctactgcttttgggctccttttctttctctccttctgcacctcacttcactcagactactctttttgcaggaactattatgggcccaacagaaactcttttttccctgtggtggcagcactagaagatggcttaaattgaaatggcttagatcacattaattaataggtaattatagtaataataattactaaaactgttatagcaattcttgataattactaatatctgtggggtgcatactgtgcagtgaacatgggggacttaccatcctgtagtgaagacataagcagt

SEQ ID NO: 166284 - DNA, 591 bp, Homo sapiens
agaattcaaaatagctgtgttgaggaaaactcaaagaaattcragataacagaggaggaattcagaatcctatcagataaatttaacaaagagattgaaacaattaaaaagaatcaaacagaaatttgggagctgaaaaatgcaactggcatactgaagaatgcttcagagtcctttaatagcagaactgatcaaacagaagaaagaactagagagcttgaagacaggccatttgaaaatacacagtcagaggagacaaaacaaaaacagaataacaaacaatgaagcgcacctacaggatccagaaaacagcctgaaaagggaaaatctaaggttattggccttgcagaggagagagaaagagatacggatagaaagtttattcaaagtgataataactgagaacttcccaaatctagagaaagatatcgatatccaagtacaagaaggctgtagaacaacaccaagcagatttaacaccaagcagatttcaaagaagactatctcaaggcatttaataatcaaactcccaaaattcaaggataaagaaaggaccctaaaagcagcaagaggaaagaaacaaataacata

SEQ ID NO: 166285 - DNA, 570 bp, Homo sapiens
tgagggggtgaacagtaccagtctgtccctctgggcccgtacagtgtaaaatagtggaattttcataaacctctgaagcctgaccaacaccaactaaggctgtggatgcatattctttgggccagtgtctaggctattgatatgaggctataatggtgatatcagcacccgtgtcaatcattccctcaaacttccttccttgaatatgtatgcatggagcacacaggacgagtatcagaaatcttgctggcccaataggctgttttgccctgaaagtctgtgcttctgaaacctctggttctcttacaagaactagatcctagtggaatgtaacggagtataagaagttgagcaatgctgtctcctgctgctgcataccaagatactgcagagctaatgacaatgtgaatttyacctgaataatcagagtcgattacaccagtatgtacttgaacaccttttaaatttaggcttgagcgaccaagaagcaagctgacagtgccaggtggcaaacggccaaacacacctgtggaaacagcaataggtggctctccgggtaagagagaaata

SEQ ID NO: 166286 - DNA, 568 bp, Homo sapiens
tgagggggtgaacagtaccagtctgtccctctgggcccgtacagtgtaaaatagtggaattttcataaacctctgaagcctgaccaacaccaactaaggctgtggatgcatattctttgggccagtgtctaggctattgatatgaggctataatggtgatatcagcacccgtgtcaatcattccctcaaacttccttccttgaatatgtatgcatggagcacacaggacgagtatcagaaatcttgctggcccaataggctgttttgccctgaaagtctgtgcttctgaaacctctggttctcttacaagaactagatcctagtggaatgtaacggagtataagaagttgagcaatgctgtctcctgctgctgcataccaagatactgcagagctaatgacaatgtgaatttcacctgaataatcagagtcgattacaccagtatgtacttgaacaccttttaaatttaggcttgagcgaccaagaagcaagctgacagtgccaggtggcaaacggccaaacacacctgtggaarcagcaataggtggctctccgggtaagagagaaa

SEQ ID NO: 166287 - DNA, 591 bp, Homo sapiens
gttttaagaactagtctgattggattttaggaaagttcattcattttgatatgatgttatcagggacattttctatttgcttataattttatctgaccaatattagcttgtatcaatttgaggtttttttttcctttatgaatcaattgtgcaaggtttgccctacatctcttaaaaggtggttaaactggaatcttaaagacagttgaatttagccaagaccaaagatatgcaaagaaagaatattttgtttatgttacagtacatttaataaatccaaatggctcccttgattcttttctttctgggacaccacgtattgatttctggcagctggccaaaggcagatggtggtggagcaagcgaggacagttaagaatgttgatgattactggattactgaggagtactgtgagctttctggtcctctgctcagaggtgtctagctctgaaactgggatcctggctctgagctggagaggcgcttccagtyactgctgtcctggagcgctggaagggagcataagtgtgaggagacagtgggcttttagcctgggatgcagatgagagatgtcttgacctgagtgaaaa

SEQ ID NO: 166288 - DNA, 579 bp, Homo sapiens
ttcaaaccacagcaagcgtgctcctacctcctctctcagggcatctgcagaaagagctgcaactgcacgtccttcctccgtccatcctccgtcccttcccgatgtctgtgcatttcctgtgacccaggaggtctggtgtaggggrtgctcctgccttaggtctgaggccctgtctgaagaggggtaggtgaggaggccacctgattgtctgggccaagacagtcacaggatgaatcattcatcatcaaggaggctgagggttgagtctccaggtccagggaactccccacaaagtgcgaaccctgcccagctccacacagcctctgctgggggaccctgctctggcacagagcctgggaacaggtcttgagctcagccagagtctgcctccctgtcatttaggaattaaacctagcggcaggatgctggagcccagcccccatctgaccttacagggccaagcctggggccctgggttcccctcaaggcgcagcaggactggagccccaggcagtgcaggagtggccaaagctggggcttcctccagagccaccaagcatcacggcatcaggaagggta

SEQ ID NO: 166289 - DNA, 579 bp, Homo sapiens
ttcaaaccacagcaagcgtgctcctacctcctctctcagggcatctgcagaaagagctgcaactgcacgtccttcctccgtccatcctccgtcccttcccgatgtctgtgcatttcctgtgacccaggaggtctggtgtagggggtgctcctgccttaggtctgaggccctgtctgaagaggggtaggtgaggaggccacctgattgtctgggccaagacagtcacaggatgaatcattcatcatcaaggaggctgagggttgagtctccaggtccagggaactccccacaaagtgcgaaccctgcccagctccacacagcctctgctgggggaccctgctctggcacagagcctgggaacaggtcttgagctcagccagagtctgcctccctgtcatttaggaaytaaacctagcggcaggatgctggagcccagcccccatctgaccttacagggccaagcctggggccctgggttcccctcaaggcgcagcaggactggagccccaggcagtgcaggagtggccaaagctggggcttcctccagagccaccaagcatcacggcatcaggaagggta

SEQ ID NO: 166290 - DNA, 579 bp, Homo sapiens
ttcaaaccacagcaagcgtgctcctacctcctctctcagggcatctgcagaaagagctgcaactgcacgtccttcctccgtccatcctccgtcccttcccgatgtctgtgcatttcctgtgacccaggaggtctggtgtagggggtgctcctgccttaggtctgaggccctgtctgaagaggggtaggtgaggaggccacctgattgtctgggccaagacagtcacaggatgaatcattcatcatcaaggaggctgagggttgagtctccaggtccagggaactccccacaaagtgcgaaccctgcccagctccacacagcctctgctgggggaccctgctctggcacagagcctgggaacaggtcttgagctcagccagagtctgcctccctgtcatttaggaattaaacctagcggcaggatgytggagcccagcccccatctgaccttacagggccaagcctggggccctgggttcccctcaaggcgcagcaggactggagccccaggcagtgcaggagtggccaaagctggggcttcctccagagccaccaagcatcacggcatcaggaagggta

SEQ ID NO: 166291 - DNA, 579 bp, Homo sapiens
ttcaaaccacagcaagcgtgctcctacctcctctctcagggcatctgcagaaagagctgcaactgcacgtccttcctccgtccatcctccgtcccttcccgatgtctgtgcatttcctgtgacccaggaggtctggtgtagggggtgctcctgccttaggtctgaggccctgtctgaagaggggtaggtgaggaggccacctgattgtctgggccaagacagtcacaggatgaatcattcatcatcaaggaggctgagggttgagtctccaggtccagggaactccccacaaagtgcgaaccctgcccagctccacacagcctctgctgggggaccctgctctggcacagagcctgggaacaggtcttgagctcagccagagtctgcctccctgtcatttaggaattaaacctagcggcaggatgctggagcccagcccccatctgaccttacagggccaagcctggggccctgggttcccctcaaggcgcagcaggactggagccccaggcagtgcaggagtggccaaagytggggcttcctccagagccaccaagcatcacggcatcaggaagggta

SEQ ID NO: 166292 - DNA, 531 bp, Homo sapiens
ggatgcggcttatttccacccagggagcccataaatacccagataggtaaaaaatccaacacctggaaagaaaaacacctcatcttgacatcacaaacacatctcagtaagtccaaggagtaatgtggaaatgaaatggawaattcacagacacatttattgtgaaatttttagcacatgcttgaacatcaaaacagaattgtccacaattttaggaaaaccaccccatgaccacgaatcactacactcatagaaacaccactgagtcaacagagttctaactgtgagcaggtcactactgaggcctcaggagaatcaaggctctagggtacattttacagaacccagaattgagccacacaatctatagccaaatgatctttgacaaacttaacaaaaacatacaccagaaaaaggacaccccattcaataaatggtgctggggaaattggaaatgaacatgcagaagaacaaaactagacccctaccctcaacacatacatactcaacacaaaatgaattaaagactta

SEQ ID NO: 166293 - DNA, 579 bp, Homo sapiens
attttcgcacaccttgcctgtgacaaggaactaacatgaagaatttacaaggaattaaactatacaacaacaggaagaagaaccaaataaccctattaaaatgagcaaaggacgtgagtagacatttccaaagaacacatacaaatggataataaatatataaacaatgctcaacatcactaaccatcagggaaatgcaaattaaaactacagtaagatattatcttacaaaagccacagtgactattattaaaaactcaaaagtatcagatgttggtgaggatggaaagtaacaggaactcatcgacactgtagatgaggatgtggactaggacaacctctatggaaaatggtatggagtcttcccaaaacactggaaatagaactgccatttgatccagcaatccgactacggggtaactacccaaaggaaaataaatcattacttcaaaaagatatccatgcttctatgtttaccacaaaactattcttaataacacacatgtcaacctgagtgtccaycaacagatgattttataaaagaacacagcacatatgcacaattcaatactagtcaac

SEQ ID NO: 166294 - DNA, 661 bp, Homo sapiens
caggagtttgagaccagcctggccaacatggtgaaaccccatctactaaaaatacaaaaattaaccagatgtggtggcaggcacctgtaatcccagctactcgggaggctgaggcaggagaattgcttgaacccaggaggcagagtttgcaatgagccaagatcgtgccactgcactctagtctgggtgacacagcaagacgccatctcaaataaaataaaataaaataatataatataatataatatgtaaaaaatgatcaataaatgaaattactatcagttgaaactcattaaatttaaagacgttttctactcaagtaactataagaacatgaatgtcaagtttcagatgggaaactattttcaaatcacataaccaccaatttaattagaataagaactctcargactcaactgtgaaaaagaaataagaaagaaacaacccatggataaaataggcaaaggtttgtgcagacatttcatcaaatgagatgtgcagatgacacataagcatataaacaggctgttaacaggattttccattaaaggaattcaaatcaagcccacaatgagacaccactatacactttttagaatggctgaaattaagaagaaatacaggtaataccaatgctgatgagcataccaagttcctagtg

SEQ ID NO: 166295 - DNA, 661 bp, Homo sapiens
caggagtttgagaccagcctggccaacatggtgaaaccccatctactaaaaatacaaaaattaaccagatgtggtggcaggcacctgtaatcccagctactcgggaggctgaggcaggagaattgcttgaacccaggaggcagagtttgcaatgagccaagatcgtgccactgcactctagtctgggtgacacagcaagacgccatctcaaataaaataaaataaaataatataatataatataatatgtaaaaaatgatcaataaatgaaattactatcagttgaaactcattaaatttaaagacgttttctactcaagtaactataagaacatgaatgtcaagtttcagatgggaaactattttcaaatcacataaccaccaatttaattagaataagaactctcaagactcaactgtgaaaaagaaataagaaagaaacaacccatggataaaataggcaaaggtttgtgcagacatttcatcaaatgagatgtgcagatgacacataarcatataaacaggctgttaacaggattttccattaaaggaattcaaatcaagcccacaatgagacaccactatacactttttagaatggctgaaattaagaagaaatacaggtaataccaatgctgatgagcataccaagttcctagtg

SEQ ID NO: 166296 - DNA, 655 bp, Homo sapiens
ccacagtttgtcatactttactaaagtagtctaataattagatgaagttctgaatttaatattcagttgtattaaatatttaaaaataccacaatctacaaattaggaaactgagactatatttttatcaagggttacagccatcctatacactggaaagcatagatttggtaaaaatgagagacaggcactcccaagaagaaggggttgggcagaagctttatgctgaactgtttggttaaacagacttaatcaacaggttacaggaggkgctatggatgttcatggaggttgtcctgacacacgcatactgaacaaacacacatgaagcttatgagccctgttcactcaccagtggtgacttagcatttaaatccattacagtcaggccctatgtgcaaatagcagaagcagagacacaaaggcactcagggtgcacattctgtaaacggccagagccaggccatggtcagtggcctctgatcaggaaaaagatcctgatagcaaatgttcaatcaaagctggggttatggcttgtggaacagggggtcagttcatcaggggatgggctgcaattgtcttcatagtgcttgtctcagtgccagtgcttactgagccactagagaaaaggaataacctattggcagttaaaaca

SEQ ID NO: 166297 - DNA, 605 bp, Homo sapiens
agcagaagcagagacacaaaggcactcagggtgcacattctgtaaacggccagagccaggccatggtcagtggcctctgatcaggaaaaagatcctgatagcaaatgttcaatcaaagctggggttatggcttgtggaacagggggtcagttcatcaggggatgggctgcaattgtcttcatagtgcttgtctcagtgccagtgcttactgagccactagagaaaaggaataacctattggcagttaaaacatagtttatcttttaagtgtagaagtgagtggcaaaatccttgcctggcaaggccttaggtcttgtttataatttgacatcttactgccactcttctgtcagtcttaagatctctattttaacatgagtgttggtcactgctgtgactaaaccacaaaggggagtaggtataacgaggcgtgtctgatctcttgtttagtcatggttggaaaaagtttttagatttttagggggttccytaggccaagagatggactatttaatcagtggtgggttttagggatttatttttaggttacagtttataaatatgaacccaactattgactttctgcaatttcactgctgtgttgt

SEQ ID NO: 166298 - DNA, 565 bp, Homo sapiens
gtatgtgtttctttccttaagttcaccttattacctgaagatggctgctgaagtgtcagacagcggcaaaactatattccgtttatatatcggaacataagcatgtcaaatgataatcaccataaacagaagagactgcaacatctaattttttaaactgggcacattctcaaattgaataaaattgaggttgtattagttaggaagataataaaattgggtgttaaatatgtagctaacaaactttgccacacatgtattgggtataaaattaagaaaatggacataagtgatagaagtttagaagtagcccctcttctcaaaagcctcactctaggaggttgatacacctcttaagcaaaactttatacccaaatgaactgcaaaagagacagagttggtggatagaaaagtttttaaaaaacaaaaatgttgataagccaaaaaaaaaaaaaaagacactacaaaaactcttgcaaatgtstatggaaaaaaataaatttaaatttatttcccctattctccacagaacaaaaggcccacatacggtgcttgaaaaataaat

SEQ ID NO: 166299 - DNA, 600 bp, Homo sapiens
aactatcatctgaaaataatgttttcttcattccctggtaggtattaaatgtgaaaacttatgaaagcgagatgataaaatatgatttgttactactattatggcaatcaacatataaaacatattctttctatatatatatatatatatawataaataatatatagaataggagaaaagttgggtccccaaacatggcaatgtgattattagatgcatctttcctcatagtcttctatcatatctaacaagtggcctagtggtaaactctgcttctcaaccaaaaagaaagcaatctacatttcaaggttgtactttacctcatcataaattcctcaaacttttaactggtaaggttaaggctggaccggtatgtatctgccacaggtttgtgctctggaggaccgaggtatacaagaagtgttgccatttatcaaaaggtcatcttccaacagctttatgatccctagatatagcaaactacttagaaaaaagtagcagttcacatttagcagtacacatttctttaacttgtaactgttgcttttcctttaactgtcagctggtggtccctgttgatttgtaaacagtacccaaaag

SEQ ID NO: 166300 - DNA, 585 bp, Homo sapiens
tcaagggcatgagttactgaataagtccaaggagggtgacacttttcattcttgtttgatgtctgtcattctcagagcaccagcctgatctgcctctttccatcttttcagggacccagayaggggacacatgattattgctgatttcataataggcaactggaggctttaccatgaaagatgaataagtaaacagtgcaacttggaggtagggctggccacctaccacttggtggccaacgcagggactgctcacctcctgctgctgtttctggagcctgttgatcagcagcagctgcacagctaccaccgttttacccggtagcttcagaaggaggactattttgatttaccccaaggtgaggttgagtgggatgccttctgtgagtgactttggagaaggctaaggaaagccagatgagaaagagaggattagaagctgtgagaggtttaaccaggcagaaatctctcccagcaggggcctggattgccatcacatcactgaaaggagggctcacaaaagtggtctgcaggcagtgcttactccaagcccgctttttacactgaaaatgatagttgaagaca

SEQ ID NO: 166301 - DNA, 585 bp, Homo sapiens
tcaagggcatgagttactgaataagtccaaggagggtgacacttttcattcttgtttgatgtctgtcattctcagagcaccagcctgatctgcctctttccatcttttcagggacccagacaggggacacatgattattgctgatttcataataggcaactggaggctttaccatgaaagatgaataagtaaacagtgcaacttggaggtagggctggccacctaccacttggtggccaacgcagggactgctcacctcctgctgctgtttctggagcctgttgatcagcagcagctgcacagctaccaccgytttacccggtagcttcagaaggaggactattttgatttaccccaaggtgaggttgagtgggatgccttctgtgagtgactttggagaaggctaaggaaagccagatgagaaagagaggattagaagctgtgagaggtttaaccaggcagaaatctctcccagcaggggcctggattgccatcacatcactgaaaggagggctcacaaaagtggtctgcaggcagtgcttactccaagcccgctttttacactgaaaatgatagttgaagaca

SEQ ID NO: 166302 - DNA, 585 bp, Homo sapiens
tcaagggcatgagttactgaataagtccaaggagggtgacacttttcattcttgtttgatgtctgtcattctcagagcaccagcctgatctgcctctttccatcttttcagggacccagacaggggacacatgattattgctgatttcataataggcaactggaggctttaccatgaaagatgaataagtaaacagtgcaacttggaggtagggctggccacctaccacttggtggccaacgcagggactgctcacctcctgctgctgtttctggagcctgttgatcagcagcagctgcacagctaccaccgttttacccggtagcttcagaaggaggactattttgatttaccccaaggtgaggttgagtgggatgccttctgtgagtgactttggagaaggctaaggaaagccagatgagaaagagaggattagaagctgtgagaggtttaaccaggcagaaatctctcccagcaggggcctggattgccatcacatcactgaarggagggctcacaaaagtggtctgcaggcagtgcttactccaagcccgctttttacactgaaaatgatagttgaagaca

SEQ ID NO: 166303 - DNA, 615 bp, Homo sapiens
acatatttgaaagcacctgcaaacaaagttctttcaaaaaacagttctgataccctgctagtcctctcacacaaggcattcccttaaaaaagaatatgcaaaaatgggttggagaatgctatgtgcatttttcaaaatgaattccttctgcctccactgaaagcaatgtgttcacttgtttgataaaaagctactttattccagaggaatgaggcaagaatcaatgagctacttgtcagtgttctaaagctaaattgcaaattcagagtttctctaattcatgaggttctcacaatagtagtattgcatgagtgagaacaatagttgtgatcctgtattacatatgaggaatccaagcacataaagrttaggtgacttaccactgtggcacagcaaactggatctggtgctcatcctctgagtcacagtccagggctctgtactctctactgtcttctgcttacctccaactgatgacagcttaccttgctatggagttaaatgggcaaaaacgaggtaaacatcttaaaaatacacacacgttatctatttctgagaatattttcacaaatttacagagattttgcataaaattataagtgcccccagacagaa

SEQ ID NO: 166304 - DNA, 606 bp, Homo sapiens
gttctaaggaaaagtacttgttgcctagagctcatttaagaaacaaggttctcttcagtgcagcatgtgctgttttaggraccctgccagtgtccttccaataggaccaatgctctaaaatcatcacataaataaagtgtgacaagagtttcagcttcttggtttcgtactcctccctcagacatactctactttgtacatttacatttcctcttatctatcgcaattcttcaagcttcctcattgaaaaataagccctggagaatgaatggaatatgtaaataaatgaaacatccaccagtagattattgttaagaactgtagtatgtgtacatgatagaatgcttccccgtattaaagtaaatatttttaaagattatcccaaaatatgggtaaagacttaagataggctattaaagtgataaaaatagaataaaaagtagaattcaaaattagtcataatatgattcaaagtagaaaaaatagtaatgcagcaaagtattagtaacaatttgatgtaaatgaactgtgccattaataatttttctatatttttcatatttgtccattttttgtttcattttctaaatagttaaattgtgcaaa

SEQ ID NO: 166305 - DNA, 606 bp, Homo sapiens
gttctaaggaaaagtacttgttgcctagagctcatttaagaaacaaggttctcttcagtgcagcatgtgctgttttagggaccctgccagtgtccttccaataggaccaatgctctaaaatcatcacataaataaagtgtgacaagagtttcagcttcttggtttcgtactcctccctcagacatactctactttgtacrtttacatttcctcttatctatcgcaattcttcaagcttcctcattgaaaaataagccctggagaatgaatggaatatgtaaataaatgaaacatccaccagtagattattgttaagaactgtagtatgtgtacatgatagaatgcttccccgtattaaagtaaatatttttaaagattatcccaaaatatgggtaaagacttaagataggctattaaagtgataaaaatagaataaaaagtagaattcaaaattagtcataatatgattcaaagtagaaaaaatagtaatgcagcaaagtattagtaacaatttgatgtaaatgaactgtgccattaataatttttctatatttttcatatttgtccattttttgtttcattttctaaatagttaaattgtgcaaa

SEQ ID NO: 166306 - DNA, 606 bp, Homo sapiens
gttctaaggaaaagtacttgttgcctagagctcatttaagaaacaaggttctcttcagtgcagcatgtgctgttttagggaccctgccagtgtccttccaataggaccaatgctctaaaatcatcacataaataaagtgtgacaagagtttcagcttcttggtttcgtactcctccctcagacatactctactttgtacatttacatttcctcttatctatcgcaattcttcaagcttcctcattgaaaaataagccctggagaatgaatggaatatgtaaataaatgaaacatccaccagtagattattgttaagaactgtagtatgtgtacatgatagaatgcttccccgtattaaagtaaatatttttaaagattatcccaaaatatgggtaaagacttaagataggctattaaagtgataaaaatagaataaaaagtagaattcaaaattagtcataatatgattcraagtagaaaaaatagtaatgcagcaaagtattagtaacaatttgatgtaaatgaactgtgccattaataatttttctatatttttcatatttgtccattttttgtttcattttctaaatagttaaattgtgcaaa

SEQ ID NO: 166307 - DNA, 604 bp, Homo sapiens
ataatgtctacatttcttatagtagctaagacaatgtaaatgctaygtaaatagttgttatactatatatttgaattattttttgtcatattgttatttttatttttttctaaatattttccatctgtgattgattgaatctgcagatgcagaaccacagatactaagggccaaaagaatacttgaaaattgctaagagagttgatcttaaatgttctcacaacaataaaatggcaagcatgtgaggtgacagatatgttaatcagtttgatttaatcattttgcaatgtacacatatatcaaaatatcaccttgtataccataaatatatacaatgttttcaaattaaaccttaattaagctgagggaaaaatgtacacctgccacctgtcacctccaacacacacttcctattgacctgaaccttctaatttttctccatctttactcatcgccccccaagcatgccacatagtttatttaccccgtcttcccccattacaatataacttccacaagtcaggaatttttatccattttgttcactgctgtattcatgagtatttatagtagtgtctggaatgttaacaattattattgttga

SEQ ID NO: 166308 - DNA, 604 bp, Homo sapiens
ataatgtctacatttcttatagtagctaagacaatgtaaatgctacgtaaatagttgttatactatatatttgaattattttttgtcatattgttatttttatttttttctaaatattttccatctgtgattgattgaatctgcagatgcagaaccacagatactaagggccaaaagaatacttgaaaattgctaagagagttgatcttaaatgttctcacaacaataaaatgrcaagcatgtgaggtgacagatatgttaatcagtttgatttaatcattttgcaatgtacacatatatcaaaatatcaccttgtataccataaatatatacaatgttttcaaattaaaccttaattaagctgagggaaaaatgtacacctgccacctgtcacctccaacacacacttcctattgacctgaaccttctaatttttctccatctttactcatcgccccccaagcatgccacatagtttatttaccccgtcttcccccattacaatataacttccacaagtcaggaatttttatccattttgttcactgctgtattcatgagtatttatagtagtgtctggaatgttaacaattattattgttga

SEQ ID NO: 166309 - DNA, 529 bp, Homo sapiens
ggctatgcatggaaagggcagaagggagatggagggactgcagagacctgtgggctgagtctgagcctcaaggctttttcagcatgaaactcagcaaagacaggtgttaaaaaggcctgcctcccaccgcccctgctgttcactaagcttaggcaatcaaagtgtaccagtgttttttcactgcccagcatatactgatttaaggactcaacactctgacttgagaaaacctaaaacatgaagttatctcaaaggtgggtgagattctaaggaggctcaaatatatagtcctcaattaattctcacctcaacttagttacaatctgatacaacatattaggagacaggaacagcacagtggtaaaaatcaaacctcacctcaaaagatcrtaaattattgctctcagattagtattaactgacacaatatgtgcagtgagtatcttctcttcctcctcccgaattacagaagagaacgtgaaagactaggagccatacacattaccccagggaaagcagagtgaaaggg

SEQ ID NO: 166310 - DNA, 617 bp, Homo sapiens
gacaaaaaggatctgggggccttggctccactgtaggtgggtaattttattccaactggttttgggtgctagttttctgcctagtggtcaaattcagaaacccaatcaggacctagrtctccacctggagctcttaggttagctaatcaatgtcttcttggtcctcaaggaagggtttattgtttttgtttgcttgtttgattggttgtttgccattgcattaaaattctttcttacccagcaattgatgagttcaaggctatcctgtcacatttcgtgatgtggcctgagccctcccagagtgttactgactgggaccaactactaactaaagtttagtgaagagaagacaatgagcttgctggaacgtcacagaggcttggttgccatggtagtgattgtcagatgagatcacagagaagggtgtaagagaaaagaaagaaaaacatgcaggaaaagctgaagcataatattatactaaaatatatatatattatatatatatattttatacatatttatactgtctaaacttacagtggagtaatgtgttgaaacttgaggggaaaactactttttgagaaagactgactttccagcatcttcttagagagatg

SEQ ID NO: 166311 - DNA, 581 bp, Homo sapiens
gtttattgtttttgtttgcttgtttgattggttgtttgccattgcattaaaattctttcttacccagcaattgatgagttcaaggctatcctgtcacatttcgtgatgtggcctgagccctcccagagtgttactgactgggaccaactactaactaaagtttagtgaagagaagacaatgagcttgctggaacrtcacagaggcttggttgccatggtagtgattgtcagatgagatcacagagaagggtgtaagagaaaagaaagaaaaacatgcaggaaaagctgaagcataatattatactaaaatatatatatattatatatatatattttatacatatttatactgtctaaacttacagtggagtaatgtgttgaaacttgaggggaaaactactttttgagaaagactgactttccagcatcttcttagagagatgtggtttcatggaagaatggtgtctgagctacattttgtcttattctaaaagtaaaaggaatgggactgatctggaagcacatagattccagatcaatactaataccagactattgtaatgccaatttataaaaggaag

SEQ ID NO: 166312 - DNA, 617 bp, Homo sapiens
gacaaaaaggatctgggggccttggctccactgtaggtgggtaattttattccaactggttttgggtgctagttttctgcctagtggtcaaattcagaaacccaatcaggacctaggtctccacctggagctcttaggttagctaatcaatgtcttcttggtcctcaaggaagggtttattgtttttgtttgcttgtttgattggttgtttgccattgcattaaaattctttcttacccagcaattgatgagttcaaggctatcctgtcacatttcgtgatgtggcctgagccctcccagagtgttactgactgggaccaactactaactaaagtttagtgaagagaagacaatgagcttgctggaacgtcacagaggcttggttgccatggtagtgattgtcagatgagatcacagagaagggtgtaagagaaaagaaagaaaaacatgcaggaaaagctgaagcataatattatactaaaatatatatatattatatatatatatwttatacatatttatactgtctaaacttacagtggagtaatgtgttgaaacttgaggggaaaactactttttgagaaagactgactttccagcatcttcttagagagatg

SEQ ID NO: 166313 - DNA, 354 bp, Homo sapiens
aatgaaatcacaacaatgatagatgagcaagataaaaatattgaagtaaagatatagaaattttacaagaagaaacaattagaaattctggagctaagaattctatgacggaaataaaaaaaatcactagggggtgttcacaagtagacttgatcaaacagaagaaggaatcagctaatccagacaccagtcatttcaaattacatagacaaaggagcaaaagaaaaaagaataaaaaagagccaatgaacctacggacttaaggkacatcataaagtgaaataatatactgatcacaaaagttccagatggagaagagaaaaataagaaggaaagtacagtgctggctaaaag

SEQ ID NO: 166314 - DNA, 540 bp, Homo sapiens
acaataaaacagggttataaataatcagattayttattgtatgaagtttatacattaatatattctttaaaaatatgaattttctcgatataatttctgctagtagttaaaatcaatcatttctcattctatattttaggtagtgtttctattcttcctaattataattatatttacatgtacaaatacatattaaaaatgtttaatgtcttaaaataaaaaatcctacagccttcattgtagtctgtttcagaatgtctagaatgattacgcaaaaaatgatcctcatgacacaagacatctgctataataaaacgtattctcatgaaaataaggtccatcaggtacctaactaatgaattcttttgtaatataaacaaaataaaaacacataactgaaaaccgtagggtatttccaatataaatgtaagaggaagtactgtaagaaaagctgaaaatttagttggaaggggaatttaagatagctagattatcaaaataattcacctttgacattaacttcaaggccccttccgattc

SEQ ID NO: 166315 - DNA, 625 bp, Homo sapiens
aagggaacctgctgccttgaaggaaagaaccagtcctggcaagacccatcacctattgactaaagagcccttgggccctgaataatgagaagcaacacccaaatagtatgccatatgccttgggtgagactcaagacatactagcttcaggtgagacctagcacattcccagctgtggtgactacagtgacagactccttctgcttgagagaagcaaagagaaaggtcaaggggactttgtcttgtaccttaagtaccagcacagtcaaatgggcatagtgcatcaagggggctcttgaggttccctattctagcccatggctcttttatggcatttctggagcttctctgggccagaggggagcccatgtccatgaaaggtgattcccaggcatagcagcattcaccacaagctgactgaagagcctstgggccttaagtacacacaggtgggagtgtggcagttactcaccataggcctgtgatggtggtggccacagggtcattctcctctgcctgtggaaggaagagggaagagtgggaagggctgtgtcttgtggcttgagggccagctcagttgcagtataatagaacaccaggtagacgtctaaggtttttgactcca

SEQ ID NO: 166316 - DNA, 540 bp, Homo sapiens
acaataaaacagggttataaataatcagattacttattgtatgaagtttatacattaatatattctttaaaaatatgaattttctcgatataatttctgctagtagttaaaatcaatcatttctcattctatattttaggtagtgtttctattcttcctaattataattatatttacatgtacaaatacatattaaaaatgtttaatgtcttaaaataaaaaatcctacagccttcaytgtagtctgtttcagaatgtctagaatgattacgcaaaaaatgatcctcatgacacaagacatctgctataataaaacgtattctcatgaaaataaggtccatcaggtacctaactaatgaattcttttgtaatataaacaaaataaaaacacataactgaaaaccgtagggtatttccaatataaatgtaagaggaagtactgtaagaaaagctgaaaatttagttggaaggggaatttaagatagctagattatcaaaataattcacctttgacattaacttcaaggccccttccgattc

SEQ ID NO: 166317 - DNA, 540 bp, Homo sapiens
acaataaaacagggttataaataatcagattacttattgtatgaagtttatacattaatatattctttaaaaatatgaattttctcgatataatttctgctagtagttaaaatcaatcatttctcattctatattttaggtagtgtttctattcttcctaattataattatatttacatgtacaaatacatattaaaaatgtttaatgtcttaaaataaaaaatcctacagccttcattgtagtctgtttcagaatgtctagaatgattacgcaaaaaatgatcctcatgacacaagacatctgctataataaaacgtattctcatgaaaatwaggtccatcaggtacctaactaatgaattcttttgtaatataaacaaaataaaaacacataactgaaaaccgtagggtatttccaatataaatgtaagaggaagtactgtaagaaaagctgaaaatttagttggaaggggaatttaagatagctagattatcaaaataattcacctttgacattaacttcaaggccccttccgattc

SEQ ID NO: 166318 - DNA, 540 bp, Homo sapiens
acaataaaacagggttataaataatcagattacttattgtatgaagtttatacattaatatattctttaaaaatatgaattttctcgatataatttctgctagtagttaaaatcaatcatttctcattctatattttaggtagtgtttctattcttcctaattataattatatttacatgtacaaatacatattaaaaatgtttaatgtcttaaaataaaaaatcctacagccttcattgtagtctgtttcagaatgtctagaatgattacgcaaaaaatgatcctcatgacacaagacatctgctataataaaacgtattctcatgaaaataaggtccatcaggtacctaactaatgaattcytttgtaatataaacaaaataaaaacacataactgaaaaccgtagggtatttccaatataaatgtaagaggaagtactgtaagaaaagctgaaaatttagttggaaggggaatttaagatagctagattatcaaaataattcacctttgacattaacttcaaggccccttccgattc

SEQ ID NO: 166319 - DNA, 544 bp, Homo sapiens
tgctgtgtggtcaagccagaaactccacacacctatgtacatcctactggccaatttctccttcctggagatctgctgtgtcagttctgacgtgcccataatggcagccaatctcatctcccagacacagagcatctcctgtgctggctgcctgctccggttctacttcttctccatgtgtgctgcagagtgcttatttctgtcagtgatgtcttttgataggtttcctgccatttgtagacctttgcactatcccaccttaatgacccatcacgtttgtgctcatttttgtgatcttctgctgggtgggtggctgtctctggttattgacccctttgacactaatatctcaggtgctcttttgtggtccaaacactatcgaccattttttctgtgatctggcacctttgctggcactgtcttgtgctccaatacctggaattactctgacttgtggtatcattagygctctcatcatctttcttaccttcttgtatatccttgggacttatttctgtgttctaagcacagtgctacaggtgcc

SEQ ID NO: 166320 - DNA, 330 bp, Homo sapiens
ttttaggttctgaatttcttcttaaactttatttttaccttaatatatgtctcatcactcccatttgactcactctctctaattcacagagtataatcttagttttacaacctgagcttaaaattgttctattcataccttgcccatgtttagatgcctcatacgaaactttccttgcccactrcagtatatcataatgttattttctaagttcattgccttttgagttttgccaaatatttactcaaaattggtctgccttttgggtatctattacagcattgtttgtgctattttttactttcctaccagttagaatataagtttctt

SEQ ID NO: 166321 - DNA, 560 bp, Homo sapiens
atttaatcttttcaattagagaattctatttaagcaaaatgtttttattactgtttctttcatgttttatagtagacatatttgatataattattgaatttattgagccatgcttttaaggtaaaaactcgggaggcttcataagccatgggattttcttgccatttgtatgaagtaaacaaacacaagacggtgctaggtgtgtaacaaatgctttacaattatcaggaaatatttctgctcgagtgagtttgtatcttcatataagagattaaaaacacccagagtgaagaagtggcattggttttgcatggtgagagaggaaatctgtagtcaggctgcacaactaactctaaatttagacagataaattctgcttcttttattttctaattatcttcagtttttctttcactgtctttttatcttcacccccaaatacatrtgcattacagcccttctctttctttgcctgtcttatggcaacatcttgctcactgttctccccaccccatgttatttcacacagtactctgcaggttctgaggacaagttagaat

SEQ ID NO: 166322 - DNA, 560 bp, Homo sapiens
atttaatcttttcaattagagaattctatttaagcaaaatgtttttattactgtttctttcatgttttatagtagacatatttgatataattattgaatttattgagccatgcttttaaggtaaaaactcgggaggcttcataagccatgggattttcttgccatttgtatgaagtaaacaaacacaagacggtgctaggtgtgtaacaaatgctttacaattatcaggaaatatttctgctcgagtgagtttgtatcttcatataagagattaaaaacacccagagtgaagaagtggcattggttttgcatggtgagagaggaaatctgtagtcaggctgcacaactaactctaaatttagacagataaattctgcttcttttattttctaattatcttcagtttttctttcactgtctttttatcttcacccccaaatacatatgcattacagcccttctctttctttgcctgtcttatggcaacakcttgctcactgttctccccaccccatgttatttcacacagtactctgcaggttctgaggacaagttagaat

SEQ ID NO: 166323 - DNA, 510 bp, Homo sapiens
agatcgttggacagatagcattgttaatcattattatattataacacaaagaatggtaaatatcaaattagactaagtgaagtattaataccagtgggccatgtattattagtgctacataagaaaacaaatcaaaatttggatatcycattagagacatgtcttagaaataaaattgtattaaggagagttagtggtaagtaaaatattttaaattcaaatttctatgaaatatttatcccaccgcttatgtttccatgcagaatcttctgttgttgagtgggtataataagttttggacaaaaataaaataacctttgtgggtttaaaatttggaataatcttttttgcggattcgtattgccatcttgggaaatttctcactcatattattataacttcttttatttgaatgggcacagttacagtccacagtttttattctcagacacctaattacagccaaattctaggtcattctctttagagaaatctcaaagacaatggcag

SEQ ID NO: 166324 - DNA, 468 bp, Homo sapiens
aagaagcttaaattactttggctaagataaacacaaagttactcrtaacaagacagattataagcaaaattttaaaagtcgtaggcaaaaggaatcttggaagcaagcagtaagataaacctgttgtgtcatctatagcatgcttcattgagatttgcagtggatttatcaacacagtccttgcaggccagaaaaaaagttaagtgatatagtcaaagtgctgaaacaaaaactttcaaagcaagaatactataactaggaaaattcttcaaaaaaaattccaaagtaacaaaatgcagtaaaagtacatcactagtatatctgccttactgaaaatgcttaggggtgtctcttccactgaaaataaaattctagaaaaaacctacattatataaaaaacatataactctctaataaagacatgcacataacaggaaattgtattaaaattataatatagaaaacaat

SEQ ID NO: 166325 - DNA, 468 bp, Homo sapiens
aagaagcttaaattactttggctaagataaacacaaagttactcataacaagacagattataagcaaaattttaaaagtygtaggcaaaaggaatcttggaagcaagcagtaagataaacctgttgtgtcatctatagcatgcttcattgagatttgcagtggatttatcaacacagtccttgcaggccagaaaaaaagttaagtgatatagtcaaagtgctgaaacaaaaactttcaaagcaagaatactataactaggaaaattcttcaaaaaaaattccaaagtaacaaaatgcagtaaaagtacatcactagtatatctgccttactgaaaatgcttaggggtgtctcttccactgaaaataaaattctagaaaaaacctacattatataaaaaacatataactctctaataaagacatgcacataacaggaaattgtattaaaattataatatagaaaacaat

SEQ ID NO: 166326 - DNA, 468 bp, Homo sapiens
aagaagcttaaattactttggctaagataaacacaaagttactcataacaagacagattataagcaaaattttaaaagtcgtaggcaaaaggaatcttggaagcaagcagtaagataaacctgttgtgtcatctatagcatgcttcattgagatttgcagtggatttatcaacacagtccttgcaggccagaaaaaaagttaagtgatayagtcaaagtgctgaaacaaaaactttcaaagcaagaatactataactaggaaaattcttcaaaaaaaattccaaagtaacaaaatgcagtaaaagtacatcactagtatatctgccttactgaaaatgcttaggggtgtctcttccactgaaaataaaattctagaaaaaacctacattatataaaaaacatataactctctaataaagacatgcacataacaggaaattgtattaaaattataatatagaaaacaat

SEQ ID NO: 166327 - DNA, 468 bp, Homo sapiens
aagaagcttaaattactttggctaagataaacacaaagttactcataacaagacagattataagcaaaattttaaaagtcgtaggcaaaaggaatcttggaagcaagcagtaagataaacctgttgtgtcatctatagcatgcttcattgagatttgcagtggatttatcaacacagtccttgcaggccagaaaaaaagttaagtgatatagtcaaagtgctgaaacaaaaactttcaaagcaagaatactataactaggaaaattcttcaaaaaaaattccaaagtaacaaaatgcagtaaaagtacatcactagtatatctgccttactgaaaatgcttaggggtgtctcttccactgaaaataaaattctagaaaaaacctacattatataaaaaacayataactctctaataaagacatgcacataacaggaaattgtattaaaattataatatagaaaacaat

SEQ ID NO: 166328 - DNA, 484 bp, Homo sapiens
aaggccttctcactgcatcatctaacagcagaggaggatgagcaagagaccacttgtctgtgagaaaaaaagaggccatcttttattagaaactcrctcctgtaataactagcccactcccatgatagtgacagtaatccattcatgaggacagagacttcatgacctgatcacataataaagtcccacctctcaacactgttgcattaaagattttttccaaatcataaactttgggtgacacatttaaaccatagcattccattcctaatactaaaatgtatgtcccaattacaatgtaaactacatacattccatcccaactgtcttcaaagtcttaactcatccagcatcaatgcaaaagtatgaagtccaaagtctcatctaaatcagatatgagtgacactgaaggcacaatttagtctgatataaattgtttccatctgtgagcctataaaatcaaaataagttatctactttcaaa

SEQ ID NO: 166329 - DNA, 541 bp, Homo sapiens
tctgggttcagtccactcagcctctctcacaggtgggactgtcaagcctctagctctcctaggtggactggataccctttgtggtgyctccaaacccatatttctgcttggcattgtgctgagggctcagtgtggtgactctgtctctgcaacaactcactgcccgagaccttaggctgtccacagcattctttgaaatctacgtggagaaagccatgccctcgtggttcttctattctgcacacctgcagaattaacaacacatggatgccatggaagttgatgacttgtaccattgaagtgatggcttgagccacacctaggtcctcctgagccacagcatgggcagccaaggagtgctgtgcctggacacagggaacagagtcctaaagtgcctgctagaagtgaggccatagatttgcttcaaatttcttccatcatatatcctcgtttatggctctgaacttccactttacagaaagacctagggatgagcacaattcagccacattctttgccactttatggcaaggatggcctt

SEQ ID NO: 166330 - DNA, 541 bp, Homo sapiens
tctgggttcagtccactcagcctctctcacaggtgggactgtcaagcctctagctctcctaggtggactggataccctttgtggtgcctccaaacccatatttctgcttggcattgtgctgagggctcagtgtggtgactctgtctctgcaacaactcactgcccgagaccttaggctgtccacagcattctttgaaatctacgtggagaaagccatgccctygtggttcttctattctgcacacctgcagaattaacaacacatggatgccatggaagttgatgacttgtaccattgaagtgatggcttgagccacacctaggtcctcctgagccacagcatgggcagccaaggagtgctgtgcctggacacagggaacagagtcctaaagtgcctgctagaagtgaggccatagatttgcttcaaatttcttccatcatatatcctcgtttatggctctgaacttccactttacagaaagacctagggatgagcacaattcagccacattctttgccactttatggcaaggatggcctt

SEQ ID NO: 166331 - DNA, 490 bp, Homo sapiens
gtgatagttttggaatgtctggttagctttctagttgatacggcctttgctatgtaaaggtcagtctttttatttctcagatacttcacactatttatgaaccttttgagtgactgcagtgaagctgaagatgaaagtgcacaaacaggtggcaggaaacgtggcatgtctcggaggttggcatcacggaggcactgtgcagtccttgcaatgtcaaacttactyagtgccagcatagacggtggtctcatgcactccataggtgagatcaaatgaaagtttcatatagaaatacacagcctagagaactggcttgtaagataagcaaaaattacttcagtaaggccatgttagtaaatttgcatccatttgtccacatcaggtttagggtactacaaggatctccagacagctacatttatggaagttctgatgaaaatccctcaacaaggcacagaatttgacacacttcagaaacggtattggctga

SEQ ID NO: 166332 - DNA, 552 bp, Homo sapiens
tttgtgcctgtttactacctccagtttgctgttcttttccccataatatcttacacaatttttaaaaatgtaagcactgtatttgcatttgatattatgatattgtttgttttaaacactgaaaacatcatatggctrttaggtctctctcttaatttaatgaaaaattttcctcaaatcacatcattcctaatacatgtgaaaacgttgagaagggtggtggttcctttccagtgttaaaaggctatttcctttttagtgtaccaaaaatggtttcacttatagtaaagtataactaataaggtaatctgtcattgtagatttgtttctgcttaaagctgtaggatatttgttacacctgtacttaaagtaaaattcaaactccttatcctgtcctacaaggctccacctgatttgggccctgcctcatctctaacatcatcttatgccattttccttcttgttcaccaaagccacaccagctacctttctgtccctccttgttagacttgtttctgccttaagcacccttgctgctgctaccacctgaaa

SEQ ID NO: 166333 - DNA, 455 bp, Homo sapiens
cacaccagctacctttctgtccctccttgttagacttgtttctgccttaagcacccttgctgctgctaccacctgaaatgcttctcctctggtattttattttggtgagaacgcctagcatgagatctaccctctaacatatttttaagtgtagaatacagtattgctatctgtaggcagaatgctgcaccacagatctctagaacttaycttgtataactgaaattttatactgattgattagcaacagcgccaaatcattgaaatcttcctaaagcctaaaattacttcacaaacgttcaaatgttttgaaaatgactattgtgaattatcttattaggatctacctatgattagcactgaaaatactcagtaattttttaaataaagaatcagttaaattcaagtagctttaatttgttgttgagttttatattaaatgactttgagaagga

SEQ ID NO: 166334 - DNA, 455 bp, Homo sapiens
cacaccagctacctttctgtccctccttgttagacttgtttctgccttaagcacccttgctgctgctaccacctgaaatgcttctcctctggtattttattttggtgagaacgcctagcatgagatctaccctctaacatatttttaagtgtagaatacagtattgctatctgtaggcagaatgctgcaccacagatctctagaacttaccttgtataactgaaattttatactgattgattagcaacagcsccaaatcattgaaatcttcctaaagcctaaaattacttcacaaacgttcaaatgttttgaaaatgactattgtgaattatcttattaggatctacctatgattagcactgaaaatactcagtaattttttaaataaagaatcagttaaattcaagtagctttaatttgttgttgagttttatattaaatgactttgagaagga

SEQ ID NO: 166335 - DNA, 552 bp, Homo sapiens
tgattgattagcaacagcgccaaatcattgaaatcttcctaaagcctaaaattacttcacaaacgttcaaatgttttgaaaatgactattgtgaattatcttattaggatctacctatgattagcactgaaaatactcagtaattttttaaataaagaatcagttaaattcaagtagctttaatttgttgttgagttttatattaaatgactttgagaaggaattttctattaggccagatctcacctatcacattattgtaatcctgggaccaggcaagaattagagagctatgggccatgatcctggccrttgttgttactgcttgaggattgaggcatctttttatggctacccctattctctataaatttcttcttgtgattaaacagtgatttaccagtagatcatttttcttgagtgtaccccaaactgctttactacagggagttacaaggatgtcatttaggtaattggaatttcagccctcatccctgtcccccttgctttgtatgtaaatctggctgatctctgggttctgaacgcccagtt

SEQ ID NO: 166336 - DNA, 389 bp, Homo sapiens
catcgtatatagtcatctatcataaacaatatacgcagataaatctcaggagaaatattaatcagtcacctttgccttaatttagcaagtagttgtcaactttgggtttatgwttttgccactcttcagctatctacctgagaacaaaaatgcactaacctgattttgttttgttctcaggatgaactggcttgagttctggttactctatttggttcttggcatttactctaccaactgctctggaacatgttttgtaaagaagtagaattggcagactgactccattcagactctcctctgagacaacagtttggccagtaaaataatgacactctgtttcaaggtttgtatcattcattttgtgtgtgtgtgtgctgaggtatgtc

SEQ ID NO: 166337 - DNA, 540 bp, Homo sapiens
aaggttgttcttcatgcaataaacactgtaacataaagaaagcttcctgaactgtgtgtagtgtaactgaaggtgggactatattgttacacctcaccgcttacaaatactttattctctarcatctaatttttactaacttcctattagagattacagaaagctattttgagattataagcagtgataagaatgcatttaaaatgtggacttcatgaagcactgcgttgaacaggatgaagtgaaataatcccgattccagagttaatctggagtcagccatgtgaatttaggacaggaaatattaatttattgaggcattgtgcaaaaaatagttaagtgatattctgcatgtaaatctgggtcccccacaccaatatcctttgaaaggaaggtttatcctcggaatcacaaaacattgagtggaatgctacagttttgtaatcactgctactttaaacagcagttagccacactaagcaagaatagctgtagagattaaaatgttacattgtgttctttaaaaatgaatatatatgg

SEQ ID NO: 166338 - DNA, 540 bp, Homo sapiens
aaggttgttcttcatgcaataaacactgtaacataaagaaagcttcctgaactgtgtgtagtgtaactgaaggtgggactatattgttacacctcaccgcttacaaatactttattctctaacatctaatttttactaacttcctattagagattacagaaagctattttgagattataagcagtgataagaatgcatttaaaatgtggacttcatgaagcactgcgttgaacaggatgaagtgaaataatcccgattccagagttaatctggagtcagccatgtgaatttaggacaggaaatattaatttattgaggcattgtgcaaaaaatagttamgtgatattctgcatgtaaatctgggtcccccacaccaatatcctttgaaaggaaggtttatcctcggaatcacaaaacattgagtggaatgctacagttttgtaatcactgctactttaaacagcagttagccacactaagcaagaatagctgtagagattaaaatgttacattgtgttctttaaaaatgaatatatatgg

SEQ ID NO: 166339 - DNA, 617 bp, Homo sapiens
gctgtgagggagtgaggtgggaatccccctagctaggattgagtcatttttttcttccatgcaaaatgcatattccccattgtggatttctgagtgtgtgagtgatgaagaaatagggcatgtgccttgacccagttgcagctattgcctccatgtgcctgaggtgccttcctcatactctagcatgttactgggcagacagtcagtattagcacatgctgctggtccttgtgagcacagcacgaagacgagaaatggctggcagaattttggcttgagggccaatagatgtaataaatgtaatacagttagttttagaacataattccatratttgattcgggtcaaataaatcattttaaccaaaatttctattgtggaagaaaatctttcaagaattatgaaatttgtgtctcagaattggctcatttaagaaaaataatactgttcaaatgtgcgaaggctgtcaaagggtttgttgtatagctttgcattggctgagttttcaatgtttagacatttgagtataagaaaactgctacactaaaagtaatagacataaaaataaaaaataaacagctgtgtaatgttatcaggctagctagatgttatgcatc

SEQ ID NO: 166340 - DNA, 617 bp, Homo sapiens
gctgtgagggagtgaggtgggaatccccctagctaggattgagtcatttttttcttccatgcaaaatgcatattccccattgtggatttctgagtgtgtgagtgatgaagaaatagggcatgtgccttgacccagttgcagctattgcctccatgtgcctgaggtgccttcctcatactctagcatgttactgggcagacagtcagtattagcacatgctgctggtccttgtgagcacagcacgaagacgagaaatggctggcagaattttggcttgagggccaatagatgtaataaatgtaatacagttagttttagaacataattccatgatttgattcgggtcaaataaatcattttaacyaaaatttctattgtggaagaaaatctttcaagaattatgaaatttgtgtctcagaattggctcatttaagaaaaataatactgttcaaatgtgcgaaggctgtcaaagggtttgttgtatagctttgcattggctgagttttcaatgtttagacatttgagtataagaaaactgctacactaaaagtaatagacataaaaataaaaaataaacagctgtgtaatgttatcaggctagctagatgttatgcatc

SEQ ID NO: 166341 - DNA, 602 bp, Homo sapiens
aaatgcagtgtaaaatttcagggaaaacaactaaaagaatagtaaagattccaaaccaatagaggtttaatttccaaaccaatcaaaggaaaaaagatggaattggtgggtgagggtagamggatttaaattattcaaaagagactgggcagagtggttcacacctgtattcccagcaatttgggaggccaaggcaggtggatcacctggggtcaggagttcaagaccagcctggccaacatggtgaaactccttctattctaaaaatacaaagaaaaaaattagctgggcgtggtggcttacacctgttgtcccagctactcaggaggcagaggcacgagaatcacttgaatccgggaggcagaggttgcagtaagccgaaatcatgccgctgcactccagcctggggaacagagtgagactcagtctcaataaataaataaataaattcaaaagaaaagcaggaagagagagggaaaaaaactagataaaatggacaagtagaacacataaaataaagtgaaaggataaggatatagaagattcgaatagattatttcccactttgattttaatggacatatatcgtgattagagaatat

SEQ ID NO: 166342 - DNA, 483 bp, Homo sapiens
ttaaaatgatcatgtggtttttgttctttcttttgttgatatggtatattacattaattgatttgcatatgttgaagtatctttgcatccatgagataaatcctacttgatgatgaggaataataaacttttaatctgttgctgaattttacttgccagtatttttatgagaaattttgcatctattgctgatattggcctatagatttttttgatatgcatttgtctgattttagtatgagagtaatgyttgccttacagaacgaggttgaaagtatttcctcctcctctgttttgaaatagtttaagtgggattgctattagttttatacatgttttgtcaaattcagtgaaaccatcagatttcaggcttttctttgatgggaggctttgtattatggatctcatcacgtcttgtttgtgtattcaggttgtggatttcttaataattcaatcttcttaggttctatgtgtctagaaatt

SEQ ID NO: 166343 - DNA, 546 bp, Homo sapiens
acttctcataacaaaaatttaactgtgaaaggagatgaagaacatagaatatttctgaagaagcctcagtttctgccagctactcctacagaaccgtgtattcctgtgagtaaatatcaacatcaatttttggaatctgtcttttgtaataaaaatcagataaattttagccatgactcaaatattagtaaacatcagaatactcattttstagaaaactattacaaatgtaatgaatgtgagaaagtgttttatcaatcctcaaagtatccatattcaagaaaagccttacaaccctaatgaatgtggtgaaacttctgacccatcctcaaaacttactcaacatcgaagaacttatattggagagagctcacaaagatgtaataaaaaatgtataatagtctttagtcagtcacatctgaagagacataagataattaacactggagagaaatcagtaaaatgtaaagaacgtggcaaagcttttaccaggggcttacaacttggacatcagaaaattcatactggagagaaaccttacaaatg

SEQ ID NO: 166344 - DNA, 546 bp, Homo sapiens
acttctcataacaaaaatttaactgtgaaaggagatgaagaacatagaatatttctgaagaagcctcagtttctgccagctactcctacagaaccgtgtattcctgtgagtaaatatcaacatcaatttttggaatctgtcttttgtaataaaaatcagataaattttagccatgactcaaatattagtaaacatcagaatactcattttgtagaaaactattacaaatgtaatgaatgtgagaaagtgttttatcaatcctcaaagtatccatattcaagaaaagccttacaaccctaatgaatgtggtgaaacttctracccatcctcaaaacttactcaacatcgaagaacttatattggagagagctcacaaagatgtaataaaaaatgtataatagtctttagtcagtcacatctgaagagacataagataattaacactggagagaaatcagtaaaatgtaaagaacgtggcaaagcttttaccaggggcttacaacttggacatcagaaaattcatactggagagaaaccttacaaatg

SEQ ID NO: 166345 - DNA, 432 bp, Homo sapiens
atttcttctatttttcttaatgtttaattaaaatattatttcaggctggacatggtggctgatgcctgtaatcccagcactttgggtcagtgagggaggatcacttgagctcagtacattgagkctgccctcagctatgattacgccacagcacttgagctgaggacagaatgagaccctgtctttagaaaaaaataggctgggtgtggtggctcacacctgtaatcccagcactttgggaggcctaggcaggagaatctcatgagcgcaggagtttgagacaagcccatgcaacataatgagaccccatctatacacaaaatttaaaaattagttgggcatggtggtgtgcagctgtggtcccagatacttggtagcctgaggtgggaagactacttgagcctaggaggtagaatctgcagtaagccatga

SEQ ID NO: 166346 - DNA, 432 bp, Homo sapiens
atttcttctatttttcttaatgtttaattaaaatattatttcaggctggacatggtggctgatgcctgtaatcccagcactttgggtcagtgagggaggatcacttgagctcagtacattgagtctgccytcagctatgattacgccacagcacttgagctgaggacagaatgagaccctgtctttagaaaaaaataggctgggtgtggtggctcacacctgtaatcccagcactttgggaggcctaggcaggagaatctcatgagcgcaggagtttgagacaagcccatgcaacataatgagaccccatctatacacaaaatttaaaaattagttgggcatggtggtgtgcagctgtggtcccagatacttggtagcctgaggtgggaagactacttgagcctaggaggtagaatctgcagtaagccatga

SEQ ID NO: 166347 - DNA, 550 bp, Homo sapiens
ttcaaaattatttttaaaatatcatccttttgtcgtgtttagcaataaaaatctctgctttattagcttcatgtgagctagctatttgacagagattttctcaaatgcctgctcacatcaaatataaatctactagttcttgcagttgggtttacttagccagaaagattacaactttgctgttttcttttcttcctgcttgtgcagkgcttggaggtaaagcagacatgagagataacagcttcgtaggtctttgtgagcatttgcctgtcccttgattgaccctgaacatgcttatgggcttctggattctcaggaatatgtggataattttcaaagcccgaatcccccaggcacctcactcctcagtcttttctcttagatattctacatgacttttgcttgccgcactgatattctttctccaaggtgtgatgagtagttaattagcccttaactatttttgccaaacattaggttattaatttagaattgtttatttttaatgtaggtgtttactgctgtgaatttctctcagtagtttgctgca

SEQ ID NO: 166348 - DNA, 621 bp, Homo sapiens
tttgccaaacattaggttattaatttagaattgtttatttttaatgtaggtgtttactgctgtgaatttctctcagtagtttgctgcatctcatgttttgattttttttgagacaagttcacactctgacacccaggaatgagtgcagtggtttgatcaggggtctcagaagccttgaccgtgtaggctcaagtgaacttgctgcctcagcctcacaagtagccagagctacaggcaggtggtacaatgcctggctaatttttgaaatttttttgtgaagatgggttctcattatgttgcccaggcaggtctcaaactctkgggctcagtcctcccactgctgcctcctaaaatgcttaaattacaggcataagtcacagcactcagcctttataaaacctttgatattttttcttttattctgttttcccatgtttgtaacatgttgtcccaaattacacaatagttctatggtagttgtggcagatttgtgacataaaatagagaaaacataagttacatttaaatttggggtaaacaacaaataactttttagtatagctatgcaatgtttttatatctgtgtataatatgtgtaagcaattactggagtatatacaa

SEQ ID NO: 166349 - DNA, 656 bp, Homo sapiens
ctgctgtgaatttctctcagtagtttgctgcatctcatgttttgattttttttgagacaagttcacactctgacacccaggaatgagtgcagtggtttgatcaggggtctcagaagccttgaccgtgtaggctcaagtgaacttgctgcctcagcctcacaagtagccagagctacaggcaggtggtacaatgcctggctaatttttgaaatttttttgtgaagatgggttctcattatgttgcccaggcaggtctcaaactctggggctcagtcctcccactgctgcctcctaaaatgcttaaattacaggcataagtcacagcactcagcctttataaaacctttgatattttttcttttattctgttttcccatgtttgtaacatgttgtcccaaattayacaatagttctatggtagttgtggcagatttgtgacataaaatagagaaaacataagttacatttaaatttggggtaaacaacaaataactttttagtatagctatgcaatgtttttatatctgtgtataatatgtgtaagcaattactggagtatatacaaataacaattcatcatttacctgaaattcaaatataaccaagtgtgttacatttgtcaacccttgttcatgggagccactgttcttttctcc

SEQ ID NO: 166350 - DNA, 656 bp, Homo sapiens
ctgctgtgaatttctctcagtagtttgctgcatctcatgttttgattttttttgagacaagttcacactctgacacccaggaatgagtgcagtggtttgatcaggggtctcagaagccttgaccgtgtaggctcaagtgaacttgctgcctcagcctcacaagtagccagagctacaggcaggtggtacaatgcctggctaatttttgaaatttttttgtgaagatgggttctcattatgttgcccaggcaggtctcaaactctggggctcagtcctcccactgctgcctcctaaaatgcttaaattacaggcataagtcacagcactcagcctttataaaacctttgatattttttcttttattctgttttcccatgtttgtaacatgttgtcccaaattacacaatagttctatggtagttgtggcasatttgtgacataaaatagagaaaacataagttacatttaaatttggggtaaacaacaaataactttttagtatagctatgcaatgtttttatatctgtgtataatatgtgtaagcaattactggagtatatacaaataacaattcatcatttacctgaaattcaaatataaccaagtgtgttacatttgtcaacccttgttcatgggagccactgttcttttctcc

SEQ ID NO: 166351 - DNA, 544 bp, Homo sapiens
acatgatgactctcattcaggaactacaggagatcctggtaccttcacagccccagcctctacctaaggatctttgcagaggcaagagccatcagcacatcctgctgccggtgagtttctcggtgggcatgtacaagatggacttcatcatctcaacctcctcaacgttgccatgggcatatgaccgtggtgtctagaggctagtgggcagtgtctataccattgtcaggtttttggtgctactgagatctgataaaagggtaatcaatgtgatgtaaactataagacaaatgtttaaaaggttaattgtatgaatcctgtcatgagttaaattattcagagtgttcattatagagaataatccaaagttaaaataattrgataatttatttgtatgtaggataaaagtagtaggagattgcttcttgaagatttaaaattatattgagtgtaattatttgcattaaaataattttaaatgttttgaatagcaagtattgatataattaaactttcgaataacttagtgctttgcctttattcc

SEQ ID NO: 166352 - DNA, 681 bp, Homo sapiens
ctgccggtgagtttctcggtgggcatgtacaagatggacttcatcatctcaacctcctcaacgttgccatgggcatatgaccgtggtgtctagaggctagtgggcagtgtctataccattgtcaggtttttggtgctactgagatctgataaaagggtaatcaatgtgatgtaaactataagacaaatgtttaaaaggttaattgtatgaatcctgtcatgagttaaattattcagagtgttcattatagagaataatccaaagttaaaataattggataatttatttgtatgtaggataaaagtagtaggagattgcttcttgaagatttaaaattatattgagtgtaattatttgcattaaaataattttaaatgttttgaatagcaagtattgatataattaaactttcgaataacttagtgctttgcctttattcctaatgtttatatggaagcatgtggtcaatgtttgatgcattacagctctgagcggtccttctgtattaggtggtcatcatttatrtacttctccataaaagattaaggacctggaaatgtaagatacatgaagaaaatctaagtggagaggctgtttgtggttaagtgataacagtgttgtaagcgatgcatgaggtaggtgttcagtgcatatcctctgcattttattaataaacactgt

SEQ ID NO: 166353 - DNA, 439 bp, Homo sapiens
actcccattttcctgtcttctaagaatataatccttttgaagataatctgcaaggacaaaattactatttgacaaaatttcttaattctgtgtctaataagcctaataataaagctgtttgtgaaggaaaatagtcatgaaaatttatgctcctttttataccaacatctgaaacaaagtggacttcgagatacagaaaagttactgctccacctgcccataattccrtatcctaaatgttgcccgggagtcaaatagcctctaagtaaggcaccttttgattcttttctttacaaaggcccctttcaggctttactcagatgtagaacatgccacaaatctccccattcctcattacttatcccttccagagtctgaggctctgtctctggagatctcaatcctgggaccagtgggggcaattaacgtgcattatgca

SEQ ID NO: 166354 - DNA, 439 bp, Homo sapiens
actcccattttcctgtcttctaagaatataatccttttgaagataatctgcaaggacaaaattactatttgacaaaatttcttaattctgtgtctaataagcctaataataaagctgtttgtgaaggaaaatagtcatgaaaatttatgctcctttttataccaacatctgaaacaaagtggacttcgagatacagaaaagttactgctccacctgcccataattccatatcctaaatgttgcccrggagtcaaatagcctctaagtaaggcaccttttgattcttttctttacaaaggcccctttcaggctttactcagatgtagaacatgccacaaatctccccattcctcattacttatcccttccagagtctgaggctctgtctctggagatctcaatcctgggaccagtgggggcaattaacgtgcattatgca

SEQ ID NO: 166355 - DNA, 597 bp, Homo sapiens
ctctgtctctggagatctcaatcctgggaccagtgggggcaattaacgtgcattatgcaggcttgagtatgtttcatcttcagagataatcatattggagacaaaaactacataatatgcatacacgctcatgtgcagtcacacacacacttacacacacacagatcaggctgttaacatagcagtattccttccagagtttcctctcctaatcttaataaattatctttgcgctaacaaactttttctgccatgagaggcaccattaccttcaaattttgttaatctcagaaactgagaagaaaaaaaaaattctgggtctaaacagtttaataacaaataaacaaaggtaccacacttggcagataaaaaatgactttttgtctatgtgtctgtgcarttaaaacagatttagattccccattgggacaaaaggaaaaacacacaaaaaaaggaaggaggttcttttgaaaaacatactcccttgctccaaatatgtaacaattttttttctctttttaaattcactacacaaactctgtgatgaggtaagaaaagcgacgagggctcttcctgctttttttcttaaaccattaa

SEQ ID NO: 166356 - DNA, 597 bp, Homo sapiens
ctctgtctctggagatctcaatcctgggaccagtgggggcaattaacgtgcattatgcaggcttgagtatgtttcatcttcagagataatcatattggagacaaaaactacataatatgcatacacgctcatgtgcagtcacacacacacttacacacacacagatcaggctgttaacatagcagtattccttccagagtttcctctcctaatcttaataaattatctttgcgctaacaaactttttctgccatgagaggcaccattaccttcaaattttgttaatctcagaaactgagaagaaaaaaaaaattctgggtctaaacagtttaataacaaataaacaaaggtaccacacttggcagataaaaaatgactttttgtctatgtgtctgtgcagttaaaacagatttagattccccattgggacaaaaggaaaaacacacaaaaaaaggaaggaggttcttttgaaaaacatactcccttgctccaaatatgtaacaattttttttctctttttaaattcactacacaaactctgtgatgaggtaagaaaagcgacgagggctcttcytgctttttttcttaaaccattaa

SEQ ID NO: 166357 - DNA, 501 bp, Homo sapiens
gagccaaaacctgtggggcagaaataagaaaaacctttagcagtaggaagcagtgtggagttttttagttttttgaatgcaaaggtttacagagacctgaggaccttgaattaagtgaacatagttacagggggaaaaaatagtaagaactatccctaccatcagcattcaattaacagtagtgagaaaatacagctgtaaacccagttgcagaaagttgaggataggacaaattcagaagctcttaaaatcctggtaagtagaattaaatttaatttaaagccagccatggaaattaaaagatataattaaagtttaattaaaatgtagagygtttaagactttatgtgagtggtatatcactttcttagatgctataaaattaaattagaaatattgatagaaaacatgttcttgaaaatattattttgctgccctgtttcaggtatctctatgtctataaattcaatccctgtcttccatgggtttgctaatgctggt

SEQ ID NO: 166358 - DNA, 501 bp, Homo sapiens
gagccaaaacctgtggggcagaaataagaaaaacctttagcagtaggaagcagtgtggagttttttagttttttgaatgcaaaggtttacagagacctgaggaccttgaattaagtgaacatagttacagggggaaaaaatagtaagaactatccctaccatcagcattcaattaacagtagtgagaaaatacagctgtaaacccagttgcagaaagttgaggataggacaaattcagaagctcttaaaatcctggtaagtagaattaaatttaatttaaagccagccatggaaattaaaagatataattaaagtttaattaaaatgtagagcgtttaagactttatgtgagtggtataycactttcttagatgctataaaattaaattagaaatattgatagaaaacatgttcttgaaaatattattttgctgccctgtttcaggtatctctatgtctataaattcaatccctgtcttccatgggtttgctaatgctggt

SEQ ID NO: 166359 - DNA, 616 bp, Homo sapiens
ataggacaaattcagaagctcttaaaatcctggtaagtagaattaaatttaatttaaagccagccatggaaattaaaagatataattaaagtttaattaaaatgtagagcgtttaagactttatgtgagtggtatatcactttcttagatgctataaaattaaattagaaatattgatagaaaacatgttcttgaaaatattattttgctgccctgtttcaggtatctctatgtctataaattcaatccctgtyttccatgggtttgctaatgctggtctttctgcccatatgccctcactttctatctctgcagtaaaatgtcaccatccttcttaggcaaatcacacactagctcttacaacttccatctgaaaattgcatgccattacatctattcagaaatcgataggcaaatcagggtagtcttttggtcacacctaatttccaagtgtcagggaggtacaattctatcatgcactcaggaggaaaaacaaaatactggtgaacagagtaacaactacaacatttaagcttcctttgttcttcatgtaagcatatgattaaacctttattaaaagaatgtaaaacaactatatgtttaaattaactataat

SEQ ID NO: 166360 - DNA, 616 bp, Homo sapiens
ataggacaaattcagaagctcttaaaatcctggtaagtagaattaaatttaatttaaagccagccatggaaattaaaagatataattaaagtttaattaaaatgtagagcgtttaagactttatgtgagtggtatatcactttcttagatgctataaaattaaattagaaatattgatagaaaacatgttcttgaaaatattattttgctgccctgtttcaggtatctctatgtctataaattcaatccctgtcttccatgggtttgctaatgctggtctttctgcccatatgccctcactttctatctctgcagtaaaatgtcaccatccttcttaggcaaatcacacactagctcttamaacttccatctgaaaattgcatgccattacatctattcagaaatcgataggcaaatcagggtagtcttttggtcacacctaatttccaagtgtcagggaggtacaattctatcatgcactcaggaggaaaaacaaaatactggtgaacagagtaacaactacaacatttaagcttcctttgttcttcatgtaagcatatgattaaacctttattaaaagaatgtaaaacaactatatgtttaaattaactataat

SEQ ID NO: 166361 - DNA, 616 bp, Homo sapiens
ataggacaaattcagaagctcttaaaatcctggtaagtagaattaaatttaatttaaagccagccatggaaattaaaagatataattaaagtttaattaaaatgtagagcgtttaagactttatgtgagtggtatatcactttcttagatgctataaaattaaattagaaatattgatagaaaacatgttcttgaaaatattattttgctgccctgtttcaggtatctctatgtctataaattcaatccctgtcttccatgggtttgctaatgctggtctttctgcccatatgccctcactttctatctctgcagtaaaatgtcaccatccttcttaggcaaatcacacactagctcttacaacttccatctgaaaattgcatgccattacatctattcagaaatcgataggcaaatcagggtagtcttttggtcacayctaatttccaagtgtcagggaggtacaattctatcatgcactcaggaggaaaaacaaaatactggtgaacagagtaacaactacaacatttaagcttcctttgttcttcatgtaagcatatgattaaacctttattaaaagaatgtaaaacaactatatgtttaaattaactataat

SEQ ID NO: 166362 - DNA, 597 bp, Homo sapiens
aaggaaatctgcctccaaaaagtaattaatttgtgacatagcaaaccccagaagggaaaatttgaggtaacacaatgagttcacttgtacacatggtcaactatgtgtcactgagatatccaagtaaagacaaccagtcagcgattggacagaaaagtctcaagctcaggagagggtaatagatatattagatattagaagctgctagcacagaaagggcatttggacctgaagtgggtatatacttcctaagaaatactgcctaagaaatatgtatgagaaaagagcagagwgtctaacgtcaagccaccagcaatgccataataagcacaaataaatatatagtggataggtggagaagcaaaataccaaaaaagaaacaggaaaagtaaataaagagggaaaaaaaaacagaagaaaataagcaaagaaaatgggattttctttgaattttcatttagagagttgtcagtctggtcaaacactgctaaaaagtcaaacaattcacgaacttacaagtaaccatttgatttaggtacatagaaatcactggtgactttggcaaaatttcagagacattgtggagaaggaaaccag

SEQ ID NO: 166363 - DNA, 502 bp, Homo sapiens
aatcagtgcatttacaaatatgtgtataaacacatggctttgggcatttaatttttaatttacataatgcataatattaacaggtaatagttttacatatttacaaggtacacgtgttattttgatacaggtatatagtatgtagtgaccaaatcaaggtaattgggatatctgtcacctcaatcatttatcattactttgtaagcacgtttttaaataaattatagcgtactaatcacacrtttctgtactttatttcacttagaactacttcttggacatattgcttcttatcaaaatgtatacatctatcttaattcttaatggctgtgtagtttttcattctctaaatgtaacatgatttattgattcagtcacctattaatagacgtatttgtttccaagattcagctatgacaaataatgctgaaagcttattaatttatgtagaaatttgcaaaatacacaatatctgaaagaaatattctgaaagtgaaaatgc

SEQ ID NO: 166364 - DNA, 502 bp, Homo sapiens
aatcagtgcatttacaaatatgtgtataaacacatggctttgggcatttaatttttaatttacataatgcataatattaacaggtaatagttttacatatttacaaggtacacgtgttattttgatacaggtatatagtatgtagtgaccaaatcaaggtaattgggatatctgtcacctcaatcatttatcattactttgtaagcacgtttttaaataaattatagcgtactaatcacacatttctgtactttatttcacttagaactacttcttggacataytgcttcttatcaaaatgtatacatctatcttaattcttaatggctgtgtagtttttcattctctaaatgtaacatgatttattgattcagtcacctattaatagacgtatttgtttccaagattcagctatgacaaataatgctgaaagcttattaatttatgtagaaatttgcaaaatacacaatatctgaaagaaatattctgaaagtgaaaatgc

SEQ ID NO: 166365 - DNA, 594 bp, Homo sapiens
cttgcatttctcataatgaaagcacagccatattgtgacacttgttattttatggttcactgaagagccgcaataacaaattttaaatacctatcaaatgtcataaaatgtcatttaatattgttcttcgtttgttaaagggaaaatgaaaactgataaagttcatgtatattttgtgctagttcaataaactaaataccatactmtaagactttcagcaaacatacagtcaattgtaatatggtaatattaaataagagggtactacactttttcaagagaaagtggtcttattaaaaaggttattttaatgatgctctaaacaatttctttggctgcatcacagcataggttcagttcataataaaagttgcctttgaacgaagtattctaaatttttacaagactccaattctcctgtgcaattacggaatttgaaatgtaattctcctggaaccataaaagaattaagaccagagaactgctgttaagaataaagcaagataaaaaggaattgcttcaaagaccctttttattcttctattttttagtgccacgttatattccaagtcactatgttgttatggaaaagga

SEQ ID NO: 166366 - DNA, 594 bp, Homo sapiens
cttgcatttctcataatgaaagcacagccatattgtgacacttgttattttatggttcactgaagagccgcaataacaaattttaaatacctatcaaatgtcataaaatgtcatttaatattgttcttcgtttgttaaagggaaaatgaaaactgataaagttcatgtatattttgtgctagttcaataaactaaataccatactctragactttcagcaaacatacagtcaattgtaatatggtaatattaaataagagggtactacactttttcaagagaaagtggtcttattaaaaaggttattttaatgatgctctaaacaatttctttggctgcatcacagcataggttcagttcataataaaagttgcctttgaacgaagtattctaaatttttacaagactccaattctcctgtgcaattacggaatttgaaatgtaattctcctggaaccataaaagaattaagaccagagaactgctgttaagaataaagcaagataaaaaggaattgcttcaaagaccctttttattcttctattttttagtgccacgttatattccaagtcactatgttgttatggaaaagga

SEQ ID NO: 166367 - DNA, 561 bp, Homo sapiens
tgtatcacccctccattttaaactgttycagagtattttcatttaactcctgccacagtttaagcccatcagcataaccaggcaaggtcctccgtaagctgacccttcttaaacttctagcttagaatttttactccttctgcaaatatttcatccaaattaaatatcatgtagtttcctaagagagattcttctctcttcttctcccaagtccttttttatttcctccttttagagcgtacttcctctcacctttcacctgactcatgttaccagtctgttgagacttagttcagaaatcacatctttcattttgtctttccccaccctctcctctcctatgaattaagtcttgcttctatgtaaacaattagcttagatatttataactgatgctgtacttatatggttctgttgtattccatgaacatgtgttagatctttgaagacaaatatatgttattcatcttatgaaatttgtcctacacagaatttggcacatggttatccattcaaatgtttgtggaataaatatgaataaactcaaaataaagagaacat

SEQ ID NO: 166368 - DNA, 561 bp, Homo sapiens
tgtatcacccctccattttaaactgttccagagtattttcatttaactcctgccacagtttaagcccatcagcataaccaggcaaggtcctccgtaagctgacccttcttaaacttctagcttagaatttttactccttctgcaaatatttcatccaaattaaatatcatgtagtttcctaagagagattcttctctcttcttctcccaagtccttttttatttcctccttttagagcgtacttcctctcacctttcacctgactcatgttaccagtctgttgagacttagttcagaaatcacatctttcattttgtctttccccaccctctcctctcctatgaattaagtcttgcttctatgtaaacaattagcttagatatttataactgatgctgtacttatatggttctgttgtattccatgaacatgtgttagatctttgaagacaaatatatgttattcatcttatgaaatttgtcctacacagaatttggcacatggwtatccattcaaatgtttgtggaataaatatgaataaactcaaaataaagagaacat

SEQ ID NO: 166369 - DNA, 598 bp, Homo sapiens
gttcaacatttgcaaatcaataaacacaatacatcacataaccaaaaccaaagacaaaaaccacatgattatctcaatagatgcagaaaaggcctttgataaaattcaacrtcccttcatgttaaaaactctcaaactaggtattggtgaaacaccgcaaaataataagagctatttatgacaaacccatagccaatatattgaatagacagaaatggtacgatggacataatactattgcacccctactagactacagtgtagtataaacataaactttagatgcactgggaaaccaaacacttccgtctgacttgctttattgcagtggcctggaactgaatccacgatatctgaggtataccactatttgaactgaataaaattggtagctttcactttgtttttacttcttcagcaatcataacaaattttggtgtatttaaagtacagcaaggtaattattatcttcaaagagcccctaaattagtagagaagagaatacctataaaaatgtaaaaacaatgctggtaaataatgacaaatggcataataagggaatagatccaatggttaagaattgcacaaaaataaaaat

SEQ ID NO: 166370 - DNA, 598 bp, Homo sapiens
gttcaacatttgcaaatcaataaacacaatacatcacataaccaaaaccaaagacaaaaaccacatgattatctcaatagatgcagaaaaggcctttgataaaattcaacatcccttcatgttaaaaactctcaaactaggtattggtgaaacacckcaaaataataagagctatttatgacaaacccatagccaatatattgaatagacagaaatggtacgatggacataatactattgcacccctactagactacagtgtagtataaacataaactttagatgcactgggaaaccaaacacttccgtctgacttgctttattgcagtggcctggaactgaatccacgatatctgaggtataccactatttgaactgaataaaattggtagctttcactttgtttttacttcttcagcaatcataacaaattttggtgtatttaaagtacagcaaggtaattattatcttcaaagagcccctaaattagtagagaagagaatacctataaaaatgtaaaaacaatgctggtaaataatgacaaatggcataataagggaatagatccaatggttaagaattgcacaaaaataaaaat

SEQ ID NO: 166371 - DNA, 598 bp, Homo sapiens
gttcaacatttgcaaatcaataaacacaatacatcacataaccaaaaccaaagacaaaaaccacatgattatctcaatagatgcagaaaaggcctttgataaaattcaacatcccttcatgttaaaaactctcaaactaggtattggtgaaacaccgcaaaataataagagctatttatgacaaacccatagccaatatattgaatagacagaaatggtamgatggacataatactattgcacccctactagactacagtgtagtataaacataaactttagatgcactgggaaaccaaacacttccgtctgacttgctttattgcagtggcctggaactgaatccacgatatctgaggtataccactatttgaactgaataaaattggtagctttcactttgtttttacttcttcagcaatcataacaaattttggtgtatttaaagtacagcaaggtaattattatcttcaaagagcccctaaattagtagagaagagaatacctataaaaatgtaaaaacaatgctggtaaataatgacaaatggcataataagggaatagatccaatggttaagaattgcacaaaaataaaaat

SEQ ID NO: 166372 - DNA, 571 bp, Homo sapiens
gtttgttgctcactctgaactagaagtctgtaaattacttgttatccattttagcagaattctattatagaattaaagccartggtgctcatcaaaacattaagaaaaacctaggcaaaggcattccaaattcccaggttaaaacttacaacactggttctacttttcctgcctgtaaaaagttatagaggctgtttcatcaaaattgaatgcttggggaaaaaaaatctaagggaggcagattctgaagtaagtctcttcaggattaaaatctgtctttttctgatatcgactgtgcgactttgtgcaagtaacctaacctgcctgaaccttcgttttcttgtctgtaaaatggggataataatatctatctcatgaggtcatgggactatctttatatctatatgcttttcatggtagaaggtacttggtaagggctctattagtgttagctattgtaacctaaatacatttatttccttcttttaatacctggggaaaggttgtgggtgtcatatgccaagacattaactagacatcttatttctactgattgtaagtttactaaaca

SEQ ID NO: 166373 - DNA, 490 bp, Homo sapiens
cttccttttgctttgctcagggtcagtttcttattccctcatggctgtggtctataccattccccgttagctgctcacctgttttcctaacttgcgattctccacagtttgcagtttctcacctttaagaattttgttcagcttttatcttctcccatatccattctttgagatattatttaccctttaccttcctatatgaagatgacaccttccctgacaacctttgctttatctcaactacattattattttttgtgagatgtatactatccaattatgtttagagttttaaatcaccctactaaaccacaaatattgacagattgggagctttattatatatatacttattatataatacawgtatgtgtgtgtgtgtgtgtgtttccatttccattgcacagtaccaggtacacgttaggaacccagtaaatctgtattgaatgaatgaatgcctacactgaaattttacttcaggttggttagc

SEQ ID NO: 166374 - DNA, 605 bp, Homo sapiens
ggcaacttctcaccgcgagatagttacaaatatagtaccgttgctactacccggtgccttcaatgagcagtcttgacaggggaggcataatctaatcctacttctgctgccaagcgtcattgcacgactcccatttttagtcaaaaagcaatatccccgaccacagctttccaccgccccccggctttttttttttttttttttttttttttkgcagccaatacaagtctattgttgcctctattatgcgccagttaccgagcctttactcacgctcacgtttaactgacactggcgctttttacaatgcagcagcacgagggatctctttcaggaacattttattgaacccatccagtcagaggcatcacctgaaatgaagttgtaaccacaccggcatcggctgaacccaattatctcgtaactcataaattaagaattcacagaggaaaaacacataaacaacatccggagacagtggcatggaggaaaaaaaccctcagcgctggaattgacgctgctgccagacgccccccaataggtttcccaagccgagctcctttgcaagcctattttgggggcaagcagccaacccggcgtccccc

SEQ ID NO: 166375 - DNA, 397 bp, Homo sapiens
atgctccccaaccctgactctttgagcccacccttctctgcccaggcttccaaggtaagcatctgcatctaacgcagtgcmtggctcacagtcagccctccacaaatgctagctgatttgattagatttgacctgggtcaatgtaaataggtgcaggaggagaaacagaagagagaaatcaaaggatgatgactataaggggagccgtgatgtaattttaacctgaaaattgtctgtaaatagtctgcacagtttattcaaacctcagtctttcataatccaattatatgcaaatgcccctgtggtcttccttaccatcttgaatacctggatagagcattttgaagaaccacagtggaactccttgaggtaagaaaacaaaaaagacaaggaattc

SEQ ID NO: 166376 - DNA, 578 bp, Homo sapiens
atttttcttcacattaaagtttgagaactattggtccaagacrgtttttataatgggcaatgggatcatattatttagccaaacttcatagaatcctaatgattttatttcctctggaacacctctaaatttttggaaatatacctctcccctcacctgcaccccatggagattaaaatcaataaatatgattgcatgcatgcattctttactgtgtagaaaaggctttatcctgaacagctcaaaggagacacagctattaatgatgttggtaaatgttcagcagttgattttggtgggaagtgggagagaaagaaagaggatggtttcatctgtggtgttaacccaaccccaagcatttatggttggttgatgaggacactgggcctgctacaagttagtcataggcacaaggaagggagtgaaaaaagaaattgttggaacaaactgatctgattaacatggtccaagtgggtgttggttaaaatcctagaatctggaactactgggatgatctaggcctcagagtacgaatgagacctagatgaaaattagaggtgatagaaacttggccagtg

SEQ ID NO: 166377 - DNA, 438 bp, Homo sapiens
agattacagacttccaagtagttcagattattagctgtcacgcccasctaatttttaaaatttttttgtagagacagggttctcactatgttgcccaggctggtcttgaacttttggccttaaaaaatcctcctgctttatacttccaaagtgctagaattataggcatgcatcaccatgcccagcaatttactttctttactatgatttcaattttagacatgtcaggggcctccctgaataactgcactttttagaaataaaggccagtggttcattggccaaaaagaatttgtcgttaaaaaaaaagcaaatctgtccgatttattaattatgattgtgtgatttgatccaaccaatgatagatggcaaatttcacttttcaatttgtctaggtattagatgaaggtcacccaaaaactgagttggaaaaaaaac

SEQ ID NO: 166378 - DNA, 546 bp, Homo sapiens
agaattctactcatctaaaataatattgtgcattaataatggtctgttactatacattgagaaatttatcaaggactttgaatccatagtatagactgtactttgtgcttacgtacaaaaatgttaaaaattgttgcaatgctcagaactgtgcatggtgatttaatactagaagcactratattaaaaggtggagagacaaaattaggtaaggcaaagactgatctccattccagcttcattctttaagagccatctcaaacgttaccttaaatgaaacctgccctaccttgaccaggagctagtaaattacttgtctatgctgcattctaagtatatttatctatactgcattgaatctagtactttacatgtatatcctcctcctctgtggatttgtcgagatgtgtcttcttcataagtaaattcccagagccccagagtatatggaaaatataaagggctagcgtttttgtaaatgatagaaataggataataaggagatgagataaaatctgcttaataacctaaaaattagctaattag

SEQ ID NO: 166379 - DNA, 603 bp, Homo sapiens
tcatcctggccctgccactactcactctctgactttatggaagtggcttaatttcttttatatttaaaaaaaatgggggtgataatttctcacctactatattcactgggttataattgtaaaatttagttaatcaatttaaaattgctttgaatactctgaaatgatattgaggctgctatatacatcatggtgattttcgtttacrttttgcacatataatgcactttagagaacacttacgccttgtttccttccttaattttgtttcattatttaccatgtacattcagaatagcagtcattaagcgttaatgcaactatggatggtagtaaggcagttatattactgaagggaggtactttattctttctttgctttctaattggattatggtctttaaattatattgtaattcagaaatttgattgagacttattccccttgatttgtcagcttcttagatatattactgaatcctaggtcctgtaaataacaatgaaaattaatgctcaagaaattacatttaatctattgctttgaccaaggttttgctctccgtatttgtatttgcatgcagtttctagaataactttagtttg

SEQ ID NO: 166380 - DNA, 603 bp, Homo sapiens
tcatcctggccctgccactactcactctctgactttatggaagtggcttaatttcttttatatttaaaaaaaatgggggtgataatttctcacctactatattcactgggttataattgtaaaatttagttaatcaatttaaaattgctttgaatactctgaaatgatattgaggctgctatatacatcatggtgattttcgtttacgttttgcacatataatgcactttagagaacacttacgccttgtttccttcctyaattttgtttcattatttaccatgtacattcagaatagcagtcattaagcgttaatgcaactatggatggtagtaaggcagttatattactgaagggaggtactttattctttctttgctttctaattggattatggtctttaaattatattgtaattcagaaatttgattgagacttattccccttgatttgtcagcttcttagatatattactgaatcctaggtcctgtaaataacaatgaaaattaatgctcaagaaattacatttaatctattgctttgaccaaggttttgctctccgtatttgtatttgcatgcagtttctagaataactttagtttg

SEQ ID NO: 166381 - DNA, 592 bp, Homo sapiens
gaattctaaataatatcagtaccttggacacaaaacatatgttactaataaataaaacaatctcagtgaggtaaatgtatttgcatttatgtggcttccatggacaatctaaggtgatagttttgctatgatattgcataagagttaacacatagaccattacaaactctagtgaggaaattgaatgtccatacagagtgttgccgacatccaatgtgctgatgctcatgagggtgatgtgtgctcatcattgctgatacgcgcagaagtctttaggcattcaggattggaacataaaatagtttccttctaatcagcaaaaaacaaaacaaaaaaaaaaaacamaaaaaacatgtatttgccttcaccaaacactatcttctgcataatgaaagaatagaagaaaaccatggaaatagccagcacctaatcagcagcaccttgttgacagtctcactgcttatcagtgagatctgaaggacatttggatcttgtagttagaaagactctgcataggctacacactgacaagcatgcaggactcctgaacgcccactagcgctacattcaatgtatcacagaaagataccaa

SEQ ID NO: 166382 - DNA, 592 bp, Homo sapiens
gaattctaaataatatcagtaccttggacacaaaacatatgttactaataaataaaacaatctcagtgaggtaaatgtatttgcatttatgtggcttccatggacaatctaaggtgatagttttgctatgatattgcataagagttaacacatagaccattacaaactctagtgaggaaattgaatgtccatacagagtgttgccgacatccaatgtgctgatgctcatgagggtgatgtgtgctcatcattgctgatacgcgcagaagtctttaggcattcaggattggaacataaaatagtttccttctaatcagcaaaaaacaaaacaaaaaaaaaaaacaaaaaaaacatgtatttgccttcaccaaacactatcttctgcataatgaaagaatagaagaaaaccatggaaatagccagcacctaatcagcagcaccttgttgacartctcactgcttatcagtgagatctgaaggacatttggatcttgtagttagaaagactctgcataggctacacactgacaagcatgcaggactcctgaacgcccactagcgctacattcaatgtatcacagaaagataccaa

SEQ ID NO: 166383 - DNA, 534 bp, Homo sapiens
aaacaatatgtgtgaggtcgccatgtcttcagacatactctactcttcacggtatcagaaagctgtcttgaatttaaaagaggtgaacctgagacgttattagggagcaaacagaatacaccaaatacaatataacatgtaacaawttctttaactaaatttttctggccataaattatagctatattaaaggaagaggaggaaggcagcataagaaagaaaactgataatgaaagaacatgaactgtgtctgacactgcttttggcacattcacgtatattattatagtgttcacaataagtatgggagtagctctcagtatttccattttacagacaagaaaactgagtctcagaaaaaccaaataacttgctgtggccgctgagctaagagttagtgaagcagaaatccgcacgtaagttttttgtaacacacaacagtgtttaagaatatagactgaattacaatgtaaattcaatagatgggaacttatctcttatcatcattggatcttaaactcacagaaagtggat

SEQ ID NO: 166384 - DNA, 544 bp, Homo sapiens
caatagacactggggactccagaaggatggagggagagaaggacagggctgaaaaacttcctattgtgtactatgctcactacctgattgacagtatcattcacacccaaaacctcagtgttatgcaatataaccttgaaacaaacctgcatatgcaccctgttaatctaaaataaaagttgtaattataaaatttaaaaaattaataaagtttccctggtaagggcagccatagtggattgctactccctactcaagactgtcttagcttttatgtattgttcttaacaggaaccacaccttgatatataggtgtgtatgtgtgttttcttattgtgtgttttcatttccttgggtatagaagctgtattacctttctctgtatttcagtgtatttacatttttctgtatgtagtcagattataagtgcttgctaaaattgagtgaaaaaataggacagaggtatctttacccaataactgtctggattgtgagatgaaaatacagctytctagccagttggctatttttcaagactttactg

SEQ ID NO: 166385 - DNA, 459 bp, Homo sapiens
ctattcattatgagaaaggtgtgaagaaacaagcaatattttatactgttggtgtattagtccgttttcacgctgttgataaagacatacctgagaatrggcaatttataaacgaaaaagatttattggacttacggttccacatggctggggaggcctcacaataatggcagaaggcatagaggagcaagtcacatcttacacggatggcagcaggcaaaaagagagcttattatggaggaactcccatttttcaaacagtcagatctcctgagacctattcactatcaggagaacagcataggaaagacccacccccataattcaatcatctcccctggggtccctcccacaacacatgggaattatgagagctacaaaatgatattgggtggggacacagtgccaaaccatattagctggtaacttagatactaatttgtgaataatgtggcaata

SEQ ID NO: 166386 - DNA, 529 bp, Homo sapiens
ggattacaggcacgagccaccacacccagcygggaggttgattattaaaggccttgaggtagtcttctttgggttaaatctgcttggtgttctataacctttttgtacttaaatatttatatcttctgtgcagcacaccaacatggcacatgtatatatatgtaacaagcctgcacgctgtgcacatgtaccctaaaacttaaagtataataataataataataaaaataaagcttctgcttcagtgcagctaaaaaaaatatttatatctttctttaggtttgttctcttttattatccctttgaatgaagtttctactgctgtctttttctctactctctctttaaggccaataacttttagatttaccatttcaatgctattttctagatcctataggtgtgcttcattgttttttattccttttccttttgtctcctctgagtgtattttcaattagcccatcttctagctcactaatactttcttctgcttgatctatactgctcttaaaggactctgatgcat

SEQ ID NO: 166387 - DNA, 397 bp, Homo sapiens
aaaactaaacaaaatagggacaaagaacaatacaaaagatcaatggaacaaaactttgtttttttgaaatgattcacaaaattgctagaatactagatagcttaaccataaaaaaagaaaaaagaaaacrtccaaataaataaaattacatatataaaggagatattttaacagatcctacatttaaaaaatttaaaaattataaatgactatgtgttaaagttagataaaatccagagaaaatatatacattcccagaaacatatagtctaccatgactgaactgtgaataattagaaaacctgagcaaaccaatagtgactaataagactgaatcagtaataaaaaagctccaaacaatgaaaagcctagggacagacagatttacagctgaatt

SEQ ID NO: 166388 - DNA, 447 bp, Homo sapiens
  misc_feature (1)...(447): n = A,T,C or G
cagggctaacatgcagctaccacttagatagacagaacagtgtgtagagactcacaccatgaacttttgctccaagaaccatcacagaaatgtaccagaaaactgaaataatttacaggtccttttaaagaagtggcacactattgcaaattcyatgagacaagtgaaaaactgtgagttcccaaagtgtgaaagggagaaagcctaccttcaaacacatatccccactagggaatctgaaaatccagatcatgggaaaaggatttaaccttacctatagnctgaaacagattcagggagttgcacaaaatacaaaagtagaaacagaagcaagaagagacttgtaggcacttccagtctccagctcgttcccagggaagccatcccagactatatctcacagaggcccttggggaaggcagccagcaggattagggaggggtcaca

SEQ ID NO: 166389 - DNA, 447 bp, Homo sapiens
  misc_feature (1)...(447): n = A,T,C or G
cagggctaacatgcagctaccacttagatagacagaacagtgtgtagagactcacaccatgaacttttgctccaagaaccatcacagaaatgtaccagaaaactgaaataatttacaggtccttttaaagaagtggcacactattgcaaattctatgagacaagtgaaaaactgtgagttcccaaagtgtgaaagggagaaagcctaccttcaaacacatatccccactagggaatctgaaaatccagatcatgggaaaaggatttaaccttacctatagnctgaaacagattyagggagttgcacaaaatacaaaagtagaaacagaagcaagaagagacttgtaggcacttccagtctccagctcgttcccagggaagccatcccagactatatctcacagaggcccttggggaaggcagccagcaggattagggaggggtcaca

SEQ ID NO: 166390 - DNA, 500 bp, Homo sapiens
gttaactaatacaggccatagcatctctttgtagttaatgaagggacttgtggycaatagacccaactggctaaagggaggagttggaatttcaaagaagagaaattaactatggttatgttatatgcatgtttctatgcttgaaaactgtatcaggtatgagaaaaattttaaagatggtttaaaaaatattcttgaattcacaaatggactttcttttttccacatgctgttatggatgatctgagatatcatctggcctaaccaaatggcacatagcatcaattttattaccttatctgtgtagaatgtgtgtaatcatttctatattttatgatttccagtagtactggacttaacttctcattctgtcatttggtatggtaggaagattgcccccaaaacatccttctggtgacaagacctatataatccctccgcttgagtttcatatttttcttgtgactatgtcacattatatagaaatgagacttttaaaa

SEQ ID NO: 166391 - DNA, 533 bp, Homo sapiens
atttaatatcatatcatttttgtatttttacttttaacttatttgtgtttagatataaaatgagtttcttgtagaaaacaacttgttggcacttagttttatatccagtctgacaatgtctgcttttgaattcaattgtaatccattaacatctaagtattcactgctatggttaggtaaatacaccatttatatttactttgtcrcatctgtcctgcattcctgtttttctctttttcttccttctttgggttagttgaatcattctcagaattctatcttatgccaaccttcggcctagtagctagactctctacctttggctttactaaaaaggtttactttgtggatatgatataaaatgcatttctataagaattttcaatatcactttaggggttcttttaaaactaaaaacaagattagaaaagaggaactctttttttttttttctatttaaaggcttttaattatttggaaataattgtaagcatacagaaaagtacaaaataacactaagaatacccatatgc

SEQ ID NO: 166392 - DNA, 669 bp, Homo sapiens
tatccatatcctgaccttggaattcaggctttgactcagttaagataagaactgcttctctccttgttttggcagagcactgagcttgcttttgacaacactatgtgttagtacatcatgttttcttgtccttgcctgttctatttctgttctttggctcaatgctttctggcaataggctttctacatatataatacctccataccttttatgataataggaccaacactatggttgttgggaagcaaacataccttccacctatgaaccaaaaagaggctgctggatgaagatatataagggtagctttgttgtttgaggtctttttctaggatagaagaaaggcaagtggcaatatttctacttcccatgggaagagatggaattctggagtgaagcttaccctcttgtcttgccatatgaaagtttttatcttagtctcttctgtaaccaacatgtatttcctcctttgtaccaaagccttttacccatagttgtctttctcctgaattcacattcatatcgtctaccmctcctcctatcaagtaataattattgttggatgttattacgaacacttgttatgttcactaaattgtttttctgtctttatatcttgctgtatacctgcagtctctcatgtacacacacttgattttaagctagat

SEQ ID NO: 166393 - DNA, 477 bp, Homo sapiens
tctttcatattgtgtaaagcctcctcctcagtacatcttacagtgagctcatgtaaagaaagttggtttccttatttaagtcttttgatccaggattcaagatgctaaatttragaagtcctattttactgatgactctgaggagtagagaagttcagtattcatcacaattttaatcaacttgctgggtcatttctttaaaccagtagatgagctgacaacgaatcatttaacagcatcaatattcagattattcagatcaagaggcagaaaaaaagagcttgctcccattgccatccatggtgaaactattaagtctctttctcatatgaatttatttttaaagattatcagcagggcttccagaaaaagaattataagagacccaggtattaccaatgctgctctttcaaggcccacactttgaatgtgaggtattaaggtaatacagacatcttcttgctcatcaactactca

SEQ ID NO: 166394 - DNA, 589 bp, Homo sapiens
aaatctaaaaaacattgtggaaatgaacatgaagcaagtttcatgtctcagaatgggacatggacagactgcgtgggataattaagccataaaatgatataatccagtagtagaaagggacctaccatacaaatataagaaatgtagacattagcagaaatcatagagaaagtcatgcactttcatagagtatacaatgaatggttggtaatgttatttaaattttaaggarcagagcagtcccggctaatggaccattctgagtaacagaagaaagttatgattttatgtggaggaacatttccactccaatgacttggagttttcaccatcgagaaatgccaccaacccccaaatgagttggcctatatttgtaatgatcaattagccacatctacctgaatgccttactcatgctttaaattcagcatgaccctgatggtaccttccccacttcctcccaagtccctgtgtctttgtttcctgactctgtgaatgcttccattacctgtcctgcttatcctgaactcttttctcccattcatatcacatagccaactagtcactgaatcattttaattttcattgc

SEQ ID NO: 166395 - DNA, 559 bp, Homo sapiens
cacaatgatctttcattcaaatacgtggtgatagacatttagcaagtaaacactgaaagtgaatgcataaaatacagcaatttcaggaactattaagtatttacaaagactataataatgcagccctgtgatagtgacttgtgattgtgggaagaggtgagggaagaccttcttgcagaggtgatgtttgaggagcaaatagaatgatgaaaaggaaggagcaatggatctcagttttctttcttctagacccattacacagcaaattcacaaactttaaagtaggaaggagcttggcaagttcaagaaatacaaataagccagtgtggcagaaccccattggtgcaagaataaagacaggagtttgaagaagagtcgtaggtcagatagataycatgtctggtacgtactggcaaaaagtttggacttgatattcaagcattggggcagccactggagaggttggattgaaagagtggtatcacctaattaagtttttctacagatctctttggtatgggaagaaattggattataaggtgcagaggctggaaaaagg

SEQ ID NO: 166396 - DNA, 619 bp, Homo sapiens
aaactcataccataacaggtcacccgttagaacaggtcaatggagaaagatgagcactgagaaaatgcggaaagactgggccttccctatcctctgtacaccattgtgtttcagctcactctccacaaaaatgatgtcctggagttctaagaaagaaaacagtcatagagcacagaaatacagggctgcgtgttactggatgtgagggaaaactgtagacatggggacaaagaaaaaaatagaagcaccaagtttaacttaggggagaatcaaccatcattatggttgcttgagacagaacaatgatttaaaagggagaaactaaataggagttgttactggaacagtgtttaacctgcatgtgttttccctactccctcatcccaygcctgctaatgtcaatagtgataaaaatgagctagatggaagagggttgaaggtggtcagtgtaatactttagaaaacagattcatgtatgactcaaatacctgaagctttagggattccataattaaagaacagaatatagaaggaataaaaaacatactgaacagcccaagaatctctagtaaaagtgaaagattagacagagaaacagaaaactggaaaataaaaccag

SEQ ID NO: 166397 - DNA, 499 bp, Homo sapiens
ggctttgcagggtacagccccctttcctgctgctttcactggctggaactgactgtctgtggcttctccaggtgcacagtgcaagctgtcaatggatctagcattttggggtctggaggatggtggccctcttctcacagctccactaggcactgcccaagtggggactaggtgtttggggtctgaccccacatttctcttccacattgacctagtagaggctctccatgagggctctacctctgyagcaaacttcggcctggacatccaggagtttcaatacatcctctgaaatctaggtagaggttcccaaacctcaattcttgacttctgtgcattcacaggctcaacaccatggagaagctgccaaagcttggggcttgcaccctctgaagccatggcccaagctgcaccttggccctttttagccattccaggagcagctggaatgcagggcatcaagtccctaggctgcacacagcagggagccctgggccca

SEQ ID NO: 166398 - DNA, 590 bp, Homo sapiens
tgtctaattggggtggacagatacactccatccgtgggaaacaaccccttcctgtccagatcagaggttgctgtcagtgctaagcctataagttctgaagcccagagtcaagaccgaaagcccaggccagcagcattcagggctggtgtcagcaaccaggcaggagcctaggcacaaacaaacggaagttgagggctaagccatgagccaggaatcagcctggcgaggagccagggggcaggttgagagcagactgagcagccacggcccccaccagcagggtgatcaatgggtcagaggatgctctgcagacagacagcaaccaggaagacacagataaccatgagcaaagctgggaagataggccaggatcacggcccatctgcaggaaggggaatgggaagttggcagagaacaggatcaaggaggacaagcatctcggatggtctcactgccagtaagaaagctgctggttcttgcatrcttgcatacttcctgctgggacaaaaagcaagctcaaatcagcccaaggcttctgggtctgtcctaaggataggatgggaaggtaacactgtgcctctgtaacagtt

SEQ ID NO: 166399 - DNA, 557 bp, Homo sapiens
tgggtaatttataaaggaaaaaaaggtctatttggctcatgattctgatggctgggaaattcaagattgggcatctgcatctgrtgggggcctcaggctgcttccgatcaaggcagaaggccaagaggagccagcctgtgcagggaccacagggtgagagaggaggcaggagagagctgggaggtgccaggctctttagcaaccagctctgtgggaagtaatggagtaagaagtctatcagtctctatcaaggcattaaatctattagggcattaatctattcaggagggatccacccccatgacccacatgcctcccattaggccccacttctaacactggggatcaaatttcaacatgaggtttggaagagaaaaacatctccaaaccatagcaactctgacaggatttgctgatggaccgtgtgaggtgtgagaaacgataaagactgattagtccaagagacattcctgagccacaggaaggatgttgttgcctttgctgagatgggaagaagggaggcagaccaggctgcagggaatgcaaggagctcaata

SEQ ID NO: 166400 - DNA, 557 bp, Homo sapiens
tgggtaatttataaaggaaaaaaaggtctatttggctcatgattctgatggctgggaaattcaagattgggcatctgcatctggtgggggcctcaggctgcttccgatcaaggcagaaggccaagaggagccagcctgtgcagggaccacagggtgagagaggaggcaggagagagctgggaggtgccaggctctttagcaaccagctctgtgggaagtaatggagtaagaagtctatcagtctctatcaaggcattaaatctattagggcattaatctattcaggagggatccacccccatgacccacaygcctcccattaggccccacttctaacactggggatcaaatttcaacatgaggtttggaagagaaaaacatctccaaaccatagcaactctgacaggatttgctgatggaccgtgtgaggtgtgagaaacgataaagactgattagtccaagagacattcctgagccacaggaaggatgttgttgcctttgctgagatgggaagaagggaggcagaccaggctgcagggaatgcaaggagctcaata

SEQ ID NO: 166401 - DNA, 583 bp, Homo sapiens
ctacataaaacttttgccaaaataggatgaagtaggcaaatgttacagccaaaataatatttcactgctaatagaaaaacaggcagaaaaaactaccttgtcaccttttctgggaaaagcaaaaataaagttgtatttcatccttaattttctaccgtgtgggataaaataaaaggaaaattacttstgggcaatagtgcacatattatagaataatgagccatcttaagcagttgggcaagaagcagaacaacaaatgttcactccagaaaagaagagaatcatgcaaaaataatagtgttgttttcagaagtaaaccttaaaaagaaatcaaaagggagatataatcagatacactatcaagggccaactaggaatgccacacgtatcattgttaaagagacagtgtgacgcttgggtatgcactgcgaaatttggcacttgggaagctgatctgattcacacctggcttctcactgccctcatggccctctctacctgcagcaccaaatcaaaccatttcatatcagctttctcctctctctctctctctataattgttaattaattgaacactacaaca

SEQ ID NO: 166402 - DNA, 389 bp, Homo sapiens
taatatttaactaaaatatttaaataatgtaattagctcccttgacccgacatctcagatgaaacctakagacttggaaataaccttcatctaccatcttctcctcacacacagcctatcttgtgtttatcatgtgcttactcacctttttttttttttttttttaataactcttgctcaggctgggattacaggggtgagccactgcacccggcccttactttcctttttatataactttattgcgtctacatatattcctacatatagggatacacacagttagtagatgaaaagtatgttttggacctcccccaaaaaagtcattatatgaaaaagacatgcgcacatatatatagcagcacaatttaccaattgcaaaaatatgg

SEQ ID NO: 166403 - DNA, 389 bp, Homo sapiens
taatatttaactaaaatatttaaataatgtaattagctcccttgacccgacatctcagatgaaacctatagacttggaaataaccttcatctaccatcttctcctcacacacagcctatcttgtktttatcatgtgcttactcacctttttttttttttttttttaataactcttgctcaggctgggattacaggggtgagccactgcacccggcccttactttcctttttatataactttattgcgtctacatatattcctacatatagggatacacacagttagtagatgaaaagtatgttttggacctcccccaaaaaagtcattatatgaaaaagacatgcgcacatatatatagcagcacaatttaccaattgcaaaaatatgg

SEQ ID NO: 166404 - DNA, 389 bp, Homo sapiens
taatatttaactaaaatatttaaataatgtaattagctcccttgacccgacatctcagatgaaacctatagacttggaaataaccttcatctaccatcttctcctcacacacagcctatcttgtgtttatcatgtscttactcacctttttttttttttttttttaataactcttgctcaggctgggattacaggggtgagccactgcacccggcccttactttcctttttatataactttattgcgtctacatatattcctacatatagggatacacacagttagtagatgaaaagtatgttttggacctcccccaaaaaagtcattatatgaaaaagacatgcgcacatatatatagcagcacaatttaccaattgcaaaaatatgg

SEQ ID NO: 166405 - DNA, 389 bp, Homo sapiens
taatatttaactaaaatatttaaataatgtaattagctcccttgacccgacatctcagatgaaacctatagacttggaaataaccttcatctaccatcttctcctcacacacagcctatcttgtgtttatcatgtgcttactyacctttttttttttttttttttaataactcttgctcaggctgggattacaggggtgagccactgcacccggcccttactttcctttttatataactttattgcgtctacatatattcctacatatagggatacacacagttagtagatgaaaagtatgttttggacctcccccaaaaaagtcattatatgaaaaagacatgcgcacatatatatagcagcacaatttaccaattgcaaaaatatgg

SEQ ID NO: 166406 - DNA, 429 bp, Homo sapiens
catccctggccccattagttcacttcggccttgactctaacatcaccactgccctgaacaactttctataaggccaycccatagttaagcaagtggactgcaccaatgtcctccttggttgctgctacatttgacactcttaaacatgctgctcttgaaatttcttcctacctatgtgacatttcactattactgtctctcctacattcagtttgctaggtcctctttcttccctaaatactaaacatcttcccaagaccaagagcatttttggcccttcgttttcctctctgtgtaatgaaccctctctcatagcatctactatgtcaaatccacaagtatgacttttacccatgactagtttattgtcttccactaacactcaaacctgaccaaaactgagctgacttattgtggtgtgcagaattc

SEQ ID NO: 166407 - DNA, 429 bp, Homo sapiens
catccctggccccattagttcacttcggccttgactctaacatcaccactgccctgaacaactttctataaggccaccccatagttaagcaagtggactgcaccaatgtcctccttggttgctgctacatttgacactcttaaacatgctgctcttgaaatttcttcctacctatgtgacatttcactattactgtctctmctacattcagtttgctaggtcctctttcttccctaaatactaaacatcttcccaagaccaagagcatttttggcccttcgttttcctctctgtgtaatgaaccctctctcatagcatctactatgtcaaatccacaagtatgacttttacccatgactagtttattgtcttccactaacactcaaacctgaccaaaactgagctgacttattgtggtgtgcagaattc

SEQ ID NO: 166408 - DNA, 410 bp, Homo sapiens
aaagcatactttaaccttaagttgcatgyttgctgttggcttttcacaggtgccatgtatctggtgtagaaagttctctattcctggttcattgagtttttatttttatttgtaatcattaaagcatttggattttgttaaatgtcttttctgaatctatcgacatgatcatgcaattctcgtttcttattctatggataagatggattaccttaatggattttgggctgttaaaccaacctgagattactagtataaatttcactttgtcatagtgtataattcttttatatgttgctagatctgatttgttagtattttttaaggaattttgcatttatacttatagtagttttatttttctatgctatttggactaatttttgtatcaaggtaacactggcctcaca

SEQ ID NO: 166409 - DNA, 410 bp, Homo sapiens
aaagcatactttaaccttaagttgcatgcttgctgttggcttttcacaggtgccatgtatctggtgtagaaagttctctattcctggttcattgagtttttatttttatttgtaatcattaaagcatttggattttgttaaatgtcttttctgaatctatcgacatgatcatgcaattctcgtttcttattctatggataagatgkattaccttaatggattttgggctgttaaaccaacctgagattactagtataaatttcactttgtcatagtgtataattcttttatatgttgctagatctgatttgttagtattttttaaggaattttgcatttatacttatagtagttttatttttctatgctatttggactaatttttgtatcaaggtaacactggcctcaca

SEQ ID NO: 166410 - DNA, 410 bp, Homo sapiens
aaagcatactttaaccttaagttgcatgcttgctgttggcttttcacaggtgccatgtatctggtgtagaaagttctctattcctggttcattgagtttttatttttatttgtaatcattaaagcatttggattttgttaaatgtcttttctgaatctatcgacatgatcatgcaattctcgtttcttattctatggataagatggattaccttaatggattttgggctgttaaaccaacctgagattactagtataaatttcactttgtcatagtgtataattcttttatatgttgctagatctgatttgttagtattttttaaggaattytgcatttatacttatagtagttttatttttctatgctatttggactaatttttgtatcaaggtaacactggcctcaca

SEQ ID NO: 166411 - DNA, 504 bp, Homo sapiens
aggtaggtaaccttctgatgattatactcaccctccctcattgcaaacctcccgttgttattgtcttggctctggattccctcaaaaatagactatgaaacaaatatctggggtcagatactttaatcagaaattgagtgagaaaacacagaaatggagaaaatgaaacagaacatgaagccagtgtgaatgagtagttactgctatgtgctcagtaatgatggaggtatggagattgtctcaaactaactttacaaagagatggtgatgctggaatccccatctattattgcttaaggattgccttagaatcattaactctccacccctaactccttctttgttcctatgtgtggttgagaagcactggttagcctcaagaagcttgcaggcaggcccaaaaatcagaaagacaggmatgatgtggggagcactcagttagctggaaacaggtgaatttcaggtgaacgcattgagtccaggacatacaagacaagtcatcag

SEQ ID NO: 166412 - DNA, 583 bp, Homo sapiens
acactggcctcacagaataaattgggaaatgaatatttctctttttagaaaaagtcagtcaggaattaatatcaactagtcaaccctaaccaatatgattactattataaattattaatttctctaatttttattttcttccttctgcttgctttaggtttagtttgctattctttccagtgccttaatgtggaaggtcatattatctcctcctttcgtttgtcttttcattttcgaaatagtgtctttttagcatcaggtgagctccccaggttggtagtactccatgtttattgctgtacaacaatgacaggtaatatgtcctgaagacaatggaaacttaacattcaaaatcctcctagattccaccttatgtgatatgtctcttcctttgattggtcctcatttctaccctttctctcttataaaccatgagtacaatggcattcaatgagttctgtgagtctttttagtaaattcttraaactgagggtgttctggggaaacccctgaactggcagttggtgaaaacagtgcgaatcatcttatatggcctctttcattgaactttgcagctggaccc

SEQ ID NO: 166413 - DNA, 512 bp, Homo sapiens
acttattattatagaaaatgctgaacttaacagttaagatacaagtagttaaaaatgattgtatttaaggagatctagaaaatttaatctatacctgtaatgtgtgagaagtattagaatagtgcttgtatttctggattggcatcgatttctattgagactggaaacataatagaagtgagcaaaaaagaatttaaattgtggatacttgagttttatacctaggatttcaagaaatacattttgttactatcaaagcagttggcacaaacgtgtacaaaattccctaattgtgtctatgtggagaagacatagacaaacagagaatagcaaaacagaaatagcaaaaaagcagaaataaattttacctrtatttttaagtaaaagccaattagagaaggaaaacatgaaatttgtgttttatcaaaatttttctctttctcataatatagttgaatatattactggaaaaaatttgaagcactggtatgttcacaactaaaagtaaatta

SEQ ID NO: 166414 - DNA, 558 bp, Homo sapiens
aaataatactatacaaaatcaagaatagacagtcactcctagacttaaartaagagtgtgtacatttgataatttaatccaatgtatcaggtaaaaacttgaacaaaccttttggcctcttccataaaattcagggaagcatgtcctccacaaaacagtatcaaaatataaataaaagactggcttaagatgaaaggaaacgttatgaatgaaaagaagccagatgagaggcacttaactgagaatgaaaggaaactgagtggacaaaataattatgagaagatgaaccttcaaatcagaaagagggaaaaaagtttatttgatactatgggaactcaaaagagagtgaacacaaatgtgaaaattccaagaatacaggaaagtagcataactaaattaagagcatgagaaaatgtatagaattttgagtaataagaacagaaatcaaaagttagtattgtatgttatatttcagtagagcaacactgaagaagaatgaaaacaagaaataatattaaatatgaacatatggagaacagaataatattttaaaaattt

SEQ ID NO: 166415 - DNA, 422 bp, Homo sapiens
tatttgtcctaatgctctccctccccttgccccccaccccacaacaggccccggtgagtgatgttcccctccctgtgtccatgtgctctcattgttcaactcccacttatgagtgagaacatgcagtgtttggttttctgttgctgtgttagtatgctgaggatgatggtttccagcttcwtccatgtccctgcaaaggacatgaactcattcttttttatggctgcagagtattccatggtgcgtatgtgccacattttctttatccagtctatctatcattgatggccatttgggttggttccaagtctttgctattgtaaacagcgctacaataaacatacatgtgcatgtgtctttatagtagaatgatttattaccctttgggtatatacccagtaaagggattgctgggtcaaatg

SEQ ID NO: 166416 - DNA, 536 bp, Homo sapiens
gctaaccggcccttccactaaccccgcccctgtcagcctcccctcctcgtgtgactccagaggaagagtcccttgccctggcctggcctctggttcctcacctgaaaaggtgaaggggattgtaccgcagcatcccaactatctccttcagcaccgagtggctgtctgactcctccggtcagaggtaccagaataggctaaatatccccagcrgctgccatcccagcgggtgggatgagagcgagcctgagctctgctcccttgatctcctctgcgtctctgctggatggcaggggtgagctggagcttccctggaggctgccacatgctggactcccccaaagtgctgactcctgagcctctctgctcgttttctatgcattgaacttcaaacaccagagaggcactcaggcagcaagacgggtggatttggccattatgttctcgctctcctttttcccttcatctccctcaagacaggattatgggttgcacctattaattcttgtctggaagcagcaagccaaccttttctc

SEQ ID NO: 166417 - DNA, 549 bp, Homo sapiens
gacaaatggcatcatgcgctaaagagggcccagcttccctaggcccggcggacttggcttctcacctggctctccaactaactggtgctcatctgcktggctttccaccaaccaattgccttttttctctttcatccagccagcctcgggacaaaatccaaatgttggtcaaagtcctttttctcccaggtagggagactgtgagcctgggctccagccagagaggatgtgctgctgtccagggcccacaggaaggctgcacggttcatgcatcctggtgtccccatgagaatgcatctcattgcccaggtgctcaaggctgccaggctggaggagtgcacatgatggtgaagacgaccttggtcactggagctttccacatgtggacactatgcatatagtatcatgcgttcctccattctagctgtgtgactttgggcaagtaactgagtatctccactacctcaatttccttataaatatatataatgtgtgtatatatatatgtgtgtgtatgtgtgtataatttatgtaactatgtatataata

SEQ ID NO: 166418 - DNA, 549 bp, Homo sapiens
gacaaatggcatcatgcgctaaagagggcccagcttccctaggcccggcggacttggcttctcacctggctctccaactaactggtgctcatctgcttggctytccaccaaccaattgccttttttctctttcatccagccagcctcgggacaaaatccaaatgttggtcaaagtcctttttctcccaggtagggagactgtgagcctgggctccagccagagaggatgtgctgctgtccagggcccacaggaaggctgcacggttcatgcatcctggtgtccccatgagaatgcatctcattgcccaggtgctcaaggctgccaggctggaggagtgcacatgatggtgaagacgaccttggtcactggagctttccacatgtggacactatgcatatagtatcatgcgttcctccattctagctgtgtgactttgggcaagtaactgagtatctccactacctcaatttccttataaatatatataatgtgtgtatatatatatgtgtgtgtatgtgtgtataatttatgtaactatgtatataata

SEQ ID NO: 166419 - DNA, 549 bp, Homo sapiens
gacaaatggcatcatgcgctaaagagggcccagcttccctaggcccggcggacttggcttctcacctggctctccaactaactggtgctcatctgcttggctttccaccaaccaattgccttttttctctttcatccagccagccycgggacaaaatccaaatgttggtcaaagtcctttttctcccaggtagggagactgtgagcctgggctccagccagagaggatgtgctgctgtccagggcccacaggaaggctgcacggttcatgcatcctggtgtccccatgagaatgcatctcattgcccaggtgctcaaggctgccaggctggaggagtgcacatgatggtgaagacgaccttggtcactggagctttccacatgtggacactatgcatatagtatcatgcgttcctccattctagctgtgtgactttgggcaagtaactgagtatctccactacctcaatttccttataaatatatataatgtgtgtatatatatatgtgtgtgtatgtgtgtataatttatgtaactatgtatataata

SEQ ID NO: 166420 - DNA, 311 bp, Homo sapiens
aagctttctttatatatgtatttgtatcattttatgggaggtacatgtgcagttttgttgcatgcgtagattgtgtagttgtcaagtcactcctgttagggtatccatcacctgrataagatacactgtacctattaagtaatttgtcatcagccatcccttcaccccctcacccttctgattgagtctctgtcgtccatcaacccactctctgcatccgtgtgtacacgttatttagctcccacttatgaatcaggatgtgcggtatttgtctttctgtggaggctctctttagaacatggcattctcag

SEQ ID NO: 166421 - DNA, 439 bp, Homo sapiens
agaattcctttcctttacttcattcattgaatttcatacatgcaagggtgcatgcrcgcacacagagacacacacagcttctgttctgggttttgaattattgggtggaacagtggacaacttccagatttaggacaaaacctttgcatgcatttggatcattctgaggtttaaggcatagaaggctcaaaacaggcttacaaactccaaaatcccgagaaacagaatttgttctgtctctaagtgttgtaaataaggcttctaacaatagttaatagttcatgaatgcctagtatgtgtcagacactctgctaagtgctttatgtgtactgtgtctatatctagttctatgataggtactgttactatttacctgttagaaattaggacactgagagatagaaagctcaggaaacttgcccagggaccacacacagga

SEQ ID NO: 166422 - DNA, 416 bp, Homo sapiens
tgcatgcacgcacacagagacacacacagcttctgttctgggttttgaattattgggtggaacagtggacaacttccagatttaggacaaaacctttgcatgcatttggatcattctgaggtttaaggcatagaaggctcaaaacaggctyacaaactccaaaatcccgagaaacagaatttgttctgtctctaagtgttgtaaataaggcttctaacaatagttaatagttcatgaatgcctagtatgtgtcagacactctgctaagtgctttatgtgtactgtgtctatatctagttctatgataggtactgttactatttacctgttagaaattaggacactgagagatagaaagctcaggaaacttgcccagggaccacacacaggaagctgttgatctggaaatcgaattc

SEQ ID NO: 166423 - DNA, 390 bp, Homo sapiens
gcttctcgcccggcgttccagggtggtcagttcaaatgatagttgattcctggctgctcttgttggcttgaatgggagattagataaaaatgtttgagaatttccctgtacttagtgtgggaatttgaagaaccagaatggtttagttacttcctgcttctcccactcctctgcctctgttcacccaaacgwacattgtcatctctttaatgtccatgaaatttgaaactgaaaggatggttaactggtctgcatgcttattttacacatgagaatacagaggtccaggctaggcaaatgacatgcacagggcggctcagtttggggcagacctagggttggaatcttccccagttttctggatccctatgtatagtccagaaagagttc

SEQ ID NO: 166424 - DNA, 570 bp, Homo sapiens
tgcagtgcattatgatcagacctgtgaatagccactgcactcaagcctagggaacatagtgagaccgccatctctctctatttttttttaagacggagtctcactctgttgcccaggttggagtgcagtggcgtgatcttggctcattgcaacctctccctcctaggttgaagccattctcctgccttagcctcctgagtagctgggactacaggtgtgtgccaccacacttggctgatttttgtatttttagtagagatagggtttctccatgttggtcaggctgttctcaaactcctcacctcaagtgatctgccctcctcagcctcccaaaatgctgggattacaggcatgagccacggcatctggcaagagccccatctcttaaaaaagaataataataatcaaatttcttctttggtaaatgatgggtttaagtggtgtgtctcctctgtaatttactttagtaatttaygtttttcaagaaaatgagccctttttttcaggttttcacatctatacacatataattggataagattatatgattctttaatatcctctatatca

SEQ ID NO: 166425 - DNA, 553 bp, Homo sapiens
ctaagtgtggcataaacatacaataaaatattatcagccttaaaaaaatgaaatctgacacatgctatgatacagatgaaccttagaaacattatgcaagtgaaataagcacacacaaaagggcaaatattgtgattctacttaatgaggtaccgagaataaataaactcatagacacagaragtaggataaaggttactgaggtctgtgggaaagaaagtgagggtcattgtttaatgggtacagagtttctttttgaggtaaccactaagttttagaaatagaggtgatggtaacaaccatgtaaatactctagttcccatctatcttcagctttgccttctgcagttttaattgcccatggtttcaattacctgtcaacatcagtccaaaaatactaaatgagaaattccagaaacaaacaatgcctaagttttaaattgcgcaccgttctgagtgacctaatgaagcttgtgtcttcccactccgtcgtgcctgggatatgaatcatccctttttccagtatatccaggctatagatgctacctgtcca

SEQ ID NO: 166426 - DNA, 580 bp, Homo sapiens
ggtgtgctgtgcctatgaaaagttgtctaattcattggacatttctgtagataataycaatctcagaaaagagagacagacatgaaacagcagaagcaaagcaaatgggcaggaaagggaaagaatttctaaaagtggtagtaagcagaacaaacagctgtttgctacaggagcaaggctgtggaatctagagtctccctactctatagcgtggttcagggatcagcattgccagtatcagttgtgagacatgcagaatcttgggcctcaccctagacctgtggaatcagaatccgcactggaactagaacccgctttggttcacatgcgcattcaagtttgagatgctttgctctagaaaactatggcaggtaagcatgacaagtggaaatatggtccatgaggtccagaacacatttcagattttattttgcaaatgaaggaggataaaggaagattttgagcatgggaattattttagaaaaagtaataagacagtttgtattaaaaattggaaatatatgtatacctacatgcatatatacatagatgtatatgaaacttataaaaacaaaatcct

SEQ ID NO: 166427 - DNA, 610 bp, Homo sapiens
ctattttacttaaactaactagtatctggtctccactactatattgcctctccaccttccacgcccacgcctattctatactttcaagaacagcctaagatcttctaaaactggaatcaaatcatgccactgcctacttggattactctgtgatttcccatctcattcaagtgttaaagcctacattcttaaatggcctacagaaaactgcactgactccttccctgtaccccttatcatctctaattgctcctaaaggaccaggaaagctttgacatcagtgccttagcactttgactttgcttgtctattttttatttttatcatagtatatttatrtgttctgcttggaacgttcttttgtcaataccctcatggactgcttctgtgtttttagatttttgacctatatattatcttctcatgaagttttcttagccaaggtttaaaaactgtttttgaaatgcaagcactctctatcctccttccttgtttaattttgatcatgagtacttagcaatatctaatatattatatcttaagaaatttatgaacatgcaagcttcagaagatgtctattttgtctgctgctaaattgccagccctgtaa

SEQ ID NO: 166428 - DNA, 427 bp, Homo sapiens
acccgggaggtggaggttgcagcgrgccaagatcgtaccactgcactccagcctgcgcaacagagggagactccgtctcacacacacagatgcacaaaaaatgtccacatacaaatgccgtcacttttaattttaaaaataataaataatatttgcaaaaagttcaatagtagagagagtagaaaaagtccctcgtattcccgctttttggaaataaccactgagtttcagcaatcaaaaatcttcatgtgctccatgtcaagtacatgcacacatacattatgattttccatagttctggtacacactgtggattcttcttgtaggagtgaattccagagaaggagacttatgttatgacttatgttatgaccaagctaagaaaatcgttgtcaatatttctcagaagtacatttttttaaagtta

SEQ ID NO: 166429 - DNA, 549 bp, Homo sapiens
atgaaggcatagttattctccttttaactctgttaaatcatgtaaattaatttttaaaatttcctaatatgtttttaaaacttatctaacacctgttaatctttttagtagaaaaaaagaacatttttttctagagccttcaatgtccagaaatattttttctccttgtagccccaacacacaacacagagtacagcacataaaaggagctcaatatatgtttctcaaatgaagatggagatgaataattcagatagatagatagatagatagatagatagatagatagatagatagatagatagatcttggactcaatgtacctttagtatgacccagctaactgccatctcctgaactaagtactgtagctataattgtacagtaaaacaaacattatggcagatcwtagaaaagccaaatatgtttgctttctaagagatgcctcttgactttccaaaagccttcaatacccaaaagaaggaagctctgctggtagaaagattagaaattggctcatatttgaaatcatgaagacttggcctataa

SEQ ID NO: 166430 - DNA, 584 bp, Homo sapiens
gaattctaaacatcataaacagaaatgagttaacattacctaaaagatcaccaagagaaaatatgatgaagaaactgagattagaatatcaatacacaaattgttataatcggtattcaaaccagaaaattatttcccttctgaaataattaacaaaacagaaatagagacatagaacctcataggagaggctctgtgaggttcccagttttaataatacagactttcataaggttactcatttctgcagcaaaatttaatcagttaaagtaactcttgctatagaagatgttgtgccttttcataaaaacagttccagaagctatttgtcctaaaatttaagaaggaggccgggtgcagtggctcatgcctgtaatcccagccctttgagaggccaaggcrggtggatcacctgaggtcaggagtttgagaccagcctggccaacatggtgaaaccccatctttactaaaaatacattaaaaaaaaaattagccgggtatggtagcgggtgcctgtaatcctagctacttgggaggctgaggcaggagaattgctcgaacccaggaggtggaggttgcagtga

SEQ ID NO: 166431 - DNA, 520 bp, Homo sapiens
caaaggcatgaggtctacttyagggcactgattaactctaccattgagagagatgcccttggggagtgggcagtttgtctctacaaagtagacctcaggaaaatttctctggcatctggcaatgatgcctctctcctcattagaacagacagtagcaaaagaaatcaaaggggcaggcagcagtccagagaaggctatctctcactctatgcccaccaagtgatggcagttctccatgtcctttcacccttcatctttccaccacgcgtacaagttaatcaagtgacagagttcatggatatgtatgaaacagatttagagatacattatttcttaatttggaaaacatctttagcagaacacaaaaagtttcaatgtatccattaagtttatacggtaaactttaagtaactaaaatttgcagagaacactaaatgtggagttttgcctaaaccaagctcatgtctgaatccctgaagaggaaaatattgctgaagctttttttagcaagttttactga

SEQ ID NO: 166432 - DNA, 461 bp, Homo sapiens
ccatggcagaaccagcatgagaattcaggtccagtggctgccagctcaatgggtttcccatcaaactctgacatgtttcaacctgatgtcttttccacatgggtttctggaaacaaaagtttctgtaagtcaggaaaatttttggaacctggcygcccccatttaacctggtttctgtagtatataagcaaggctggaaaactactgtaactactgatacatgcctctgacggcagccttgctcaggagagttatatgaaggcatgtgtttgtgtgtgtgacagtgggtgaatggggggtgaatagtgttggtggcagcaatggaggataacattcagtagatcatcatatttcctcatattttcccatcttctgaaattactactccttcctaaaaaccattagtctggttttggcttcaggctgctggaggaaagcattatttagtgagtgctgcaggg

SEQ ID NO: 166433 - DNA, 468 bp, Homo sapiens
tgactttattgaccctcttcctctataaaaagtattaaaaattatattttatgacgtgttggtgtaaggacaaatatatttatattatttttaaatttttaggacctaaaatatttttctctttgatcttaaaakaaataaaaacattttctgaacttctaaacatattttggacactagaccctgtaatggataagttggtcttgagtctctgggggtggctgtaattatggaaggaggttgaggattcaggaatcctagtctcagccaagtatgaactgataatcagtgaaaatctgagcttgagaagagtctaaaacaaggattgagcttatatagcttgtttaaaaagtctgagtggaggccaggcacagtggctcatgcctgtaatcctagcactttgggaggccgaggcaggcagattacaaggtcaggagattgagaccatcctggctaacatggtgaaaa

SEQ ID NO: 166434 - DNA, 561 bp, Homo sapiens
aatcagttataactttggcccaacataagaagcagttcttaggaaaggtatcaggttggaagaatacaaatgagctgttaggaggacttgagaamctgttgttgctgcttagggaatttggcagtacagtgtcattataagcaaatatgttatgcatgtcattccatagtgaaacagtttttgtaaaaggcacagtagcatctggatatctctaaaattcttaaggtacagaaaacagaataattaaataagcaataagatgtcatcctgtgggggaggaacttatataagagaaactacagcattacacatactatctctattccatgacatacattactaaattatgtaaatttcatttggacctcagaggaaagggaatctttactattcattatacttatcagtaaaatagaacatctgcttaattttcctgttgttctgtaaaatgaatttatcttgccctttccttttacattaaggacaattaccaaatgaacaaatgtataaaagttacataaaaacaatctactagaagtatgttaatttattgcttataaa

SEQ ID NO: 166435 - DNA, 458 bp, Homo sapiens
ccatctgaaaaatgggagtaatgattgaatggagaggactaatggtggaaaaggaaagaaaaaacagaaagagagagaaagggaggaaggcataaaggaagggaggcaggaaaagggacagaaagggagcgaggaaacatactgtaaactctcaggtggagatacacttttccaggcctcccttattgctcacaagaatataccgatgccaatggtaccactgatttggagtgaggttttcccagatctgagaagaattgttttttttcattctctctgtgaagaattgcaggtcaattcctaggcaacactgggtgtcatcagagctaggtctgaggcattcctaaaaatcaattgcccrgtccatttgggatagttttgatagtttgcaaatagttttgattctgaatttgatctgaagatcataattacacattcatttatctacaatagttttc

SEQ ID NO: 166436 - DNA, 578 bp, Homo sapiens
gttaacatccttctagagataatccacaggtcaaccatgaggggaatgaggaagagtctggctttagagcagtagtttttcttcaacaccaaacaccagaagacaataaggtcacaatataacagtgtgtgagaccccttaaatacatccttagacaagtggtcattaatatgtcaaagraatattttcagataagcagctctctaaaagtttatcaccaatgtctgctgcatcattaactctaggcagaattgtaaatagagaatccaccatacagaattatttgaaggcatgcaacatggttgctttggaatattcctatgccttttctcaagagaaagatatagatataaatacagatacagatacatagatatatatgtttatatctattctctacatagtatatatgtcataggtttgtgtgtgtgtatatgtgtgtgtgtatatatagatatacacattctagctactaaaatgttaatctctttgaaaaatggaaataattatataaaagcactataaaacataagacataattttatgtaaaacttttgtacatagatatatattgtata

SEQ ID NO: 166437 - DNA, 516 bp, Homo sapiens
aataaaattaaaaagaaaagcgaaaagaaaggaaacaagaaagataaagaaaagagaagaaaagaaagaaaggaaagaaagaaagaaagaaagaaagaaagaaagaaagaaagaaagaaagaaagaaagaaaacaggatttatgggataccattaagtgaacagatattgacagtatggtcaacccagaaggagaatataaggaaaaagggaggaaaatatattttatgaaatagctaaaaaacttcccaagtcatcagagaaacatggatatctacattcaggaagctcaaagagtctcaagtagaaccaatccaaacaggtcttcttcaaggcattttagagwcaaattgtcaaaagtcaaaggcaaagaaggaattcttaggaaaaaaaaaaagcaagagagaagcatcaagttacatataatgtaatctccattaaatgaacagtggatttctcagttgaaatcttgtagccaggagaaaatgggatgatgtattcaaagtactgaaaaaaa

SEQ ID NO: 166438 - DNA, 516 bp, Homo sapiens
aataaaattaaaaagaaaagcgaaaagaaaggaaacaagaaagataaagaaaagagaagaaaagaaagaaaggaaagaaagaaagaaagaaagaaagaaagaaagaaagaaagaaagaaagaaagaaagaaaacaggatttatgggataccattaagtgaacagatattgacagtatggtcaacccagaaggagaatataaggaaaaagggaggaaaatatattttatgaaatagctaaaaaacttcccaagtcatcagagaaacatggatatctacattcaggaagctcaaagagtctcaagtagaaccaatccaaacaggtcttcttcaaggcattttagagacaawttgtcaaaagtcaaaggcaaagaaggaattcttaggaaaaaaaaaaagcaagagagaagcatcaagttacatataatgtaatctccattaaatgaacagtggatttctcagttgaaatcttgtagccaggagaaaatgggatgatgtattcaaagtactgaaaaaaa

SEQ ID NO: 166439 - DNA, 586 bp, Homo sapiens
agaagcatcaagttacatataatgtaatctccattaaatgaacagtggatttctcagttgaaatcttgtagccaggagaaaatgggatgatgtattcaaagtactgaaaaaaaatttttaaaaaactgccagccaaaaatattatacccagctaagctattcagaaatgaaggatcaataaaatatttcacagagaaaaaaaaaaaaaactaagagaattaatcaccactagactagccttaagagaaatatttgagagactcttagatctggaagtgaaaagacaatatcaaccatcatgaaaacatgtgaaattataaaatttattggtatagtcaatacaaatgggagaaataagaatcaaaactatcactacagaaaaccagccaactgcaaaactaaacaataagaacagaaataaggaacaatgaatatacaaaacaaccagaaaataattaataaaatgacatgagtaagtcttcacctatttgtaacatatttcaatgtaaattaattaaattctctatttatgytattgactggctgaatggaaaaaaataacaagacccaattctatgttgcccac

SEQ ID NO: 166440 - DNA, 460 bp, Homo sapiens
aaaccacaaaacgctatcaaaaagaaattgaaaaggacacagacaaattggaagacatcccatgctcatggatctgaagaattaatatagttaaaataaaaataccactgaaagaaatctacaggttcaatgcagtccctttctaaagaccaatgatattcttcatagaaataggaaaygaaaaacttagaacttgtatggaaccacaaaatccttgaataaccaaagcactaatgagcaaaaagaacaagctcgaggcatcacactaacagacttttaactgtactacaaaactgtagtaaccaaaacagcatggtaccagtataaaaacagacacatagaccaatggaacacaatacagaacacagaaattaatccacttctctatatagctagactgattttttacaaaggtgccaaaactgtttattgcaaaaaaatgacaccctctttcaataaa

SEQ ID NO: 166441 - DNA, 433 bp, Homo sapiens
aaaaaaatgacaccctctttcaataaatggtaccattaaaactggatattcatatacagataaacaaactaaactgtacctctcaccttatataaaaatcaaaccaaagtggatcaaagacctaaaggtaagacccaacactatcaaactactagaagaaaacatagaggaaatgttttaggacatcagtctgaaagaagattttatgaatgagacctcaaaagcacaggcaatgaaagcaaaattatgcaaatggtattatattcaactaaaaagcktctgcccagcaaaggaaacaacagagtgaagcaacaaactactgaattgagagaacatgtttgcaaactattcatttggcaggggattattatccagaagatataaagaattcaaacatttcaacagcaaaataaacaaacaatttaaaaatgaa

SEQ ID NO: 166442 - DNA, 345 bp, Homo sapiens
gaagtttgaagggaaaaatgataggaaaaaaggagaaatgaaaacagtaggaaggtgttcactaaaataacgtttccctagcaatatttatgaaacattgaattttaaataaatattttttgaaatatgaaatataacttgcagaactatagccttaagtgtaaaattttttccgcgtacctatgattcaaacacacagaaaattttcttttctatgttttaaaagtgttaagagaaacagtggttgactatcccgctaaagrtctacaaatgtctaattcatggcccctttggatgatggtttctggctcactgaactcttaagagtagttttcatacttaaca

SEQ ID NO: 166443 - DNA, 520 bp, Homo sapiens
agaatgaaggagacctgccttagattggtgctgaagaattctctgaagaagtggcattgaaggagagcaggggagagttagaaggaaccaagccatgaataaattttggaaagaaaataatgcatcaggtctaaagttgagaactgctggtgttcctgacacgttgtgactgaggggagcatttcagtggatacatttggaaatgacaagagagaaggaatcatgctgggcttcatacacgacagcaacaattttgttttttatttgaagagtaatggaaagctattaagagatttttagttgagggagaagataaaatgtttcatttgaacaaatgtctgatgatttccaagcccacaccatgtgcaatagcccaaaygttctatggatgtgcaatgtgtgaaaggactttggaaaacaggagaaactcggcaactgcaaggcggtaatgataataaatgtcttcacctcctgagtggggaatattcagcaagttttcaaaggacgtcttagtttgtat

SEQ ID NO: 166444 - DNA, 328 bp, Homo sapiens
ttttttttctgtttttagtcactttctaatttcaaggtattgctaaaagtcctggtgataaaggttgaaaatgaaggaagcttacatcagcccacagttggtgtactcaaaatcacttctgacccattktcttcaggccaagtcctcgctttcgttaagtgaagtgagattttccctaggaggttgatctcagtgtctcatataaaacctgtgttggactgaccctatttttctatattttccagtcttcattgaatctttgaagaaatctacctcatatttttatgtgtcatatgggtttaatggaatgaaatagcaattagagcta

SEQ ID NO: 166445 - DNA, 372 bp, Homo sapiens
tattagcagcataagaacagagtaatacacatacattgaaccagtcttgcatcccaggataaagcatacttgatcatagtgaattaawttttgatgtgctgctggatttagtttgatagtattttgttgaggatttttgtttctgtgatcatcagggattttgtcctgaagttttctttattcattgtgtctctgccagattttggcattaggctgatgctagcttcatggaatgagttagggaggggtccctcctccttaatttttcagaatagtttcagtaggattggtacctgttcttttttatgcatcttgtagaatctggctgtgactccatgtggtccagggctttttgtagttgataggtttttt

SEQ ID NO: 166446 - DNA, 567 bp, Homo sapiens
gtatgtcttattttgagaaatgtctgttaatgtcttctgcccacttttttaataaggttatttgtttcctccttgttgaattaagttccttatagattctggattttagacctttgccagatgaatagattacatatattttttcttattctgcagaytgtctgtttactctgttgagagtttcttttgttgtgtagaagctctttcattttatgaggtcccatttgtcaatttttgttgttccaattgcttttgaggacttacttataaattatttgccaaggctgatgtctacagtggtaccttctaggttttattatagaattttttatagtttgaagtcttacatttaagtctttaatccatcttgacttaatttttgtacatggtgaaaggtaggagttcagtttcattcttctgtctatggctagccagttatcacagcaccatttattaactagggagttttattcatattacttatttttgtcaactttgtcaaatattattcagctgtagattgtggcttaattactggattctctattctgttccattggtacatgc

SEQ ID NO: 166447 - DNA, 598 bp, Homo sapiens
  misc_feature (1)...(598): n = A,T,C or G
tgatgtacttcctataaatctcagtggtttttgaaaaggcccctgctaggactttacaagatctacctatatggagtagttatttttccttatttgcagaagacaatagactatatgttgactagaagaaggttagctaaatgtatgtaygagccagaataaaatcatatactgcaatcaatttattgctaatacatttcctattaattatgtttactccacaaatacatttaggtcaaatgtcatcaaatataaatagccatccagcattataatcccttaaaataaacaaaatatataatttctatgagggacagccatatttctgctttaatttatgtacctgagtactatcctgcaaaagcaaaaccaactcaataatttaaatatagtccaatgccttgactggttttcaacatagcaaagacaaaagctgtagtcatgattggtggcctagcccttcccattcaataatcactttcctttttctctntcaatgcttttggattgatgcaaatacatgaagaaactgtatgaagagaaaataaacaaagagaattacaaacaaagggaaggaaattgttattatgacaaagga

SEQ ID NO: 166448 - DNA, 598 bp, Homo sapiens
  misc_feature (1)...(598): n = A,T,C or G
tgatgtacttcctataaatctcagtggtttttgaaaaggcccctgctaggactttacaagatctacctatatggagtagttatttttccttatttgcagaagacaatagactatatgttgactagaagaaggttagctaaatgtatgtatgagccagaataaaatcatatactgcaatcaatttattgctaatacatttcctattaattatgtttactccacaaatacatttaggtcaaatgtcatcaaatataaatagccatccagcattataatcccttaaaataaacaaaatatataatttctatgagggacagccatatttctgctttaatttatgtacctgagtactatcctgcaaaagcaaaaccaactcaataatttaaatatagtccaatgccttgactggttttcaacatagcaaagacaaaagctgtagtcatgattggtggcctagcccttcccattcaataatcactttcctttttctctntcaatgcttttggattgatgcaaatacatgaagaaactgtatgaagagaaaataaacaaagagaattacaaacaaagrgaaggaaattgttattatgacaaagga

SEQ ID NO: 166449 - DNA, 580 bp, Homo sapiens
ggttgattctatatttttgcaattgcaaattgtgctgctataaacaagcatatgcaggtatctttttgaaataaaatgacttctttttctctgggtaaatacccaatagtggaactgctggatcaaatggtagttcttcttttagttttttaaggaatctccacactgttttccatcatgtactagtttatattcccaccaacagtgtagaagtgttcgttttcactacatcctcrccaatatctttttttttttcctggtcattcttgtaagagaaggtggtatcacattgtggttttgatttgcatttccctgatcattagtgatgctgagcattttttcatgttttttggccacttgtataccttcttttgagaattgtctattcatgtccttcgacccatttttttgatgggattgtttgtttttttcttgctactttgtttgagttccttgtagattctggatattagtcctttgtcaggtatatagattgtgaagatatttttcccactctgttggttgtctgtttactctgctgattgtttcttttgctgtgcagaaactttttagtttaaat

SEQ ID NO: 166450 - DNA, 618 bp, Homo sapiens
tagagctctagagctgtgatttgatcttctatccatcctcagtgcctagcacaacgcctacaagtggcaattcaataaatatttgctgaatgcatccagcccttataattattctttatagcatactattaaatatcctgaccaagagattagattaattgtagttctaatgtcaagacaaagagaaaacaaaaggcygcccatctctctgcatacatgacttatattctgggcttaatctgacattcattaatagaaacaaagccatagaggacacattattagccaatggctttctctactttctaattaattcgaagaacttctaaatatatttaatttctcttatgctgtttgcctctctgcttcatggtatgaaaaatcagctacttaagtaatcatataacactggctccaagaattaccagtcctatgatgcgcccattataaagcaagtaataaatattgctgcaattttgtagtggccacataaatctgcctagatagtatttttctaagatgttctcaggtcctccatatcaagtatatggaaatccacctgccctgaaattgccctttattagatgaacagacaatccaaaaaattatgcaaatgtg

SEQ ID NO: 166451 - DNA, 548 bp, Homo sapiens
agatctgccagaaagacagaatatgaaggtgaagctctacccagttttggagcccaagaagcatcttgggctttcacagctctgcccagacaaagggtaaagctaagcctttacaagttcaaggtgataatttagtcactaaactgctttcttgaacaaattatcaacagcctgcagaggaagataacagaatccattgtataaaccacattgtactacatatagtcaaatattactaaacatccaaagaaaaatgaaaatgtaaccatgtataggaaaaaataakccagtaagaaacaaacctgatgtatccagaggttgaatttaatatgtattttgtaaaagctttgttcacaaaattaaagaagaatttgttaatattagttatctcttgctgcaaaacaaattactccaaacctcagcaggtaaaaagccacaaacttgcgttatttcatagtttctatggatcagtaattttggcacagcttaacttgttcctctgcttcagggtacctcacaagactaccaattattggcaaatactggga

SEQ ID NO: 166452 - DNA, 498 bp, Homo sapiens
tagtatgtacatatatttatggggtacaggagctgttttgacacaggcatccaaaatgaaatgagcacatcatggagaatggggtgttcatcccgtcaagcatttgttatttgagttacagacaattcagttacactctttaagttattttgaaatgtgcaattaagwtactattgactataatcaccctattgtgctatcaaatagtatatcttattctttcaactttttgtacccattagctatccccatctctgcccctccacccgctgtgcaaccctccactaaccttcccagattctgctaaccatccttctactctctatgtttatcagttcaattattttaattttttgatcccaaaaatacatgagaaaatgtgacgtttttctttgtgcctggcttatttcacttaacatattcaagttccagtaagctgtgtttctatttttgtttatcttaacatatttttatttttttttttaaaataacatttta

SEQ ID NO: 166453 - DNA, 309 bp, Homo sapiens
ggcggatccggcgtctcggggcacgggcggatggctccgcccagccaatcgacgccccgcggygggcgggactccagccaatcgcggctcgcggctcggctccggggcggggctggtgggccagaggccagacggagaggccccgccgaggtgagcgaggctccaaccggtcactggtgggtcctggcactggcgggtcgcaacgctgtgggcgttccaggaggtggtcgtggcgaacctggcagctgcggtgaggagtggtcgcctggcttgggaatttaccttaggctgggggagagagaagcgcgc

SEQ ID NO: 166454 - DNA, 415 bp, Homo sapiens
aaagctttacaatgacattggatttgacaatgatttcttggttgtgttaccaagagcacaggccacaaaaataaaatagataaaygttttgtttgtttgagacagggtcttgctctgtcacccagactggagtgcattgccataattatggctcactgcagccttaacctgccaggcttaagcaatcctctcatctcagcttgtcgaataactgggatcacagatgcatgccaccacacctggctaatttttctgtgttttagtagaggcaaggttttgccatgttgcccaggctggtctcaaactcttaggctcaagcaatccacccacctcaacctcccaaagtgctgggattacaggtgtgagccaccaggcccagccataaaatagataaattatactacattaaacttag

SEQ ID NO: 166455 - DNA, 415 bp, Homo sapiens
aaagctttacaatgacattggatttgacaatgatttcttggttgtgttaccaagagcacaggccacaaaaataaaatagataaacgttttgtttgtttgagacagggtcttgctctgtcacccagactggagtgcattgccataattatggctcactgcagccttaacctgccaggcttaagcaatcctctcatctcagcttgtcgaataactgggatcacagatgcatgccaccacacctggctaatttttctgtgttttagtagaggcaaggttttgccatgttgcccaggctggtctcaaactcttaggctcaagcaatccacccacctcaacctcccaaagtgctgggattacrggtgtgagccaccaggcccagccataaaatagataaattatactacattaaacttag

SEQ ID NO: 166456 - DNA, 600 bp, Homo sapiens
tcgcgcacaccttgcaagcccaggaaaagttcctctcaggctcctcgctttgccttacctctctgagtagggtctccgagggtaaccggtcgtgccttgtatagggttttaatagaatggcttttaactaaaggaagagaatggttgtcctcttgagtccgcacgccatgcyttccggtcgctgtcatctccagacccccatactataggcgtttgcatatgatgatgattcccaatttactgaggccctgatgtgtgccaggctgcgtgcgagcatgtttacgtgcattgtgtgtagtcactaccaaggaatgcatctgttacatacatagccagggattcttacctcacccctgcgaggtttgagtgattcatttagtagataagattttataagggtcagcaaggtaaagcaccttcccttagggcagttttctccctgctgtgggcttcctacccctaggattccactgcacgttgtgagttgtggggcttgtgttgaacttacccggataatgtttcttctcttctttaataatactgagaacttcattgttttgactgttattcatttacttatgtgttgatagacccacagtt

SEQ ID NO: 166457 - DNA, 569 bp, Homo sapiens
cacctatacatactgttactaggtacttgtgtatttctagacatcycaaacttttcttaacatatacagattatatattctcctcatcacataaatgttagcatactatgaaagagacagcaagtcgcctgtctcaacatccattctcccactttctttctttgttgatatggggttttgctctgccacccaggctggagtgcagtggcatgaacaaaggctcagcacagccttgacctcttgcctcagcctcctgagtagctgggactacaggcacgcaccatctggctaatttttaaatttttgtagagacagagtttcaccatgttgcccagactggtctcaaactcctgggcctaagggatcctttcaccttggcctctcaaagtgatgggattacaggagtgagccactgcgtctgatctcctcactctttttataacagccgtccaaatgtatttgaagccactcattgctgtccagcaaaaaactgcatttctcagcctttctgttagctaataatgcaggctatgtaactaagttttcgatactggagtggaagatactag

SEQ ID NO: 166458 - DNA, 425 bp, Homo sapiens
ttttcacttgagccaaagctatttctaggaaggcagtggcatttcctgagctaaaatcattttcccattcctgagtcacatttcacatggtcccagaggtgaatttagtggattacattttaaaaaacaaacaaaaacctcagagccacacatagaccaggttttgccttcttcctctccaactcccactattccttcctttgcacgtttgctgagccatacggaagtgcatggccaacagagaagaaaaaggttgattagtagtaaagaagccctgctgttgccttgaatgtcagcacgtgcacacacacacacaggtgcgcgcacacacgggcacacacaggtacgcgcacacacacaggtgcaagcacacaggtgcgcacacacacacagatgcgcgygcacacacaggtacgcgcacacac

SEQ ID NO: 166459 - DNA, 411 bp, Homo sapiens
tctcactctgttgcccaggctggagtgcagtggcatgatcatagtgcactgtagactctacctccttggctcaaatgatcctcccacctcagtctcctgagcaacttggactacaggcatgtgctaccatgcctgagtaattttttagaacatkttttgtagtgattgggttctccatatgtggcccaggctggtctcaaactcctggcctcaagtgatcctcggcctcccaaagtgatgaaattataggcataagccaccatgtctagccctaaggctattttaatatttcatatagtaaaaacaaaatggatgacaaagaagaaagagtggaaatttgctggaggaatgtccttgagtagacagtagtgcaagagcagaattggcttgagttaaaagcatgcacagctt

SEQ ID NO: 166460 - DNA, 406 bp, Homo sapiens
tctagagcctaggcattgagaagatttgtagcttctacctttttcccwctccgaatgccaccctgagactgccatgcaaagaagcagtctctgaagaatgagaagccacctagaggaaaactgaggcaaaagggccagtacctaacttccagacttgtgaatgaggctgcctcaattcaaggggtggggcaatagattcaacctcttaatagtaagacatgcacagaatttgtggccatatttactgttccacagtttgcccactggccacaatatttctacccctccgacatgtaaaacagactcacccttttccaagaacccaaaaagctacatcctatttactaccagactcaaagtccagtatcttatgatctgcaatccaggcgagaggctccttggttgc

SEQ ID NO: 166461 - DNA, 521 bp, Homo sapiens
tagtttacatataatcaggtaaattcattccaatctagtgacttcccaggtcagttcaggattgttggattagttacagttgggkgtgtgtgtgtgtgtgtgtgtgtgtctgtgtctgtgtgtgtgtgtatcttatgtgattggtcagtccttgggggaatgggtgggagtggctgatctttttcatgtatgattggtcactggtggtggcaatggaagggaccagtgatcatcaatttatctggtcaagcctgttctgggaccagttgctgatgtccttgaaggctgtcacctggacaggggctctagtcaggactctgttgtatctaagtccctcaggttagtcatactcctgagagattgtcagacttcccatccatactccattcatcagcaggaccccacatttctctgacaagcttccccccagtgtgaagagctggaactaagggtagaacagagacactgtctcctattaactctttagtctgaggtcagaggatgctgattcagctaattct

SEQ ID NO: 166462 - DNA, 521 bp, Homo sapiens
tagtttacatataatcaggtaaattcattccaatctagtgacttcccaggtcagttcaggattgttggattagttacagttgggggtgtgtgtgtgtgtgtgtgtgtgtstgtgtctgtgtgtgtgtgtatcttatgtgattggtcagtccttgggggaatgggtgggagtggctgatctttttcatgtatgattggtcactggtggtggcaatggaagggaccagtgatcatcaatttatctggtcaagcctgttctgggaccagttgctgatgtccttgaaggctgtcacctggacaggggctctagtcaggactctgttgtatctaagtccctcaggttagtcatactcctgagagattgtcagacttcccatccatactccattcatcagcaggaccccacatttctctgacaagcttccccccagtgtgaagagctggaactaagggtagaacagagacactgtctcctattaactctttagtctgaggtcagaggatgctgattcagctaattct

SEQ ID NO: 166463 - DNA, 521 bp, Homo sapiens
tagtttacatataatcaggtaaattcattccaatctagtgacttcccaggtcagttcaggattgttggattagttacagttgggggtgtgtgtgtgtgtgtgtgtgtgtctgtgtctgtgtgtgtgtgtatcttatgtgattggtcagtccttgggggaatgggtgggagtggctgatctttttcatgtatgattggtcactgktggtggcaatggaagggaccagtgatcatcaatttatctggtcaagcctgttctgggaccagttgctgatgtccttgaaggctgtcacctggacaggggctctagtcaggactctgttgtatctaagtccctcaggttagtcatactcctgagagattgtcagacttcccatccatactccattcatcagcaggaccccacatttctctgacaagcttccccccagtgtgaagagctggaactaagggtagaacagagacactgtctcctattaactctttagtctgaggtcagaggatgctgattcagctaattct

SEQ ID NO: 166464 - DNA, 571 bp, Homo sapiens
acttgctttactgattcccttccattaataaaacagaggaccctacacggggcgcttcataaatgtgctcttgcttaatcaccaacaaaaatctgcaaggaaaacgcaatgaacagcacaggagccgacaggagacgtcctcaacacaaccaccggcggaggcactgcggacgaaagtgtgcggagattgaagcgggtcctccacaaaaggtgggcgaacggtaccaagcaggggttctgtgttacagctcctctctgcttaacacccgagaaattctttctttgactatgagcacagaggttgttaatagccttcaaggaaaaccagtgtagagcccasaggaggagctcaatataaatcagataaataaaaaaatatgaaaaatgaagctctattgaatgaacaaagcacaggcaccggctgggtgggttctggaggtagggatgagctctggctgtgccttagatgggctggactcataacatgagaacttctccacagacaggaagggcattcgggtgtgggggcaggcacaaatggaacacgcatccctacaggtgtgtatcttgt

SEQ ID NO: 166465 - DNA, 397 bp, Homo sapiens
gaattcaaatatggaagagtaaaggttctggttttgtgggacttgtatataatgtggtgggaaaaatattgcataaagctttaaaaacaatacacctgatagtaccacacaggctatcagtttcctgtgagtggggctgctggacaactttcagatggaaagaaagagtaggcaaggtggagaaggggtgaagtagagctgcaggggtgtgtggatggaagcaggcatcacggaggatggggttaacacagctttgaaacttcgatgtgaaagggcttaggctaaacaaagaaatggttttggcaccaygaggccctgtgtatttccacccttagaactttctgtatacataggtatcatgggcagtatttttttactcatcctgggaggggcagtt

SEQ ID NO: 166466 - DNA, 511 bp, Homo sapiens
gagtatgctctatttcttggtcagtctagcttcagtttatacattttgttgatcttttcaaaaaaaccaagtttggtttctttgatttttctctgtttttttwattctccatttcatttacatttactctaacttttgaaataatttccttctttttgcttgctttaggtttagtttgctctcctttttctaggttcttaaggtggaagattaggctattgttttaagatctttgttttgtaataatagacattcacagatgtaaatttctctctaagcactattttagctatatcttgtaagttttagtatgttacattctcattttcattcatttcaaagtattttaaaatttcacttgttatttatcctttgacccattggttatttagaagtgtgttttttaattttcacatatttgtgaattccacaaatttccctctgttattggtttccgattttattttcttgtggtcagagaacatattttgtatgatataatatcttttaa

SEQ ID NO: 166467 - DNA, 531 bp, Homo sapiens
gtttcctcagcttttgccagttaaacacttccgtccataaaaaactggaatagcttgatgatatcttacattcaagaaacagcagagtgggtggggaggaaagatgaaaaagtactggtgaaattaataatagattcatatagacttytgaaaacttaagaaatctctccatctccaccacacctaggatctgcttcttcaaaaaatctttcagtatgaaactccataaaacaactgacgaagatttgttctcagggccttcagttatgatgccaatcttagcacccaaattgctttgttttcctgtcctatagtatgctgctcacaagacaatttgctgtcaccatcatgctagcattaatggtacagagcagcaaagcctacaatcaacttggtgatctcatatttatgtttgtttctgtaaagcccctataccactttacctagcattttagttatggctctaaatatggtaacagcatctcatcggtactgtaattacttctactttaatttttccatgtattttca

SEQ ID NO: 166468 - DNA, 531 bp, Homo sapiens
gtttcctcagcttttgccagttaaacacttccgtccataaaaaactggaatagcttgatgatatcttacattcaagaaacagcagagtgggtggggaggaaagatgaaaaagtactggtgaaattaataatagattcatatagacttctgaaaacttaagaaatctctccatytccaccacacctaggatctgcttcttcaaaaaatctttcagtatgaaactccataaaacaactgacgaagatttgttctcagggccttcagttatgatgccaatcttagcacccaaattgctttgttttcctgtcctatagtatgctgctcacaagacaatttgctgtcaccatcatgctagcattaatggtacagagcagcaaagcctacaatcaacttggtgatctcatatttatgtttgtttctgtaaagcccctataccactttacctagcattttagttatggctctaaatatggtaacagcatctcatcggtactgtaattacttctactttaatttttccatgtattttca

SEQ ID NO: 166469 - DNA, 539 bp, Homo sapiens
tgttccaagattagtttgaattactaagtttaaaaagctcaagtaataatagaaaaaatataatgtttaaaaatatttcagctgaaaatattttggtgcacaagtttagcttttcaaatttgaaattagaaagttgtggatctattaatctgtaacagcaagaacacttaacttagatttacatttctttaaaaaaaggtttcacacrattttattaatacatttgaatatgcatactataatatcgttttattttattttatttattttggagctttactggatttacactacacttcaagccacttggagattagatctttttttttgatgtgtgggttcatattttactggacctatttcatgttcttaattcactttctaatgaactcaataacttcataaactctaccatataaggaagagcatataataataagatacattaactggagaatattttctgtaaatattgtatcatatttcctatttactgttttctctataaagacctgacatattcagagtaaatccaatac

SEQ ID NO: 166470 - DNA, 491 bp, Homo sapiens
ttcaccggatgttttgttcacagrgccctggagagctatccatttgttaattcaataacacacaagcatgagctaagtggcaaccgggcaacaggcatcatgctaggtgtgagcagaggcacatgagtaagatgggtactggaactctaggagctcactctgtagtgagaggcaaactcacagacacagttaggatctgaagtgttattagttatcgaatttgaatgacagtccagatgacacctactcttctgcctgtctgaaattctatctgagcttgcaccttcttatgggacactgcttctttcccactctaaatctaatgagggcctgacaagggttgctgatcatgttaccctgtcactgggtctgagcaggcaccttgaagcagtctaggggaatcatggcacctggtccccttcctgtgatgctcatgtggactaagccaggccatccagagtggttcctctgaagttttataactagaattc

SEQ ID NO: 166471 - DNA, 482 bp, Homo sapiens
gctggtgacccaagaccaagacacgccttgctaaggagtttggatattttttaggccaaaggaaatcatgaactcttgtaatgcagaaaagtgatatgattccattacagtttagcaagacttatataattaggagtatgcagaataacaggctgactgggatgatgtaaggccaataggcagtaaggagggtgttgcaatagttcaggcaggtaagatgctgagtcagagccagtgttgattgcaccaaatcagactgtgtgacgtacatccagagcatggtcagtgctccagctggcaacccaataaatgatcagacttattaaaattctgctgtgctcaggttaccaccyaggaaggaataggctgctcagttcttttaaatagtaatattaatgatgtttggtgcttacatagcacttatggccatgattctctgcagacattgcataatgcatccactaaacatcctgtccagctac

SEQ ID NO: 166472 - DNA, 551 bp, Homo sapiens
tcttcttaaaccaatatataaagaagaaatatgttcaggttattcacataaaacagaatatagctagaacattttgcacgttcatcttcatttcacaatgttaacttcaaattgtcaccatttctaactttccaatgcatgagtaatatgttcagccagcactgatgctattttgaattacaagaaggctggaacaacaatatgatatttatgttttataaatgaagctcaaaaatatctttgtctttgwgaacagctgtaaaaagacagtattcaacttattgcaccaagtgaaaggattccattctttggaaggatgggcatttatataaatcatgctgtgctatttggtgttaaggaaacattattacttttacttgacatattgaacttgttaattggcatgtcatcattaaatattttcttattgcttgctaccatatgtatttcaaaaagtgaaaaatagaaatttagcatcattaaaataatttttaaaaatgatttttattattagaaaattttaatggtacaagttctaatgacaatgttga

SEQ ID NO: 166473 - DNA, 578 bp, Homo sapiens
accagattaaaaaatgggaaagtccttaaatagacatttttttctaaagaagacatacacgtggccaaaaaaccttatggaaaaatgctcaacatcacttacaatcagggaaatgcaaatcaagtccacagtgacttatcattgcacaactgttrggatggcacaaaagataatagtttggtggggatgtggagaaattggaacctttttaccctgttgttgggaatgaaaaatggtgctgcatctatgaaaactatgtggaggtacctacacaattaaaaatagaaatagcatgtgatccagcaatcttatttctaggtatttatccaaaattattgaaatcaggatcttgaagaaatatttgcactctcttgttcactgcagctgttattcacaatagccaagatatggaaacaatgaaatgtccactgatggatgaataaatgaagaaaatgtggtatatgcatataatgggttattattcagccttaaaaggaggaagtcctacgatatgcaactacatgaatgaaacttgaagatattttgctaagtgaaataagccagtcatagaaggacaa

SEQ ID NO: 166474 - DNA, 578 bp, Homo sapiens
accagattaaaaaatgggaaagtccttaaatagacatttttttctaaagaagacatacacgtggccaaaaaaccttatggaaaaatgctcaacatcacttacaatcagggaaatgcaaatcaagtccacagtgacttatcattgcacaactgttgggatggcacaaaagataatagtttggtggggatgtggagaaattggaacctttttaccctgttgttgggaatgaaaaatggtgctgcatctatgaaaactatgtggaggtacctacacaattaaaaatagaaatagcatgtgatccagcaatcttatttctaggtatttatccaaaattattgaaatcaggatcttgaagaaatatttgcactctcttgttcactgcagctgttattcacaatagccaagatatggaaacaatgaaatgtccactgatggatgaataaatgaagaaaatgtggtatatgcatataatgggttaytattcagccttaaaaggaggaagtcctacgatatgcaactacatgaatgaaacttgaagatattttgctaagtgaaataagccagtcatagaaggacaa

SEQ ID NO: 166475 - DNA, 600 bp, Homo sapiens
gtctttcagttattcatgtatagcagtatgcacttctttcaacaggttttatattgggctgtgaagtttgtcgtccaagcctgtagataacagtcatgctgtggtcaaagtggctggtatctgtatttagaagtggaagttctctgttgcccaggcaatgggttgattcatagaatacacattggtctgaggtccctgctcagcactgtgggggtaggagccataaagggtgggaccagttgggcaggtctgcctggaggtcccctgatgcargcacaagcaccagtatcaagtgagaatccagtgggtggctaccaggcacccagaagtgtgtctaaatgtggagtcaggaaaccacctttgctccaagttctgtgttccaggttcctaatccaggagagtgggtgcttcagatgcctgcagatcttcctgggtgtggagcagagagggccttcctgcaccaatatctacgaacagaaggggttgtgcaacccaggttgccacaccaggcaagcaggtattctaaatgcctggagatttgcctgagcatggagcagaaagggtcttactataccatgatctatgtccataaatggtggg

SEQ ID NO: 166476 - DNA, 562 bp, Homo sapiens
tgtttcttctgtgctgccttcccagtgctccctaggaaggcaaggcagtctctttcacataattctttcacagtgtcagaggcatttgaacagggcaaccccatcatgaatagggactgggtaaaataaggctgagacctactggggtggaccttggtgataaaacaggcttcagtaaagaagctggccaaaccccaccaaaaccaagatggctatgagactgacctctggttgtcctcactggctcactatacactaattataatacattagcatgctaagagacacccaccagtgccatgacagtttacaaatgccatggcaatgtcaggaagttactctatatggtctaaaaggggcataaaccctcagttccgggaactgtccmccctttttggaaaactcatgaataatccacccccttgttaaggatgtaatcaatagataaacataaaaatgggcaaccagcagtccttgggctgctctgcttatggagtagccattctttcattcctttactttcttaatgaacttgcttttgctttgcggtgtgcactcgccc

SEQ ID NO: 166477 - DNA, 384 bp, Homo sapiens
ctgccttctgccacccttcttctgcctgccttttagattcaagtcccagattcttgttttttctcatctctctgcctgctatctctgtagggrctcctctctgaaactgtgatttagttaccaactacctatgtgcaaaaacctctcaaatctgtatctctaggcttgctattttctcggtgttccagatttgcatgtttaacttcctatctgaaatgcctacttgaacgtcagaaaggcaccgcaaactcaaggctcttaaatcaaaccaaaaatcaacatctttcctctaattggtagttgatatttctctgtttcagaaaataaatggtccaccacccatccatttgtacaatctggaaatgtgggaatcaccttcaactc

SEQ ID NO: 166478 - DNA, 614 bp, Homo sapiens
gtcttaacattgaacgtatatacttagtaaggagacagttgtttcatttgtgtgtactatatgcttgctgggttggcacgttacatgaattttctcactttatttcaaatacactgcaagatgctgggacaaattaagtaacttgttcatggttacacttagtgggtgatagatgaagaacttgaacctaggtttacctgcagagctggagtgttttctgcaaaacaaatggtacctagcatatagtaaaaccatcaawtatttgctgttggtattttctttttttaatgattgccccttgcctcccatacttcaggttttaaaaatattagatatttggacaggggaaactttttgtctaaatgtggcttttctttttttgaaatggagttttactctttttgccctgaagtgcaatggcacaatattggcccattacaacctccacctcctgggttcaagtgattgtcctgcctcagcctcccaagtagctgggattacaggtgcatgccaccatgcccggctaattttgtacttttagtagagacagggtttcgccatgtttgccgggctggtcttgaactcctgacctcaggtgatccatccaccctggc

SEQ ID NO: 166479 - DNA, 614 bp, Homo sapiens
gtcttaacattgaacgtatatacttagtaaggagacagttgtttcatttgtgtgtactatatgcttgctgggttggcacgttacatgaattttctcactttatttcaaatacactgcaagatgctgggacaaattaagtaacttgttcatggttacacttagtgggtgatagatgaagaacttgaacctaggtttacctgcagagctggagtgttttctgcaaaacaaatggtacctagcatatagtaaaaccatcaaatatttgctgttggtrttttctttttttaatgattgccccttgcctcccatacttcaggttttaaaaatattagatatttggacaggggaaactttttgtctaaatgtggcttttctttttttgaaatggagttttactctttttgccctgaagtgcaatggcacaatattggcccattacaacctccacctcctgggttcaagtgattgtcctgcctcagcctcccaagtagctgggattacaggtgcatgccaccatgcccggctaattttgtacttttagtagagacagggtttcgccatgtttgccgggctggtcttgaactcctgacctcaggtgatccatccaccctggc

SEQ ID NO: 166480 - DNA, 614 bp, Homo sapiens
gtcttaacattgaacgtatatacttagtaaggagacagttgtttcatttgtgtgtactatatgcttgctgggttggcacgttacatgaattttctcactttatttcaaatacactgcaagatgctgggacaaattaagtaacttgttcatggttacacttagtgggtgatagatgaagaacttgaacctaggtttacctgcagagctggagtgttttctgcaaaacaaatggtacctagcatatagtaaaaccatcaaatatttgctgttggtattttctttttttaatgattgccccttgcctcccatacttcaggttttaaaaatattagatatttggacaggggaaactttttgtctaaatgtggcttttctttttttgaaatggagttttactctttttgccctgaagtgcaatggcacaatattggcccattacaacctccacctcctgggttcaagtgattgtcctgcctcagcctcccaagtagctgggattacaggtrcatgccaccatgcccggctaattttgtacttttagtagagacagggtttcgccatgtttgccgggctggtcttgaactcctgacctcaggtgatccatccaccctggc

SEQ ID NO: 166481 - DNA, 614 bp, Homo sapiens
gtcttaacattgaacgtatatacttagtaaggagacagttgtttcatttgtgtgtactatatgcttgctgggttggcacgttacatgaattttctcactttatttcaaatacactgcaagatgctgggacaaattaagtaacttgttcatggttacacttagtgggtgatagatgaagaacttgaacctaggtttacctgcagagctggagtgttttctgcaaaacaaatggtacctagcatatagtaaaaccatcaaatatttgctgttggtattttctttttttaatgattgccccttgcctcccatacttcaggttttaaaaatattagatatttggacaggggaaactttttgtctaaatgtggcttttctttttttgaaatggagttttactctttttgccctgaagtgcaatggcacaatattggcccattacaacctccacctcctgggttcaagtgattgtcctgcctcagcctcccaagtagctgggattacaggtgcatgccaccatgcccggctaattttrtacttttagtagagacagggtttcgccatgtttgccgggctggtcttgaactcctgacctcaggtgatccatccaccctggc

SEQ ID NO: 166482 - DNA, 331 bp, Homo sapiens
aatttctagtacatgagaatatttccacactgcaagtttttctgaaaaaaagaaactacatcatgatttgaaaacaggctttttcatatgacacttcagtaacaaacattttcacatgtaagaaatgtcctgcactttttttttttttttaraaatcaaggtctcactgtgttgctcaggctggacttgaactcctgggcttaagctatcctcccacctcagcctctcaagtagctcagcttacagccactgcacctatgttctgcaaatatttaaagattattaatcagtgtgaggacagtgatagagtccagtaaatgtccatatcatg

SEQ ID NO: 166483 - DNA, 517 bp, Homo sapiens
caccttgaaagcttcacctggcctacaacttttattttaaaaagatgatcaagaaaacttcatcttctctgagactcagaaaaagaggggaaaatagtggtagtgcactaattgttacattactaatatagcttttgtaaaactcgtttgttttcaaaggtctggactaagcaaaacaacagtgtcagtttaggaaattattactactttgaacacaaactgaaattgcaactttgccttgtgctttgtttataatttctttrtatatcaaaatgagtgttttaaagtttaacccttgaagcagcatgtctttgccatagcagcacttcacttaaaaggaagaaattgcctctctggcagcaattcctagttagttaccacctccagctgaggggctggaggaaaacaggtatagccaaattcaagaaagataaacccctgtctcaaggaacattttaaaaagaacgtctgtcccctgtgatgctggctgttatgcctttgaatggacctaactata

SEQ ID NO: 166484 - DNA, 563 bp, Homo sapiens
catcaaaatgccaagtttcagatttgaaagaacgtacttttattacatgctctactctcaaggcttgtgtggactaaagagaggtgattagcaaccactgacccagaactgtgcaggtttcctgatagtgccaggcaatgtgcttgatggctccacctatcaaggggacaatgatggcacaggttgattccgctaaggatttgcatctgggcacagaatttcactttcttgcctgcggactgtaatgtaaggaaaaaggatgagcatcactctactgaaacaactgtggagagaggatttcataaagatgatagagtgggaggcacaagaaatctgtctctctacttagataacaattgagctggtgaatcaatgtgatgtaacaattttggaacactagaatgtactgaaggcttgmaacttccaggggaaggcttgaacaataaattgtagttaatttcagtactctgaacacagtaccatctacacatccccagtcccagccttgtaactggcaaatgtgcatatgtttctggaacaacctgtacatagcttgtgagagc

SEQ ID NO: 166485 - DNA, 415 bp, Homo sapiens
tgtgtcttgctctggggttgagtagccaaggctccctttcatgtctgaggctaagccaccactaaaccaccccatcccagtggcctgacacactcaagccaagatgcaagctgctgttatacccttctccacagaaccaagcagacgtggagccactctacctacccctaccactgcccctttgggctggagctaaagtagtactctacttcctrggaaaatgataccttggcaaggcatgtcagtcatacctccccagtgcctaagttgaatcagtcctctgcattccaggaaatggtgccttggctgcccagagtagtcgtgaccccagtacctaacctgaagtggtaccttgcattccagggaaatagcacctgggctgcccaggacaatcacacacaaccaggcctgagct

SEQ ID NO: 166486 - DNA, 554 bp, Homo sapiens
aaaatgagaatggcagaaatttaataaaatggacagcaagcccaaaattagttctttgaaaaagacaacaaaaatgataaacttgtataagattcatatgaaaaataaaatagaaaaaaattagcatactagaacagagaaaaagttggcacactctatatcctgtagacactaaaaagataaaaggatattatgaacaactttgtaacaataaattttaaagcagtaaaatctcagaaaagcacgacttaataaaatgctcaggagaaattggggaaatattgtggtttcataactatttagaaatcaaatcagcaatataataacttttcagagatgccttctgtttctaccctcttttccctgaaacaaccaaaatactggaaaaaaaatatatgaaacaatagtttttcaagagactggacatcagatagcgattcagcaaaatgggagaggaggtgaaagragttgagctctttattgctccaagttaatgccttgagagagtccagtgctgtgaagcagagcagggaaacccagacaaagcaaacctg

SEQ ID NO: 166487 - DNA, 650 bp, Homo sapiens
ctgcattttatctggctaccctacttaggatgtgtttggctggctgacaggttgattgctgctgagttcttatgagtctctagatgtctgagcaacaccaatgtgtacaataaccactctaaactatgacttaggcttacacatttccactacccatgagtggcaaggataacgtatcattagttcttcttcaatgacataatatctaatatatgctacttatcttttactgatttataactcactaaatcttattggaagagtgagacaataaaagtcatcagttcaagggattcatgtaaggaaataaagtttagtgaaatagaaatttaaagaatttttcatagattttgatgccyaatattatttatctctgactcattgtatacttatgaaaaatatattcattatgtgagcagattaggaaaatgtcataacagtattcagtcagggaaaataatcataaaaagtgatgtctgatttcccttcttattcaaacttccaagatcaacagaatgtgaagacatattccatgaagcatctattgttatggcattatacattattaaatatttgcaaactacatatttaataatagagaattattagtgtattatatgattctgtcacaccatgatatgataaacaat

SEQ ID NO: 166488 - DNA, 650 bp, Homo sapiens
ctgcattttatctggctaccctacttaggatgtgtttggctggctgacaggttgattgctgctgagttcttatgagtctctagatgtctgagcaacaccaatgtgtacaataaccactctaaactatgacttaggcttacacatttccactacccatgagtggcaaggataacgtatcattagttcttcttcaatgacataatatctaatatatgctacttatcttttactgatttataactcactaaatcttattggaagagtgagacaataaaagtcatcagttcaagggattcatgtaaggaaataaagtttagtgaaatagaaatttaaagaatttttcatagattttgatgcctaatattatttatctctgactcattgtatacttaygaaaaatatattcattatgtgagcagattaggaaaatgtcataacagtattcagtcagggaaaataatcataaaaagtgatgtctgatttcccttcttattcaaacttccaagatcaacagaatgtgaagacatattccatgaagcatctattgttatggcattatacattattaaatatttgcaaactacatatttaataatagagaattattagtgtattatatgattctgtcacaccatgatatgataaacaat

SEQ ID NO: 166489 - DNA, 476 bp, Homo sapiens
taggactaacattaggtacaagattagaaattatggtttaggaatcatgcagctggaggctacaygattctgaccctccctaaactgctcctaagatcagtgtttgagatattttgcagaccctgcacttgacggatcagctggcaccacccagattgataaactgtctcatctgatcttgtggcccccaaggaactgactcagcacaagaagacagctttgactccctatgattttatcactgaccaatcagcactcctggctcactggctgtcccctacccattgagatgtccttaaaatctctgatccccaaatgctatgggagactgatttaaataataataaaactctggtctcccatacagcaggatcggagtgaattactctttactgtcactcccctgtcttgataaatcggctctgcctaggcagcatgcaaggtgaacctcttgggtggttacatcagttgcatgt

SEQ ID NO: 166490 - DNA, 476 bp, Homo sapiens
taggactaacattaggtacaagattagaaattatggtttaggaatcatgcagctggaggctacacgattctgaccctccctaaactgctcctaagatcagtgtttgagatattttgcagaccctgcacttgacggatcagctggcaccacccagattgataaactgtctcatctgatcttgtggcccccaaggaactgactcagcacaagaagacagctttgactccctatgattttatcactgaccaatcagcactcctggctcactggctgycccctacccattgagatgtccttaaaatctctgatccccaaatgctatgggagactgatttaaataataataaaactctggtctcccatacagcaggatcggagtgaattactctttactgtcactcccctgtcttgataaatcggctctgcctaggcagcatgcaaggtgaacctcttgggtggttacatcagttgcatgt

SEQ ID NO: 166491 - DNA, 574 bp, Homo sapiens
aaatttaaaagacttttcttgactgccaccttgtggtagatttttcaaagtaaaaaaatttagtcgaagaaatatatgtacaggtttccaacaatgttaaaaagagagaattaaactgccagtaatttatgtataaatagaagaaagttttacagtgaggttaacaaaaatctttaaaaatcttccctgatttaaartaagcatttaaaagaaacatctcttttttctttattattcgaaacattaaatgggaaaaaaacagaaaaaatattgcctcatctatgtaaaatatatatgatatcatcaaattaatccaaaacctttccctgattcactggctactttctaaaaactttaaaattagatttagttgttgaataattatcaatttaacaagaaattacatgtattataagaaaagttaccctatataatcaacttttaaaagtatgtatttataattaactacatgatacatagtttattaactattttattacttttaaattgaaattatcagttgacaaaaatataattttcttagagcacttgcaatacgtatgtacttgttttt

SEQ ID NO: 166492 - DNA, 574 bp, Homo sapiens
aaatttaaaagacttttcttgactgccaccttgtggtagatttttcaaagtaaaaaaatttagtcgaagaaatatatgtacaggtttccaacaatgttaaaaagagagaattaaactgccagtaatttatgtataaatagaagaaagttttacagtgaggttaacaaaaatctttaaaaatcttccctgatttaaaataagcatttaaaagaaacatctcttttttctttattattcraaacattaaatgggaaaaaaacagaaaaaatattgcctcatctatgtaaaatatatatgatatcatcaaattaatccaaaacctttccctgattcactggctactttctaaaaactttaaaattagatttagttgttgaataattatcaatttaacaagaaattacatgtattataagaaaagttaccctatataatcaacttttaaaagtatgtatttataattaactacatgatacatagtttattaactattttattacttttaaattgaaattatcagttgacaaaaatataattttcttagagcacttgcaatacgtatgtacttgttttt

SEQ ID NO: 166493 - DNA, 393 bp, Homo sapiens
tcaaatgaacattatatttctcagttccttttatcatctatttctgcttattattttccatgttatttttccttgacttaacaccttcatctttatctctataagctgcgaagctaacttattttattaagtctcacattttttcctatgtgataattatcattcattttactctctcatttcttctacagatgcaggataatcagttaactatcagggttactttattctttgagagtacccatgtaaatattgtttatttatttttcactggyagtataattttggtggtccagccagtgtggtcaccattatcaactcagatggtgaaaagatcttcagcagagaactctcagacaaaatttcaaagataattgtgcttgcaaagtgtga

SEQ ID NO: 166494 - DNA, 593 bp, Homo sapiens
actgcttaacgctgccattgtctcatgaaagtactcataggcagtatgcaaacaaataagcatagctgtgttccaataaacatcaccaaaacatgtggcaagccagatttggctgatggactacagtttgcaacccctaccttagattagaatgtttgatgcaattatgtaacaaaaacagaacaagagtcatgggctcaagacckatttctgacactaggtgtgtagtagagaaacatttttcctagctagcaaaatttatcatctgtaaaatgaaaggattaaacttacttttcctaaacttgctctctgctctaaaattacgagtttattctgtgttcatttacctcttctttcatatataagaaaaacttggcttgtgtttttttaaaaaggcaatacaaatcattcaaagaatcattttaattatttaaatttttttgaaatgattgctttctctggtaggaggagagtaaggaaactcttactgcaagtgtataaaatgttttctttgtttttattctgtgtgagtcatcagaatttattatgactcccataagaaatttcaacagagagcaagacacgcagagcta

SEQ ID NO: 166495 - DNA, 580 bp, Homo sapiens
gtggcatggtggtttgctgcacctatcaacccgtcatctgggttttaaattctgcatgcattaggtatttgtcctaatgctctccctcccctttccccctacccctctacaggccactgcatgtgatgctcccctccctgtgtccatgtgttctcattgttcaactccgcttatgagtgagaatatgcagggttcggttttctgttcctgtgttagtttgctgagaatgatggcttccagcttcatccatgtccctgcaaaggacatgatctcattcttttttatggctgcatagtgttccatggtgtacatgtgacacatgttctttatccagtctatctttgatgagcttttgggttgtctccaagtctttgccattgttaatagtgctgcaataagcactacttattgcatgtgtctttatagtagaatgattcataatcctttggggatacacccagtaatgggattgctagtcaaatggtattyttggttctagatccttgaggaatcaccacactgtcttccacattggatgaactaatttacactctcatcaaaagtgtaaaattgttcctat

SEQ ID NO: 166496 - DNA, 580 bp, Homo sapiens
gtggcatggtggtttgctgcacctatcaacccgtcatctgggttttaaattctgcatgcattaggtatttgtcctaatgctctccctcccctttccccctacccctctacaggccactgcatgtgatgctcccctccctgtgtccatgtgttctcattgttcaactccgcttatgagtgagaatatgcagggttcggttttctgttcctgtgttagtttgctgagaatgatggcttccagcttcatccatgtccctgcaaaggacatgatctcattcttttttatggctgcatagtgttccatggtgtacatgtgacacatgttctttatccagtctatctttgatgagcttttgggttgtctccaagtctttgccattgttaatagtgctgcaataagcactacttattgcatgtgtctttatagtagaatgattcataatcctttggggatacacccagtaatgggattgctagtcaaatggtattcttggttctagatccttgaggaatcaccacactgtcttccacattggatgaactaatttacactctcaycaaaagtgtaaaattgttcctat

SEQ ID NO: 166497 - DNA, 499 bp, Homo sapiens
ctttccatatgaccactgaaattattagtcaacwgtctctgtccccataaaaaagtgtttggtttatgatgtgaaatgtgtatgtgataatatggagcaaatataaatatccggaaataataattattaaacatattttgaatatctgggtaatcttcccctgtaacagatcattctcattagctacaggataaatttaaataaacctaattactctaatttgatcattacacattgtatgcttgtatcagaatatcatatgtaccccataaatatgaacaactattacatatccataaacattaaaagaagttttaaaattaaaaaatattttttaaaaattaaaaattcaataaaccttcagtactgcaaaggggtgtaagggattagaaatgctataaccccagaagaaaccccaagacttccaatggcagaaacacaatgaattcagagggaaattgtcactcagtgtgttgtaggttagattctcccaaaacag

SEQ ID NO: 166498 - DNA, 526 bp, Homo sapiens
actgacgaaactttccatatgaccactgaaattattagtcaactgtctctgtccccataaaaaagtgtttggtttatgatgtgaaatgtgtatgtgataatatggagcaaatataaatatccggaaataataattattaaacatattttgaatatctgggtaatcttcccctgtaacagatcattctcattagctacaggataaatttaaataaacctaattactctaatttgatcattacacattgtatgcttgtatcagaatatcatatgtaccccataaatatgaacaactattacatatccataaacattaaaagaagttttaaaattaaaaaatattttttaaaaattaaaaattcaataaaccttcagtactgcaaaggggtgtaagggattagaaatgctataaccccagaagaaaccccaagacttccaatggcagaaacacaatgaattcagwgggaaattgtcactcagtgtgttgtaggttagattctcccaaaacagactttaatgagatgaga

SEQ ID NO: 166499 - DNA, 614 bp, Homo sapiens
agcctcctgcagcaagtggacccactgtggtttcctaagactctccaatgcatgtgatcagtttactaggaagcagctctctttaatatgttcatacttaacagaaaaggaaggaccagaaggttgcccataggctgcacccaagtgtgaaataaacattattattacagcagttgaaatgtgaagttgaagaacattttaatttcaaaatagtattcatgagaatcagatgacacatctatactttaactctggtgaagtgtgaaaattaaatgaacactccrtcagattctgaaagttgaattatgacccccacctccctcactaaagagatattttttcatatttagggtggcatacctcatttgtggaaaaggtctttctggcactcatcccctgtttctcaatttattgtagccatcttattaatcactgtgtttgctggggaagagccaaagtatacctaaatctagaattaaactatatagcactagggtttaaaataatagaatttgtcatcaagttgactgcctcatattcatccagtgtcaaactcaatagttgatatgtttgcttatgcaaaaatatcagagaggaaaagaaaattttaattt

SEQ ID NO: 166500 - DNA, 614 bp, Homo sapiens
agcctcctgcagcaagtggacccactgtggtttcctaagactctccaatgcatgtgatcagtttactaggaagcagctctctttaatatgttcatacttaacagaaaaggaaggaccagaaggttgcccataggctgcacccaagtgtgaaataaacattattattacagcagttgaaatgtgaagttgaagaacattttaatttcaaaatagtattcatgagaatcagatgacacatctatactttaactctggtgaagtgtgaaaattaaatgaacactccgtcagattctgaaagttgaattatgacccccacctccctcactaaagagatattttttcatatttagggtggcatacctcatttgtggaaaaggtctttctggcactcatcccctgtttctcaatttattgtagccatcttattaatcactgtgtttgctggggaagagccaaagtatacctaaatctagaattaaactatatagcactagggtttaaaataatagaatttgtcatcaagttgactgcctcatattcakccagtgtcaaactcaatagttgatatgtttgcttatgcaaaaatatcagagaggaaaagaaaattttaattt

SEQ ID NO: 166501 - DNA, 558 bp, Homo sapiens
tcataaatacagaattacatagcaggagatattttttgaatgttggaaaatgagagaagacatttttagcctcttccaggtcaattcactttctgttattctaccatatatattgttcttatagctactattttggatcccattaatttctggcgattgaaaagcctgaaatagggtaccttgtttttctgataaaatctgttgggtaagatttatttcatcctaaattttgactcataaaatatacttttgcaattaaaatagcaaagaggatgattgcattaattgtatacattagtcattgtataagatttaatttaaaaacttattaagtgaccataytttctgggactgctattggtgataaatgttgagcaagaccctaaattagttaagtcaatccaagtgaagacaatggaacattaataatatttcattttttacagtataataaaaattaatgttttttgtctcttttaggtatattaaaataatgaatatttttcattagcctattaataaaaattaacacattaattaatattagccattcttcaa

SEQ ID NO: 166502 - DNA, 706 bp, Homo sapiens
ataaagaaatttcttgatccagcaattccatttctagatatttatccaaaatatttgaaatcaatatgtggaagagatgtctgcactcccatgcttattgctgcacttttcacagtagccaaaatatgaaatcaacctaggtgtcatcaatggatgaatggattttttaaaatgtgatacatacatatatatatacatacatacatatatatatatgcacaatggaataatattcagccataaaaaataatgaaatcttgtcatttgcaacaacatgaataaacctagagacactatgttaagtgaaataaacygagcataggacaaataccacattatctcattcatatgaggaattttaaaaaattgatgtcatagaagtagggagtagaatactggttgccagaggttggagaaagcagagcggcaggggagatagagataaacggttggtcaacaggtacaaagtaagctacacttagataggaggaacaagttctgttgttctattgcacagtaggacgactatagttagtgataatgtatatttcaaaatagctagaagagaggatttttaatgttttcaccacaatgaaatgataatgtttgaggtgaggaatttgctaattaccctgatttgatcattacacaatgtatacatgcattgaaacagtatactccttaagtacatatgattgttatgtca

SEQ ID NO: 166503 - DNA, 556 bp, Homo sapiens
atggataccccatttaccctgatatgattattatacattgtatgcctgcaacaaatatctcatatacccttaatatatagacctactatgtacctaccaacttaaaatgtttaaaaaaagttgtctggtgggggtggggagctgaaatacaaactgctaggggtgtattttttgtttggtttcgttttactgaaaagtttgacttttaagacarcacagaacgagtagattaaattcagacattaacacattggtcatgtgaaatggctaaatgaactacctaaataatctcctgtcagaaacatgaaccataggccctttcctaggatctaagcatcattagacctatatagcttcacctttcacatacaccattcattcttacattcaatgaacaattactgagtgcttacaaagtactaattgtacaaagtggtagacattagggctataattgtaacagagctttgctagtctacaaacaatttacactctagtgatgaatagtaaacttttttaaaagcattaatgattacaatgtaataaaatataactg

SEQ ID NO: 166504 - DNA, 345 bp, Homo sapiens
taacatgccaaacttaactatgtacataaaacatgaaaggtgggatgatatgggacaggagttttagaaggtatgagctctaattgatttcaaattatttcactgaatccagagaggacaataaaggaaagaaagtaaataactgttaatagtttacatttcagttattatataacagatcattagttttaaaaatcgttaaaatttcaaaagtgaattaaaatcaaatttctgtttttccttttctgtgattttctgtatatttttaaatatcatrtagtaatgaaatataaaaatattcattttgattcaacccaaaaagcaaaggtaactgcaaaaaagcaa

SEQ ID NO: 166505 - DNA, 524 bp, Homo sapiens
acatttgcaaatatcttctccttttctgtggtttatctttttactccattcatagtgtcctttgacgcccaaaaattttttaatattgatgaagtccagtttttccattttttttttgttgcctgtaccattggtcatacctaagaaatcattgtcaaacttatgtcatgattttcccccatatttttttttctgggttttacagttttagkggttatatataggcctttgatccattttgagctaatttttgtatatggtgttaagtgtccaacttcattcttttgcatgtggatatccagttttcccagtataatttgttgaaaagattctactctccccacgaataatcttggtacttttttgaaaattatttgaccatatatgttagggattatttactgggctccctatactgtttcgttggtccgtatgtctgtctttatgacaataccacactgttttgattacttttagaattgtaataagtgtgagacctccaaatctgttatttttattggttt

SEQ ID NO: 166506 - DNA, 564 bp, Homo sapiens
ttaattttgagtgatagcttgtaaagttttccctctcccctattataaaaaaaaagtcattcatgctttctagtacttgcattattaaggtctttggcccagtatttagtcaggttgtttgttttcttatttttgagttttaagggttctgtgtatattttgaataacagatctttatgagatatatgttttgcaaatattttctcccagtctttggyttgtctttttattcacttgacagtgtctttcacagaaaacaaattttcatgacgtccagcttatcagttctttctctcatgtattgtgccttcagtgttgcctctaaggagtcatcaccaaactaagcttatataaatatttttctacattatcttctaggagattcatagcattttacatttagatctgtgatccatttcaaattgatttttaagaagggtgtaaggtctgtgtgtagattcatttctttttattggcaggaggatatccagtcattccagcaccatttgtttaaagatttttttttgtattgtctttgcaatatgaatctttaaaggtcagttg

SEQ ID NO: 166507 - DNA, 550 bp, Homo sapiens
tgtctgtacaaaaaataaaaaataataatcagctgggcatagtggggtatgcctgtagtcccagccacttgggaggctgaggtgggaggattacttgagcccaggatttcaaggctctgatgagctatgatcacgccactgcattccagcatgggtgacagagcaagactctgtttctaaaaawtaataaataggctgggcgtggtggctcacgcctgtgaccctagcactttgtgaggctgagacgggtggatcacctgaggtcaggggttcaaaaccagcctggccgggcatggtggtagggcacctgtaattccagttactcgggaggctgaggcaggagaatcactggaacctgggaggcagaggttgcagtgagccaagatcgcagcattgcactccagcctgggtaacaagagtgaaactctgctcaaaaaaaaaaaaaattgttttaaataataataaataataaataaaataatcgttatttttttaaaaaagtgctggttggttctgtaagggttagagttactactttagagaggaaagg

SEQ ID NO: 166508 - DNA, 524 bp, Homo sapiens
atgtgagggattgtgttgttgttttgctttgtctttttttccctctgtgggaagtttagaggcagtcatataatatttattcagtgctaacagcacatggatcaacatcccaaggggtaagacattgaaatgtggagttgagaagttcaataaataaataaataaattgaggacacagttttatatagaagaattcaaaatgtaacggttgaattatattcagctttcttcccaggttaaaaattctagctgccacctctagttattgaacaatattatatttattgaatgttttttgtgtgcagcacactgtgaaataggtgctgttggtaccgattttctgrcgataaaagctattgagttccagaaaatgtttaaattttttgatagctaaagcctcttacacatatattgtttaactgaaaaataccatggctgatagatgcttgtttgaaaatctggtgtcctggcatcattcttctcaaatcctttggtgccattccagatgctgacattccggcaga

SEQ ID NO: 166509 - DNA, 633 bp, Homo sapiens
  misc_feature (1)...(633): n = A,T,C or G
ggcccgggctcagttcttgtcggtgctaccaatatctaaaccttttcttcttgctccaaccaatccaatgtttggtgtgtcctgaagtctctatttcagggttaccttatccctcctccatggcaaccactactatctctctactcatctaatttcctaaaacctcttacttggaggacttaacaacttctgaattcactttatatggcacaaaagcagagggaaaatagggagatagggttgctatttcaagccctgagcatttccaaggtttgaaagtgtgaggatggaggtaaagaatacacttttctaagaatgttcacatcgagtttaaccacagaagggatataggaaggaaagagggaaatggtacatrtgtttgaccatttcagcttcttcttttctcttttcttttctgacatcgagtgggtactgtacttgtgtcatattctgagtcccctctacctatggnctatggtaaatcctcaggtaaaatacacatatcagggttgctcctgatatgtatattttgaaaattaaaaaaaatagtatttcttttttctgtaaaacctagctttcaagataatgccttcttatggacacaggaaagttaactttgaatttgttctcagt

SEQ ID NO: 166510 - DNA, 670 bp, Homo sapiens
  misc_feature (1)...(670): n = A,T,C or G
cccgggctcagttcttgtcggtgctaccaatatctaaaccttttcttcttgctccaaccaatccaatgtttggtgtgtcctgaagtctctatttcagggttaccttatccctcctccatggcaaccactactatctctctactcatctaatttcctaaaacctcttacttggaggacttaacaacttctgaattcactttatatggcacaaaagcagagggaaaatagggagatagggttgctatttcaagccctgagcatttccaaggtttgaaagtgtgaggatggaggtaaagaatacacttttctaagaatgttcacatcgagtttaaccacagaagggatataggaaggaaagagggaaatggtacatgtgtttgaccatttcagcttcttcttttctcttttcktttctgacatcgagtgggtactgtacttgtgtcatattctgagtcccctctacctatggnctatggtaaatcctcaggtaaaatacacatatcagggttgctcctgatatgtatattttgaaaattaaaaaaaatagtatttcttttttctgtaaaacctagctttcaagataatgccttcttatggacacaggaaagttaactttgaatttgttctcagtagaatctgctctctctcttttccttgcgtgataaaccac

SEQ ID NO: 166511 - DNA, 453 bp, Homo sapiens
  misc_feature (1)...(453): n = A,T,C or G
aagagggaaatggtacatgtgtttgaccatttcagcttcttcttttctcttttcttttctgacatcgagtgggtactgtacttgtgtcatattctgagtcccctctacctatggnctatggtaaatcctcaggtaaaatacacatatcagggttgctcctgatatgtatattttgaaaattaaaaaaaatagtatttcttttttctgtaaaacctagctttcaagataatgccttcttatggacacaggaaagttaactttgaatttkttctcagtagaatctgctctctctcttttccttgcgtgataaaccacatggtatattataaatggggaaagtcagatttatggtggttagaaaattatttaaatttttgcaaaatattacgcctgtttgcaatcatgtctttctgctcctctttccgtctccccaggatgtttataggagagtcc

SEQ ID NO: 166512 - DNA, 330 bp, Homo sapiens
gcttactaaataaatatcctttggaaggtatctaagaaagttttctttatcctttagcttagactatatgtcaaacagtaaaatgaaaaagaaaagcccactagatatgcaccatcagtccctccagactttcttccctttccgtcctgttctgtgaccctttgttgattgctgggtccagggaataaaagcaccgataggagatccagaagtaagggaagctggagaacaggtgtttattctccgactcctcctcctsggaatgggttgcaatggctgtgctcctctgtggaaagatctctcaggtttttgtaattgctccttcccctt

SEQ ID NO: 166513 - DNA, 585 bp, Homo sapiens
atagaatatccttctttatcacaaagtattggctcagatatggaggctgagaagtcccatgatctgatattgctgtctgcaagctggagacttaggaaaactattgctgtagtctgaaggcctgagagtcggaggtcaatggcatagattccagtccaagtctgaagtcctgaaaaccaggagcaccaagggcaggagaagctccatgtcccacttcaaccatcagacagagagggaattcaatgttctctgcctttttgttctatgcaggccctcaacagattggatgatatccactcacggtggggaatcttatctgctttatgcaattgaccagttcaaatgtttatctattctaaaaataccctcatagacactcccaggaataatgtttaaccaaatatctgggcatcccatggtccagtcaagttgacacataaaattaacaatcacaattaagatgagcttcaaaacagttaattttcctttagttccgccttcttattctaaggttgatttattacygtcatttgcctttttaagaaacactcagtgacttctagagtattccaattattaaagctt

SEQ ID NO: 166514 - DNA, 594 bp, Homo sapiens
tatacaatctgtacttaacagcaattaactctggctggcagaatgttgagtgatttttaaatgagtgtagactgggcacagtggctcacacctgtaatcccagcaatttgggatgccaaggggggtggatcacctgaggtcaggagttcaagactagcgtggccaacatgaaaaaacccagcctctactaaaatacaaaatacaaaaattagccaatcatggtagcaggcacctgtaatcccagctctttgggaggctgaggcatgagaatcacttgaacccggaagktggaggttgcagtgatccatgattgtgccactgcactccagcctgggcgacagagggagattctgtctcaaaataaataaataaattaaataaataaaaatgatgagtgcattttattatttttctataactaacttgtattacttgtctaatgcctggaaaaataaaatgcttggacgtcagggacgctcaggcaggagctaaccagataaagcttaagcttgagggcctctcactagcacaaggcaatgcatttcatgttctgttgtcttttgctctccccctacctattgtgtaagcttaggt

SEQ ID NO: 166515 - DNA, 556 bp, Homo sapiens
ctctgtataattttatgttaaagagaaagtacttcattcaaatgtatgctgtttgccataattaagaaaatgtctaatatagattttcatgttttcaataactgttatgtaattaaaaatcacagttaccaggagttgtaaatctaattactctgttccctagttcttacctttttcagtttgaagcattataacttctttaaagtcaatccaaactcacaggagatggaagaagagtcaaactagaaaatgatccattagtcatgacacaataaaaaatcaagaagctttctttttaacagttgataagtagtattgactgttaagttttacatttaaaagatagttaaaagtattgcattattcaaatgataagaatttagtattttcagtaggctggccatggtggcttacacctgtaatctcagtactttgggaggccgaggcgggcggattgcttgagcmcaggagtttaaaccagcctgggcaccatggtgaaaccccatttctacaaataaataaataatagcctggtgtggtagtgcaaacccatagt

SEQ ID NO: 166516 - DNA, 556 bp, Homo sapiens
ctctgtataattttatgttaaagagaaagtacttcattcaaatgtatgctgtttgccataattaagaaaatgtctaatatagattttcatgttttcaataactgttatgtaattaaaaatcacagttaccaggagttgtaaatctaattactctgttccctagttcttacctttttcagtttgaagcattataacttctttaaagtcaatccaaactcacaggagatggaagaagagtcaaactagaaaatgatccattagtcatgacacaataaaaaatcaagaagctttctttttaacagttgataagtagtattgactgttaagttttacatttaaaagatagttaaaagtattgcattattcaaatgataagaatttagtattttcagtaggctggccatggtggcttacacctgtaatctcagtactttgggaggccgaggcgggcggattgcttgagcccaggagtttaaaccagcctgggcaccatggtgaarccccatttctacaaataaataaataatagcctggtgtggtagtgcaaacccatagt

SEQ ID NO: 166517 - DNA, 531 bp, Homo sapiens
taaaaatcctctccttggcttaggatcattgggtcaaactgggagtatatctgtgtgattacaacctgctgctatgagaaaaaagaattgtaacttgaccatgttggctcacacagggcaatgcaaaagaagtcaaaacattcatatcaggtcttggtatctgtgtcaggagaaacgtggtggctttcacagcttcttcacctctgtcctctgtcatgcarctccatttttggctaggtactatttcacatgcacactgtcctgggtgccagaaatacttgtggtgtacttggtttgagcagtacctctagtatgcaccattccagggaacatggttgtcaacataacaagtttagtgtgtgtatttgcagacaacatagccctgaaagcatgaaatgtagaataggtaaggtctgtcttagaaaggaggaggaagtaccaatttggtgcaagaagatcgtggtgaggaaggacatgggagccacagtgaagtgaaagaggctttagggatcagatgcacagatggatgct

SEQ ID NO: 166518 - DNA, 396 bp, Homo sapiens
gatctcaaataggggtaccatctggccaaggaatacactctggggcccagccaagaggygattgcagtttcaaaccagcaactctgcctgactgcagagctcagcttgtgggttcacctgatagcagagcccagccagcagtcccacccaaactcagagcaaaggcagcagcccaactatctacagaatccaaagcaagctttgcctgctcagggctgctgccagttggcctattcagaatcaaaggctagacaagtgaagttctatccctgccaaagaacacctataaaagccaaagaggtagctgtctcctcaaatgtgcagataccaacacaagaacacagattacaaagaaccaggaagccaagataccttcaaaagaaactaacaaagctc

SEQ ID NO: 166519 - DNA, 368 bp, Homo sapiens
ggaatacactctggggcccagccaagaggcgattgcagtktcaaaccagcaactctgcctgactgcagagctcagcttgtgggttcacctgatagcagagcccagccagcagtcccacccaaactcagagcaaaggcagcagcccaactatctacagaatccaaagcaagctttgcctgctcagggctgctgccagttggcctattcagaatcaaaggctagacaagtgaagttctatccctgccaaagaacacctataaaagccaaagaggtagctgtctcctcaaatgtgcagataccaacacaagaacacagattacaaagaaccaggaagccaagataccttcaaaagaaactaacaaagctcc

SEQ ID NO: 166520 - DNA, 368 bp, Homo sapiens
ggaatacactctggggcccagccaagaggcgattgcagttycaaaccagcaactctgcctgactgcagagctcagcttgtgggttcacctgatagcagagcccagccagcagtcccacccaaactcagagcaaaggcagcagcccaactatctacagaatccaaagcaagctttgcctgctcagggctgctgccagttggcctattcagaatcaaaggctagacaagtgaagttctatccctgccaaagaacacctataaaagccaaagaggtagctgtctcctcaaatgtgcagataccaacacaagaacacagattacaaagaaccaggaagccaagataccttcaaaagaaactaacaaagctcc

SEQ ID NO: 166521 - DNA, 552 bp, Homo sapiens
tctttagttcttaagagatgtagttattttcataaaaatatgtgacatgtcaaaatatggtgagtttgtaattactttaaatgttaatgttttaaaattccctgttttaatttataatatggtaaatatatagacataacccacaaaaacaagagctctttgaaatccttaataatttctaatagtataaagacatcatgagaccaaaacatttgagaactgttgagaaataaaataaaaaatacttcccatttacatttctgatacaattattctcatcatgttacagcacaggcctcatctatgaacaaacctgttyggtcactttggagcataccctctcgatgaccatgggatttgaaggttgagtggaaggtctctaattgcttctgaatgttaactgtggctattttgacaatatcagctgctgatccttggactattgtgttgatagcttgacgctcagcctagaaaaaacaatcaacaggtgctccaccagatatgccaacatggtttcatactttcctttagtgtccacagttcagtgctcac

SEQ ID NO: 166522 - DNA, 572 bp, Homo sapiens
gatttggttttctttgtttgtttgtttttttgagacggagtcttgctctcttgcccaggctggagtgcagtggtgcgatctcagcttactgcaacctccacctcctgggctcgagcaatcctcccacctcagcctcctgagtagctgggaccacaggcgtgtgccaccatgcctagctagtttttgtagagacaagggtctcactttgttgccctaactagacccgaactcctgggctcaagcaatctactcgcctcggcttcccaaagtgctggtattacaggtgtgagctaccacacccagccctcagtaaggtttttattaagtttcttagacggaaatactgatgttactgaaaatcagacctytttcatatatttgagactgcttcatgtctaactgatgatgttgtttgcaccacagaggaaaatataagaagggtttcagcgtgaatcctagatgccaggcacagatggaggagagagctgcagacagaggaatgccattttcaattagcatgcgacatgcctttgtgcctttcccaggtaaggtggctgatagctttgaagctt

SEQ ID NO: 166523 - DNA, 561 bp, Homo sapiens
gaattcatatatacctatagacatagcctaaagataattttatacaattatttaatacttttgtgcacaaaataaaatttgtgtacactgaaccatcagaaagcaaaggtatcactgtctcagtcactcatgtaggcagtctgtggttrtctggcggattagatatattgaagctgaatggggcaaggaggggcttttttcctttagagacgctgaataaactttgtgttgtacacctgtgttttgactgtgccctgtcacgtaaagtcaggtatggagtgtcctaattgtggtgtcatgtcagtgctcagaaagtttcagattttggagcattttggatttcaaaataaggttgattgttatgctgctgctaagagtagaagcagaaacatcttaggagaaatacagtctcttgtaatccagactagtcacaagattgccgactcttctactctctgcagagacaaggatagttgtccagtgctaaactagcctgtacttttccacctttcattgttggcttgaggatgctgctcgggagactggctcctgaaggatacc

SEQ ID NO: 166524 - DNA, 363 bp, Homo sapiens
tgatctctccttaattaaattaaatccacaccaccraggcacagaacctgctcaggagggcatagtgattaagagcagggcttggtgtcaggatgacctgagtgtgagtgttggtactggcatttactctatatgccttttggtcaattacttaacgtctctcagtatcacctaacttgtgtaaaatgatggagctaagaaacagtattcgcctcttagtgtaattgttaggattaaatgagacatatgcaatgcatttagcacagtgcctggtataaaatgagcttcataaaattctaacttcattcagtgttttgattaagcccagtttctgaaatggaagggctgagccctcccctggaa

SEQ ID NO: 166525 - DNA, 591 bp, Homo sapiens
ggcataactcgtgacttcctaatagtccaaattaatggcttctggttgtttttctcctccgcgtccctgcagtatttgaagaaactaggctctgtcagcgttccctctcttcttgtcacttctcactgtgttagttttcattctcttctcactttgttgactatgtctcctttgcatccccttgctctctaaatgtgggcttcctacccttatctgcagtctcattttccttagtttcagttaccatcggtcaactgtggtgtgaaaatattaagctattttgagagagagaccacattcacatgactgttactacagtatattgttataattgttctattttattacctgttattgttgttaatctcttactgtgcctaagttataaattaaactttatcacagatatgtacgtatgggaaaaacatggtatgtataaggttcagtactatcttcagtttcaggcatccgctaggggtcttggaatgtataccmcatggataaggagggactactgagttagttttctatttctgctataacaaagtcttccaaatttagtggcttaaatcaacacaaatttattggtat

SEQ ID NO: 166526 - DNA, 615 bp, Homo sapiens
ttaagctttcttttttaagacttacgggcagcactgttttgtatgttttacatattatattgccttatccctagccaaaaacaaaacaaaacagtaagccttctcatactctttgaacatatttgcctgcatctgaaatatcacaataacactcaaataatattattgccatctaaagatgtattcaggcactacaccaccagcaattataaaacatcccttttttgttagtttaagaagtttgcatgcaggtgttaagattatgggaaatcggtggtgaaatatacaatcaggrcctacatttttttaaaaaaatatataaattcttgtaaactatgatttacctgtgacagcagagatcttttctctgtctctcagaatagtattgtcatttcttttttggcaagaagaagaggcccctcctcttctctctaagtgttaggctaatacttaggtttgcagtgtatgtttttataactttcagatggtgtgaccatcggaaacagggcaggcaaaaccatggagttaaaaggagaggagtcactaatttaaaggtgttggaggcattctttgaattggagcagtcctaccatgggccccaggggcatgatgtcc

SEQ ID NO: 166527 - DNA, 618 bp, Homo sapiens
taggtgcctccaggggccaggcgggtgaggtaaatgagtgaaggggtcaccaccggtgacagggagttccaggtctgagtcattaaagtcactaaaccacacagcacaaaggcatctgatatggtttagctctgtgtccccacccaagtctcatcttgtagctcccataagtcccatgtgttgtgggagggacctgatgggagatgattgaatcatgggggcagctcttttctgtgctattctggtgatagtgaataggtctcatgagatctgatggttttaaaaatgggagtttctctgcacaaggtctctttttgcctgctggcatccacacaatatgtgacttgcttctcctcaccttccaccatgattgtgaggcctccccagccatatggaactataggtccaataaacctctttcttttgtaaattgcccagtcttgggtatgtcttyatcagcagcatgaaaacagactaatacagtaaatttgtaccagtagagtggggtgctactgaaaagataccagaaaatgtggaagggactttggaactagggaacaggcagaggttagaacagtttggagggctcagaagaagacaggaaaatgtggaaaagtt

SEQ ID NO: 166528 - DNA, 574 bp, Homo sapiens
ctctctttttctctgtctctcatgtttgcgttcatgcaatgtagctaagtctatcaatcttgtttatcctttcaatgaaccatatgatcatctcaacagatgcagaaaaagcttcaacataatccaatatcccttcatgataaaaagcctcaacaaaccaggcattgaatgaacatacctcraaataataagaaccatctatgacaaacccactgccagcatcttactgaataggcaaagctagaagcattccccttgagagccagaacaagacctattcaacatagtactggaagtgatagccagagcaatcaggcaagagaaagataaaagacatccaaataggaaaagaagaagtcaaatattctgtcttcaggggtgatatgattctatacctagaaaactctaaagagtccaccaaaggtttcagcaactaataaacaacatcagtaaagtttcaggatacaaaatcaaagtacaaaactcagtagtatttctacacaccaataacgttcatgttgagagccaaatccagaatgcaatcgtatttacaatcaccacacacaaaaaatac

SEQ ID NO: 166529 - DNA, 542 bp, Homo sapiens
tcttttgttcctgctgctggagcctccttggctgattaagtctgaggcttcttccaggttttgttggtccatgaatggagcctcttcagtgctcactggagtgcggtatcattgatacttcctccgcctggctccctccctctcccagcccagcagagctgatggattaatcctrttgtgcgcttgtaagtctcccaggcagaaatgtaagctagggtagaaaaagacggctcaggttggatgggaccacagagaccttcctttctaatactcctcattttacttaattaggcttcaagaggtatagggcagagcagtgaagggcctggcccaagtctctcagagggttggggcaagtctagacttccccagggctttctactttacttgttccagcacaggcccttctcagtgggaagcctgcaagaatttttttgcccttgctgtagaacagtaacattgtatctacatacagaacaataacactgtatctagatgcatcttttacatttttacagcaaagtgaaggacctgctgactaa

SEQ ID NO: 166530 - DNA, 542 bp, Homo sapiens
tcttttgttcctgctgctggagcctccttggctgattaagtctgaggcttcttccaggttttgttggtccatgaatggagcctcttcagtgctcactggagtgcggtatcattgatacttcctccgcctggctccctccctctcccagcccagcagagctgatggattaatcctattgtgcgcttgtaagtctcccaggcagaaatgtaagctagggtagaaaaagayggctcaggttggatgggaccacagagaccttcctttctaatactcctcattttacttaattaggcttcaagaggtatagggcagagcagtgaagggcctggcccaagtctctcagagggttggggcaagtctagacttccccagggctttctactttacttgttccagcacaggcccttctcagtgggaagcctgcaagaatttttttgcccttgctgtagaacagtaacattgtatctacatacagaacaataacactgtatctagatgcatcttttacatttttacagcaaagtgaaggacctgctgactaa

SEQ ID NO: 166531 - DNA, 416 bp, Homo sapiens
ggccaggcacagtggctcatatctgtaatcccagcattttgggaggccaaggcaggcagatccctggaggtcagaagttcaagacaaacctgaccaacatggcaaaaccccatctctactaaaaatacaaaaaattagccaggtatggtggcacacacctgtaatctcagctactcgggaggctgaggcaggaraatcgcttgaacccaggagggagaggttgctgtaagccaagatcgggccattgcatgtcaaccttggcaacaaaagtgaaactctgtctcaaaaaaaaaaaaaattatccaaagtgaatgtagccacgttctgcgcacgtatcccggagcctaaagtaaaataataagaaaaaataaacagagatgaaaaaaaaaaaccaaagtgaaggtagcgttttctgt

SEQ ID NO: 166532 - DNA, 388 bp, Homo sapiens
ccctgctgctgctgctgctaggggaacttcatccaataaaaataggtatcaaagctcaaataaaacaaaacagagatgtcatgttggaacagagtgcctcttaaaaattaaagtgaaaaggtaaaacataatgttaaatagaattttatgacataagaagatgtttctgataytttgttaagcgaaaaaggttataaaaacatttgttcgtgatgatatcattttttgttaattttatataactgaatgtgtatagaaaacattggcctggtgtacccgagactgttaacagaggtgggattacatacagttcttttgtattttcctgtgttttccaaattttctacaataaacattattttaacaagtcaactcttctgtaaagcat

SEQ ID NO: 166533 - DNA, 583 bp, Homo sapiens
cctctggtaactgttatacctactttctgtttttatggatttgcctgtcctgcacatttcatataaatggaatcatatcatatgtggcctttagtgtctgatttatctagcttaatgttttcaggattcatcatgttatattaacagcatgatcagtgcttcactccttttaaggggtgaatggtgytccattgtatagatgtgccatactttgtttatctactcgtcaattagtggacatttgggttgtttccactttttagctgttatgcataatgcttctgtgaacattcatgtacaaggttttgtatggatgtatgttttcaattcccttggatatataccaagaagtagaattactggatcatatggtaattctttgtttaaattttgaggaaatgctaggctattttctaaagtagctgcaccattttacactcccacctgcgatgtgtgagagttccattttgtccacattctcaccaacatttgttattggccacctttttcactatgtccattctaggagttatgaagtgtctcattgtggttttgatttgtatttccctaaagagtgatgata

SEQ ID NO: 166534 - DNA, 424 bp, Homo sapiens
aatggcttcttgatttccacgggttcacaaggtcctccstgccataacgcctcttcccactcaagatttctgaagggcctgaggcttctagtgactcttcaagtcagaagcaaaaaccaaggaaagctttgcctccatctttccaataatatttcttcagcacctattaataaaatctgtgataaaaagtagaaatggagatgcgtttaggactacatccacgcacatcttccccaaagcaaaaccccaaccccacacacactcccctctctgagcctgggacctcctcctgcctctcaacaaggtctcattgcacgttagccattttcacctcaaaaactaggaaccttcgcccagtttctcagaagaaggggtcctcatcagcagagaaagtccctctcctcccttgtatctttctggaatt

SEQ ID NO: 166535 - DNA, 507 bp, Homo sapiens
ggcaccacctgggaacactattattagccaaagatagtttactttgcatatgctaagagtgaaatgacatttctataatatatttagcaatttagatttttgcctattcagcaggtttttcttctttctaaattagtagtttttattatgccattacatcctcataattttgtatttactgttttaaaacttgcttctaacatttcagggtcaagttaaaactgcttgtcctctcatagggcattttccagcccttcargtgggtagctgtatttcttgtttcactgcatcttgataaccctgactcctatcactgcgcatcacttaccaaactcttccttggccctcagccccattcagacttcaactccttttccccactctagctttttctctggccagccttttattattgataatagaaacatcattttcacttttctttctgctgctgtgtagttgatatttgaatgatttcacctgaagcagacatttattataaaaatg

SEQ ID NO: 166536 - DNA, 515 bp, Homo sapiens
tccagtaaggcaccacctgggaacactattattagccaaagatagtttactttgcatatgctaagagtgaaatgacatttctataatatatttagcaatttagatttttgcctattcagcaggtttttcttctttctaaattagtagtttttattatgccattacatcctcataattttgtatttactgttttaaaacttgcttctaacatttcagggtcaagttaaaactgcttgtcctctcatagggcattttccagcccttcaggtgggtagctgtatttcttgtttcactgcatcttgataaccctgactcctatcactgcgcatcacttaccaaactcttccttggccctcagccccattcagacttcaactcyttttccccactctagctttttctctggccagccttttattattgataatagaaacatcattttcacttttctttctgctgctgtgtagttgatatttgaatgatttcacctgaagcagacatttattataaaaatg

SEQ ID NO: 166537 - DNA, 488 bp, Homo sapiens
  misc_feature (1)...(488): n = A,T,C or G
tgctaattggagcaaaagtcaacactaaagtttgccacctagccaggcctcagtgggaaaaaaaattcttgtgtgaaattgaaaccaagactgcactgacttaaataaytcataattttaaaatggagacaatgtagcaataaagattataaatactaagtgattataatataaaagaagtttatttttaaaactaacaaataaaatttcttgaaataaaaactgtagtcaatacaattaaaaaatctatgcaaaaattcaactacagattagacacagctgaaagtanaattaataaactgggagttgtatctgcgaaagtcatataaaatgtagccaatcaaaataaaggcatattaaatattcaatgagtaatattcctatatatttttatatattctataaaagacacaatgtatgatggttaatttatggtgtctatttggctaggctacagtatttagttgcttggttaaacaccagtccag

SEQ ID NO: 166538 - DNA, 524 bp, Homo sapiens
aaggccttcaacagagatggacaatcccagaaactcagccctgtgaacacattgcctgcaaacttccaaagctgcttggattcagggtagaagaaacgattagagaaggtcctacaatgcattttggtgtaagtttttaagtggcctatatcattacaaaaggagtcatgatcyccctttttaataattgcagaaccccaattttccttttgtactttttgtcatggggtgatatcagattcatcacatgtaaatgacaagtaaaagagacattggcctgtacaagagtgggaacacaaataagttgtacagaaagatgaaacaatcattttgtagtttaaaaatactgagcaaatttcctgtttttaacaagcacgagagattcaaaaaccagacacctagacttagtgattccacaatgcatatatacatcaaaacatcatgttgtatatggtaaatatgtacaatttttcctttcaatgtaaaaaataagttttttaaataacagaaccaaaaaccagaca

SEQ ID NO: 166539 - DNA, 539 bp, Homo sapiens
ggtatactaagagttttacattttagatttagaataatttttaaatctaattcttatttcactcatgtagaatgcatttaacagacttcctgactaatggccatgtaacctgtgattgaactcttccagggatagagagctcactatttttaaaagacccaatgttgttctgtttggtccttcctgattttctgcaagttaatttatcttccatgcttcaacaatttataatttaaaatcattttttaatttagggtacaacatgttaatttatttactgaattaaacaacatattccctaatatactatcttgttttgtcttacaaacactgttcaggaatttaagaataggattcatggatttcaacagatctttttattgctgaaatgttttactttctctttttttttaaacatatgttctggatagtatttgctaggatttttggaactgaaattataattccaaagcctcrtgagtcaggaagccactttagttttctatagcttagtaagtgaactttatcaagacagagac

SEQ ID NO: 166540 - DNA, 571 bp, Homo sapiens
cccagctactggtatggctaaggtgggaggattgcttgagcccaggagcttgaggctgcagagagccatgattatgccactgcactctagcctgggggtacagagcaaaaccctgtctcaaaaacaaacaaacaaaaacccacaaaactgccaccatcttctcttctctaactctctatcccttaactctcttattttttgacagtcacagtaaagcagaaacactacacaatgccccttaagcgcccatgagcctctcagagagtctggcctcagaaggtgaaatgcagcaattgatgaggctgtgctgaagccatgactcaatgtcttggaagccrcctcttactagcatatgggaaacatcataaggctacttctttgcctaagtttggcagtcaagcaattccagataaccctccaacttggaacaaaataaagtccagattaagaatgtaatctggaagaagaacagagggagagcttttttatctctttatctcagaagagtacatttttagggttcacctagaaattgagtaagagaccagggagataccagaacatactgtct

SEQ ID NO: 166541 - DNA, 560 bp, Homo sapiens
tgaagtctaaatctcccaaaggaaatgctgccttagactttaggtcttaggattaggttctccttctttatcctcaaggcayagatacacactaattggctttctcccctctaagcctcacgtaggttgaggacccaggccaaggaaaagggagccagagttagaaacctggaagttatgctggtgtagcagcaaagaagtcctatcctagctctccctcaacctcctccaggtaaccagcactcttagaaggtgtccaagtgcagttactaaagccctagaagattatgccgtggtctcaaagaggatccaaagattatgcactgagaacttgaagaaattattagaaaccctgtgtattttgtatctcactcatttttattcctatttttatatattttacatttataatatattagtatagtttatagtaagttaatatagcagttcattattatttatatattattcgaaaattttaaaaaatgtgtatgtgaggtcctgtgaccaattattattattttaataaatctgcttttactggagagaagagagactcc

SEQ ID NO: 166542 - DNA, 560 bp, Homo sapiens
attaactgatttaaaaaaagatacagaagaattaaatgaaacatccatatttaaataagttgttggtaatactcagataataaaagatattttgaaagctactgagaattcaaaggagactgatataaatggtaaaaaaaagattataatataggttggaaaataatttgggagaagacggattaatccttagattcactcatcaattttgtagaaaggcaatggtgttaaatttagtttaggaggccaaagaattgcacattcttctttcctttatgagaatgagataaagaacaagaaaacaagctgaaatcaaagaatcagtcaaaagtaaaragggtgacaagctaagatcaatgaggatcagttttaattcctcctattttacctgataattgcctggttattaattttgtagtgttaattaatattactcatacttaatgaggcactgcaaaattctgagtcattaaggaaagtcaaagtatatttccatgtttactgagaaaacaaagaatacttcttttttaaaatttcaataacggaagtgcaacaaggaa

SEQ ID NO: 166543 - DNA, 560 bp, Homo sapiens
attaactgatttaaaaaaagatacagaagaattaaatgaaacatccatatttaaataagttgttggtaatactcagataataaaagatattttgaaagctactgagaattcaaaggagactgatataaatggtaaaaaaaagattataatataggttggaaaataatttgggagaagacggattaatccttagattcactcatcaattttgtagaaaggcaatggtgttaaatttagtttaggaggccaaagaattgcacattcttctttcctttatgagaatgagataaagaacaagaaaacaagctgaaatcaaagaatcagtcaaaagtaaaaagggtgacaagctaagatcaatgaggatcagttttaattcctcctattttacctgataattgcctggttattaattttgtagtgttaattaatattactcatacttaatgaggcactgcaaaattctgagtcattaaggaaagtcaaagtatatttccatgtttactgagaaaacaaagaatacttcttttttaaaatttcaataasggaagtgcaacaaggaa

SEQ ID NO: 166544 - DNA, 488 bp, Homo sapiens
tatttattggaatgtcatttccttttcctttattgatatgaagtaatactttcactgataaaacagttttggagattcaattatttaacacttagagcatcgtatctctatctctatctctttctctcttcctctctccttccctttctccttccatttctcccttttgtgcactcatgcatgagkatgcgtaattcttaaagttaataaagcctgggtgtggtggctcatgcctataattccagcaacttgggagacctaggtgggaagatcacttgagcccagcagttcaagaccagtctatgcaacatagtgagctcctgtctctacaaaatattttaaaaattagctgggcatagtatcatgtgcctgtagtcctaactacctgggaggctgaggtgtgacgatcacttgagcccaggtattcaaagttgcagtgagctgtttattatttataataataaataaataataaagttaataaaaac

SEQ ID NO: 166545 - DNA, 549 bp, Homo sapiens
aaacctaggtggaagttaattacatttctgaaacaaygaatgaaatctaaatggattctggaatgtaaaacgcaaatggactttttagttctaagctactgtccagactcacaagtattgtcttcatctgtttggtgctctataacagaatacctgagactgggtaattatgaagaacataaatttatttctcacagttctaaaacctgggaagtccaatatcaaggtgctgacaggttagggctcagtctctctatttccaagatggcaatttgaacactgcatcctccagaggggaggaacatcatgtcctcatatggaagtagagcagaagagagagaacctactcccataagccctttttatagcaacaagctatagtttggatgtttgtccctctaaatctcatactgaaatttgatccccagtgttggagggagggcatagtgggaggtatttgggtcagggggagagatccctcatgaatggcttgctgccatcctcatggtaataagtgagttctcactctattagttactgcaagatctg

SEQ ID NO: 166546 - DNA, 497 bp, Homo sapiens
aaatttatttctcacagttctaaaacctgggaagtccaatatcaaggtgctgacaggttagggctcagtctctctatttccaagatggcaatttgaacactgcatcctccagaggggaggaacatcatgtcctcatatggaagtagagcagaagagagagaacctactcccataagccctttttatagcaacaagctatagtttggatgtttgtccctctaaatctcatactgaaatttgatccccagtgttggagggagggcatagtgggaggtatttgggtcagggggagagatccctcatgaatggcttgctgccatcctcatggtaataagtgagttctcactctattagttactgcaagatctggttgctaaaaagaacataataccwtccccctctctctcttgcttcctttctttccatgggatctctgtacatgctgacccctctttcccttctgctctgagagtaatctgctggaggccctcactaga

SEQ ID NO: 166547 - DNA, 554 bp, Homo sapiens
cacctctgctatttcgtggtgtttggttgcctacattatttttttttacattcaataagatttctttgcagtaatccattggagaggtagggatagttaaaactaaatatcatcatctgaaattcatttaaccaggcccatgtgaaccaaaactgttgtaacaacctggaaatgaataaatgagggaggatgagacaattgacccctctgcattgtggaaatcctgtcattcccatcagatgccttgtgaattgcacataacatgtractatcttttatatggaccaagagagggcttttattgagtataggattcccatagagccagctgatgctttggaaagaacactgattgaagaataaattgtctatcccaggaagttaataaagcagcttcacaatattagaagagctgtcaccattgttttactgtctgacttgtgaacctgtgagagttattggctcatgtgtatgaatccacagataaactgatttaaaagatgagtgtgtgctcttagatggagggtagtatgctcagattgtacaggttgtaa

SEQ ID NO: 166548 - DNA, 554 bp, Homo sapiens
cacctctgctatttcgtggtgtttggttgcctacattatttttttttacattcaataagatttctttgcagtaatccattggagaggtagggatagttaaaactaaatatcatcatctgaaattcatttaaccaggcccatgtgaaccaaaactgttgtaacaacctggaaatgaataaatgagggaggatgagacaattgacccctctgcattgtggaaatcctgtcattcccatcagatgccttgtgaattgcacataacatgtgactatcttttatatggaccaagagagggcttttatkgagtataggattcccatagagccagctgatgctttggaaagaacactgattgaagaataaattgtctatcccaggaagttaataaagcagcttcacaatattagaagagctgtcaccattgttttactgtctgacttgtgaacctgtgagagttattggctcatgtgtatgaatccacagataaactgatttaaaagatgagtgtgtgctcttagatggagggtagtatgctcagattgtacaggttgtaa

SEQ ID NO: 166549 - DNA, 613 bp, Homo sapiens
tcacaatattagaagagctgtcaccattgttttactgtctgacttgtgaacctgtgagagttattggctcatgtgtatgaatccacagataaactgatttaaaagatgagtgtgtgctcttagatggagggtagtatgctcagattgtacaggttgtaaatacagaagacatttaaatgggcttatagaagtttggtcttaatagtgagacatctaagagtttttcagttggtagtgaaagcatgaatgattttatctggagataagtcagagcacaataacaatagctaccactatcagagcatccacaatatacctggtattgtggtaatcacattacatatattatttaatctgctctttacagcacctcttcaagatagatattaccatctgagacgttaaatamcctgcccaaggatacatggtcagtgaatggaggagtcaggatttgaatcgggaattatgtgtctccttgacagagtctttttgcattatacctcacaatcaagactgatattagagatgtcccattctatcgtagcttgcatagtattttatgtacaatatgtatgtaaaaatacaatatgtatttcctaacacatattaaaac

SEQ ID NO: 166550 - DNA, 613 bp, Homo sapiens
tcacaatattagaagagctgtcaccattgttttactgtctgacttgtgaacctgtgagagttattggctcatgtgtatgaatccacagataaactgatttaaaagatgagtgtgtgctcttagatggagggtagtatgctcagattgtacaggttgtaaatacagaagacatttaaatgggcttatagaagtttggtcttaatagtgagacatctaagagtttttcagttggtagtgaaagcatgaatgattttatctggagataagtcagagcacaataacaatagctaccactatcagagcatccacaatatacctggtattgtggtaatcacattacatatattatttaatctgctctttacagcacctcttcaagatagatattaccatctgagacgttaaataccctgcccaaggatacatggtcagtgaatggaggagtcaggatttgaatcgggaattatgtgtctccttgacagagtctttttgcattatacctcacaatcaagactgatattagagatgtcccattctatcgtagcttgcatagtattttaygtacaatatgtatgtaaaaatacaatatgtatttcctaacacatattaaaac

SEQ ID NO: 166551 - DNA, 637 bp, Homo sapiens
acaggcaagaaatccatctacttctaacccgttaacataattcaactattatttgtacatatttattttagtctttttcttctggcatgcatattctcatatgattattatcatgcttgtaaaattttctttcctaattttattgcttagtagtatgtgcttttcctcacattgctacaatattgatcattgtaatttcaaagctgcataatatcccatcaactggatttaaattcatcaattttttcactttgaaattccttccagatataccctattttaagtaatactgcaataaacatcyttgtgcttgaggattttcccttctttttggatgagttcctacaatagattctgttaagtagaactggtgggacaaataataggaagcttttgaggcttttgatacatattgtcaaataatttttccaaagcgtcctattaaactatagcacacagctaccacaaactttgccacccgtgcacagtgataagaaccttgtgccacagtgtaaattgattcacggcttcctttacctagaaagtctcactctataaccattaatatcagcttaattgctagcatgcttaatcatatggttcattgatattgtggtacttctagaagcagtttagc

SEQ ID NO: 166552 - DNA, 637 bp, Homo sapiens
acaggcaagaaatccatctacttctaacccgttaacataattcaactattatttgtacatatttattttagtctttttcttctggcatgcatattctcatatgattattatcatgcttgtaaaattttctttcctaattttattgcttagtagtatgtgcttttcctcacattgctacaatattgatcattgtaatttcaaagctgcataatatcccatcaactggatttaaattcatcaattttttcactttgaaattccttccagatataccctattttaagtaatactgcaataaacatctttgtgcttgaggattttcccttctttttggatgagttcctacaatagattctgttaagtagaactggtgggacaaataataggaagcttttgaggcttttgatacatattgtcaaataatttttccaaagcgtcctattaaactatagcacacagctaccacaaactttgccacccgtgcacagtgataagaaccttgtgccacagtgtaaattgattcayggcttcctttacctagaaagtctcactctataaccattaatatcagcttaattgctagcatgcttaatcatatggttcattgatattgtggtacttctagaagcagtttagc

SEQ ID NO: 166553 - DNA, 602 bp, Homo sapiens
tggccagaagcagttcatcctgtagatgaaccrtgatttacctaccagtccatagtggtgcacacataagtgattcattctttaactcattcagtaaacatttattgaattcctattatttaccaggcacttttctaagggctgaggatacagaagggaacaatacatggtcccagcttttgtgctagtgggtagaatagaaaatacacaataaatgtgtaacacattggtaaacaatggtaagtgaaacaaaaataaagcaggaaatggggtagtgaatgataggggggcttgtttaaaaattatgaccaagaaaaacttatctgaggaatatctgcacagaaatctgaatgagtaagcagtgagccatttgtatataaggacagagtattccaacagaataaagggcaaaggccatgacacgggcatgtgcttagcctatttaaggaataaagtttcagttatgcaagatgaaaaagttgtagagatcttctgtgcaacatcatgcctacagttaacaatactgtattgtgcatttacaattttgtgaagagggtagatctcaagtgttcttaccacaataataaagaagggcagcaagg

SEQ ID NO: 166554 - DNA, 649 bp, Homo sapiens
ttacccttatagaacttgactcagtgtatcatattctctatgtgtgtgtcaggytaggtcctctaagaaggagatgccaggagagaaatagacaagcaagagattaatctgggggaaataactacaaaaaataaagtgggaagagaacagagtaggtagaaagagctttcagactacgatgcagtttctacacttgtacaaagagagaggaaggaagaaggttgggtaggaaggacctcagacttcagttgagccctgagaaagtttcacccaggaaatggggagctcgagaacaaagactgctcatcaaaggagttctgcattgggctggaatcacccatctctagttcccaaactattctgtcattggctgagagcagctctgagagaatgtagcctcagtgatgaatgctggtatggatcagaaggtatagcagctggaggatgtccaccaactacacttttgccaataggttctcttgcaggaagatttgagcagcatatgcccatggtcattagagtgtgacactggagaagttttatcatctctctgaactgcatttgcaaaatggagttaatgtcatttttgttaccaggttttgagaggactaaataagtaaaaagtatctggtatagtatgtggacttaa

SEQ ID NO: 166555 - DNA, 649 bp, Homo sapiens
ttacccttatagaacttgactcagtgtatcatattctctatgtgtgtgtcaggttaggtcctctaagaaggagatgccaggagagaaatagacaagcaagagattaatctgggggaaataactacaaaaaataaagtgggaagagaacagagtaggtagaaagagctttcagactacgatgcagtttctacacttgtacaaagagagaggaaggaagaaggttgggtaggaaggacctcagacttcagttgagccctgagaaagtttcacccaggaaatggggagctcgagaacaaagactgctcatcaaaggagttctgcattgggctggaatcacccatctctagttcccaaactattctgtcattggctgagagcagctctgagagaatgtagcctcagtgatgaatgctggtatggatcagaaggtatagcagctggaggatgtccaccaactacacttttgccaayaggttctcttgcaggaagatttgagcagcatatgcccatggtcattagagtgtgacactggagaagttttatcatctctctgaactgcatttgcaaaatggagttaatgtcatttttgttaccaggttttgagaggactaaataagtaaaaagtatctggtatagtatgtggacttaa

SEQ ID NO: 166556 - DNA, 476 bp, Homo sapiens
ttggggtatttattaccttcgttcttaatataatttttagcttttatagtttaagtattattaatggttgtatttaacaaccagcttgcaaaatttctgaaaatttaacagttgatgctttggagctagcgcaagccagctccagcattccactcactaagtgttatgaagattaaaaagaaataattaattttaaaatgccyaatagtgtcttggaggatcataggtcttaagtaaatcttcattttgtttcctcttatttcgtgttttattaagccccatcctactcctcggagtccatgacagcatctttagttttaacaccaattccaaagacaaaatagcttcatgcactgttttgaatattcagacaaactggtaagcaggatttacttactattattctgctaaaaagggtcagcttgaatatatagaagaaagacaccgacatctccatctaccttgtaattgtgtgt

SEQ ID NO: 166557 - DNA, 634 bp, Homo sapiens
tcagttctctcacatgtaaaatgagaatactattaatacctacctgaacgtgcttaggatgcaggaagcaccttatgaaagatagctactgtatgttcagttttgactggcccaatcctgccagcttgaatcagaataagatgagccactgactatagcagcaatggtcagaggatgaactgtggggataaaatatataagtgtttagaactgtgcctgacaccgagtaagtgctttgtaagtgctgtcactggctgccagtttatgtacaacttaatggttaacttatcatccaaactgagaaagttttgagagtgttaagtgtaatactttggttttaaacaacaggtgaaaaccaggactgtctgggggaaatcaggataatcttaggcaaacagacagatattccaccctacacatccacccagctcttccaacttcccggaatatacactgttaatagtttcttaaaacttctccttttcttcataagtgtgcaagcaaacatacatacatttttaaaatttttcttcctttttacacaaaagataacattcrctgtttattgtttgctgcttcattttttttcacttaccaataatacatcctggagatcacttcattgcaacacaaa

SEQ ID NO: 166558 - DNA, 421 bp, Homo sapiens
ctttcccttgatcttgcaccttttagtgacattttataacaaacatcctaaaatatttttgtacacttgctgcttctactttcttatctctcattcaytttttgattcacttcaatcaaaattcctcactttttgattcactccaatcaaaattcctcacctgctaactccacctaaactgatcttgttaaagtcaacaatcgtcttcctaaattcaaatagttacttttgaagctttgttttgaataactcataacagcatttaacatagttctatcaaaacagaactcttgatttccatctctgtaccctaaatctcttcctttgcagtgcctcccttctcagaaaaaagaagctccatatatctagcagctcacactataaacgtaggcatattttttcatctctctcatgttctatt

SEQ ID NO: 166559 - DNA, 517 bp, Homo sapiens
cctgactgctatgtgcatgggaaacattgccttttcactgtggtagttatagccatatatggttggtgttcacttgtatcatggtaccaaactagaagtgttttgaaggtcaataaacttggagctgtaagaaccaaggagattgttttctctttcttagaataatataatattagaactggcgagtaccttatagcactaacccaaacctttattgtacaagtaagaaatttgaagcccatagaagtaaagtaatttctccaaggtcaaacagttgtgygacccctttgttcactatgccctgcatttgtcttagggacaaaaaatgtgccaactgactttaggctgatttttggaattttttttctaagttgtaaagaggtagagcaaaacaaagacagggatgaaatgggggaggggacataaatgttctttgtgatataaggggaagactctattttttgtctcttaaaattgtgatcataattgcaattaggtaaggatacctaattgcaca

SEQ ID NO: 166560 - DNA, 490 bp, Homo sapiens
ggcaaagaaaaaaaggcattgggggtcactggcttgaaaggcttgctcctttgaatagatttgggctgctttcacgataaaattcccttaaaatttttatagccaagtagatttaaagcaggaattacaaagcttttgtgttaaatacaatcctaatcatatctgcattttttttaagaaaagaggactgttgtaaattttagataacctgtactktaattcatggatatggtatacattaattatggtataattaatacatgcttattctggattttgaacagcgatatcatataagaactcatgtttacacattttgcttaatgctttaaaacataatccttcctgtttctctgatataaaagtaatatatgcatgttcattaaaaacctagaaaactttatttacaacttagaaaataccaaaattcgcaatgctaaaaattaaaatcacctataatcccatgactgtgaaagaaattaacattaac

SEQ ID NO: 166561 - DNA, 596 bp, Homo sapiens
ccacaaagcttatgtcatcccacttggaaacttttagcagaaacatgattacacattggacataaaggtactgccacgttagaaagaaattctgaggagagctttgctccaatattgtccccaaggtctttcctcatgagttgccacttcactcctccatgcatgtggattgcagacattgctagtgaatcatgctattcattctcatcctgtctccacaagtaagatgggcagtcaccaccaatcaacaggcactggcagatgatgaaaagcctagcagctaaacttgagcctgttaagtcttttgagcacttccgcatccagtctccaccaaatagggcaatgacagacttatcttataaaagagtcctgttttcatgagttgctttgttctttagaaaaaacaaagaaaacaaacagtagttcagtatgtccagtgcatgtcactagccacaagttgctatttcaatttaaattaaaaaagttaattaaaaatatatctcctcaattgccctagccacagttcaagtgcttaatagacacgtgttactagtagccrctgtattgtccatcaccaatacagaatgtttccatca

SEQ ID NO: 166562 - DNA, 454 bp, Homo sapiens
tgactgtaaccatcttggactctttagatctttctagctgccagatgaacaccgctgagtgacctcatctatgccatatggaacagaagaatcatctagcagatgatctagtgatctgagaattgatccttctcaaattcctggcctacaaaaattatgagataaaattaaatggtttttgttttaacccactacrttttggggcagtttgttaggcagcaacagataattgggaaatgctgctaccctctcagattgatgatccgttcattctatatctacattaataatgggaagtaacaacaatcctccactaacccctacacatacatatattcacaatacaactttaaccttccatttctatgataagtgatctagctagatcatgaaatctaatgtgaagctgtttaactctggaggtattttgatatatggaagtggaaaaagtgat

SEQ ID NO: 166563 - DNA, 478 bp, Homo sapiens
tgtccccacggcgtcagacatgtgactgtaaccatcttggactctttagatctttctagctgccagatgaacaccgctgagtgacctcatctatgccatatggaacagaagaatcatctagcagatgatctagtgatctgagaattgatccttctcaaattcctggcctacaaaaattatgagataaaattaaatggtttttgttttaacccactacgttttggggcagtttgttaggcagcaacagataattgggaaatgctgctaccctctcagattgatgatccgttcattctatatctacattaataatgggaagtaacaacaatcctccactaacccctacacatacatatattcacaatacaactttaaccttccrtttctatgataagtgatctagctagatcatgaaatctaatgtgaagctgtttaactctggaggtattttgatatatggaagtggaaaaagtgataa

SEQ ID NO: 166564 - DNA, 420 bp, Homo sapiens
aggaaagattataaaccccatccccttaaattgcctttaaataaaagtttaatttaaaaaaactatataaattatatgcttcttgcccaaatgccccatcaaggaaacaaactcattcatgtcagaacaaactttgggattagaccaatttctaagaaaaaaatgcaagagggaaatgtgcagctaatgagacttaatggggaaaaagagctaatatttattaagcactgtattggtcagcatacactggattatatcactgtaacaaataagcyccaaatctcagtgacttgtacaagaaaagctcatgtcttgctttggctacaggtcaaagttaggttggtatctgtgtgggggttggtgtgtcttcactcactgaagttatgcagagacacagataagtgaagcttcatctcaaca

SEQ ID NO: 166565 - DNA, 481 bp, Homo sapiens
ggagacagctgacctatcactgtaatgaacatggagatggaccacccatatcttccttcatgcctgttgcagctgggagtgcagttagcaattagtcctcatctatcagcctctttggagatcacctcagttgcaaagtaaactataaacaataaagaaggaaatatcctgatatgaaattgaaggtggtttctgccatattgggaggaaataaaagttctgcctgagttagagatgcctggagagagggtgtgtgygtgtgtgtaaaacagcagtgctgaaacacgagttgagacctgccctctgcctccttctttaggaatagatggaatagaaactgtaaatggacttaggcttgaagtgcctgggccaacctgtgccagcctgggccttagagtgcctgggccaacctgtctaccacaaaacagaaatggcagaatggcatcgtgaaggagaggagagagatgagaaagcatatttt

SEQ ID NO: 166566 - DNA, 584 bp, Homo sapiens
aaattagctgcgcttggtggcacatgcctgtcccagctactcaggaggctgaggcaagagaatcacttgaacctgggaggcagaagttgcagtgagcaaagattgtgccactgcactccagcctgggcgacagagcgagactccacctcaagaaaaaaaaaaagaaagaaagaaaagaaggagggaaagaaagaaagaaaaagaaggaaagaaagaaagaaaagtgaagcctcttttcagagaacatcagatcttagttttggaaggaaatccaattgtatgctgctcacacttctaatatacctaasaggtagataatagtgattctgcttgaacatttccagtgatggagaacttaactacccctcagaaaatttcattttataattggataatttagttatgaataaacttatattttatattgaacagaaatctacctttccgtaaattccacctactggttccagtggttaaatagcaaagcagtggtttttaaattgtcttgtgcagaaatgtttcagaagttcttaaaatgtttgatcaaaatttcatttttttaaaaagacatttttgaatcattt

SEQ ID NO: 166567 - DNA, 425 bp, Homo sapiens
agcaccatgcctttccttaatagaagctccacataggccaggtgcggcagtcacgcctgtattctgagcagtttgggaagcccaaatgggcagatcacttgaggccaggagttscagaccagactggccaacatagcaacttcccaactctactaaaaatacaaaaaattggctgggcctggtggggtgcacctgtagtcccagctacttgggaggctgaggcaggagaagtacttgagcctgggaggtggaagttgcagtgagccgagatggtgccactatactctggcctgggtgacaacagcgatactccatctcaaaaaaaaaaaaaaaaaaagaatatcagaaaatataaactttcatgtgtgttcaggtaatatatgtgtatttttaaagctaaggccaacaaaaagagttttgaagag

SEQ ID NO: 166568 - DNA, 478 bp, Homo sapiens
aacacacatcctcacatcctcaccggggaacctgaaaacccagatcatgggagaagaatttaaccttacctagagctgaaaagaatttagagagctgaacaaaatataaaagtagaagaagtactgaaaaagccctgtaggtattcctggttcgcagggaagccatttctgactttatctcactgaagtcactgggtaggactgccagtggaattggggaaggacaggtagaagaaaactttcagctgaactttgtaataattttgaccaagtgcaaattttcctgggcagaatcctgggtggagggaatgggaagtacagacaggagcacagaagctgtggcaggtaaggaggggtggggcctgaaagccctgcttgctttctcagctagaaarcatgcagcctggggcaatatcccagcactgttcgttggctgcctggatataaactaggtgctattggtggggtatggtgggat

SEQ ID NO: 166569 - DNA, 422 bp, Homo sapiens
tgttgttatttatgtaacttacaaacacaggtttaacaatctcaagttgctatttttaccctcctatctgctattgtaattcaaccagtgaagttctcttttgttaagagttaacatcattgattaggagattttctccctattaaccctcaaatacgcttcatcagactctggatcccctctgatcttctcttcattataccacacctgtgtagcactgatttttttagcttctgagccatggccttctggtacctccacacatgggtgaacatcacttttggaattgctgattgctgatctggcaacagatatacctataagtgacatcatgatggaggtgccagcatgkacactataaaagggaagattttttagtacatttaaaacacttggggaacaggctaaaacagaaagaattc

SEQ ID NO: 166570 - DNA, 495 bp, Homo sapiens
cagtctcggtaccgaaatctgtattagtcagggttctctaaagggacagaactaatggaatagatatgtgtataaaggggagtttattaagtattaacccacataatcccaaggtcccatgataggccgtctgcaggctggggagctcttcttgctctttgtacgaattccaaaactgaagaacttggagtctgatgtttgggggcaggaaacatccagcatgggagaaagatataggctgggaggctaggccagtctctcttttcacatttttctgcctgcttatattctagctgagctggcagctgattacattgtgyccacgcagattaagggtaggtctgtctttcccagcccactgactcaaatgttaatttcctttggcagcaccctcacagacacacccaggatcaatactttgtgtctttcagtccaatcaagttggcactcagtattaaccatcacatggggttaatagtactttataaagttaac

SEQ ID NO: 166571 - DNA, 582 bp, Homo sapiens
actttacttgttattggtatattcagagtttctgtttcttccaatttaatctagaagggttgtatatttttaggaatttatccatctcctctagactttctagtttttgtgcataaaggtattcatggtagccttgaattaccttttgtatttctgtggtatcgattgtaattttaccattttgtttctaattgagtttatttggatcttctctcttcttttcttggttaatcgcagtaatggcctatcaattttgtttttcttttcaaagaatcacatttttgtttcatttttctcttttttatttaatttcatttatttctgttctgatctttcttctttcttttcttctgctgggtttgagtttgttcttttttctctagaccttgaggtgtgaccttaagttgtctatttgtgttctttcagkctttctgatataggcatttaatgctatgaactttctcttgcagagctctttccatgtcccagagagtttaataagttgtgtcactattatcattcatttcaaaaatgttttaaatttccatcttgacttcgttgttgacccaaaggtcattcagg

SEQ ID NO: 166572 - DNA, 573 bp, Homo sapiens
ctaattttcctttagccaattctgtttttgtgcctcctgagttctcgttaaggtcaaaacaacattagtggtttttaaggtgttaagttggttgtctttttctcacattttacaagcaaaacacagaaaatgagaaacaacaagaaatccctcatggtcttaaaaacaatctatttgaaaatttcagcatgcagatccagttaaatttaaattcagttaaatttaacgtgccaaatttcaaatggaaatttggttctctgcattttaaaatgtgtaacaactgcttacgatattctatttgaaacatrtcacaatgtacatgatagaattaaagggtcatttatataaattgttatagactacaacacaaacattgttttcagaggaattcttaaaatcatctaatccaatccactcatttttaaaatgagaaaactaagagaaatggagagtctattcagaagcaaaatcacattgtggttttaaaaaaaaattcagctggcacacatgggtacaagtataaaggttgttaaaatatattgatatatttctgcttcagttggtaaattgcca

SEQ ID NO: 166573 - DNA, 573 bp, Homo sapiens
aaaccttcttcttggccaggcgtggtggctcatgcctgtaatcccagcactgtgggaggccgaggtgggtggatcacctggggtcaggggtttgagaccagcctaaccaacatggagaaaacccatctctactaaaaatacaaaattagccgtgcttggtggtgcatgcctataatcccagctactcaggaggctgtggcaggagaatygcttgaacctgggaggtggaggatacggtgagcctagatcctaaatatctctaatctctattctctaccattaatttgaaccagtgaccttcagcttatttctatgcaccctccctaagggtctctcactctacttcactctactaaattaattgttaaccctctgggactcatttttgtcctttgtaaaatggaggaattcatttaatcatgactttcagacttagctcttcttggtcctagaggttcaaagaagtgattcagataatcctgtgttagaggctgacaaacaggagagtcattgcccagccagaacactcctgcaacaaaagcagctctgctttctgttcacataggaattgga

SEQ ID NO: 166574 - DNA, 575 bp, Homo sapiens
ttaaaccttcttcttggccaggcgtggtggctcatgcctgtaatcccagcactgtgggaggccgaggtgggtggatcacctggggtcaggggtttgagaccagcctaaccaacatggagaaaacccatctctactaaaaatacaaaattagccgtgcttggtggtgcatgcctataatcccagctactcaggaggctgtggcaggagaatcgcttgaacctgrgaggtggaggatacggtgagcctagatcctaaatatctctaatctctattctctaccattaatttgaaccagtgaccttcagcttatttctatgcaccctccctaagggtctctcactctacttcactctactaaattaattgttaaccctctgggactcatttttgtcctttgtaaaatggaggaattcatttaatcatgactttcagacttagctcttcttggtcctagaggttcaaagaagtgattcagataatcctgtgttagaggctgacaaacaggagagtcattgcccagccagaacactcctgcaacaaaagcagctctgctttctgttcacataggaattgga

SEQ ID NO: 166575 - DNA, 573 bp, Homo sapiens
aaaccttcttcttggccaggcgtggtggctcatgcctgtaatcccagcactgtgggaggccgaggtgggtggatcacctggggtcaggggtttgagaccagcctaaccaacatggagaaaacccatctctactaaaaatacaaaattagccgtgcttggtggtgcatgcctataatcccagctactcaggaggctgtggcaggagaatcgcttgaacctgggaggtggaggatayggtgagcctagatcctaaatatctctaatctctattctctaccattaatttgaaccagtgaccttcagcttatttctatgcaccctccctaagggtctctcactctacttcactctactaaattaattgttaaccctctgggactcatttttgtcctttgtaaaatggaggaattcatttaatcatgactttcagacttagctcttcttggtcctagaggttcaaagaagtgattcagataatcctgtgttagaggctgacaaacaggagagtcattgcccagccagaacactcctgcaacaaaagcagctctgctttctgttcacataggaattgga

SEQ ID NO: 166576 - DNA, 671 bp, Homo sapiens
accccaaaattcagtggctaaaacaaaagtgaagttcattctgtctgattgaactttccagagtcatagtccaaaatgcatagtgttgctctgtcatcctcactcaacacacagattttatttctgggttcaaaggggctgttccacttcatgccttcacagctgtatcctagccagtagcgaaaaggccagaggaagcacatttattccttttaagaataaactcagaagtgacacacaatagttttattcacatcctactggccaggatttgatcataagcttcaagaggggatatgagtgtagtggaagcattctgctctactatagctgctagctgaagctgctatrtgctccacgaaaccctggagaatgattattaaagtaagaagagaaaaatggatttttgttggacaactagttgtctctgccacaaaccatttcttctgtttgtatatttttatgtgattctacaagtgtcaattattcactgaaaataggcagaaaaataagtctccattattttaagaattcaagttaagaaaatactagaatttttatggagacgctgctgattctgttgagaaccttgttttctttggtacatggtccttcatggtaggtagagacttctttattatgaacctaggccatcagttcaaaagtaaata

SEQ ID NO: 166577 - DNA, 671 bp, Homo sapiens
accccaaaattcagtggctaaaacaaaagtgaagttcattctgtctgattgaactttccagagtcatagtccaaaatgcatagtgttgctctgtcatcctcactcaacacacagattttatttctgggttcaaaggggctgttccacttcatgccttcacagctgtatcctagccagtagcgaaaaggccagaggaagcacatttattccttttaagaataaactcagaagtgacacacaatagttttattcacatcctactggccaggatttgatcataagcttcaagaggggatatgagtgtagtggaagcattctgctctactatagctgctagctgaagctgctatatgctccacgaaaccctggagaatgattattaaagtaagaagagaaaaatggatttttgttggacaactagttgtctctgccacaaaccatttcttctgtttgtatatttttatgtgattctacaagtgtcaattattcactgaaaataggcagaaaaataagtctccattattttaagaattcaagttaagaaaatactagaatttttatggagacgctgctgattctgttgagaaccttgttttctttggtwcatggtccttcatggtaggtagagacttctttattatgaacctaggccatcagttcaaaagtaaata

SEQ ID NO: 166578 - DNA, 671 bp, Homo sapiens
accccaaaattcagtggctaaaacaaaagtgaagttcattctgtctgattgaactttccagagtcatagtccaaaatgcatagtgttgctctgtcatcctcactcaacacacagattttatttctgggttcaaaggggctgttccacttcatgccttcacagctgtatcctagccagtagcgaaaaggccagaggaagcacatttattccttttaagaataaactcagaagtgacacacaatagttttattcacatcctactggccaggatttgatcataagcttcaagaggggatatgagtgtagtggaagcattctgctctactatagctgctagctgaagctgctatatgctccacgaaaccctggagaatgattattaaagtaagaagagaaaaatggatttttgttggacaactagttgtctctgccacaaaccatttcttctgtttgtatatttttatgtgattctacaagtgtcaattattcactgaaaataggcagaaaaataagtctccattattttaagaattcaagttaagaaaatactagaatttttatggagacgctgctgattctgttgagaaccttgttttctttggtacatgrtccttcatggtaggtagagacttctttattatgaacctaggccatcagttcaaaagtaaata

SEQ ID NO: 166579 - DNA, 470 bp, Homo sapiens
ctccctaaaattatattgggggtttaaaagattggtttgaaattatagtccttgctcatataatttttttaatacatagggaatgcccaatacaaacattttcaacactatttcattgtagaggttaccacgttatttaaagaagtttaaaaatcttccctaatgtattctgttattactacaaaagtatgctcttatttatttttggatcagtgtaggctcctcttgaattcataagtgatacaaatgaatgatagtaaattgtctagagtttacacaatagactttagatttagaaaaagaatataagaatcygaaaaaattgaaaagttggaaacataaggaaaaagaaaaccataaataactaaaagaaaacatgtttcaggatatcaatttttctagtttctaatttaataatgtgttaaattctcacctcgatattcctgataagagttatatagagaccagtt

SEQ ID NO: 166580 - DNA, 459 bp, Homo sapiens
gtaacagaagggaaagggcattcggacaggagctgctagacccaggtagagagaggtatgagacagaagatgcatcttaggaaatgcgcattggcctgtatagctagggtatagagtggtgacaagtgcagcagagcacagtggcaaaggaggagaggcaggcatgtcagtgargattgctaatggctgcaaacaagaacgcaaacaacataggcttaaataattaacaatttacttttctaagaagaagttttatggtaagcagttattgactctgatcagtagcttaattacatcaagaataaaagccattctcgaggccttcccctcatgggatcaacatggctgtagcggctccaatcatgtcatcctaaccccatggtaaatgtaggaagtaagaggttgcgtggcacagaaaaataccctttctcttacagtatttttctaatcagggataaa

SEQ ID NO: 166581 - DNA, 459 bp, Homo sapiens
gtaacagaagggaaagggcattcggacaggagctgctagacccaggtagagagaggtatgagacagaagatgcatcttaggaaatgcgcattggcctgtatagctagggtatagagtggtgacaagtgcagcagagcacagtggcaaaggaggagaggcaggcatgtcagtgaagattgctaatggctgcaaacaagaacgcaaacaacataggcttaaataattaacaatttacttttctaagaagaagttttatggtaagcagttattgactctgatcagtagcttaattacatcaagaataaaagccattctcgaggccttcccctcatgggatcaacatggctgtagcrgctccaatcatgtcatcctaaccccatggtaaatgtaggaagtaagaggttgcgtggcacagaaaaataccctttctcttacagtatttttctaatcagggataaa

SEQ ID NO: 166582 - DNA, 495 bp, Homo sapiens
cacccaccaggagactgtctcaagagaaaacagtcaatttacaacccaaagtatccctgctataaaatcctctcctctctggtgagttttggccacctttacaacctagttctgcccatgaagatgccaactcaaccacctggtagataaggcaccaaagcaagtatgtggacccccaactgctcacttcctcccctgtatgccatttatgccagcatgccaggcccccttttaaaaggatatgytttctactccaaaagtgaagtggtatccttaggcaggaagcctatacttcctcccctaagctagtcttggaataaaaagccactttctttataccaggccttgctcttgttaattggactctgcaagcggcatgcggctgaacctgtgtttcagttacaatatcgtggatgacacaagaatggttttcatagttgaagaaataatgtggttatcaaagggatgatatggtaagcaagactatcctcacat

SEQ ID NO: 166583 - DNA, 519 bp, Homo sapiens
ttgtttcatcagcatttgttgaaaagactgtcttttctctattgtattgccttggctcctttgtcagagatcagttggttacatttatgtgagtctatttctgggctctcgctctctctcttttttcagacatgcagtagtgcaattatggctcactgcagccttgacytactgggctcaagtaatcctcacacctcagcctcccaagtagctgggaccacaggcatgcaccaccacaccaagctaatttttgtagtttttgcagagctatggttttgtaagttttcccaggctggtcttaaactcctgagttcaaggaatccatctaccttggcctcccaaagtgccaggattatggatgttgagcccctgcaactggccctgggctctctattctattccattgatttgtccatttatttaccaatactacactatcttaattaatatagcactatagctttatagtaagtgctaatgttgggtagtgtcatacttctgactttgttttcatcttac

SEQ ID NO: 166584 - DNA, 593 bp, Homo sapiens
gctgagttggggaaagtttaaaataaggtaaaatataagcaatgccttgtaagtataaaaattatacatattattatcactattattgaaagctgacataattcaaacacatttttattggctttttacatagaagatatttttgaattatatttgccacttaaaatcaggaatttgtttttcaaaaaaaaagcactaatttcattgcatgttttaaaatcagttcagactatgtaagtttggcatgatagaactcatgctcttaataacaatccctcagatactaaaaaatccacaagtaaattttgagttatcaaaaaagtgtttttattcatttattcgatatatgttaagtgtcactgtgtgtaccaggcactattctgggctctgtctgagtatacagcattagaccacaaaccaagattcccargcaggtagtaaatggcagagctagctccacatactggcccatttgacttcaagattttggcagacccatatgactgcatgcttttccattctgtaatggaaacttcaatgtataaattagctacagtaagccaggcactgtacagggcaccttatatatatat

SEQ ID NO: 166585 - DNA, 685 bp, Homo sapiens
attctttttgggccttattttataaaatttataaattttgataaattcaattacaaaatcaagttggtatattacaggattattgtgaagattaggagtcatatgaaagggctcagaatacygaatgaatattttaacttaccaagtcattttaaccttggtaagtgtcttctttcttggtaaatcttcaactcaagttcggatgaacaggaaaaatgaaagctttaactctggggaaattctatcatgctcagctctgctcctcaagcactgcagcaggaactctgtttcttttcattgcatgctgtccaggtgcatttgtaccaaataaaatggtcatggtgcccctcatagccattgtcttgcagctggtagagcacttcctaaaagaccaggtgtaaggaacagcgtgggtatcttgtgtgcctggtgaggagtgcctatgagatctgggatggacactacccaagaacagcccaacctgagtggactggcatgatgggttctgctcagcagggagtgggaacctaaatatcagatggggtcaccccgcctcttgagttcttgacaaaattatctcaagaacagataagaaacctgatgccctccccctatctccaccagttcccgggggctgccagttcttgactccagcctccagcctccagcttctacccagttgaca

SEQ ID NO: 166586 - DNA, 685 bp, Homo sapiens
attctttttgggccttattttataaaatttataaattttgataaattcaattacaaaatcaagttggtatattacaggattattgtgaagattaggagtcatatgaaagggctcagaatactgaatgaatattttaacttacyaagtcattttaaccttggtaagtgtcttctttcttggtaaatcttcaactcaagttcggatgaacaggaaaaatgaaagctttaactctggggaaattctatcatgctcagctctgctcctcaagcactgcagcaggaactctgtttcttttcattgcatgctgtccaggtgcatttgtaccaaataaaatggtcatggtgcccctcatagccattgtcttgcagctggtagagcacttcctaaaagaccaggtgtaaggaacagcgtgggtatcttgtgtgcctggtgaggagtgcctatgagatctgggatggacactacccaagaacagcccaacctgagtggactggcatgatgggttctgctcagcagggagtgggaacctaaatatcagatggggtcaccccgcctcttgagttcttgacaaaattatctcaagaacagataagaaacctgatgccctccccctatctccaccagttcccgggggctgccagttcttgactccagcctccagcctccagcttctacccagttgaca

SEQ ID NO: 166587 - DNA, 591 bp, Homo sapiens
gctcagcagggagtgggaacctaaatatcagatggggtcaccccgcctcttgagttcttgacaaaattatctcaagaacagataagaaacctgatgccctccccctatctccaccagttcccgggggctgccagttcttgactccagcctccagcctccagcttctacccagttgacagtttttgcggccctgcagcattcctgcctatgctgctcaggtttgtatcacttgggcctgggtgtatgactcagtctctttcctcaacgatcacaacataacttcttccaggctgtcatgaaggcaacttcttcacaattcagtgtcctggctctctgcagctgagtacaaactatacaagatatagtgrccgaaagcatcaacaactgttaatgttgctcatgaatctccaagatgcttcactcatatggctggagaattgaggctgggaggtcagacagggctattagtcagggccttgattcctcttcaggcagatgtctcctctctgtggggctgcttaggctccctaacagcatgggggctgacttctaagaacggagattccaagacacagaaagcagaagtgccaa

SEQ ID NO: 166588 - DNA, 446 bp, Homo sapiens
caagaacattttaaccattacatccacaggctttgtatggtgcatttgcaggttcagtatytcccaggccaagcaacagtttgtgcatatagtaaatacagctggaggaaactgtgtttataacacttagttagaaggagtaaatagccctgggtactgataagaaaggtaaaatgtatccagagctgctgcagaagacagaggcggaggaaatgatggaaatggtgaccctgttggtaggaaaatcacctggaaaacaaacagttgctttagcctttacacacgcagaaaactttcaaggagaatgacttcgacccaggaggatgggctttgaccttgttcctgaaggatccaagccctggctaagcttggggtgggggaccggctccaggatgagatgtctgtctgtgtcattttccctttctctgtgagcttgtgagccaacc

SEQ ID NO: 166589 - DNA, 570 bp, Homo sapiens
gattcatccatgctaagtgccatgtaatcaaactgactcatacggaccagttttccaaaaaacaggagattcctagcagcagttggaagaagccccatttgtctgaaacagcatgatacagaagttccctccattttgaccttataaggaaagtaacctgtaatgcccattctactttttattccttttttcagccataaagtccatctccttttctcagcttacaggatcttctttctaaagctttagatggaatgttgcctgacacatgactcactaatgaaagccagctacatctctaaactaaattggtgagaatgctacttattttttttaacaacagtaataagaggaagagtagaatagctaaaacttagtaaatgaatatttgggtcaagtgctgttctatgtgctttacacatgttaactcattaatccttaaaacaagcctttgagataaaaacaatggcattagctgcatttggtagatgaggaaatggaggcacrtgggggcgaggtgacttggtgacttgtccaagtcatacagtggtgaggagcagagctgggatt

SEQ ID NO: 166590 - DNA, 513 bp, Homo sapiens
tgctttctgtttgtttgcttttctttttaacagtcaggcccctcttctgtagggttgctgcagttttctcagggcccagtccaaaccctatttgcctgagtctgtcccacacctggagctgtcacccagtggaggctgcaaaacaacaaagatggctgcctgctccttcctctgggggctccatcccagagaggcactgacctgatgccagccagaatgctcctgtataaagtgtctagygaccactgttggagggtctcacccagtcacaaggcatgggatcagggacccacttaacgaagcagtctggctgccccttggcagaggaggtgtgctgccctgaggggaatcccacttgtctggactgcccagattcctcagagccagcaggggaaagaccaagtctgctgatctatggagactgcggcagcccctttccccaggggttccatcccagtcctagggagatcaaagttctgtccataaacccctggctggagttgctgaaattcc

SEQ ID NO: 166591 - DNA, 593 bp, Homo sapiens
gatttttctaaatagtaggacactatagagctttcataataaagctaactaatcatggttaaatgcaacattcacacaaatgtttgaagggaagtaccatatttttaaaaacaaatgagcttattgytggcttttgaggctgtatctgaagtcctctgaggaatgcattctagctattgtctatcaagaatatttaaatggaaaaatttgagaatcattgccttgggtgaaatccaaattcttcagtaattcacactagtctctgcactatttaatattgactattttggcactatcacctttttacagttctgcatcctgttttattctctaccagttcccaacaacttccggtagccagaatacaagactttgcttttgtgcaaactgtgttactcacctaccatgcctccccttgtccttgctcttccaatatatttctatgtgtgcatcaaaaccttgctcagaaccctgcttctctcttgagccttgtctataaacctgaaatttaatgaattcactatcacctctttgaaaacgctgttactaccatatactctacatattttccttattgccattttatattctta

SEQ ID NO: 166592 - DNA, 625 bp, Homo sapiens
ccagtgcttgtgtgtgagcctgaggatatctgcacatttctgtgtggtttgacactgattctctctgatctgagctaccatgaaacccacagggccatctgtgtgtcctgttgacaggctggaataaaagccttggctcaggttaaacaccaactctttttactcctgttcaaatgggtttacaatggtgattcctgatcttttaccactgccatttgttttcataaaaagtcagaggctaaaagagatttcttccacagctgatgtgatgtaattattttcccctagtgtttcatggtgagagtttgtcttccgtttactgacttacagctctagtgttttacctggtttcatttaaagatgtacctcagttttcagggtaaagaataaaataccagacacagtgaaatattaatcacttgccccaaggggaaatgtgaaggaaatttygggatcataacactaaataatatgtttgttatatgttttgtgtgtgatagtaataaagttcatgatacatacataaaaatttaaataattcattttcttctcaaacatcctcagagagaaagaacatcaaaagttgacatctgaaccatagcatatttacaaaatgtactaataa

SEQ ID NO: 166593 - DNA, 575 bp, Homo sapiens
tgaaggttgcataaaatagattaattttcattaccttaatttatatgtaagcaagagacaaaggatgagaagagactcaaggaaacaggttataagagaaaaaaattaggtaatttttgttgctccaggtgatattttaaatgttttacattttgtttttctcatctaatatctgttacaatgttggagactgaactgaatatttcccattttcaggtaaagaattgagttttgctatgtgcaactaaaagctacatattatgagtatatccaagacctgtggacaacaatttcaaaaagcatatctctgaacaaatttttcctggaatgaaagcatcaagattttccaaagtctatttgagcttacacaccccctgcttctctgtccaagtctaatccaatagactcatttgattttgtatttcaatttgttgcacccrctaggatattctatccacatatcacaggatgggagcaaagggaagctggaatctgtattttcccatttccctccctgaaatattctttcattgagccatactaattatggtgtagactttttaatacagttattt

SEQ ID NO: 166594 - DNA, 593 bp, Homo sapiens
ctatcctgttatattggtctgtgtctctgtttttataacagtaccatgctgttttggtcactgtagcctggtattaattgtagtatagtttgaagttgagtgttttgatgcccccagccttrttctttaagcttaggattgctttgacaatttgggctctcttttggttccatatgaatgttagcatagtttttttctaattctgtgtaaaatgacaacagtagtttcataggaatagcattgaatctgtaaattgctttgggcagtatgaccattttaacaatactgattcctatccatgagcatggaatgtttttccatttgtttgtgtcatctctgattcctttcaacagtttcttgtaattctcattgtagacatctttcacttccttggtaaactgtgttcctaggtattttattctttttgtagcttttgaaaataagattgcattcttgatttggctctgagcttggacaccattggtgtataggaatgctattgatttttgtaccttgattttgtatcttgacacttgacacagaaaaatcaactacatttatgtgcctttattatccatcacttataatataat

SEQ ID NO: 166595 - DNA, 620 bp, Homo sapiens
tgattaaaccttcagttttgtcttattattttttaatttaaggcaatctttaaaacttctaaacgagataaaattccttttccttaaaaaaaaaaaagccatatttccatggcttcttgtaaccttttctcaaaacacattttcttttctttatatactttgcatgtagaactgttcctctagtagtctcactacatatgttacaatgcaaactcccagcaacttttatttttagtgaaaaacctggtaagtaaacaataacactgygtatgagatgcagagcacaggatagggacagagcttcagagaatgtctctggttcttttcagcataaccaggggacatggctaactacaaatgtcccctgactttacctataatttaatggcagtaaaacagaaaagtcaaacaattatcaaaaaaagtcatagaaacagttataactttaaaatatctagcaaagacagtatctgccctgcctaattcagtttctaaattctgaagacatttttattttgtttcaccaatgttactaaagtcacatgaactgaaaggcattaaaatttatatttttgtgtgaaaatatgtgatttaagcacttgctttttcttttaagccaa

SEQ ID NO: 166596 - DNA, 445 bp, Homo sapiens
ctactcccagtgaggaccagaagggagaatcaaaaagaaagagaacaagcccagtgcaagaaaccatgcactggaattgtttccttcagatttaagtgttaattgactatatcttgtgtgtactgcatggactttgttggccttctgttttccttaatcaagaaaaccctaagttttgggmtctgtttatacaacagatgatcttttggctattaataaaaatgtaaaattcttggtatttttaatgtgttatttaaatttacttcaaaagtaatgatgcaactaaaatgaaataaaatttccatgattatcagaataattaaataaatgtaaaactacaaggaaatattatgaagccattaatattatacttttgaactattctgatggcattaaaaaatgtttaagatgtaatatgtgctacaaaattgaaaacaccatagga

SEQ ID NO: 166597 - DNA, 445 bp, Homo sapiens
ctactcccagtgaggaccagaagggagaatcaaaaagaaagagaacaagcccagtgcaagaaaccatgcactggaattgtttccttcagatttaagtgttaattgactatatcttgtgtgtactgcatggactttgttggccttctgttttccttaatcaagaaaaccctaagttttgggatctgtttatacaacagatgatcttttggctattaataaaaatgtaaaattcttggtatttttaatgtgttatttaaatttacttcaaaagtaatgatgcaactaamatgaaataaaatttccatgattatcagaataattaaataaatgtaaaactacaaggaaatattatgaagccattaatattatacttttgaactattctgatggcattaaaaaatgtttaagatgtaatatgtgctacaaaattgaaaacaccatagga

SEQ ID NO: 166598 - DNA, 470 bp, Homo sapiens
tggctctctggtaactaacaaatatttttcttaccttggtattcacatcactccacaatctatatttccagttttaacttccctggtcatctatacttcatgccacttcaattaatataataaccgtgtgctaatataattgccaggtgattgagatgccatttacattgaaattccttgtctaatagctcctcttctgaaatactctcccctcttaaaggctttagttcaaatagcacttctttcatggagcctaactttgtcccccagtttagcctccaaaataaagaggaatgttttcccctttgaattcaagaatcagaattctagtactgaacagaactgtacagataattcagtattgcrttctcatttggcatatgagaaaaatgaggttaaaacaagttaagttcagaaagtagcctataaatagcatttagtgctgtttccagtctacgtggaagagttgc

SEQ ID NO: 166599 - DNA, 499 bp, Homo sapiens
aaactttcagttgaaggatctcctatagatatggcagatactctaaaaatgccaagcatcattttattgatcaacatcaccatcttgggactgtttctgagacagagacagggaggtgacaaaggaaaaagaagcacaaggaagaaatagtgcatagggaagagaaagattgggaagtcaactacagggtcctggatgtaagggagagtctgggtgacttktagttttacaggagctgatgataagcaaagaacagctacacactggggactgcccatatgacaattcgtgaaattataagcttttaataatcatcctcttttctgatttcccgttaattacttttgcaagaaaaactccataattccaattaaaaacaaaacaaactctctccacccaatttaacaactaaaaactcctttggcagtgatagaccaaacatgaatttgaaatcacaaattcatatatgacttctcatggagcccaagaaaaagggagt

SEQ ID NO: 166600 - DNA, 499 bp, Homo sapiens
aaactttcagttgaaggatctcctatagatatggcagatactctaaaaatgccaagcatcattttattgatcaacatcaccatcttgggactgtttctgagacagagacagggaggtgacaaaggaaaaagaagcacaaggaagaaatagtgcatagggaagagaaagattgggaagtcaactacagggtcctggatgtaagggagagtctgggtgacttttagttttacaggagctgatgataagcaaagaacagctacacactggggactgcccatatgacaattcgtgaaattataagcttttaataatcatcctcttttctgatttcccgttaattacttttgcaagaaaaactccataatyccaattaaaaacaaaacaaactctctccacccaatttaacaactaaaaactcctttggcagtgatagaccaaacatgaatttgaaatcacaaattcatatatgacttctcatggagcccaagaaaaagggagt

SEQ ID NO: 166601 - DNA, 499 bp, Homo sapiens
aaactttcagttgaaggatctcctatagatatggcagatactctaaaaatgccaagcatcattttattgatcaacatcaccatcttgggactgtttctgagacagagacagggaggtgacaaaggaaaaagaagcacaaggaagaaatagtgcatagggaagagaaagattgggaagtcaactacagggtcctggatgtaagggagagtctgggtgacttttagttttacaggagctgatgataagcaaagaacagctacacactggggactgcccatatgacaattcgtgaaattataagcttttaataatcatcctcttttctgatttcccgttaattacttttgcaagaaaaactccataattccaattaaaaacaaaacaaactctctccacccaatttaacaactaaaaactcctktggcagtgatagaccaaacatgaatttgaaatcacaaattcatatatgacttctcatggagcccaagaaaaagggagt

SEQ ID NO: 166602 - DNA, 505 bp, Homo sapiens
tgttgtttttaaagcctaaaagaaattccccctcctcactcccccgtctctccctacaacctggtgagacaattctctcattttctcctcccagtttccaatgctattgttatgatctattagaataattgctattatttttttgccttatctgaccctagaagtgatttacagggaaaaaaattactaaccaattgattagtgaactgaatataaagtgcagctcttatggtttattcacagacaagaatatayatagtacttaatgtgatagtattttgttgttgatgtggaacagtgttagtctataatacaggctttcaggcagacaagacctagtttaccttgacctctggacttctgaaaggttgagtaagttattttaagagaattagacaaagataagtaaatcaaaaccaataaatggcaaagatttaaaaaacagagattagtctattcctctcatttaatagaaaacaaactgaatcaaagaaaaatgggcaat

SEQ ID NO: 166603 - DNA, 574 bp, Homo sapiens
cagggttattaccaatttttctatataacttccttcttgctttttctttaaaaccagaaatgatttttacatggcaaggattgctgaagaaggtatgagcttgctgaacaatggatggtttaagtttaggtctgtgctgcccaatatagcagagattaattagccttgtgtagctattgagtatttgaaatatgtaagtgtaactccatatttcaaagatctaagacttagtataaaaatatacatatctcaaaaattttttatatcaatttcattcccaaatgataataattcagatatgttgggttaaagaaaatactgttaaaattaatttcacctgctttgtttttcttttaatgtggctctcaggaaatttaaaatcataactgtagctcagatttgtagcttacattatatttctgttggaaagtgctggtcaaggtaaccttcatcaattcttctatattctattaaaacaaatagttgagcatctcctagtttataaatgtcttggtrtcataacctatgtatctttgttttctctttagaatgtagcacagggcattgcaaatat

SEQ ID NO: 166604 - DNA, 548 bp, Homo sapiens
tataaactgaatgatcggcttcttggctatgtaagcaattacaaggaggtaagatacagacagttgaggaaataaacaaacataagatcaattacatataataagactgacattctaaatggaacttactctgacatgaaagtgctatcatatttaaaattatacatattgggttgctatacaagtctgggtactgttgctttattggaaggctgtttaaaatccatcaataccttaaagctacatctatgaagtttgyacataagcatgtatgtttcaatctgagaaaaatggagttctcacagaagaaatcctatgaaaaaatggtcctttaatgttggccttattgttagcttcctgggtagcaaggatgtcttgcacaacagtatgtcttatgaaaaattaaagcaaaacaaataccgttgttcagtaaaaaccttaccaattccatttataaattcaacttgcaagtattttccattgcacatataaatcttgttaccaaataatcttctacacattctttaaatttttaaaatgaataaagg

SEQ ID NO: 166605 - DNA, 544 bp, Homo sapiens
tttcaatctgagaaaaatggagttctcacagaagaaatcctatgaaaaaatggtcctttaatgttggccttattgttagcttcctgggtagcaaggatgtcttgcacaacagtatgtcttatgaaaaattaaagcaaaacaaataccgttgttcagtaaaaaccttaccaattccatttataaattcaacttgcaagtattttccattgcacatataaatcttgttaccaaataatcttctacacattctttaaatttttaaaatgaataaagggaatacactgtaaaatcagtaaatgttytcatctaaggcttgaacaattgataattatgcccatttgtttttaacttttgtgtcaaagtattaattttctctatgtcaaaggacttttagatttagaatcacataccaacattgagagtgctttggtttcattaaactcatcttacttagtttcagccctttatacctccttttatcttattttttaaattgacacgtaataattgtacatatttatgaagcatatagtggttttaatac

SEQ ID NO: 166606 - DNA, 544 bp, Homo sapiens
tttcaatctgagaaaaatggagttctcacagaagaaatcctatgaaaaaatggtcctttaatgttggccttattgttagcttcctgggtagcaaggatgtcttgcacaacagtatgtcttatgaaaaattaaagcaaaacaaataccgttgttcagtaaaaaccttaccaattccatttataaattcaacttgcaagtattttccattgcacatataaatcttgttaccaaataatcttctacacattctttaaatttttaaaatgaataaagggaatacactgtaaaatcagtaaatgttttcatctaaggcttgaacaattgataattatgcccatttgtttttaacttttgtgtcaaagtattaattttctctatgtcaaaggacttttagatttagaatcacatacmaacattgagagtgctttggtttcattaaactcatcttacttagtttcagccctttatacctccttttatcttattttttaaattgacacgtaataattgtacatatttatgaagcatatagtggttttaatac

SEQ ID NO: 166607 - DNA, 562 bp, Homo sapiens
aagcaatattagctggggagaggcaagtctctgtgcaagtcgatatagaaaatgacaggaaaaagtgtgttctcctaaataggtgttttctgtttctttccccacatgataggcacmttctggtctagctgcccttattgatataggagcaagacttctcatctacctttgtattccctaactttttttttccttccactcttagttaaccctgagagtcatcaaagtggttccatgcatgtgacattcaacaagtctctcaagtatattgaagatagtgtcaattctatcttttaaaaattacttctgtttgccagttgcctacatttgctggctataaaaccacttgaggagcaataactgctgattgtgagagtggctctgatcgtatccgaatgagatctctagatgctccaaaattttgaaaaccctgggaaccagaaagaagagaattccttccacttccatcccactgagccatatattgaaagttgagttcctcaacaatttttctgccgaaatcttcaacatccatattgatcaatttaatctgctttgccgc

SEQ ID NO: 166608 - DNA, 585 bp, Homo sapiens
aagctttgttcaggctgagtgacggcgctgctggccttgagttcagtgttgataagctgacaatatacattaaatacagtgtctttaaacagaaacccgcatcagacaaggtcatgtatttattgatagatgaaactgaagtgaccagaagctcacaggaacctaaccctgagtttcccctaggaaccaccattcagtgccygctaattctgtgttcatggagactttacagaacatgactgctatgcacaggcgctgacagcatcttagctacccctgagtctgggtggggtgggcagctgtcctgcagttgggtgcctggtgctgccccggggccacctctccttccaggcccagctgagttggtggcctttcgaacaagcacctctttattttgggcaatttctagatgacaatggcatttgtttgcaagtggatcatggggcctttgctcaatgtgacattattggccaatggtggcgatgctgacttctgtcccagatgcagtcaccttcatgggggcggactccctgcttgtctagggcatctcaaatggcaatttttgaccttccagctggacaacaa

SEQ ID NO: 166609 - DNA, 585 bp, Homo sapiens
aagctttgttcaggctgagtgacggcgctgctggccttgagttcagtgttgataagctgacaatatacattaaatacagtgtctttaaacagaaacccgcatcagacaaggtcatgtatttattgatagatgaaactgaagtgaccagaagctcacaggaacctaaccctgagtttcccctaggaaccaccattcagtgcccgctaattctgtgttcatggagactttacagaacatgactgctatgcacaggcgctgacagcatcttagctacccctgagtctgggtggggtgggcagctgtcctgcagttgggtgcctggtgctgccccggggccacctctccttccaggcccagctgagttggtggcctttcgaacaagcacctctttattttgggcaatttctagatgamaatggcatttgtttgcaagtggatcatggggcctttgctcaatgtgacattattggccaatggtggcgatgctgacttctgtcccagatgcagtcaccttcatgggggcggactccctgcttgtctagggcatctcaaatggcaatttttgaccttccagctggacaacaa

SEQ ID NO: 166610 - DNA, 391 bp, Homo sapiens
aggctgcaatgttgataacttttggcagtcttcatctccccatgattaagccttccttgccggtgaccttcatgtacactccattacagccccataatagccagttcttggcttgctttgtggcttggaatttctcttcaatccagacgtacctacctctctttcttccttcttcctgctctactttcctttttgtaccctaccttgacctctaatctcttggtctcctctgatacctgggtcctcttggctccatttgcttccccatcgagacaaaccccattgttagccagtaaatggcatctccctggagccccaaaatctgcyccctccttgcccttcttgctctgcctgctttgacgacccctaccctactgtcctgagttgctga

SEQ ID NO: 166611 - DNA, 580 bp, Homo sapiens
aggaatatacatgtaggtaattctctttcctaagatagtcacagcccgtaagatgtggatcctgtaaaaaactgctgtaaaaggtataacaacataatgaggataataacaacatgtgaagagcagtagtcttcattartgagcacttgctctccatcaagtcctgtgtcaaggacttttcatgtatattacacttaatcttgacctcaatcttgtgacttagggacttacaggattctcattttatagaaaattgagactgagagctcaaataagaggtagagctgggatttgaacccagaatgtgcatttagattctaccaactttggcctcttttctccccaccttccttcaaatgggtggactcatccagggcaggtctagagagccttcagccccctcccacgtcctctctgacctcttggttttcccaagttcatatgtttctgctgaacaagcactgctgctctgacccaccacaaatttagctgctgagcacgtgtagaatcacatcgtgcttttaactgcaggcaaaacccatccccctgggaactgtcccagtttgagggttaaaaaaaa

SEQ ID NO: 166612 - DNA, 580 bp, Homo sapiens
aggaatatacatgtaggtaattctctttcctaagatagtcacagcccgtaagatgtggatcctgtaaaaaactgctgtaaaaggtataacaacataatgaggataataacaacatgtgaagagcagtagtcttcattaatgagcacttgctctccatcaagtcctgtgtcaaggacttttcatgtatattacacttaatcttgacctcaatcttgtgacttagggacttacaggattctcattttatagaaaattgagactgagagctcaaataagaggtagagctgggatttgaacccagaatgtgcatttagattctaccaactttggcctcttttctccccaccttccttcamatgggtggactcatccagggcaggtctagagagccttcagccccctcccacgtcctctctgacctcttggttttcccaagttcatatgtttctgctgaacaagcactgctgctctgacccaccacaaatttagctgctgagcacgtgtagaatcacatcgtgcttttaactgcaggcaaaacccatccccctgggaactgtcccagtttgagggttaaaaaaaa

SEQ ID NO: 166613 - DNA, 580 bp, Homo sapiens
aggaatatacatgtaggtaattctctttcctaagatagtcacagcccgtaagatgtggatcctgtaaaaaactgctgtaaaaggtataacaacataatgaggataataacaacatgtgaagagcagtagtcttcattaatgagcacttgctctccatcaagtcctgtgtcaaggacttttcatgtatattacacttaatcttgacctcaatcttgtgacttagggacttacaggattctcattttatagaaaattgagactgagagctcaaataagaggtagagctgggatttgaacccagaatgtgcatttagattctaccaactttggcctcttttctccccaccttccttcaaatgggtggactcatccagggcaggtctagagagccttcagcmccctcccacgtcctctctgacctcttggttttcccaagttcatatgtttctgctgaacaagcactgctgctctgacccaccacaaatttagctgctgagcacgtgtagaatcacatcgtgcttttaactgcaggcaaaacccatccccctgggaactgtcccagtttgagggttaaaaaaaa

SEQ ID NO: 166614 - DNA, 450 bp, Homo sapiens
atgagacccccagccagcttggagtaatgtcatttcccggtgggatgggagcccaggggaagctgcacccaaaagctgaaggtgggcagaatatggagtgggtcctttctgtttygctcagtggcctagaaacagaaggactacttgtcttcctggcatgttttggcttcagtcttgtcttcaaggagtaagaggattaacttttctccagagatcctttctagctcaagatttcccagagataagtaatttatgttttttcttcgtcaactggattcaggcatccagtctgtattggagttttaaagggtcataattctgaaccaggtaaaacatatacataggggtcagataggaatcaaaagatgagcattattgttgcgcccaagaaggcagcttgggcgtaaagccaaaatgggttttttggtgcttctcctgtcttgaacttgg

SEQ ID NO: 166615 - DNA, 393 bp, Homo sapiens
gaattcattgtatattgtataacgagaatgctcttaacttagatctccaagaaacattgttaaaaacaggtgcacaataatgtwtataggatagtcagtgttatctgtgccaaaaagaaagggaatcatatacctctggaaggacacgtaagaaattgataacaaacgttgcagaagggaactgagtgacatgggcatgggtgggagcaagactttccactaggtattcgttctttcatctttgagccatgtaaatatattagctatctaacatttcaaattaaacacttggtaggccaatgttcatggcagcattgttcacaacagccaaataatggaaacaacctaaatgtccgtcaatgggtaaataaataaacacagtgtggtctagcc

SEQ ID NO: 166616 - DNA, 482 bp, Homo sapiens
cataatagaagcaaaattcaagcaatgtaaagaacacgtaaatgacccgtaaacacatcgacctagtagaagaactgaatcaacacattatgttgaacttctgttatgctgtctccttctaggccatcaaaccctcaaagctgaaaactctgtcttactcatttctgtatccccggagcctagcacagtaccagccacgtggcatgtccacaaaatattatttgttgagttaaattgaacatatgtcacagtttccaaccgattgaarttcaactctttttacaatccccccaccaatgccccaggagtacttagtgagttaaattcgaccatttaatatacaactcccataacaaagaatgtttcacccttgaaaggcgatattgcatttcagaagccatctgagattagagaatatcacctggcctcagatttctgtagatggatatttttacccaaataataccatcctgattgttcga

SEQ ID NO: 166617 - DNA, 455 bp, Homo sapiens
aaaattcaagcaatgtaaagaacacgtaaatgacccgtaaacacatcgacctagtagaagaactgaatcaacacattatgttgaacttctgttatgctgtctccttctaggccatcaaaccctcaaagctgaaaactctgtcttactcatttctgtatccccggagcctagcacagtaccagccacgtggcatgtccacaaaatattatttgttgagttaaattgaacatatgtcacagtttccaaccgattgaaattcaactctttttacaatccccccaccaatgccccaggagtacttagtgagtyaaattcgaccatttaatatacaactcccataacaaagaatgtttcacccttgaaaggcgatattgcatttcagaagccatctgagattagagaatatcacctggcctcagatttctgtagatggatatttttacccaaataatacc

SEQ ID NO: 166618 - DNA, 455 bp, Homo sapiens
aaaattcaagcaatgtaaagaacacgtaaatgacccgtaaacacatcgacctagtagaagaactgaatcaacacattatgttgaacttctgttatgctgtctccttctaggccatcaaaccctcaaagctgaaaactctgtcttactcatttctgtatccccggagcctagcacagtaccagccacgtggcatgtccacaaaatattatttgttgagttaaattgaacatatgtcacagtttccaaccgattgaaattcaactctttttacaatccccccaccaatgccccaggagtacttagtgagttaaattcgaccatttaatrtacaactcccataacaaagaatgtttcacccttgaaaggcgatattgcatttcagaagccatctgagattagagaatatcacctggcctcagatttctgtagatggatatttttacccaaataatacc

SEQ ID NO: 166619 - DNA, 499 bp, Homo sapiens
atacttcaagacctaggtgatgctagcttcctccaaggaagacctgtttcctttagccaggcatctcagagtcgtagttgtctaggaccaaggctgtggtttatctagaagattcctatccccaccacaccaatccctcctcccaattcagagcctttcagaatacaatccagaagagggggtgctatgcttgggtccctgtctgtgccaggctctgaattcagacccatgttgcatctccttgagcctcctcaaggtayggaagcaactctgcctctcagttgcttccacacctcctaaacagcagggcactgggggagtgttatgactgcttctctgcttctggtggccgcaagacactgcccccacgcccccagtatctcacgtgcccttcctagatcaaacacttctactcccctctggaagctcacattttctccttattattggcctgacaactaagagctcttaacagtctctgatactttcctagcagaaa

SEQ ID NO: 166620 - DNA, 388 bp, Homo sapiens
aaggtcaacaatataggttgagttaaataaattatggttatccattactggaatattatgttgtcattaataatcagtttggaaaaggacatatattgatgaggaaatattcatcctatattgccaaaattgggaagtatcatgttccacaagcctttttaaaaatggaatattagttttgtgaaacctataaatatrcacacatatagaacaaatactgaaaaaaaatttttaactttttctttagatggcgaagttttgggtgttttatctttgtgccttcctgtttctctaatatttcagcaatgaaatattgaatttttctaattcctgtctttctaatattttggcaatgatttcaactagaaagtacggcttagcttgattc

SEQ ID NO: 166621 - DNA, 377 bp, Homo sapiens
gattggttgatttttctttagatacagtggtcaggagaagcttctgaggtgattgtttagcagcatacacctaaaagagaaggcaagatgccatgccaaggattggggaaagagcattctcagtaaaggaaacaggatgtacaaagagattagaataagagaactaggtgtgtgggatggatgggaagagcccagggagggtggcgcatagggaacaagggagggaaaggtayaagatgctaacagagaaggaggcagggctagtttggaaaggacttgtaagctaaggaagggagtttggattctattttggctgctgtaggaagtcactagaggattctcaggtggttgaggggcatgatttaagctttaaaagg

SEQ ID NO: 166622 - DNA, 395 bp, Homo sapiens
gaatgcttgcttgactgcaccatttgtacttgtggggaataaggaacctctccaggatcagagccatatcacaggtggatgtcttaccctataactacataaaaatgcaaaactgtgcatctgatgcatattaaggttcccctgcttgtccataacagattgaaccaaaaacatccctaaagatttttatgctcctgaaaattctatatgttttttgtttctttcagcaatgtaaaacaggtcattttaaaccaactgtgccataagtttagagggtggggtaggggagccttacattcgttttataccaatkatgtgctgggcaatgcattcagtgccctgtgatggtcatacattaatccttccctcatcttttgatttagatattatcattt

SEQ ID NO: 166623 - DNA, 395 bp, Homo sapiens
gaatgcttgcttgactgcaccatttgtacttgtggggaataaggaacctctccaggatcagagccatatcacaggtggatgtcttaccctataactacataaaaatgcaaaactgtgcatctgatgcatattaaggttcccctgcttgtccataacagattgaaccaaaaacatccctaaagatttttatgctcctgaaaattctatatgttttttgtttctttcagcaatgtaaaacaggtcattttaaaccaactgtgccataagtttagagggtggggtaggggagccttacattcgttttataccaatgatgtgctgggcaatgcattcagtgccctrtgatggtcatacattaatccttccctcatcttttgatttagatattatcattt

SEQ ID NO: 166624 - DNA, 473 bp, Homo sapiens
ggcaataataaaatcactagtattgtaattattataaatgttctcttgatctyttttttgatttatgaggatttttacatgtcattaaatattctcctttacatcaaattgttatagcatattcagaaaatcagtataaaggcagcatgattttcaaatactaaattggatgtatatatcatttctaatattttgtcacatcatcgggcattactatgtttatcacctctgtgtgcccccccaccctgaccccaaccttagaatacattgattgaacaggaaattctgggttaaaatatgattattttaaggcttttaatacatattaaaaattatccagcaaaaatttagtatcactgtatattctgttttcaagagtatcttaaaattctggcccatctaatctactattaaacactgatttaaggataagagtattattggaagataataaaaaaaaaacagacatagga

SEQ ID NO: 166625 - DNA, 547 bp, Homo sapiens
ttaaagactctaaaaatagtctgccgggcatccacgagaagtaatactaaaggtggcaattaccagaagttgcttggttggtacttatttctcaagttagcttaacagtgttcaatataattatgtaacattattagggctgtgaaaaaagcaatggctgactataagaaatatcaaagctctagttttaaccacataccaactcatgcattatgtggcctttagctaaccattgaaccaaacattgaaaayaagcttaagaagccaaacaaggatttggagtaacaggctctaaagaattaaatcatttcccttgaaaattggcttgagttttgtcttcattggggtttgtgtttgttaggaacatctagatgcattggctgatgagagaaattaaatcagtttgtacgtatagaagccatagaaatgacagtgactatcaaataaagggcagtgggacatgaatagatagtgtctgtgctaatttagctgtcattaatgtatagcctgaccaaatttctagaaagtattgcagtgaatttcaatg

SEQ ID NO: 166626 - DNA, 613 bp, Homo sapiens
tccaataacactttatttacaaaaaaagaggttaaactcctgccatgctacagctagagtgagctctctcaatacaaatattatgtcactcctctgcttaacacccaccctgaatgacttctgactacatataaaagaaaatccaaatgtgtggcttccaaagcaatgcctgacttggctctttctttcctttctcattttatctgaggtcccatcatcttcagtcaccattctcctttaagtttcttaagcgtgtgcaggactcaggacctgctacataatttgcaaagtccagtgaaaaatgaaaatatgaggctcctcatgtaaaaactattaagaatagcaaaatggcaatagattcataaactaagcacaggactcttctgtgtatcacaagtgacacatctatgaatgctgaatatccaccctataatctttgaatatacgttcttaaaccytgaacaatatcttccatccccacttctcatgctgctcttcctcatcttttaggtttcagttaaaaaacagcattttctcaggccagactttccaactaccttgcccaaagtggagcctccttctatacccatgtcttattcctttattttttatt

SEQ ID NO: 166627 - DNA, 613 bp, Homo sapiens
tccaataacactttatttacaaaaaaagaggttaaactcctgccatgctacagctagagtgagctctctcaatacaaatattatgtcactcctctgcttaacacccaccctgaatgacttctgactacatataaaagaaaatccaaatgtgtggcttccaaagcaatgcctgacttggctctttctttcctttctcattttatctgaggtcccatcatcttcagtcaccattctcctttaagtttcttaagcgtgtgcaggactcaggacctgctacataatttgcaaagtccagtgaaaaatgaaaatatgaggctcctcatgtaaaaactattaagaatagcaaaatggcaatagattcataaactaagcacaggactcttctgtgtatcacaagtgacacatctatgaatgctgaatatccaccctataatctttgaatatacgttcttaaaccttgaacaatrtcttccatccccacttctcatgctgctcttcctcatcttttaggtttcagttaaaaaacagcattttctcaggccagactttccaactaccttgcccaaagtggagcctccttctatacccatgtcttattcctttattttttatt

SEQ ID NO: 166628 - DNA, 549 bp, Homo sapiens
aaaattaaaaaaaaactttctcaggattaaattatttttattaagttctcatgtctgattctgttctaggtactatacaaaatttttaacagatttgtctggcttctagtatgtcataagcaaaaatcgtgtcattggattatgggataggtatagaaataaatatacaaagtacagaaagtacaacacaacattaatttcmcattggtttggcaatctctgtttttgtttcggttttattggaaaacattgtgctcatagcatcatgtaatttggcataaaatttgtatctaaacagctctctctgtattattttaaatagcaataactatatgtcaatcatattgttttaaatgaaatcaccttaactataacaaagaaatgtctcaactggaatgacacctagattttggaatggacttttaagtgtattatgttgatgttgatagaaggatcagaactaatagaagatttagttagcattaatatcactcttctctgcaatgccatagtgctgtattagtgggtttttttgttttgttttgtttt

SEQ ID NO: 166629 - DNA, 583 bp, Homo sapiens
atatcagacccacacaaaatctttgttattttgctatcaacatttaagggctggaattttattgttgtcctcaaataagatcaaacattttagtatattcatgagaaacaaaagttattagaggaagagcaaaacaggatagctgtacagatttttttaatgtggatcatccagattaatttcactgttcacatatattaccaccaaaactcaagtaaattgaatgtrtaggagtcaagctgacattttagctgatcttcatgattgaagtggatcagctactgaagatttttagaataataaagttctaaatagatttatttttaataatattggagacgtatgctttctacaaatgcttacttcaaacataaatctttttgtggtttttgtcatcagtttactaaatacttttggattagttataccaatatttttctctgttttggatatttatatatgagagaaaaatatatttctgaagtctggacagctagctttaagttctcgttctgctacttactagctatcactacaggcagataatctagcttctatgaatctcagttttatatgtggaaca

SEQ ID NO: 166630 - DNA, 583 bp, Homo sapiens
atatcagacccacacaaaatctttgttattttgctatcaacatttaagggctggaattttattgttgtcctcaaataagatcaaacattttagtatattcatgagaaacaaaagttattagaggaagagcaaaacaggatagctgtacagatttttttaatgtggatcatccagattaatttcactgttcacatatattaccaccaaaactcaagtaaattgaatgtgtaggagtcaagctgacattttagctgatcttcatgattgaagtggatcagctactgaagatttttagaataataaagttctaaatagatttatttttaataatattggagacrtatgctttctacaaatgcttacttcaaacataaatctttttgtggtttttgtcatcagtttactaaatacttttggattagttataccaatatttttctctgttttggatatttatatatgagagaaaaatatatttctgaagtctggacagctagctttaagttctcgttctgctacttactagctatcactacaggcagataatctagcttctatgaatctcagttttatatgtggaaca

SEQ ID NO: 166631 - DNA, 583 bp, Homo sapiens
atatcagacccacacaaaatctttgttattttgctatcaacatttaagggctggaattttattgttgtcctcaaataagatcaaacattttagtatattcatgagaaacaaaagttattagaggaagagcaaaacaggatagctgtacagatttttttaatgtggatcatccagattaatttcactgttcacatatattaccaccaaaactcaagtaaattgaatgtgtaggagtcaagctgacattttagctgatcttcatgattgaagtggatcagctactgaagatttttagaataataaagttctaaatagatttatttttaataatattggagacgtatgctttctacaaatgcttacttcaaacataaatctttttgtggtttttgtcatcagtttactaaatacttttggattagttataccaatatttttctctgttttggatatttatatatgagagaaaaatatatttctgaagtytggacagctagctttaagttctcgttctgctacttactagctatcactacaggcagataatctagcttctatgaatctcagttttatatgtggaaca

SEQ ID NO: 166632 - DNA, 583 bp, Homo sapiens
atatcagacccacacaaaatctttgttattttgctatcaacatttaagggctggaattttattgttgtcctcaaataagatcaaacattttagtatattcatgagaaacaaaagttattagaggaagagcaaaacaggatagctgtacagatttttttaatgtggatcatccagattaatttcactgttcacatatattaccaccaaaactcaagtaaattgaatgtgtaggagtcaagctgacattttagctgatcttcatgattgaagtggatcagctactgaagatttttagaataataaagttctaaatagatttatttttaataatattggagacgtatgctttctacaaatgcttacttcaaacataaatctttttgtggtttttgtcatcagtttactaaatacttttggattagttataccaatatttttctctgttttggatatttatatatgagagaaaaatatatttctgaagtctggacagctagctttaagttctcgttctgctacttactagctatcactacaggcagataatytagcttctatgaatctcagttttatatgtggaaca

SEQ ID NO: 166633 - DNA, 443 bp, Homo sapiens
ctagctgggagtgtaattgctagtggttatgctttcagagctagctttgacatacatgttactttgttgattttggagtgtaagactggaatgtaatccttaccatcatgcagcttccattctgagagaaataatgaatattttaatgtaattattatttattttaaattttataatcagttgcctatttgcaaagcagacataagccagctattaaagatgactacrgtgctgaaaaaagaattaaaacaagtaagacaaagaaagccaaagttatataaggagggaaaataaatatgtagcttagtttgtaaataaaatgcatgttatgaagttcctataaacttacaaatacaaatttgactataaacttactaagagtcaaagtaaaaaaggaagcagactaggttatggtattcattgtgtcaataaattaaaaacta

SEQ ID NO: 166634 - DNA, 480 bp, Homo sapiens
tctttatttaattgcaattttgtacatcaaccacataaaagaaataattatttgttgctcatgcttcactaatagattaaataggatatataaactaaaggaaattattatttgtgctttatttttagaaaaataaattagtcagtgcctactctaaaatgagtagtacactgaatttaggcatagtggataatcaagttggatagcataaactaaaacttcaccctgamgcctgagttatgttgatcactaaatgacatgtaaaaggtatgcttatagaatgtcaaattaatgagctatagattgcaaaatgtagtcaaagccatttgaaaaaaaaaaaaaatcattggtgaaatccagtcagttcgtgtaaatttgttttagatcacttgcatatgcatgagcacctgctagttccccgagtaggccaacctttggggccctgtgtgcaactgcaatttgtgtaacacaccctaaatg

SEQ ID NO: 166635 - DNA, 471 bp, Homo sapiens
gaattcacaattcttttcaatcacttaatcaagtgacatttaaaatcagcctttcaatcacaatagccaatctgctattgaatctatagtcttgatatttttgtagagctagcctaatacaatgttatttgaagacaaaaaaaaaattctaaaacatttctatctcttccaaattccttcttctatagcttaaagatttcaagcactggtcctcaaagcataacccctggaccagcagcatcattagttgaaactttatagaaatgcagattctcrggcttctccctagtcctactgaatcaggtactgcggggatgcagactagcaatgtgtgtttctaccagccctctagatcattcagatgtatattaaagtttaaggatcactgatttaaagcactgtttttccagcattaacatttcttgtgagtgtcctggctgtcttcagaggaaaggaaaactggactctatc

SEQ ID NO: 166636 - DNA, 471 bp, Homo sapiens
gaattcacaattcttttcaatcacttaatcaagtgacatttaaaatcagcctttcaatcacaatagccaatctgctattgaatctatagtcttgatatttttgtagagctagcctaatacaatgttatttgaagacaaaaaaaaaattctaaaacatttctatctcttccaaattccttcttctatagcttaaagatttcaagcactggtcctcaaagcataacccctggaccagcagcatcattagttgaaactttatagaaatgcagattctcgggcttctccctagtcctactgaatcaggtactgyggggatgcagactagcaatgtgtgtttctaccagccctctagatcattcagatgtatattaaagtttaaggatcactgatttaaagcactgtttttccagcattaacatttcttgtgagtgtcctggctgtcttcagaggaaaggaaaactggactctatc

SEQ ID NO: 166637 - DNA, 583 bp, Homo sapiens
  misc_feature (1)...(583): n = A,T,C or G
tattcacaatagagtgtgatgtgaagaatataaaattatatgaaatttacacggacaacaggaaattttaaaatacaaaggccaagatattgtgaaaacaatttaaagagcaaagtagttaaaatgtaacataacaaaggacattgttttaaaaataccaaccaacatagactacatggggccacaaaaaagttgtttaatactgaaaataggtatttaattgtcaatgaccttaaggctatgttggaattttttaaaaactccgttttaaaactatggctaataaaataaaaggcaaaatgatgttaaaaagttttctcttccacacactaaatcctgtcaaagtatttacaaagcatgatcatttctctctttcttggaaaaagggtaattgattattttagctctgcacatttatattacattgcattctaccccaaaccaagtctttactggatagaatttgtataaatttaataaaactgatttctataatctctactyatgaaatttttaatgatacaacgaanaacagaagagaaaaaattatacattcaaaaaattcaatatcatttacaaatta

SEQ ID NO: 166638 - DNA, 602 bp, Homo sapiens
tgagtctctggtctacccagaaaaaagagaaggactgtggaaaacaatggaaaatgatttgaaataagcatcaaatatgtacagtgctcccatttgcacagcttttatagaaaaatgagtaaatatcagtattgtgcttatttgagttttacagyctgagttttcccctgtctgccctctggtgggactactaataactaactggcaagctaaaataattattgtagagaatgcattaaaaaattgtagataaatcagagatgaaatgaaattcatagaatattacttttgcttcacaaagtagggcatatagcatattactaacagtgtgctggacgaactagattgtgaaaaatgaatggcttcaatcacatgaactaagaagaaaaataatgaaagaggctgaaagttactattttacttcgtgatgcgtatatgttttcccttgtaattacttgacaaaatagtgataggaaaaccaattacttgactattttgccttccatgtgtgaaattgttggcttaacttttctctttttgaaaaagggaaggtagctttttttttaactaaatttaattaaattacaatttactaacgtcat

SEQ ID NO: 166639 - DNA, 602 bp, Homo sapiens
tgagtctctggtctacccagaaaaaagagaaggactgtggaaaacaatggaaaatgatttgaaataagcatcaaatatgtacagtgctcccatttgcacagcttttatagaaaaatgagtaaatatcagtattgtgcttatttgagttttacagcctgagttttcccctgtctgccctctggtgggactactaataactaactggcaagctaaaataattattgtagagaatgcattaaaaaattgtagataaatcagagatgaaatgaaattcatagaatattacttttgcttcacaaagtagggcatatagcatattactaacagtgtgctggacgaactagattgtgaaaaatgaatggcttcaatcacatgaactaagaagaaaaataatgaaagaggctgaaagttactattttacttcrtgatgcgtatatgttttcccttgtaattacttgacaaaatagtgataggaaaaccaattacttgactattttgccttccatgtgtgaaattgttggcttaacttttctctttttgaaaaagggaaggtagctttttttttaactaaatttaattaaattacaatttactaacgtcat

SEQ ID NO: 166640 - DNA, 589 bp, Homo sapiens
gttctttaataaaaatcttaaaaagttatataagtcttttctagaactcctttggttttggtgcatggagtattagaatgaacttttaattttattttttcaggaaaattagattttgataaattaaatgaatagtccattcatgaccargtaggaaatgaattctgtatgttgatcaacttcagtcctgtgagttatttaggaaactgttaatcaccatctggaaatgcattgaattacatctgtctgaaaggatagacactgttctacgagataactttctagttaaacatggagagatgacaatcaactgggaaatcccagttaatggcatgatttcttgtttctcttcattttcagctaggttttgtggctatatagatggtaagtgacagcaggctgatcctatgacattactgttcaaatgtggatggaagaatagatgtccagatcaagcttagagcctttcctaataagaaggctaattcagagttgtttaattgtaaattttacagatatacacaacaaaatcatgaataatgcccatttattacttaatgcttattgtgtgtcaggttatttacaaata

SEQ ID NO: 166641 - DNA, 595 bp, Homo sapiens
tcccaatatggaaccagaccagcaatccaggagaggtctatcttggcacaaagggacaatcaaaacctaactacaggatgattgatcactgatactttcagagaaagattgtgaagtgggaaatgtaaaagttgttgaaatyaaaatggagtcacttgtggttggttgtgggggtgcaaggagaacctgacagatagagccaagaaaggccatgaagggagggttctcaaacttaaatgcccgacagcagaaactatcacaaaagatggcaaaacccagagtcatgcactgaagccattgcaaccttgcacaaaaaatatttctgcaagaacatcttccctgcaattacctgtccaacctcagattggtgccactcttgttattaatccttgtagccaatgatacttatcttaaaacaattatgtaatcctcctcatttttcctttaaaaaccttagtcttttttttcttccctgaatatgcacataatttattatggcacaggaattagcatcacaatgtcctatttccccaaaaatattgttttcttttacaaagcctctgattgttatttaggttaaaaatttcatgaaatc

SEQ ID NO: 166642 - DNA, 585 bp, Homo sapiens
acagaagtgatgttttgggcagttacaagatagtggaccccctcatccgcctccagaaaatattctttatatagcaagcttttagggyaaaacacgggcagctggtcatatcttcagagcttcttgccaagactcatgataactgaggagtatagacaggtatctttataaggggttatctatgccacaatcaatgtttaatgaccttactgcagcacaccttggtatgtgagggtcaaacaccagtccttatagtggttttgcttcaagatgccatcacatttgccttgcaacagtttgttttcctacatgaacaaattttttttaatggcctggtcagtgatggtgtcatatcaatagtctagacatgatggcagagaacatggaaattattatcttcattttagttttataagagttgaagattttcttgcaagtaggacacaacacaatgacactcaaatagataaaagttggaactctttgttgcataaaactccagtgtagagcagcctgccagtcagggccgtacagggattgctccccaggacagggtagtagttagctaagctggagctgtaaggg

SEQ ID NO: 166643 - DNA, 585 bp, Homo sapiens
acagaagtgatgttttgggcagttacaagatagtggaccccctcatccgcctccagaaaatattctttatatagcaagcttttagggcaaaacacgggcagctggtcatatcttcagagcttcttgccaagactsatgataactgaggagtatagacaggtatctttataaggggttatctatgccacaatcaatgtttaatgaccttactgcagcacaccttggtatgtgagggtcaaacaccagtccttatagtggttttgcttcaagatgccatcacatttgccttgcaacagtttgttttcctacatgaacaaattttttttaatggcctggtcagtgatggtgtcatatcaatagtctagacatgatggcagagaacatggaaattattatcttcattttagttttataagagttgaagattttcttgcaagtaggacacaacacaatgacactcaaatagataaaagttggaactctttgttgcataaaactccagtgtagagcagcctgccagtcagggccgtacagggattgctccccaggacagggtagtagttagctaagctggagctgtaaggg

SEQ ID NO: 166644 - DNA, 585 bp, Homo sapiens
acagaagtgatgttttgggcagttacaagatagtggaccccctcatccgcctccagaaaatattctttatatagcaagcttttagggcaaaacacgggcagctggtcatatcttcagagcttcttgccaagactcatgataactgaggagtatagacaggtatctttataaggggttatctatgccacaatcaatgtttaatgaccttactgcagcacaccttggtatgtgagggtcaaacaccagtccttatagtggttttgcttcaagatgccatcacatttgccttgcaacagtttgttttcctacatgaacaawttttttttaatggcctggtcagtgatggtgtcatatcaatagtctagacatgatggcagagaacatggaaattattatcttcattttagttttataagagttgaagattttcttgcaagtaggacacaacacaatgacactcaaatagataaaagttggaactctttgttgcataaaactccagtgtagagcagcctgccagtcagggccgtacagggattgctccccaggacagggtagtagttagctaagctggagctgtaaggg

SEQ ID NO: 166645 - DNA, 585 bp, Homo sapiens
acagaagtgatgttttgggcagttacaagatagtggaccccctcatccgcctccagaaaatattctttatatagcaagcttttagggcaaaacacgggcagctggtcatatcttcagagcttcttgccaagactcatgataactgaggagtatagacaggtatctttataaggggttatctatgccacaatcaatgtttaatgaccttactgcagcacaccttggtatgtgagggtcaaacaccagtccttatagtggttttgcttcaagatgccatcacatttgccttgcaacagtttgttttcctacatgaacaaattttttttaatggcctggtcagtgatggtgtcatatcaatagtctagacatgatggcagagaacatggaaattattrtcttcattttagttttataagagttgaagattttcttgcaagtaggacacaacacaatgacactcaaatagataaaagttggaactctttgttgcataaaactccagtgtagagcagcctgccagtcagggccgtacagggattgctccccaggacagggtagtagttagctaagctggagctgtaaggg

SEQ ID NO: 166646 - DNA, 547 bp, Homo sapiens
taactttttaccctcttccacttttacagactctagtgatttcactgggcccacagggaaaatccaagataatctcccattttaaggtcagctgattagcaatcttaatcctctctgcaattttaatttcccttttcatgcaccctaacattgtcacaggttctgaggattaagttgtggacattttgggggaaccattacttcacctaccacagtctcctaaagttcctctagcatttccttctgaaaattcatataaatgcaatcttgactcattagtgcacaactttacttcattctttcaaaactttcccaaggtagtagcttcttggcagcatgccattgtgaaaaagtattaagtaggactcaaaaagtttaaatccaagtcctggctattacactaatttgatcaagatatttaacatttgctaacctccatttctttgcttacaaaataaaggtagtaaatgtgtgatgttacacattcaygatgtgactagctcacagagtgttgtgataaccaaaaggtttgatgacttggaagttc

SEQ ID NO: 166647 - DNA, 607 bp, Homo sapiens
caaattaaacagcaagaaaaaaattcaagatgattgcaataaaggagagatatttaactcaattgaaataaaagacragacagtttttaagcactagggtgagctactggaaaaatactagaggattttagggaggaagcttcgtcagtgtgattagaccctctgtgtttgctaattggcacttattgaagttaggctccaatactctcacagagagtgggagataggggccctgtctttcttgatgattacatttcaaggcatggctcctaggtccttgagaaagacattgcttgggttgtaaaactggcaagaagatttacatctaagagagacaaagaatttacacttccaagttttctaaagtaaatgctctaagaaaaggaaagtgcaggaacttatagtcaggaagaaacctgtctagtcaagctgagggaaacttttaagccatcttgtcactgaaggtcacttgaaagagaaatttttatccttgcaaccacatgataaattttaattgtttattttcttagctatgtgaactactgccccttcacacaatattcattcataaatttattcacatacatatcacatatctataaccaca

SEQ ID NO: 166648 - DNA, 585 bp, Homo sapiens
gacagtgccactcaacatcttgatattctttatggttgatatggtttggctgtgtgtccccacccaaatctcaccttgaattgtgataatccctgcatgtcatgggagggatgtggtgggaggtaatttaatcatggggatgggtttttcccctrctgttctcatgatagtgcataagtctcatgagatttaatggttttataaaggggagttcccccacacatgccctcttgcctactgccatgtaagatatccctttgctcttccttcatcttccaccatgattgtgaggcctcccgagccatgtggaactgtgagtccattaaatctctttcctttataaattacccagtcttgggtatgtctttattagcagcatgagaacacaccaatacgatggtgttcacaggtcataagactgaagctatgcaagaagccccatgtaagaattcccagtgctcttgctgacctttttataatgtgatctctttctacttctaactttgtagttcttattttacttcgcatttctacacacagaaattcaatctttgtgaagaccatgaatttgtaggtcagcttgca

SEQ ID NO: 166649 - DNA, 585 bp, Homo sapiens
gacagtgccactcaacatcttgatattctttatggttgatatggtttggctgtgtgtccccacccaaatctcaccttgaattgtgataatccctgcatgtcatgggagggatgtggtgggaggtaatttaatcatggggatgggtttttcccctgctgttctcatgatagtgcataagtctcatgagatttaatggttttataaaggggagttcccccacacatgccctcttgcctactgccatgtaagatatccctttgctcttccttcatcytccaccatgattgtgaggcctcccgagccatgtggaactgtgagtccattaaatctctttcctttataaattacccagtcttgggtatgtctttattagcagcatgagaacacaccaatacgatggtgttcacaggtcataagactgaagctatgcaagaagccccatgtaagaattcccagtgctcttgctgacctttttataatgtgatctctttctacttctaactttgtagttcttattttacttcgcatttctacacacagaaattcaatctttgtgaagaccatgaatttgtaggtcagcttgca

SEQ ID NO: 166650 - DNA, 585 bp, Homo sapiens
gacagtgccactcaacatcttgatattctttatggttgatatggtttggctgtgtgtccccacccaaatctcaccttgaattgtgataatccctgcatgtcatgggagggatgtggtgggaggtaatttaatcatggggatgggtttttcccctgctgttctcatgatagtgcataagtctcatgagatttaatggttttataaaggggagttcccccacacatgccctcttgcctactgccatgtaagatatccctttgctcttccttcatcttccaccrtgattgtgaggcctcccgagccatgtggaactgtgagtccattaaatctctttcctttataaattacccagtcttgggtatgtctttattagcagcatgagaacacaccaatacgatggtgttcacaggtcataagactgaagctatgcaagaagccccatgtaagaattcccagtgctcttgctgacctttttataatgtgatctctttctacttctaactttgtagttcttattttacttcgcatttctacacacagaaattcaatctttgtgaagaccatgaatttgtaggtcagcttgca

SEQ ID NO: 166651 - DNA, 497 bp, Homo sapiens
ccaaatgaatcaacctatcaggccataataaatatttaatattttttagaatgaagtgatccatttcttgaggattttaaaaatgatattgttcttctgtgtgtttaaaatttctagtgtgctgctgcaatcagatataatcttcttttagtgaataggcttttttgttccttatatcatatttaatttgttcttttaagcaaactaagyacataatgtagttaataatcatacatttcttattcaaatttaaatggttttacttttatctttgggattttttttgtgtgtctgtattaacaagcaaaaaatttctgctttatacacaaccatatttaaatgttttcactgttctaattaggtatgtcaatcagtacaaagttacttctcaataaatgattgatccagattaatatttgtaaaaaatttgttaaacccaaacaaacgagtgcttttacctgtctctatgaaatcagtggtctccataaacaaattac

SEQ ID NO: 166652 - DNA, 378 bp, Homo sapiens
aatattaattgatacaagaatgggggaataaatgggactgaaacacttacagtatccagtgctcactggtgtcagacttcatgctracccctttgcatgaattattttatctatacaataaccctaaggaagaaggcactattaaggtttgcattttaagagaagaaaattaaggcttagaaaagttatgcaattctcccaaatcatataattattaaatgacagaaagagcaataaataaatccctgcctcactcagacctgtggttctacaaagtcgtaaaggctgggcattctggattgatccttcctttcttctgcctctcctcaatggaattcagttccattctcctcaatagaatccaaagttttaaaggaa

SEQ ID NO: 166653 - DNA, 559 bp, Homo sapiens
gtttgtttgtacccatctttcttggaaaggcttccaaagtactcaaggggaatttagtgttttgatctaaatatttggtcactgcagctgtatctgcattagaggacaccccaagcccagtaatgctatgactcttgtagacttgtagatatacttccttggtggtcttgggtaagacccaggagaattccctggattaccaggaaaactcttgttctgttctcttactttctcccaagaaaacatatagtctctctctgtccatgctgagctgcctggagcttggggaggtgtgacatagcacccctgtaaccaccaacactgggactacattrggccacatctgaagccaacatagcagtaggttttgcctaaggcctgcagtgagtacggtcttggtactgtcaattttcactcaaggcccaaaggctcttcagttaggaggtgccaaattcagtttgccttatgtccttcccttcaggatggcgagttactgtcccattccagggttggtccagaaatgtcatctaggagcccaggtctagagtcaggaacctta

SEQ ID NO: 166654 - DNA, 531 bp, Homo sapiens
gacaagccctggtcacctgccccaggctcccttcactcatggtgttttatgctttggggtctccatgttctttcctgctggaggcctttgtcagggcctcctcttctatcaaacgctactaataacatccaaccggaaaatggaaaggattggagtctgtctccatcctttatatccacaggmttcttcactcacctggaattgcatcggctcctgggtggccagctgtgcagatacaaggagacctgtgcaggcagccttcctgtgtgctggaggattcctagtgccccaacccaggacaaggcccatcagctcaaataaaagcaatttttaagacattttctggaattatgaagacctgatgaagattacatgctgtcatcagagagtttcttaccaaaaaaggaggactgatttttcagtcaaccagctacataagccaatacaagggttcaatgaatgtttgtggagtgcttcatcatttacttcgcatgcatgaatactagacttgctccagctgcagtctcctca

SEQ ID NO: 166655 - DNA, 568 bp, Homo sapiens
gcgtcaccctcccacccccattacctggaatgatggttcctatatcttctygttcctcattcttcaataaaaacccctccagggatgttaatttaggggctgagagtgagtcagacacatcctaccacagtcccccttgactttgacaggtctgtcttttttccctgcatcctattggatcaggtgagagttcagttgttcttgttgtctttgaacatactttatttttaaagaagtcttaggttcacagtgtaattgagtggaaagtacagggagttcccataggcccactgttcccaaacatgcacagcctcccttattaccaaagtcccccaccacagcggtgcatttgttgcaattgatgagcctacattgacacatcaccaaaagtccctagtttacattaagattcattcttagtgttctatattctgtgaatttggacaaatgtatagtgatgtatatccattattatagtgtcatacagagtagtttcactgccctgaaaatgctttggctctgcctatttattttttctcccccaaaccctgggcaaccactgacattt

SEQ ID NO: 166656 - DNA, 579 bp, Homo sapiens
tctcgttcctcattcttcaataaaaacccctccagggatgttaatttaggggctgagagtgagtcagacacatcctaccacagtcccccttgactttgacaggtctgtcttttttccctgcatcctattggatcaggtgagagttcagttgttcttgttgtctttgaacatactttatttttaaagaagtcttaggttcacagtgtaattgagtggaaagtacagggagttcccataggcccactgttcccaaacatgcacagcctcccttattaccaaagtcccccaccacagcggtgcatttgttgcaattgatgagcctacattgacacatcaccaaaagtccctagtttacattaagattcattcttagtgttctatattctgtgaatttggacaaatgtatagtgatgtatatccattattatagtgtcatacagagtagtttcactgccctgaaaatgctttggctctgcctatttattttttctcccccaaaccctgggcaaccactgacatttttattatctccatagttttgccttttstagaatatcatataattgggatcagtcagta

SEQ ID NO: 166657 - DNA, 619 bp, Homo sapiens
cccaaaccctgggcaaccactgacatttttattatctccatagttttgccttttgtagaatatcatataattgggatcagtcagtatgtagccttttcagaatggcttctttactgagtagtatgcatttaagtttccccgatgtcttttcatggcttaatagctcaatctttttttttctttagtgctgaacaatattccttcttctggatatgccctaaattatttgtttwtttatgtactaaaatacattttggttgcttctaagttttggctgtcatgaataaatctgctataaacatctgtgtgcaggttattatgtggacataaattttcaactcttatgtgtagatagccaggaacgtgactgctttgctggatcacatgggaagagtacatttagttttgtaaggaactgctgaactggctttcaaaatggctgtactattttgcatttccaccagcaataaacgaaagttcctgttgctccacatcctctccagaatctggtggtgttagtgttttgtgtactcatagtgtagtgtatagtggtatcccactgtggttttaatttgcatcttcctgatgacatatgatgttgagcaactttttgtataca

SEQ ID NO: 166658 - DNA, 628 bp, Homo sapiens
ttctctttcaatgttgagttggytattctgggtcttttttctctccatataaactttagaatcattttgtcgatatcaaaaaataactcactgggaatttgactgggatttcattgaatctatagatcaagttggaaagaaattaaagcttgaaaatatcgcatctttctattcctgaacttggaatatctctttgttaatttagttctttatttggtttgagttttagtttttttcatataaattgttatagactgaatgtttgtgctactcctcccctcaaaatttatatgttgaaagacccccacaatgatggtattggggggtgaatccttcagcaggtgattaggtgatgagggcaaagccctcaaagataggactaaggccttcataaaagaaactcttaagagctctcttcccccttccatcaggtgagaatacagaaagaagcaggcactcatgagatggcaaatctgccagcattttgatcttggactttacagcctccaaaattatgagaaagaatttgttgttgtttataagccacctattttatggtgtcccattatagcagcctaaactgcctaagatatagatattgtacataatttgttaggtttatacctaa

SEQ ID NO: 166659 - DNA, 614 bp, Homo sapiens
atttatttaaaaaataaagtcagtaagaacagcaaaagtctrtgtagggtaacatcaagactctgctccctctctccaccctcatagctcactggaatggaaactttactccagatagctgtagccaagaacacagggctccctttcacttcagtcagaggtctgtcttcccagaaatgtagggaccaacagttcttatcctgccttcacctatctattgataagagtaccttccaggcaagtgaagccaagagatgaggactccattcttctgttcaacctacactgcggaatagaaggtctgtgatcagtatggtgttgcctagaatactggggctctgatgtctcttgtcctattttataaggtagaggtcaaatgctggtagacgcaagctgataatatctgaggcaactggtagtaactacaccaagtgctcagtactgagcggttcacttgccattttccctacccacagctccagagctgtggattgaagatgtttccttgggaggagaagtacacataaaacaacatcttcaaatctcttcccaaaagaattaagagaggatggagaagttcaagcctaaaattgttctcaaaaccaatgggcttg

SEQ ID NO: 166660 - DNA, 508 bp, Homo sapiens
tattgggcacttgtatgcaaataaataagataatttagatcgaatggacaaattcccgtacacgcacaaactaccaaaactgsctcaaaaaaaaaaaaatagaccatctggatagacttatcataagtgaacagattgaattagtgatttcagaactacacacgaagaaaaacctaagcccagatggcttcagcacttcactctaccaaacatttaaagaaacactaataccaattcttcacaaactctactaaaaaacagagaagagaacatttcccaactagacaaagatatcccaaggtaagacagctacagactactatcttatgaaggcaaacatcctccacaaagtagtagcaaaccaaatccaacaacatgtgaaaataactaaacaccatgaccaagggaagcaagatggctttaacacctcaaaatcaattaacacaatataacatgtcaaaaaaagaaaataaccacattattatttaattaacttaaaaaattaaca

SEQ ID NO: 166661 - DNA, 516 bp, Homo sapiens
attgttattagtatatttcactttcttatttctgaaatctttggcactagattctttccttgtataatacgtatgtttggcccttgcatgcttagccttgtaaaacttttttttttttttctctcttgcctagaggccatcaaactccaaatgatcagcaactggagccagccttgcacaatgtctctctttcaccaggcaaccccctgggaggaatctgactgcgattctttccaaaacaatgctctctatcatcaggaagtagctaagactggtcktggtccatattctaatggcagttagatgtccctcttcagaggggagaaattatacagacagcagtcagggaaatagtgggtagaagagggtggtccccagtgagggccacatcctcaagcttatacccacagtccaaagtgagaacatgtattcctgttttcccacttgaatgttgccttttccaaaaccaacctgtcccgccccaccccccatcctgtacccataaaaaccccagac

SEQ ID NO: 166662 - DNA, 516 bp, Homo sapiens
attgttattagtatatttcactttcttatttctgaaatctttggcactagattctttccttgtataatacgtatgtttggcccttgcatgcttagccttgtaaaacttttttttttttttctctcttgcctagaggccatcaaactccaaatgatcagcaactggagccagccttgcacaatgtctctctttcaccaggcaaccccctgggaggaatctgactgcgattctttccaaaacaatgctctctatcatcaggaagtagctaagactggtcttggtccatattctaatggcagttagatgtccctcttcagaggggagaaattatacagacagcagkcagggaaatagtgggtagaagagggtggtccccagtgagggccacatcctcaagcttatacccacagtccaaagtgagaacatgtattcctgttttcccacttgaatgttgccttttccaaaaccaacctgtcccgccccaccccccatcctgtacccataaaaaccccagac

SEQ ID NO: 166663 - DNA, 602 bp, Homo sapiens
gagggtctgtggtcaaggatgtggagtttctatccacttggcaaggggtggggagggtgagtctatacaatgaaatcactccctgtgtccattgcgcccaacaccaagcataacatgagcagctgcagttaggaggaaaaggccaaaacctccccttggaccwcctgcctggacctccctgctttaagcaggaattgaatgtaaaatgctgtctgggccagccctgcctgggtctgcaaaaggagaggtgcctgcagcaacggctagtgggccagcccctggcagcacatgaagccacaaagatgccccagctactgggcttgtcacccacaaaggcccccactctagcctgccccctaccctgcagctggagtgtctctggagaagtatttccaaacagcccattccctgcccctcttcatttttgtgttatgtgccacctgaaggtctttatgatgttctatatccccgcttcttctcccatgttgttttgcctcctatgacattggaactggctcctgaacaaggggttaatgtaggaagggagcccccacctgccataatgagaacccccccagcacctcagactctttctcatccaa

SEQ ID NO: 166664 - DNA, 612 bp, Homo sapiens
agactcatttatgggaggttataccaagaggaaaatagtaaacgggcacgtgttttagcccttttagacttgtaaatggtccacatgtaatgtgctccaaaaatggtgaaatcatccagtaaagcactcacagccctgactgctgcttgtggcatcacgggggaaagtaaaaaggcccatgcacagagggcttttttaacttttcctctagacagagtcttgatctgttgcccaggctgtagtgcagtggcatgatcttsgctcactgcaacctccgcctcctgggttcaagtgattctcttccctcagcctcctgagtagctgggattacaggcatgcgccaccatgcctggctaatttttgtatttttagtagagacggggtttcaccatgttggtcaggctggtcttgaactcctgacgtcaagtgatccgcctgccttggccccccaaagtgctgggattacaggcgtgagccactgcacccggctggggtttttaattaatatatgccctcctgtactaagtatattttaaattttctatgttatgtgatgctttgacatctcgggtcttacagactggaggagagatgtcctttcctggagttagc

SEQ ID NO: 166665 - DNA, 542 bp, Homo sapiens
cttcccatgaaagaagttgctgctcaacccactgcctggtctagtctccttctcatcctatttattcacccacctcttcccctccccttcattctcctctctttccttcatctgaaattgattttaagagacctcataataaatttcctgcatgctgatctgcttattgggaagcccagcctcatacttccaggtaactggggcctcaaaaagatgatgcttccagggcaaggattgcttgcccttttcatattttcctactacttggggtgaccctaattctgtgactgtatgttaaagaccaaaggaaggtgaagaaaaggacaggcataaatgctcgtaattgatccaggacagagatgcttggactccccarattttctcacatattttcagctgagaattataacggttctttttttttcatagttaaaaggataagaattattccagcaatatgtgtcagtaactcctgctttctcagccaactgacaaaaaaatgtactctgtaataagttacaacacttacacagcagtcttac

SEQ ID NO: 166666 - DNA, 527 bp, Homo sapiens
aaatattgcatgattctgcttatataaggtatctaaaatgtcaaatttgtggaatcaagagtggaatgttggctatagggtcaatgatggggagactgatatttgggagaaagtaaatagtcaccaatgaatgggtgtaaagttctgttaagcaagataaatatgccctacaaatctgctatacaaygttgtacatatagtctacaataatgtattgtacaccttaagatttgttaagagggtgggtatcatgtaaactgtccttaccatgtgtggtcattcctcagttttttttccttgagaatggaagcattcattcctcaggtgcccacaagaatttcccctggaatcagatgaagtctcaattgcacctgcattataattaaaaaatctctctctgaccagtcctgctctgctcattccagtataagaattaattagtaaagcactccccaataaagtttctgcatgaaaaggtcatagtttcagagtctgttttctgaggagcctaatcctagatagctccc

SEQ ID NO: 166667 - DNA, 527 bp, Homo sapiens
aaatattgcatgattctgcttatataaggtatctaaaatgtcaaatttgtggaatcaagagtggaatgttggctatagggtcaatgatggggagactgatatttgggagaaagtaaatagtcaccaatgaatgggtgtaaagttctgttaagcaagataaatatgccctacaaatctgctatacaatgttgtacatatagtctacaataatgtattgtacaccttaagatttgttaagagggtgggtatcatgtaaactgtccttaccatgtgtggtcattcctcagttttttttccttgagaatgraagcattcattcctcaggtgcccacaagaatttcccctggaatcagatgaagtctcaattgcacctgcattataattaaaaaatctctctctgaccagtcctgctctgctcattccagtataagaattaattagtaaagcactccccaataaagtttctgcatgaaaaggtcatagtttcagagtctgttttctgaggagcctaatcctagatagctccc

SEQ ID NO: 166668 - DNA, 369 bp, Homo sapiens
tgcttgaatttctaaagaagtcatactcacacttgtttcctttttctgaaatagctgtttctgtgtcagggcattttaagcattaaattccttcgtcacttgacatgagtgaaaccaaactttgtatcaacttctttttcttaattgtcttgtaatttcaagggggtggagaaaaataagagatcctcaatcgctggaaatttttcayatcagatgaaaacataattttgcagtaatacaatgatatcgtgccacattttatcaaagctctgtataatgtgtaagtgtgaaacacattctagaaacaagcaacactgcaattactatttttaataatatgaaattcataattctttatagccttattca

SEQ ID NO: 166669 - DNA, 550 bp, Homo sapiens
ttgagaacagttgattaatatttgtctggttttctagttgtgtaggccagtagagtaaattcatttcttgtaactacaccatggcataaattgaattcctagtcttccttttataaagaaaatatctgttactcttttgatgggttgcctcytttctgttttctttttcaggactgtttttgtaatgtattttaaggttatgccaaatgtttacagacatgttttcctcagaatcatcgtttttaatatgctcaccatgacaagaaccttggcatcttattgacgaagtagatttggttcactctttgcaatgtgctaatcttggaaacccagaagtgaagttcaatattgctaaattttttttttcattgtgtcagagaagtgtagcatgattttatatctaaaaggaaagaaaaattctgatgatatcatccagataatgaaatgatcacaaagcaaagcttcaggaaatataagctattttataagttttttcagtaaatcttacaggttagaaaaagtcacaagacagaaagcattctgcctgtgt

SEQ ID NO: 166670 - DNA, 550 bp, Homo sapiens
ttgagaacagttgattaatatttgtctggttttctagttgtgtaggccagtagagtaaattcatttcttgtaactacaccatggcataaattgaattcctagtcttccttttataaagaaaatatctgttactcttttgatgggttgcctcttttctgttttctttttcaggactgtttttgtaatgtattttaaggttatgccaaatgtttacagacaygttttcctcagaatcatcgtttttaatatgctcaccatgacaagaaccttggcatcttattgacgaagtagatttggttcactctttgcaatgtgctaatcttggaaacccagaagtgaagttcaatattgctaaattttttttttcattgtgtcagagaagtgtagcatgattttatatctaaaaggaaagaaaaattctgatgatatcatccagataatgaaatgatcacaaagcaaagcttcaggaaatataagctattttataagttttttcagtaaatcttacaggttagaaaaagtcacaagacagaaagcattctgcctgtgt

SEQ ID NO: 166671 - DNA, 550 bp, Homo sapiens
ttgagaacagttgattaatatttgtctggttttctagttgtgtaggccagtagagtaaattcatttcttgtaactacaccatggcataaattgaattcctagtcttccttttataaagaaaatatctgttactcttttgatgggttgcctcttttctgttttctttttcaggactgtttttgtaatgtattttaaggttatgccaaatgtttacagacatgttttcctcagaatcatcstttttaatatgctcaccatgacaagaaccttggcatcttattgacgaagtagatttggttcactctttgcaatgtgctaatcttggaaacccagaagtgaagttcaatattgctaaattttttttttcattgtgtcagagaagtgtagcatgattttatatctaaaaggaaagaaaaattctgatgatatcatccagataatgaaatgatcacaaagcaaagcttcaggaaatataagctattttataagttttttcagtaaatcttacaggttagaaaaagtcacaagacagaaagcattctgcctgtgt

SEQ ID NO: 166672 - DNA, 550 bp, Homo sapiens
ttgagaacagttgattaatatttgtctggttttctagttgtgtaggccagtagagtaaattcatttcttgtaactacaccatggcataaattgaattcctagtcttccttttataaagaaaatatctgttactcttttgatgggttgcctcttttctgttttctttttcaggactgtttttgtaatgtattttaaggttatgccaaatgtttacagacatgttttcctcagaatcatcgtttttaatatgctcaccatgacaagaaccttggcatcttattgacgaagtagatttggttcactctttgcaatgtgctaatcttggaaacccagaagtgaagttcaataytgctaaattttttttttcattgtgtcagagaagtgtagcatgattttatatctaaaaggaaagaaaaattctgatgatatcatccagataatgaaatgatcacaaagcaaagcttcaggaaatataagctattttataagttttttcagtaaatcttacaggttagaaaaagtcacaagacagaaagcattctgcctgtgt

SEQ ID NO: 166673 - DNA, 621 bp, Homo sapiens
gagctaaataaatagttgtttctaactattatttttgggttggtttgtaacacagtgatagctagctgatatattttgcttttattcttatagaacctgataaagaaagaagagtgaaattatactggcttcagctaaacctttgggaatgtgatgacttgccaaaacttttgggacctgactaaattgtattctaatatttacataaaattgcccataggtcagtgtggtattccatcaagggtcttggacaggaataaagaaacttgatttctagctctgtcttggatattatattcactcggtcactttgaaaatataacgtcacctcattgattctgtttttccacatatttaagataaagggttaagatgagattctgaaaattcccgttgaattttattatggaattcttagtatgacagagactgctcaagaatttgctagattccatgtaatggwtgaatagattttgttctactgatagcattagtgatcttatcataaccctgacatgaacatattttttgcttccacatttttggatcagagatcacattgagtgatcacattaaccaatcactcaatttatccatgcctatatcattgactacttccac

SEQ ID NO: 166674 - DNA, 562 bp, Homo sapiens
actactccttaactcattctatgaaaccagtatcattttgataataaaatctgacagagacacaatgaaaaaagaaaacttcagtccaatatccctgatgaaaatagatacaaaaattctaaacacaatagtagcaacctgaatccagcagcccatcaaaaaggtaatttgtcagtatcaattaggctttattcctgggatacagattggttcaacatatgcaattcaataaatatattaaccacataaatataattaaaagcaaaaaccatatgattatctcaatagaagcagaaaaaggtttggataaaatttgacatcctttaatgttaaaaacctcctactaaataggcatcaaaagatcatacctcaaataacccacagccaatcttatrctgaatgggcaaaagctggaagcattccccttgagaaatggaacaagacaaaactgttgactcttaaccatttctattcaacataatactggaagtcctatctaaagcaataagagaagagaaagaaataaatgtcatcataggaaaataagttaagctatctctct

SEQ ID NO: 166675 - DNA, 564 bp, Homo sapiens
atcacccaatgatcaatccaaaaagaaatagcagggaagagtgaggacagtgaattttcagtccaccatttcatagaagctgcatctagaaacaaagaatgttaagttggtttctttttgtactttttcacataattttctactatgttcactataggaccagcatttcragggcagtttctttcacagtttcagtgaaaattcattgagcatctactggcttgctctgcactgttctctgcactgtgctaggcagcgcaataaagaaatatacagagcaagacatggtggtgtgcacttgtaatcccagctactagggaggccgaagtggaaaaatctcttgagcccaggagtttgaggacagcctggacaacaaagacagaccctaaaacgtattttattaaattaaaaacatttttaaaaagacagacacagcacagaattgcataaaaaagacatcaaatcattccactaaaactatttatttaaagttgcactaagtgctactaatgagcataaaatgttttgaagttgggtaatttagacttctggtctggtttttaa

SEQ ID NO: 166676 - DNA, 564 bp, Homo sapiens
atcacccaatgatcaatccaaaaagaaatagcagggaagagtgaggacagtgaattttcagtccaccatttcatagaagctgcatctagaaacaaagaatgttaagttggtttctttttgtactttttcacataattttctactatgttcactataggaccagcatttcaagggcagtttctttcacagtttcagtgaaaattcattgagcatctactggcttgctctgcactgttctctgcactgtgctaggcagcgcaataaagaaatatmcagagcaagacatggtggtgtgcacttgtaatcccagctactagggaggccgaagtggaaaaatctcttgagcccaggagtttgaggacagcctggacaacaaagacagaccctaaaacgtattttattaaattaaaaacatttttaaaaagacagacacagcacagaattgcataaaaaagacatcaaatcattccactaaaactatttatttaaagttgcactaagtgctactaatgagcataaaatgttttgaagttgggtaatttagacttctggtctggtttttaa

SEQ ID NO: 166677 - DNA, 433 bp, Homo sapiens
tagtaagaccataaatggattgtcattgaggatgtctgtaattcagcacagttttctgtatgccttcttcatggtatcattttaaccaataaatcattgctgctgtgttctttgccaaagaaagatgggctcaaacaaaagaagggtccactgaaatcttcagaatgtcttacttgcctacaggccagatcctctcttttagataacaggatcactgaacttttastgttgtgttctgtttttttccatgactcctgttgattactgctagggcatgggcaaatatctcctcacacggagtagactacattattattccaaaatatttgctgcttttcctggggaaggattaagttcccctcttcattgattaacaaaatgggagtggcagtttttaatcaccagggtatgggttgtcaagttctgccacaat

SEQ ID NO: 166678 - DNA, 540 bp, Homo sapiens
gggaatatggtaaatacatatagtcaattgtctggaaagaaattgtctgtgaaaagccaataagtattttgcaaattcttgtttcatggcaagaaagataaggtaaatgaggcacttatacacagacatggccattatttggcacatttagagaaaatcttgatattaattttttattttattatatttgaaatatttaacttcctaatacttatcaragcacattttattttcatttcaacttatggctttcattatgtgctttgaattcagaccacctgagattgcatctttgtgaaatacttagaagtcttaggcctagggcttgcagtgagccgagatcatgccactgcactccagcctgggcgacagagtgagacttcgtctcaaaaaaaaaaaaaaaaagaagttttaggccttaggaaaaattccatgaagttcagtgcttcagtctccttgtttgtaaaatgggaataataacagtatcattctcataagattgtaataaaggttaaataaaacaataaaaagcactgagaa

SEQ ID NO: 166679 - DNA, 499 bp, Homo sapiens
tgactttacaatgattaatttaccttacttcaccttggtttccttaaacataaaacaaataatttaacttgataaaatttagttgaactcttaagttttatcaatagtaaaacatgcttttcattaaaatagagatggacaaatacctgtaaactgcataggatggaaaggatattaggaagtttatagagtgagaaaaattgacacttcacatcgtgaagagaggaaagaaatggcatcaaatgagatagttactgtaaaaagagtmcattgaaacaagaacatatggaggataatgtctgccatattcaaattagtgccagatttttgtggtttgttggatgcttttctgtagactttagaaggaaaaagaatacagctgcgaaaactcccctcttcaccttggctgaggcattcttcaagagagcagatggctataagtttcaagccatgaatcattgtcaagggatctcctcaagctgcctgtagcaagaagagt

SEQ ID NO: 166680 - DNA, 568 bp, Homo sapiens
atttcttaaattaataatgtggcttccattcaagaaaaaaaaatatataaatcaaacattaaaataagaagagctcagtcgtccctcaaatgcagaaatacagtcttgagctctaaacacctctatgtaacgtatcttattccgttttttgaggctgcactttacagctaacataccctggcatggacacctggctgaagtactcatcaaaagtagatgtcatgaatgatataaactgaggtccatttagagcctttaactaattggttaatgactacccttaatattttattcaggataaaacttcttcctccaaacaaatgatgtagatatccaggatctcagagttttcagccaaatacttgggcaaattcaaaaatttttttagagaaaaaaattctacccacagacacccttgcagacyttcctccaaatgagaattgaatggccctctgttgagatcagagtatgagtcagatttctgaaatttcaaatgagaaatgttagtctttctgtctgcacaccacacatataaagcatatggatgtcaccttaactgacgacacag

SEQ ID NO: 166681 - DNA, 617 bp, Homo sapiens
gctgctgttaaaaatgtgatgatctctacacactaatttgtagcaatttccaggagatactgttaagtgcaaaagcaaaatgcaaagtagcatatatagtatgctatcttttctgtaaaatatgagagaaaataagaaaacataaaagtctctgcttaatcttaccccctacaaaagaaagaaaagaaacaaggaaaggaaaaacagaaaacaattaagttggttacctacagagatgaggaaacagggagaaagagatatgggcaacagtgacactcctctaataatagagctgcttatagggctttggcttgaaaagctgtcaatgttttacatattaaagaaaataaaatgtatccaataaatatgggaagggcaaaaaaaattctgaaagcaaaccataaaattgaacccaagtgtgtttcaaatgaattgcataacctcactgaccagagaaayaggtagagaagtttaacaaaagtcatatgaacactgcattcatttatgcagggtagagggtgggaaaccatacattctgaactctttttaatgagtttgttttttgtagtggtttaagtgaagcaattcgaaaactattttatatgtattatggaagt

SEQ ID NO: 166682 - DNA, 600 bp, Homo sapiens
ttgagcatcttctataagacagacaatgtgttgcctcagaatatacatggtcttaatggtaactacaacccaggcaggaatgtggtctattttacaggtgatgaaataaaaattcagggagctaacttatttgcctaaggccaggttttgaacacaagtcttcctatctccaaagtccattttgttttttcaccacatactactaatttttactggtgcatttaagagggatcaatacaatgttatgaatttgaacyctcaaatccgagtacacaaagaacaccactaggctatgtactttatctaaagcatctgggagaaagattcaaatcagtgttcacaaagtgcactacaaacatcaccaacagtaaaattacttgcaagggggagagaatgttatgaaatgcagatccttgagtctcaccatagatctactgaattaggatccagatttttttttctttgtctagttcaccattgatggtcacctgggttgattctatgtttgtgctattgtaaatagtgcttcagtgaacgtatgcatgcatgtgtcctttggtagaacaattcatttatttattttttttgatatatacctag

SEQ ID NO: 166683 - DNA, 632 bp, Homo sapiens
actttgcggcaatatttgtctcatcgcatgtctcacatgcaattctggagttctgctctgaatacatattcctctaatcacaggagatacagtggttcctgctattgcaatgccgtcagtgctcgcataaayagcttacatatatgccttcctgctgtagcttctacttccttcctccttcctcccccttttcttcactcaattcttagccagtgaaaacactgccaaggtagagattggatggcccttcctcttctccttcattctctcttgccctttgccttcctcttagcaatactttctaacatatttactatgtgccagaatttgtgctatgcactttaaatagaccattcaatttagtcctcatgacagtatcatgggctaaattttattatcccattaaaaaatagatatgagatgttaagtaatttcttcaaaatagcctgtcatggccagtaaatgtctgaactgccttttaagcctgggtttttggactccaagtatataccacttaccatgatgtaatgatagccactattccacatgcatgtatatttgctgttgacattgatcatcactttagtagaagttaagaataaaaggttatcagcttctgggaaccatatttt

SEQ ID NO: 166684 - DNA, 632 bp, Homo sapiens
actttgcggcaatatttgtctcatcgcatgtctcacatgcaattctggagttctgctctgaatacatattcctctaatcacaggagatacagtggttcctgctattgcaatgccgtcagtgctcgcataaatagcttacatatatgccttcctgctgtagcttctacttccttcctccttcctcccccttttcttcactcaattcttagccagtgaaaacactgccaaggtagagattggatggcccttcctcttctccttcattctctcttgccctttgccttcctcttagcaatactttctaacatatttactatgtgccaraatttgtgctatgcactttaaatagaccattcaatttagtcctcatgacagtatcatgggctaaattttattatcccattaaaaaatagatatgagatgttaagtaatttcttcaaaatagcctgtcatggccagtaaatgtctgaactgccttttaagcctgggtttttggactccaagtatataccacttaccatgatgtaatgatagccactattccacatgcatgtatatttgctgttgacattgatcatcactttagtagaagttaagaataaaaggttatcagcttctgggaaccatatttt

SEQ ID NO: 166685 - DNA, 487 bp, Homo sapiens
aatgggagtactaatagtgtcaaatatggtagttataaggaatcaaaacagtctaattcctagtgtatagtaagtgctcaatatatttttgttacaattacaattatgattataatgattgagcctttaatatttttcaggtactctcagaagttttgtagaggatactgttattcttcattcatatacactcaataaacatagaatagaatgaaaaattggtgaactacccagcgctttgttctagaagggcccacttttcccctttaccttaccctatgaacattcttagtctcctttcatatggaattgctgtrtcccaggagaggtggcaagacttgatgaaaacatgaggcaagaataactggggatgatctgtttttttttttttcctcttgggaaggagcaggaccactttcctgcagctaatttccactctgctaagtcatgctgtgtgtgctatctgaccaggcccctcacccccacc

SEQ ID NO: 166686 - DNA, 356 bp, Homo sapiens
aggagtttgacttgcctaccctccaggcactagaagtgaccttgactgttttarcattttaattagggttggggtaggggaggggcagcaggacactttttgaaatttaaatataagaactcttttaaaaacaaattattttgtccttaagaaactctgtgtgtgtgtatgtatgtgtgtgtgtctgtgtgtgttgtgtgtgtgtgtatgtgtgtgtgtgtctgtgtgtgtgtgttgtgtgtgtgtgtctgtgtgtactgagcaaagggggtgctaggttacttgaggggttggttcagaggcaaaaacatggggatgccctgagttttgcatttgtgttgaaaagtcatcagaaa

SEQ ID NO: 166687 - DNA, 356 bp, Homo sapiens
aggagtttgacttgcctaccctccaggcactagaagtgaccttgactgttttaacattttaattagggttggggtaggggagggrcagcaggacactttttgaaatttaaatataagaactcttttaaaaacaaattattttgtccttaagaaactctgtgtgtgtgtatgtatgtgtgtgtgtctgtgtgtgttgtgtgtgtgtgtatgtgtgtgtgtgtctgtgtgtgtgtgttgtgtgtgtgtgtctgtgtgtactgagcaaagggggtgctaggttacttgaggggttggttcagaggcaaaaacatggggatgccctgagttttgcatttgtgttgaaaagtcatcagaaa

SEQ ID NO: 166688 - DNA, 531 bp, Homo sapiens
aacacactaataaaattgagtgtggtcatttctgtaataaaaggattatattggaaatgtatccttttactgtacataagaggttttgtttggctgaagtctatagaacaattctagattctcttcatatttaaaggtcttcaactatattaagaactaaaaatgaaaaattcttaccaaataacttagctaccatgcagacatgtaaaatacaactgaaatgtatgctctggctgtgttagaacttctttgaataataaagttactgatgaaacaacaatctccagtctttaygcggtttaaagcaagctacaaagtcaacctcaaaacatgagaagatgatatgaaagattatgtagtatgataaaatatttgggctgataggtttctttagcctctcaaaatttagaataaagtggataaatctagtggacttaaagatcaagaatatatactttgaagccaaaatgccaacattcagttctgtctctgtttttactaactgcataaccttagagaagtcagttaaat

SEQ ID NO: 166689 - DNA, 502 bp, Homo sapiens
gcaatcagctcttttgcctttgtgtgaagctgtctgatcgtgggatatttattttgttcatatcagcccctgacgtccctagcacagctgagtgggagtcattgtgtttttgttttgcatagttcctgagtcaagatttgtctactaactcctactgcctctgtgtatgtgaggatgtggagtacattgtattaagctatggttattgggcatttagctaggctcacttaacagattgcagagttcatttctatacatctgtcttacagagtacatgattcagrttcatttctcaacaaaatgataaactgctttgtgctagagaccttgcaggtctctaataaataggtggaaaatgataaagttaaaattcacagtgttgtggttccactgacactttgctgcttcctgcttttctaactgttatgtcacattttccattagagttctaggtgatttcctcaactttttcttccttctttgattaatgccacacataccc

SEQ ID NO: 166690 - DNA, 532 bp, Homo sapiens
agttttattcatattgccaagacttggaaggaacaaagttgtccttcagtgggtgaatgaataaataaactgtggtacatcttgacaatgggatattattcagcactaaaaggaaatgagctatcaagccatgaaaagacatgaaggaaccttaaatgcatactactaaatgaaagtagcccagtctgaaaaaactacttactgtatgattccaaatatatggcagtctggaaaagccaaaactatgaagacagtaaaaggatcagtggttgctaggggttgtggggagggagggatgaatctgcagagcagagaggattttaagggcagtgaaaatactctgatactataaaggtggtgacatgtcattatacatttgtccaaacccatagaatrtacaacaccaagagtgaaccctaatgtaagctatggtctttggatgatgatgtgttagtgtaagttcattgattggaacaaatgtgcctttctgatatggtatattgatagtgggagaggctatgcacttgttggg

SEQ ID NO: 166691 - DNA, 485 bp, Homo sapiens
gctaaagtcatctacttgggtttatgatactaaatattttctagttgcacttaaccacacccttaccggttttcttgggaataattctaaataaatcactttcccatgagtccttgttacagggtctgcttctggggaacctaatctgagagatttctccaaggaaaagttgggtaccttaattagtcagttattgctgcactagagctaaataaaagacataaatatctaaggcacttactggaataaacatcttatttccgctaagaggttggctagggaagctctgcttcagagtatgggttgagtataagcctgttccacatgtcttttgctctgggaccaggagttgtgcagcccatccttttctcaagacaaaagcygagccaagcaaggacatttaaagcttcacttctgctcacatcatatctattggccaaacattccattggccaaagcaaatcacatggccaagtcaagcatca

SEQ ID NO: 166692 - DNA, 590 bp, Homo sapiens
tattgttggagtgcctaaaatgggtcaggctcaatgcttggcatttaggatatgcaggtgaactctacatcctgctgtcaacgaccttggagtacattaggaggatgaacagatgaaaaggtaactaagattgaatgtgggaagtttagtgattgagacatgctcaggccagaagatgggttcacagccatcttcacagggctcctaggagtgtgtggagggatgccaggtatctgttctgccagggctgcattctctgttcatactctttgggtttgaggccacagctgacactcaaaaatgatgatgaaactgttggttggagtggcagcactggcaatagtagttctggttattattatctctgtcaatttctctctcttctttctctctgcttctcctttattttctttctgcacayctctgtctgtttttcactttagatccctttatttcttcttttataccatatcttatcattcttttggggacatgtaactatggattaactgatggctgattaaaacacaactgcatctttttattgcatgcttttcctaatgaaaaactgccctgatgacacctaaaca

SEQ ID NO: 166693 - DNA, 597 bp, Homo sapiens
ggtcaagtgggaagtaatttaatcatgcaggcggttaccctcatggtgttctcctgatagtgagtgagtcctcatgagacctgatagttttataaggggatttcctgcctttgctgtgcacttctctctcgtgccaccatgtgaragaggttgtgtttgtttccccttccgccatgattgtaagtttcctgaggcctccccagccatgctgaattgagtcaattaaacctctttcttttgtaaattacccagtcttgggtatgtctttattggcagcgtgagaacagaggaatacaatggtcaaataattctgatgaagaaatattaacctgaagagagtctaatagtatattcagttttgatcgaaatcttatcatgaaaaatagaatatttttaagattttgatataaaagtcatgctttctgtagaaaattttaaaaatagagaaattactggcacactttagagatattgtgggcttgattccagaccaccacaataaagcaattatctcaataaaatgagtcacatgaattttttagtgctcagtggacacgaaagttatgttaacactacactgtagtctattaagcatgc

SEQ ID NO: 166694 - DNA, 568 bp, Homo sapiens
tcatgctggtggagggtcttgccttgatgttgatggctgctgactgatcagggtttgaggtggctgtggcaatttcttaaaataagacaataatgaagtttgctgcattgattgactcttcctttcacaaaagatgtttcaatgctttttgatagcatctttcccacagtagaacagctttcagaattggagtcagtcctctcaaaccctgacactgctttatcaactaagttcatataatgttctaaaattcaggggtgtccaatcttttggcttccttgggccacattggaacaagaggaattgtcttggrtcacacataaagtacactaacactaacaatagctgatgagctaaaaaaaatttaggaaaagaacctcataatgttttaacaaagtttatgaatttgtgttgggccacattcaaaaccatccttggctgcatgaggatcatgtgctgaaggttggacaagcttgttctaaatcctccattgtcactttaacaatgtttacagcatcttcattaggagtagattccatcccaagaaaccacttccttcgctcattca

SEQ ID NO: 166695 - DNA, 548 bp, Homo sapiens
aatatatgtaatgtgaatgttgttgctctgagcaggaagatttaatcatgttggggatctgaggcattagctaagatatggagaaagggattgcttggaaagtgaattccaggcacaggaatagcatgaacaaagaccctgaggcaagatatactgagaaatgtgcaggaaggcagggttttccagttaagtaggagcaacgtcatataggatcctaaatttctattgagaaccttgaaaccattcaaacattggcaagttgctcattgttatccttcctgtgcttcaaattcctcattcacatcatagaataataatgatgcctacccaacttytttattgctagccatggagcaagcaagcattcattaaaagttatgcattattaggcatcaggaagtcatgaagtattctcagtggcagagtgacatggtcagatttatgccattggtgtagagaatggattggagggcatgagggtcagatgcagagagactagttatttgttgatataatattgtaatagccccagggggtgatggtgacct

SEQ ID NO: 166696 - DNA, 566 bp, Homo sapiens
tttactattgctaatccttacaactattatataaagtaatatcattatctctattttacacgtgagaaaactgaggtatactaaggtgaactcatttttcccatgttttccagytggaaagtggtagggctaagtgctcatttcatttaatttcaacaaggatttgtacagtacctactctgatactgtcctagatgctctagttataacagtgaaggaaaaatcaccaagcttttgtcgaagatttcagcccagatctgacctactccaaaagctgaatctttccaccaagcccactgcttcattgcattggtgctatatggagagataaacctgaccccaattcagtaagttacgatgttcccattatgccatttttattccctttatgatttaatcagaacacttgcttaaattaaaatatagcttagtcatgcatctgatcttctttcccctaacatttttttcatggagctgtcagttttgcaaactggcttgatttacagatattttatccagaaataaattgaattaacaatttaaaatgcagaacagaaaaggctgcc

SEQ ID NO: 166697 - DNA, 498 bp, Homo sapiens
gtgagacttcatctcaaaaaaataaaattatttaaataagtaagagcagaaacacttttcaagttattttataaggttagtattaacctgataccaaaaccaaagacatcattagaaaaaaaaaactacaagccaatatactttatgaataaagaggcagaatatcttaacaaaatactagcaaagaaaatcyagcaacatgtagaaaggattacataccacaatcaagtgggatttgtttcaggaatgcctgttggtttaacatctgaaaatcaatcaaggtaatgcaccataataatagaataaaggaacaaaattataatctccatatgtacagaaaaatgtactttttgtgggaaaaaaacactcaacaaactaagaatagatggaaatgttcacaatgtaataaaggctatctatttttttagaatccacagctaacatcagacttaatcatgaaagacagagtagttcccacttaagatcagaaataagtta

SEQ ID NO: 166698 - DNA, 621 bp, Homo sapiens
gaaaaacagttggaaaactatttcctaaatatatgtggtattatttgggggcaatgctgatgacatttagaatggttatatacacaagtagaaaacgtacagggtctacgaaattaaaactgaacatctgtaaaatgctttgtaaaagaatgtaaaaaggttataaatcaatttgtgggtgtttaaagcaacgcatatttgccctgcactttgcagatttgatttattctcagcttaatgatgtttacataggttaagccttcagcaaagttcaaggagccaaatttctccataattccctcccaccaaggtatcctcattaaattttggtataatggcaagatcttgcaatcagaagacctaggtttttatccttcgccccttactaactatgcaaagytaagaatcttactaaatataatcctccatttccatatctttaagaacgaaaatttggtaatggctatttgatggtcactctttaagcattacttttaggatcaaaatcaaagagatattatatacaggtaaaattcctttttaaacagtagtgcactccataagacaagaaaatgttattcttaaaactgtcttctctggtctggcaatatttatgctgca

SEQ ID NO: 166699 - DNA, 628 bp, Homo sapiens
ataaaacaaaacaccaggcagagctaacaaaacatgtatacctatgttacaaacctgcacattgtgcacatgtactctagaacttaaagtataaaaataaaaagcaaaaagacccccccaccaaaaataaaacaaaacaaaaacaaaaaaaaaactatacgtcctcatcaaaatggagctcttttagtggtaggggkggcagaagacattaacaatatttgaaactcttattctatgtaataatctattcagacacttcctttggagattcctattttcagaaaaatcatccagtcacccattccaacactgagtctataccaatatttgttccaagctgatcataaattctccctgccttcccacccctacacataaactctacccactgtaaatcaaggttatcaggcacaagtaaaaccaagacctaaccttgataaccagtagtaaaatgttactttgctagaatgtaagtaaaccttttttgcacactccttttaatatagaaagctgaaaaagttggaataaaacaagttaaaatcagtgattttacatgataatgtgagaacaaactgaggatcctagtacatagtaatgttgcatttaggattagtcagaaagtaaagct

SEQ ID NO: 166700 - DNA, 564 bp, Homo sapiens
agtaaaatgttactttgctagaatgtaagtaaaccttttttgcacactccttttaatatagaaagctgaaaaagttggaataaaacaagttaaaatcagtgattttacatgataatgtgagaacaaactgaggatcctagtacatagtaatgttgcatttaggattagtcagaaagtaaagcttcttaattctatttgcattaattagtcaaacaaacactttctgtagaggtatttgacactctcatgtgttgagatttgccaaaatatgctaatcatggtcaatcctcatgtaccatgtgaaggctgggctgctattctgtgtgattgttcaggtggctcactacataaagttgcctagccagaatgatgactggaggctacagccagcctgctgtatgctcagtaagcttcaggccctgtyatggggcttgcatcacccagtggacagggcatctttttctaatctacacaaaggtaccatatgggtagtataggtcctgtttgaaagggttaagactcagacactgtcatagctctcaagtaaccctagaagatacaact

SEQ ID NO: 166701 - DNA, 475 bp, Homo sapiens
gtagtcaaagcatattcattcatataataatcactgaagaaaaaagcataaatggacacagaattttctaatttgtcttccttgtcaaaatcaytatagctctgtcctcttgaaaagagtatttctgagtgattacttgagctatgtagccattttagtggacattattgctagtgataaaaataattatgtatttcgtgcctacaaattaccaagtttatcctgtaggtgatattaatttccataacatcctctgtctcctgatcatagggaaaaaaattattatcttaagagtcccgttaggatctgtcatccccattttatgtgtgaaaatcctcacaaaggacttagaaacttgtgtcaagtcccacatctaggaagtgttagaacctgaaacaaaccaggtccatctgatttcaaagcctctgctctttgcaatataacacactacttctttgtttactcagaaacttcc

SEQ ID NO: 166702 - DNA, 475 bp, Homo sapiens
gtagtcaaagcatattcattcatataataatcactgaagaaaaaagcataaatggacacagaattttctaatttgtcttccttgtcaaaatcattatagctctgtcctcttgaaaagagtatttctgagtgattacttgagctatgtagccattttagtggacattattgctagtgataaaaataattatgtatttcgtgcctacaaattaccaagtttatcctgtaggtgatattaatttccataacatcctctgtctcctgatcatagggaaaaaaattattatcttaagagtcccgttaggatctgtcatccccattttatgtgtgaaaatcctsacaaaggacttagaaacttgtgtcaagtcccacatctaggaagtgttagaacctgaaacaaaccaggtccatctgatttcaaagcctctgctctttgcaatataacacactacttctttgtttactcagaaacttcc

SEQ ID NO: 166703 - DNA, 475 bp, Homo sapiens
gtagtcaaagcatattcattcatataataatcactgaagaaaaaagcataaatggacacagaattttctaatttgtcttccttgtcaaaatcattatagctctgtcctcttgaaaagagtatttctgagtgattacttgagctatgtagccattttagtggacattattgctagtgataaaaataattatgtatttcgtgcctacaaattaccaagtttatcctgtaggtgatattaatttccataacatcctctgtctcctgatcatagggaaaaaaattattatcttaagagtcccgttaggatctgtcatccccattttatgtgtgaaaatcctcacaaaggacttagaaacttgtgtcaagtcccacatctaggaagtgttagaacstgaaacaaaccaggtccatctgatttcaaagcctctgctctttgcaatataacacactacttctttgtttactcagaaacttcc

SEQ ID NO: 166704 - DNA, 606 bp, Homo sapiens
gttcattgtagttcattccatacattgtgtgtattgttatttgtggaaatgaggaacttttgaatattcaagttattttattaatggaaattcaagaagktctgcatcaagtgtgtttttctccaggatatttttgttttctttcaagtgcacagggacagtaccaaccaatggctactataaatgcattcttcctttgagactttctaggatgaatctaagaatttttcatgtagacttttttctcctcactgagccacagccaagacaaacaaattctcttgccttcactgcagaacatgtttcctctagcccattctctcagccatgatacaaataattctgctttgcatggctcctataaggacaaatttcagttaccccaatttaattaaataataccagttccccaacaacacagttaaaatttccctatcattatctattaactatttggagttaaataaagtacaaaattcattgctagccgtttactccacaaattactaccaaaataacagttgcgcatcaggatccatgaccaatcacatgacttctttcaaaactgttattcttttttttttttactcaacttttagcagtaga

SEQ ID NO: 166705 - DNA, 606 bp, Homo sapiens
gttcattgtagttcattccatacattgtgtgtattgttatttgtggaaatgaggaacttttgaatattcaagttattttattaatggaaattcaagaaggtctgcatcaagtgtgtttttctccaggatatttttgttttctttcaagtgcacagggacagtaccaaccaatggctactataaatgcattcttcctttgagactttctaggatgaatctaagaatttttcatgtagacttttttctcctcactgagccacagccaagacaaacaaattctcttgccttcactgcagaacatgtttcctctagcccattctctcagccatgatacaaataattctgctttgcatggcycctataaggacaaatttcagttaccccaatttaattaaataataccagttccccaacaacacagttaaaatttccctatcattatctattaactatttggagttaaataaagtacaaaattcattgctagccgtttactccacaaattactaccaaaataacagttgcgcatcaggatccatgaccaatcacatgacttctttcaaaactgttattcttttttttttttactcaacttttagcagtaga

SEQ ID NO: 166706 - DNA, 511 bp, Homo sapiens
aaaagggagtggtgaacagtgaatggaaggcaaatagggaaactatagcaacatggactattttcatgtccttgaaaaaactaccaatctttattccctgctatagctgcctacatgcttcctgggatggagaaagatgtggactgcctggcagacagacacactggaagactgtaaacatgtaggattaacccagtggggtgctgtgacctattgtacggggcctgttggccctgtgcatccagtcactgaactgacaagctgtgggtgaacttggtgtgtgccccagtgcctccggagcacatccttggttaccgagaggagcaatggtgattttgctcatggaaccctctgaccatgctggaaggagggcrtgagtcaggaggaccttgagatggcagctgggaagcagtggcagaagaacaggaatagagattgggtcgttacaccaacttagccaaaaccttttccaacggtgatatagtttaggtgtgtgtctcctccaaatctc

SEQ ID NO: 166707 - DNA, 511 bp, Homo sapiens
aaaagggagtggtgaacagtgaatggaaggcaaatagggaaactatagcaacatggactattttcatgtccttgaaaaaactaccaatctttattccctgctatagctgcctacatgcttcctgggatggagaaagatgtggactgcctggcagacagacacactggaagactgtaaacatgtaggattaacccagtggggtgctgtgacctattgtacggggcctgttggccctgtgcatccagtcactgaactgacaagctgtgggtgaacttggtgtgtgccccagtgcctccggagcacatccttggttaccgagaggagcaatggtgattttgctcatggaaccctctgaccatgctggaaggagggcatgagtcaggaggaccttgagatggcagctgggaagcagtggcagaagaacaggaatagagattgggtcgttacaccaacttarccaaaaccttttccaacggtgatatagtttaggtgtgtgtctcctccaaatctc

SEQ ID NO: 166708 - DNA, 511 bp, Homo sapiens
aaaagggagtggtgaacagtgaatggaaggcaaatagggaaactatagcaacatggactattttcatgtccttgaaaaaactaccaatctttattccctgctatagctgcctacatgcttcctgggatggagaaagatgtggactgcctggcagacagacacactggaagactgtaaacatgtaggattaacccagtggggtgctgtgacctattgtacggggcctgttggccctgtgcatccagtcactgaactgacaagctgtgggtgaacttggtgtgtgccccagtgcctccggagcacatccttggttaccgagaggagcaatggtgattttgctcatggaaccctctgaccatgctggaaggagggcatgagtcaggaggaccttgagatggcagctgggaagcagtggcagaagaacaggaatagagattgggtcgttacaccaacttagccaaaaccttwtccaacggtgatatagtttaggtgtgtgtctcctccaaatctc

SEQ ID NO: 166709 - DNA, 567 bp, Homo sapiens
atatatatatatatatatatatatatataaagaaaaaatggtttggggagaggaattcaagcaggctgtggattaagtactcactagagatatttgtataattaaaaaggagccaagcgctaatatccaaacaatgaggaaaaggcctcaaagttatttcagagaacttcayagcaacctctcacctcacaggccagcccagaggactaggaaaaaagaatgagtttaggagccaggttaaggcctactgacctgcacagccttgggacactgctactcatatcccagctgctctggcttcagcctcagctcaaaggcgtccaggtacagctttagtcactactccaggggtacaagccattagctgtggtggcttccccatggttttaagtctgtaggcatgcagagtataagagtgaagcacgcttagcatcctccacttggattttagaagatttatgagaaaggatggatatccacgcagaagcctgctgcaggggtggagccctcacagagaacctctactagggaagaacaaatgggaaattttgggttggaagccccaga

SEQ ID NO: 166710 - DNA, 449 bp, Homo sapiens
tactgttatgagaattacagataatatacacaaaaactccaagcaaaatarcattgagtagacacataaagtttttattattataattttgtgtcaaagcaaaattggcaaaattatttttaatgattaattgtggcttcctggtgtactatcttgagaacaattatgagtgtgcgatttcactcatcaagagccatcaccatagtaaataaggaatttatggcgtaggcatcagggaaagaagctgcaacctgagtcctatttaactgccatcctcatatttaaaactcttaatcaaaagaggaaatgggaaatggagggagtactgtacaactccattaattcccctgaatccatgaatccatacactaagtctaaagaactggaaactgtgcagtcattatgacataaatatcagaaatctctgaaggagagaaaagaacaaaaag

SEQ ID NO: 166711 - DNA, 449 bp, Homo sapiens
tactgttatgagaattacagataatatacacaaaaactccaagcaaaataacattgagtagacacataaagtttttattattataattttgtgtcaaagcaaaattggcaaaattatttttaatgattaattgtggcttcctggtrtactatcttgagaacaattatgagtgtgcgatttcactcatcaagagccatcaccatagtaaataaggaatttatggcgtaggcatcagggaaagaagctgcaacctgagtcctatttaactgccatcctcatatttaaaactcttaatcaaaagaggaaatgggaaatggagggagtactgtacaactccattaattcccctgaatccatgaatccatacactaagtctaaagaactggaaactgtgcagtcattatgacataaatatcagaaatctctgaaggagagaaaagaacaaaaag

SEQ ID NO: 166712 - DNA, 584 bp, Homo sapiens
taaataaagagtttgttgcaaaaagaaaccagagtgtcaaaaaactaaagatgaaaatttattggtggttttgtaaagggcgcctcctttcttccttgggacaggttcatagtaattggarcaatattttcaaaaatattagcttctaaatcataagggcaataagcaccaaagttggcagctgacacaagaagcctaattacatctttttgcttcttcttcacaataagtatatttattgcaaatgttctctactctttttgcctgagactcataagagggaagcataaacagaagttcgactaaatcctgataattacatcatcaattatattacagaaggcaattaaatcacatttctgtgttgaatgcaattatgttttattaaaaatattacaaaaaagaataggtctcttccaaatgctgtttgcttttgttctgctaccatataggacaaagcctggaaaaataaaatgacatcagatttttgaaatgaaaaattaacctaacattccccaaattgctgtaaatatagaaccttgcaaaagcactcacaaatctatctttcctcaaggcaccggaat

SEQ ID NO: 166713 - DNA, 584 bp, Homo sapiens
taaataaagagtttgttgcaaaaagaaaccagagtgtcaaaaaactaaagatgaaaatttattggtggttttgtaaagggcgcctcctttcttccttgggacaggttcatagtaattggaacaatattttcaaaaatattagcttctaaatcataagggcaataagcaccaaagttggcagctgacacaagaagcctaattacatctttttgcttcttcttcacaataagtatatttattgcaaatgttctctactctttttgcctgagactcataagagggaagcataaacagaagttcgactaaatcctgataattacatcatcaattatattacagaaggcaattaaatcacatttctgtgttgaatgcaattatgttttattaaaaatattacaaaaaagaataggtctcttccaaatgctgtttgcttttrttctgctaccatataggacaaagcctggaaaaataaaatgacatcagatttttgaaatgaaaaattaacctaacattccccaaattgctgtaaatatagaaccttgcaaaagcactcacaaatctatctttcctcaaggcaccggaat

SEQ ID NO: 166714 - DNA, 566 bp, Homo sapiens
atatttaaaactgcaaaatataaaaatgcccactgtagtgatcctgcagtggtatagaacacaagaactgattctacctaactagctgtaattttgtatcctttaacaaatctctccatatattcttgagaagagatgaagacacagtaagaattttttttgtccaatctcttgtggagtgtgacacatttagcctgtcttttatgttattcattccttggatttagctcccaaatggtgaagaaaacctgctcccttcagcttttctcaatcactataaggatgggcgaaaaaaaaaaatccttggaaataaaagtgctatatagcaggactgtattgcatatgaaatgtatgtttaaaatctgcaaagatcactatatatttaggagaaaacactctaaaaatatacaggtacaatgccaggtggcarctcagatttataatccatcaaaggagagtgtacctaaactcatggtccatttgattttctggtcaccctaaacttttgggaagctaaatgtcataagtgattttgaaagcaacctatagtgagtttttgcaggtaa

SEQ ID NO: 166715 - DNA, 426 bp, Homo sapiens
gttgaaatcaaaatttttaaaagagacattgagctcacttgaataaaacaaaagtaaattccatcaactggatttttcagctaaattaattcgtaaaagtaaactaaaagcaaggctctcctctttatctggtcacagaagaaatcatctctgccttcatatgcaaaccgtccctcccattaaacagaggaagagagacagaaaaggccaaagggattaggaatgtattctgttcatgttatgtatgaagcaaagtycaaagaaattaaccactttgttgaagatttctcagctagtaacaaacgcaagcttagaacctaggagtacagagttccactacagaattttctccattttaatgtgcaattttcaggttaattttatggtgaaaagcacatctgaatgttttgttgttgttgttgcata

SEQ ID NO: 166716 - DNA, 426 bp, Homo sapiens
gttgaaatcaaaatttttaaaagagacattgagctcacttgaataaaacaaaagtaaattccatcaactggatttttcagctaaattaattcgtaaaagtaaactaaaagcaaggctctcctctttatctggtcacagaagaaatcatctctgccttcatatgcaaaccgtccctcccattaaacagaggaagagagacagaaaaggccaaagggattaggaatgtattctgttcatgttatgtatgaagcaaagtccaaagaaattaaccactttgttgaagatttctcagctagtaacaaaygcaagcttagaacctaggagtacagagttccactacagaattttctccattttaatgtgcaattttcaggttaattttatggtgaaaagcacatctgaatgttttgttgttgttgttgcata

SEQ ID NO: 166717 - DNA, 509 bp, Homo sapiens
attagttgagtagactagtgtagactagtgactctgattaattgataagtaggaacttcctagagccaaccattatttatttgtttatacattaatctttcccagacaaagggttgctggagcaaacaactaaatcatgatgctctacagtcttatataagccgygatgacaaaaatgctctcaattcttagcaaaatcacagcagatgctagagggaatcctcatcaggaccctgtttaacaacccagagacttgactagaaaaggccagtcacagactgtagacctcagccatctgccagtaggcctctggaatgatattcattttattggatggtaaattataaaaggagaattagaaaggtgatctatatgaggagaagcgaatgaaaggcaggacactatcaggaagcggtgtcagcatagggaggatctgttaagcctgtcaactaatcattggctacattccctgtactgtgtaagttaacagaataggaaagaaaggctgg

SEQ ID NO: 166718 - DNA, 509 bp, Homo sapiens
attagttgagtagactagtgtagactagtgactctgattaattgataagtaggaacttcctagagccaaccattatttatttgtttatacattaatctttcccagacaaagggttgctggagcaaacaactaaatcatgatgctctacagtcttatataagccgcgatgacaaaaatgctctcaattcttagcaaaatcacagcagatgctagagggaatcctcatcaggaccctgtttaacaacccagagacttgactagaaaaggccagtcacagactgtagacctcagccatctgccagtaggcctctggaatgatattcattttattggatggtaaattataaaaggagaattagaaaggtgatcwatatgaggagaagcgaatgaaaggcaggacactatcaggaagcggtgtcagcatagggaggatctgttaagcctgtcaactaatcattggctacattccctgtactgtgtaagttaacagaataggaaagaaaggctgg

SEQ ID NO: 166719 - DNA, 657 bp, Homo sapiens
cagtgtttaaccttgcatcttaattctgtaagactcaaatttgataggaatgaactaacatgttaggaatacccctatggagttcgagagagatgcaataatttaacagagaataagtattaatactatgaaaagatgaatcaaagagaaaagaggcagttgtgacagtaattaattcaactatgaggcacttcaagacatacagagtggctgtaatccagcttccagttagacctcaagattcttactccaatttcgttttcagaaagtgaacttttttatttgtaagtattctcgctcatagcttcacagtgatacttagcacaatgttgagcagagagtagacatttcataaatttgtgttgaatggttgactaatataactgcttagtaaatgtgttgtgaatacgattataatacattttttgttcaataagactgttaattgaggtgtctttttgaaatttaattgtccagatccatataaaagagtcaaagagtattacactttggggacattaatcargaaaatcattataaaatgttagttaatacatacttactcttgtaagaatgagaatacctcaattttactctgctgaaatctgacattagtatggaagtttccttgaaaatattgtgttattaacagtccta

SEQ ID NO: 166720 - DNA, 521 bp, Homo sapiens
gatctcaaactccgtgctgggagaaccactcctctcttcatagctcagatggaaatgcagaaatcacccatcttctgcgtcactcatgttgggaactgtagactggagctgttcctattcggccatcttcacccaccccatatctttaaattaaaggcaataaatttgggtcagcttcactttaatccaaatcctctaatgaatatatttaatacccattttaaaaggtgttttgaaaaggtaaatttttcttctaaattggcacaggccatcgatgaaaacattattgtgagtttctgcctcatatcctaaaataagcaaaacctawataaaaaggcatacaggatctaattaacataatacaatgttttcaaagaatttttgaaaaaatatataaatagaaaaacaagagaggctaatatttttctgaaattctttctctcacactgtcatttagtgtcatttagtgagcattttttctcccaacttactcaattgttatttccagtaactagatccag

SEQ ID NO: 166721 - DNA, 471 bp, Homo sapiens
catgctattcataatagcaaagatatggaatcaacctaggtgctcatcactggtagattggctaaagaagatgtggtacatatccatcatggagtacaatgcagccatatgaaggacaaaattctatcccttgtcacaatatggacacagttgtggatacaagaaccgaaaaccaaatacttcatgctctcatttgtaagagggagctaaacattgagcacccatggacataaacatggaaagaaaagacactgcagactactagaagggggaaggggaggatgggatgaaaaactacctattgggtagtatgctgcctctcyagttgacaagattattcatatgccaaacttcagcatcatgcaatgtactcatataaccaacttgcacatgtattccctgtatctaaaataaaagtttgaagaaaaaaaaaacaaaacaaaagaaacagatggcctcatcacattgacc

SEQ ID NO: 166722 - DNA, 588 bp, Homo sapiens
aatagtacatgtcctgtattcagggacatacacacacaaataaacacaaatcacttacgatgacatctggtcctttgatttcataatgcaaatgccaaagggttattttgttttttccaatgtcatctcataaaggcaatatattccctgaggcaggctttggacccgagtatgaacagggtcattattgttgaattttaggattctccctgggaatttaggtgtcactaaagcagcgatgttgtcttcggccttaagcaaccaattgatacccatacaccagttctttttgtcattatgaccagtatatcggctctaatattattgatattttcatcacccaaattagktttcaggatttactgccagactggaaatactgggttagagactgggagttccattgtagtattttaacatagtcgactattaataataataaaaataataatacctgtactatttatttagtctgtgcaggcattgggataagagctttataagcatcatctaatgttatggcaaccttatatgttaagtactattattttttctttaatttatatatggagaaacttaggtttagag

SEQ ID NO: 166723 - DNA, 500 bp, Homo sapiens
ttccatacagactcttacatgctttggtccagaggtgatatgcattactcagatttacagcccttgcccagagtcacttgacctctcctcattacaaagaaagtcaaaaaacaatgcggagtaagggaactgagactaacgtgtggaaattcagtcagccataaatgtctctgctagagatgagcctgctgtcagtgcaatggaagtaaacctttttctgaatacaaaaccattcagtgttcttcatatcaactttaaattccaataggggactacagtgtatgacgaaatgctattgagtaactcattatggcaaacaagaatcgccttaggcatggctgaattttccctaactcttcttttttgcccaatgccttaatacstgagaggtggcatgtttgtgttgttccatgaggcagaagcaagaccaatgatattactggggataggctttgcctttatgtccgtgaagaaagtctactttgagcctaattcatgtt

SEQ ID NO: 166724 - DNA, 584 bp, Homo sapiens
ccttcctccttgcttgtttctttcccttcctcctttctccagcaaatgtttactgagtgcctatgatatgattagcactgaacaaagccctgggataaaactttcatgcaggcctaatgtaaccattgaatggagctgtgtgattagtggaggagatagaaattaatcaagtgaccacacaaaccattgagcaatggcaattgctacagatgtactaaagaagaggtgcacagggctctttgrgagactggctggtcagggagggcaaggaaagcttcgttgaagaagggatgcttgagttgagataaaaagccaacttttcacagagggtagagaacacgtttcaggcagatggagcagcatgtgcaatggtcctgtggcaaggggaatgtggcatattggaaggaatgaacagatgccagtgtagatgaaggacaaatgctgaggctaagtctgtagcaagatgaggttgtagagatgagtaagagcataaagggacatgtatatcattgtaaggagtttttcatgaaaccctcacaagggctataagtaagagatgacttgatcaggtttgtgtttttaaa

SEQ ID NO: 166725 - DNA, 519 bp, Homo sapiens
tccccttaacgctctcttcataaaaggaaactttaaagagaggtcagtaggatgaacaacataccccattactacactttgtttggggctgcaacgggtaaccatctctcccttctcctaaccattccaaatttccatctctgtcctttgttatccattctaaattcctttacccctgtaggtcttagtagcttaccagctgtcacctaacccctcatttttaagggatctaagtggctagtaatcatacacatctcaggctagtagaatttcacataatttacagtcgaaattgtacaagggaatactaaaaaacaaccaagttgatcacgtgttccatacatagtcttctctgcctcaaggtataaaacaaagaatatctctgrtgttgatcaagatcaactgtcttggtcaatatggtaactcttctcacctgagggtggtccctactcacaaagagtccaaagttctcaggcagcatccacaacttatagttcgataaaatctcccctgtccact

SEQ ID NO: 166726 - DNA, 573 bp, Homo sapiens
gctgcaaccatcaacccgtcatctatattaagtatttctcctaatgctctcccttccctagtccctcacccactgtcagggccaggtgtgtgatgttcccctccctgtgtccatgtgttctcattgttcaactcccacttataagtaagaacatgtggtgtttggtttcctgttcttgtattagtttgctgagaatgatggtttccagcatcatccatgtccctgcaaaggacatgaactcatcctttttkatggctccataatattccatggggtatatgtgccacattttcacatatagaatgaagttgacccttgaaaaactgggtccttacatgggattagtggcaccaaagtttatgtataacttttgactctgcaaaatgttaattactaatagcctactcataaccagatgccttactcatgacatagtcaattcacacatatttgtatattacatgtattatatactatattcttccaataaagtgaggtataaaatgttgttgagaaaaatgtagggaaaggaaaatatattcactattcattaagtggaagtggatcgatatt

SEQ ID NO: 166727 - DNA, 573 bp, Homo sapiens
gctgcaaccatcaacccgtcatctatattaagtatttctcctaatgctctcccttccctagtccctcacccactgtcagggccaggtgtgtgatgttcccctccctgtgtccatgtgttctcattgttcaactcccacttataagtaagaacatgtggtgtttggtttcctgttcttgtattagtttgctgagaatgatggtttccagcatcatccatgtccctgcaaaggacatgaactcatcctttttgatggctccataatattccatggggtatatgtgccacattttcacatatagaatgaagttgacccttgaaaaactgggtccttacatgggattagtggcaccaaagtttatgtataacttttgactctgcaaaatgttaattactaatagcctactcataaccagatgccttactcatgacatagtcaawtcacacatatttgtatattacatgtattatatactatattcttccaataaagtgaggtataaaatgttgttgagaaaaatgtagggaaaggaaaatatattcactattcattaagtggaagtggatcgatatt

SEQ ID NO: 166728 - DNA, 657 bp, Homo sapiens
ttttggattacattccacacagtgcagaggttgggataagttgtttcatgtaaaatacagatatggagggaaaagggaggtgttgactattttgccaatttctcctcagacctcatgatctccaagtccagtagactgtctagatcataaattgggaaaygacaaccagtgcatcacctctagtccaccgcctgtttttgtaaataatgtttttattggaatacaaccacccttgttgaagaattgtctatggtcgcttctgtgctcctaaagcagagttgagtacccatagcagcaaaattctggcctgcaaagccaaaaatatgtactatctggtcctttctaagcctattttttctgttgctataaaggaatacctgatgctgagtaatatataaggaaaagagttttatttggctcctgattctgctggctggaagacaggacatctggtgaaggcctcagtcttcttccactcatggcagaaggtgaaccagagccatgtgtgcagagatcacatggtgaaaagggaaacaagagagacaggagagggaggagctcttattagcatccaatgctcctggaaactgatagagctcatgtactcccatccttacattaatctattcaggaaggatatgccccatgacctaaaga

SEQ ID NO: 166729 - DNA, 568 bp, Homo sapiens
tgtttgtttcctagctctgaccttcggcaagttacttatgttctccaagactcattttcttcatgtttggaatagtgataataatgcatattgatattatgaggaccgcatgaagcagtgaacgtaatctaagcagcacagtgtctacaacttaacatatagtcagtaagtggtagcaattgtttmctttgacactgacttttcctctctctctctgtcttttttttttaacaagttgaaattcaactgggagaaatgtaaagccctacacagtaagtgtttaaaacaataagcaagtacaggatgagggagatgtaatttactgaaccagtcaaccttttggttaattgacattttgttgcttgtgagtcggcagtgagttgtgagggcccatgtattagtcctttctcatactgctctaaggacactgctctaagactgggtaatttataaagaaaagaggtttaactgactcacatttccacgtggctggggaggcctcaggaaacttacaatcctggcggaagtcacctcttcatagggttgcaggagagagaatgagtgcgga

SEQ ID NO: 166730 - DNA, 632 bp, Homo sapiens
ttaccatcttttcaaggacagaaggagagacatttcagaaaaaaaaatcctcatagcgtgtctgtgtactgtgggtgatggtttaacttccttaataaaagtattctcaacaaacagttattacaacattaattaactgactaattaattaatttgctgctggaatggagactaggcagtcattatgccttatgtcataaatcttcataaaccaaggaattcttaagtcaatatctgtatcagttttcagttctattatttaggctaaatagttctaaggtaaarataggatgaaataattttagcactggatacatattaatttatcattacatttatgaagaattctttcgctttttttcctaactggtattttctactttagaatcttcaaatggacaaggcagtggcaaaggagaagcttatagataaggaaaatgactagctttaggaaagaggacaaagaagaggtaaaccaatataggactctccatcactaatggaaatatgtattttaagggaggtaacacagttcccagaataagttggatcccaatggtaaacagccctcagagacaagaaggtagataaggaaaatagcatttacattgtacttcccatgcaatttttat

SEQ ID NO: 166731 - DNA, 556 bp, Homo sapiens
tctgttactatctacagacattttggttgtcacaattgaaggacaaggwggcatgtagtgggtggagccagagatactacaaaggtcatatagtgcacatgacagctcctcacaataaataatttttccattccaaatgcccagagtgctgatacagagaaatccagggatagagatatgggctgggaataggaattagattggtgagagtggaagaagcaaagttattctacattaaggagactgcctgtgcttggaggaaagggaggagctgtttgttgccttaacctaggtgtgaaaaaggatcaaagagaggtaaggccagaggggaagacgggcctaggcgtggagaagttgagatgacaagtgaaggaatttatattgaattctcgagaactatagaggagatttaagttggggatgggatcagctttgtgtttttgaaattcactgtgaggacattgtgcaaaagttaatttcacaaagaagttattgattcgtatgaatgtgagatactccatgtaaagattttcctgaacattttctacgctaacca

SEQ ID NO: 166732 - DNA, 494 bp, Homo sapiens
gcagggaaaactccagactgaaaaaaatcaagggcacttttcagttctcaacaaatcctcttgttatccataaggtggtcaagtgagtagattaatgggttaatacttagtggtttaattttatttttgtttaaaaaatgtgtatataaaggaataatttgggtaggggtagaaaaaaaggagtccttgaggacagaagggactgtaaaaaaggatgtaactacatggttgactgagtcaccatagggcagcatctcagggagaggatggtaggaagaagagaaggaagtcrggcatgggaggttgtaaagtgaacagggagccatttattttctcttcatactaagtttggaaagttctttccgcctccaaaagtatgtaggtaagagaatacatcaggttctgtggtcttaaacacttgcttgccaccatgcaaaatggaaaaacaaaccagggacacttatttacgctttcattaggcaaactacacaggt

SEQ ID NO: 166733 - DNA, 494 bp, Homo sapiens
gcagggaaaactccagactgaaaaaaatcaagggcacttttcagttctcaacaaatcctcttgttatccataaggtggtcaagtgagtagattaatgggttaatacttagtggtttaattttatttttgtttaaaaaatgtgtatataaaggaataatttgggtaggggtagaaaaaaaggagtccttgaggacagaagggactgtaaaaaaggatgtaactacatggttgactgagtcaccatagggcagcatctcagggagaggatggtaggaagaagagaaggaagtcaggcatgggaggttgtaaagtgaacagggagccatttattttctcttcatactaagtttggaaagttctttccscctccaaaagtatgtaggtaagagaatacatcaggttctgtggtcttaaacacttgcttgccaccatgcaaaatggaaaaacaaaccagggacacttatttacgctttcattaggcaaactacacaggt

SEQ ID NO: 166734 - DNA, 494 bp, Homo sapiens
gcagggaaaactccagactgaaaaaaatcaagggcacttttcagttctcaacaaatcctcttgttatccataaggtggtcaagtgagtagattaatgggttaatacttagtggtttaattttatttttgtttaaaaaatgtgtatataaaggaataatttgggtaggggtagaaaaaaaggagtccttgaggacagaagggactgtaaaaaaggatgtaactacatggttgactgagtcaccatagggcagcatctcagggagaggatggtaggaagaagagaaggaagtcaggcatgggaggttgtaaagtgaacagggagccatttattttctcttcatactaagtttggaaagttctttccgcctccaaaagtatgtaggtaagagaatacatcaggttctgtggtcttaaacactygcttgccaccatgcaaaatggaaaaacaaaccagggacacttatttacgctttcattaggcaaactacacaggt

SEQ ID NO: 166735 - DNA, 563 bp, Homo sapiens
gtagataattgaatcataagcctggtctttcccgtgctattctcgtgaaagtgagttagtctcacaagatctgatggttttaaaaaggggagtttccctgccaatatctctctttgcctgctgccatccaggtaagatgtgacttgctcctccttgccttccaccatgattgggaggcctccccagccatgtggaactgtaagtccattaaacttctttcttttgtaaattrcccggtctcagttatgtctttatcagcggtgtgaaaacagactaatacattcatcaagttgtgtgttcttttcagtctcccattgtgctgttggaagtacctggaagtgatggtggtggtcaggaggaaacaatgcttcataaaagtagagctaatggacaacaggaaaggtcttgcggatttcatcatgacaatgactaagtgtgattgtagaatttttgaattttgttattcttcacagcagttctacaatatggtaaatgaggaaattttagtgaactgtcacagcttattcaaatatatgtggggatttagtaatagaatgaggact

SEQ ID NO: 166736 - DNA, 563 bp, Homo sapiens
gtagataattgaatcataagcctggtctttcccgtgctattctcgtgaaagtgagttagtctcacaagatctgatggttttaaaaaggggagtttccctgccaatatctctctttgcctgctgccatccaggtaagatgtgacttgctcctccttgccttccaccatgattgggaggcctccccagccatgtggaactgtaagtccattaaacttctttcttttgtaaattacccggtctcagttatgtctttatcagcggtgtgaaaacagactaatacattcatcaagttgtgtgttcttttcagtctcccattgtgctgttggaagtacctggaagtgatggtggtggtcaggaggaamcaatgcttcataaaagtagagctaatggacaacaggaaaggtcttgcggatttcatcatgacaatgactaagtgtgattgtagaatttttgaattttgttattcttcacagcagttctacaatatggtaaatgaggaaattttagtgaactgtcacagcttattcaaatatatgtggggatttagtaatagaatgaggact

SEQ ID NO: 166737 - DNA, 563 bp, Homo sapiens
gtagataattgaatcataagcctggtctttcccgtgctattctcgtgaaagtgagttagtctcacaagatctgatggttttaaaaaggggagtttccctgccaatatctctctttgcctgctgccatccaggtaagatgtgacttgctcctccttgccttccaccatgattgggaggcctccccagccatgtggaactgtaagtccattaaacttctttcttttgtaaattacccggtctcagttatgtctttatcagcggtgtgaaaacagactaatacattcatcaagttgtgtgttcttttcagtctcccattgtgctgttggaagtacctggaagtgatggtggtggtcaggaggaaacaatgcttcataaaagtagagctaatggacaacaggaaaggtcttgcggatttcatcatgacartgactaagtgtgattgtagaatttttgaattttgttattcttcacagcagttctacaatatggtaaatgaggaaattttagtgaactgtcacagcttattcaaatatatgtggggatttagtaatagaatgaggact

SEQ ID NO: 166738 - DNA, 363 bp, Homo sapiens
ttattcattctttatattttttgcacccattaaccatgccttactcccccatatcccccccactacccttcccaacctctggtaaccatccttctactctctatgtccatgagttcacattgttttgatttttagatcccacaaattttgtgtgtttattttgtatctgtatcctgtaactttactgaatttgtttatcagttctaatagttttcttggggaacctttagtttttttcaaaaataagatcacrtcatctgcaaacaaggataatttgacttcctcctttccaatttggatgccctttatatctttctcttgtctgatttctctagctaggacttccagtactgtgttgaataa

SEQ ID NO: 166739 - DNA, 615 bp, Homo sapiens
tatctgttggatcaattaagaagaagaaaaataaaatgtttcgttttactctcatttattccttctctatgaactgtttctccatgtagatctgagtttctgacctatattatttttatctctgaggaagttctttaacagttcttgcaggacatatctactgctaatgaattccctcagtttttgcttttctgagcaagactctttttcttcacttttgcaggataaatttcrtgaatatagaattctaggttggtggcttttttatttattcaatacttacattttactccactctcttcttgtttgcatggtttcagcaagtattccactgtaattcttcttgttgttttaatgataaggtgctttgtttggttttattttgtcctctgaattcttatgcgatgttctctttgtctttgaatttctgctgctttggtaaaatatgcttatttcttggtatttattctacttgttctttattgtatttggtattctctgagcttcctggagccatgaacagataagaacaagatggtaaggtgtgggaagaagaaacgttctataatcatttgataatattttagatttctagtgggactgtcttcctgagct

SEQ ID NO: 166740 - DNA, 389 bp, Homo sapiens
gttttaaaaacctaaagacaatggattaaatgagaaaagaaaaaaagctgtcacctaatcaccggtttcaatatctgaaggaggaaagtacaaacaaaagcaggtgttctaaatggagtcttaagaagagaaatacaaaattcagaaatgtttccatgcattattagctttgaccaagggagatggtactctgctgggctgaaagcattggctacattcaactctcagagctcagtgaatgaatatcctctgggctctgactccatttccatcaaggcaccctgtawtacaatttcccctggcctcagatttgctacagtgagaatgtaccaagcaataaccagaatgccaattaaagaattgtcattctagtttatatactcattttt

SEQ ID NO: 166741 - DNA, 624 bp, Homo sapiens
ataataaaccttcagacaaacaaaaactaaaggtactcactataccaacagactcacgataagtataataacacatttctaaatgatattctttagtaagaagaacaatgatttcagaaggaagatttgagatggaagaaggaatattggacaaaacccagcaaagctgcagaaactttataagacataatgatatttatatacacccattcacacacacgcgattctggtcaacaatagcatataataatgtagtrataagatcccacacattctggtgttctagaggtgggtaaagatgttgattgactttagaccttaagctatatttatatgtttacgtttcaagtattgtttagtagctacagaaacaatagacaaaagaaataaaaaataaaagaaagagtatgtaacttttaattaaaaaaatgtttaattcaaagaaaacaattttttttaaaaaatgggacaaatagcacaaaataaattagtagaataaatctgaataaaatagtcattccaattacatattatcatatgtatactaatcaaaataaggttggtatgactatattatttttatatatgtatagttaataaaattttaaggcaaaaagccttggc

SEQ ID NO: 166742 - DNA, 589 bp, Homo sapiens
tggcaaggatgattttaggatttcaaatcaggagaagcagagataaactgttatcaatgatagaccaaatgtagcctcttggtggcactgtttgtttttacaaaaatgatacattggcctcagaagatgcagcgcttgatgcattgtgattttcagaatatgtggtttaagttcagtgaaataaagcattttcaagaggatacagtttccactgaaagattgttgtactgtcactaacagrctgtgatagctgtatccccacaatttgttgtaggccaggttgtctctaaagtaaggtttgcaggctggcagcagggtgtaattacccaaacaaaaagatacagatacagtatgtcatccctgctaatgaccacaacattttcttgcccaaaatctgtaacaaaaagccacataaatgatcaggctgcacttaagtgcagcactaaagaaaaacttggtggcacaaaaattattccagccaattgagtggaaatgacagagaataacacaaagttatctctgctagggagatgtgtgtttggaatgtcaccaatggacagtgcgtggagaaggctacacttccttacag

SEQ ID NO: 166743 - DNA, 596 bp, Homo sapiens
caggaacatcagggatgtgccacaaagtaattcttcctgagacttctccagagaaaagtaccttgtaaaaaggctctttcctttcattcatgtagcccataacaaagggacggctctgttcctaaacaaaaagtgagcttttatgtaggaaatattctaactatagagagatggccactgtttttaaatggagaaacaagacttaataactgaataaatcttttcaatttatttcccactcttttgacattttcaagtaaattaaatgaaataatctgtgatctaggactaaagaggctttataaaacaagaagcaaagtcatagacctcagaaagtcaataaaagtatctaacatttactgaccatgttatatgtgcgtgtgtgtgtgtgtgtgtatrtatatatatatatatatatatatatatatatatatatatatatggctactgcaaggggctttctacatattcagttaaataatcctcacaataaccctataaaattggtactatcattgttttcattttacagacaagaaaacttggaatgaagagattgatttgtctaaggcgattagaagaagcaatgggctttg

SEQ ID NO: 166744 - DNA, 550 bp, Homo sapiens
cttttttttattagaccatatttctagagattaactttttttatagctagaataagatggagttcagagttcagcattagtttcatccctaatgtgtgctttaggattattttttgcataggcaaatgtcaattatataggttgtccaaatatgccttaagaagcttaataattcatcttaagagatgaattcttaagaattcttgtatgtggttaccyatgtaattttatttcatagtcaaaaactattaaatctgtaattatgcatttgacaaaccaagcacattcttatcaacatctgagagagtggaattcaacctaattaaacaaaactttacttctatatttcagagcataactttctggattgtaatttgggaacattttgttctacacctgtacttcaatggatattagagaggactttaatcaactttgtagaaattaacagcagcaataagagaatgaattaagtatgagcttatgaataatacactatttacagaagaatctgtaacatttgattgtaaaccaaaaataaaattctaag

SEQ ID NO: 166745 - DNA, 456 bp, Homo sapiens
gttctgtctccagctttgacgctatagctgggcataagacmttgggagaaagatccactcatgtttccttccttgtcgacaaaggggcagactagcagtgctgcatattagagcactgctgcactgcaaccatcctgggccccggcaccaaatgccaggaacaacctcaaacattgtgacaaccaatacaatgggcagttacggccgccagaggagaattactgcctgatgctctttcaagttccttaccattctatcatcctgcaaaagaagcagaggcttcttaatttgagtattttttttaataatcctcacttgtatttgcacccatgaagtgtcttaggaggttaagcaaattggattccttttctaaatgtgactctttctcatcttttgggctccattatggtgtctgatatttcatcacttgattcttcatctgggtaaaaacaatgt

SEQ ID NO: 166746 - DNA, 465 bp, Homo sapiens
gttctgtctccagctttgacgctatagctgggcataagacattgggagaaagatccactcatgtttccttccttgtcgacaaaggggcagactagcagtgctgcatattagagcactgctgcactgcaaccatcctgggccccggcaccraatgccaggaacaacctcaaacattgtgacaaccaatacaatgggcagttacggccgccagaggagaattactgcctgatgctctttcaagttccttaccattctatcatcctgcaaaagaagcagaggcttcttaatttgagtattttttttaataatcctcacttgtatttgcacccatgaagtgtcttaggaggttaagcaaattggattccttttctaaatgtgactctttctcatcttttgggctccattatggtgtctgatatttcatcacttgattcttcatctgggtaaaaacaatgtcattttagc

SEQ ID NO: 166747 - DNA, 540 bp, Homo sapiens
attctcagcccctaaatgactgattggaccccctcttggccacagggaccccagaaatgccttagaagctgaatttccagccatgacaggatggaggtcagacacaccttattatacccactccctcaaaaactgccattagggtctcttccctaaggggaaacagaagctagacttttcaaaagatttcacattgataatgtcagttaccagctyatcttcccaggcacagaacaaagacaagatgagattaattgttccttcacccttagctgagacacctgcctcttctattctctttttcttcaaatgttcacgtatgtaaaatacagatttgttggggactaactaaagtctcactagtatgtaacaatttgtctcacttcccttttaatgaaaatgcataaatactagactttctaagaagctctttggagaaaacagccacagagggcatctgtgactcatgcttttcctagacacaccctcaagctggttcaataaacctcaattgattgagaaacctgccttcatcagcca

SEQ ID NO: 166748 - DNA, 585 bp, Homo sapiens
catttgccaaaccctcttcaatgcacatcagcaggacttaggttcctaccattccacaggagcttctcatagaggacaccaacaacctcaacgatgccaaatccaacgtgttcatctctgttctcatgtgactcttccttctaacctctgtctccacttctggctccctctgttcccaacttctaactggttagatcctagacagccttctcttccctagtctctcagtagttgatcctatcaaggcttgtggctttaatatcatctctaagctgatgactgaaaattttatacctaatctgggctccacactccaaaggtagtgtggtgcaatrcttaagaatatgggctttggagtgagcctatagggttcaaagcccagtttcaccacttttagttgaatgaccttggacaaattcaaagtatctccgttttcagaaagaggtagtacctagctcacagagctgttaggaggattcaatgagataatatacttataaaagtacttgatacataagagtaaatgctcaataaatgttagctgctatcattatcaatgaaattattagcattagcattattata

SEQ ID NO: 166749 - DNA, 645 bp, Homo sapiens
tgaattcattgcactaagttttctttctcttgtgaattaaaaccatagaaatagtatgcartaccacattacaggaaagactctcaaactgtgggtcagtggaagcctttagagtatttcaaattgcccaatagcagtaactgtatgtgagcatcacattttttatggttagtttcctcaggactagtgtaagtggagagtatagactgtgtatatgtttaatatatacacacatgcatatataatattcatcttgtatttggtttttaggcctgtgtttgatcatggcaacacagacactactgcctaatttataaatattcatgtatttctgctgtattatgtttcactaaggaatgtatcaaaaatatatatcacagaatccaccttttttcatgaaaactttttaaaaactttacttccagcaatgtatgtactaatgaggctttgggaaactttagttttgctttcattcagtttaatgatagaaaggaacattatctttttgactgattatctaagatgaaccaacagcttaaagggtgcttggagatagaagattcccataaatcatggctgtataaagtattgagatattgagaacatttttataagcttagtttaatatttttaaaatacagctat

SEQ ID NO: 166750 - DNA, 645 bp, Homo sapiens
tgaattcattgcactaagttttctttctcttgtgaattaaaaccatagaaatagtatgcaataccacattacaggaaagactctcaaactgtgggtcagtggaagcctttagagtatttcaaattgcccaatagcagtaactgtatgtgagcatcacattttttatggttagtttcctcaggactagtgtaagtggagagtatagactgtgtatatgtttaatatatacacacatgcatatataatattcatcttgtatttggtttttaggcctgtgtttgatcatggcaacacagacactactgcctaatttataaatattcatgtatttctgctgtattatgtttcactaaggaatgtatcaaaaatatatatcacagaatccaccttttttcatgaaaactttttaaaaactttacttccagmaatgtatgtactaatgaggctttgggaaactttagttttgctttcattcagtttaatgatagaaaggaacattatctttttgactgattatctaagatgaaccaacagcttaaagggtgcttggagatagaagattcccataaatcatggctgtataaagtattgagatattgagaacatttttataagcttagtttaatatttttaaaatacagctat

SEQ ID NO: 166751 - DNA, 536 bp, Homo sapiens
tgattatctttacactgatgactttcaaatacatatctctagttatgaattctgttttttaaaaataaaaatattaagatgaaagtcactattttaaccattttaaaatgtacatttgaatggttttagtatatccgcaatgtttgcarctgtcaccactacctaattccagaactttatcatcaccccaagagaagccttgtatccatgaaaaagtctctccctattcacacattcctctgggccctggcagccactagtcttctttctatgtctgtggatttgcctattctggatatatcacataaatgaaatcaaacaataatgtgacctttagcgtctagcttcttcacttagcatcatgtttccaagctccttgcatactgtagcaaatatcactacttctttctatgactgaataatattctatttatagatatgccatgcttttgtttatccattcattcattggtggacatttgatctgtttctaccttttggctattatgaatagtgttgctgtaaacactcatata

SEQ ID NO: 166752 - DNA, 495 bp, Homo sapiens
aattattgttcataaaataaaattactgttataataaaaatataaaaattattattattaaaaactataaaatatatgcaagatgtgcatttctaatccacaactgagaataaattaattgtggttaactattagtcaattaactatttcctaattaacttgtaggaaagacagtgtgatataagggaaagagaacttgactttagagaccaaataccygaattgaaattaggactctgcagccagtatattccagattgaagtcgtcctcttttccccaagactcactttttctctcatagacattcgttcactcaatggcaccaacatctctggagtcagctgtgactttcccttctcccttcctgaatttatcccttgctaggtagagataaatgctgtatggggacccttcttgtgacctgcctccaccaccactgttcttgtgtgctacatgaacggagcttctgcaataatcttctattccagattttg

SEQ ID NO: 166753 - DNA, 397 bp, Homo sapiens
gggttttccctactcattcttaaagcagaacacaattttaaggtgtctgtatagaaataaattatactttgatgcttctytaatagccaaaggtaaaaaattgacaatttccttagaattagaaagggatgtactcacacttaccagtatttgtaaaaaacaaatatttcttaaacaaattgactagtcagtgacacacaagcatatgccattgtgtctgaagtttactttaggggctcctgtgtgacatgaaagtgttactatcagcttcacatttctgcctgctagcagctccaatttgtgcaaatttaaaggtttaaatttgttgtatatataaaggatattttaaaaaatatcctgcagcttattataattcaaaattataatgagtgaatta

SEQ ID NO: 166754 - DNA, 397 bp, Homo sapiens
gggttttccctactcattcttaaagcagaacacaattttaaggtgtctgtatagaaataaattatactttgatgcttctttaatagccaaaggtaaaaaattgacaatttccttagaattagaaagggatgtactcacacttaccagtatttgtaaaaaacaaatatttcttaaacaaattgactagtcagtgacacacaagcatatgccattgtgtctgaagtttactttaggggctcctgtgtgacatgaaagtgttactatcagcttcacatttytgcctgctagcagctccaatttgtgcaaatttaaaggtttaaatttgttgtatatataaaggatattttaaaaaatatcctgcagcttattataattcaaaattataatgagtgaatta

SEQ ID NO: 166755 - DNA, 520 bp, Homo sapiens
ggaaaagctgcaatggcacctgttgcatgtccaagtttcagacacaaaaacaaacgtgctgagttttgtttttggctagaataaggtctctggatttgagacatctgtaaagtacacagatcaggaaaactgccttctatagcaagtatgtgcaaggtatgctcttagaagcagtaactgaggggacaatgtccattcaggccagccagagaatatgtcatccacctcagagaaaggtatagggctggaggtccctgagtaggyagggggagggcagtaggaaggattctatagagtccaacaaagcattctttgagagaaagaaccagcatttatttgcacatctgccaaactgatggcctcaatgccagattccaatggcaatgatcaagttaaaccttgcgcttttcttctagttcctcttctttgcctgatcttaaaggagccagacgcaacagctaacaagtggtagaagaaatagaacaaaaccagtgaagaaataggccatgttttggcccat

SEQ ID NO: 166756 - DNA, 361 bp, Homo sapiens
ggacaatgtccattcaggccagccagagaatatgtcatccacctcagagaaaggtatagggctggaggtccctgagtaggtagggggagggcagtaggaaggattctatagagtccaacaaagcattctttgagagaaagaaccagcatttatttgcacatctgccaaactgatggcctcaatgccagattccaatggcaatgatcaagttaaaccttgcscttttcttctagttcctcttctttgcctgatcttaaaggagccagacgcaacagctaacaagtggtagaagaaatagaacaaaaccagtgaagaaataggccatgttttggcccattcctcaatgctgccggttgtagaa

SEQ ID NO: 166757 - DNA, 361 bp, Homo sapiens
ggacaatgtccattcaggccagccagagaatatgtcatccacctcagagaaaggtatagggctggaggtccctgagtaggtagggggagggcagtaggaaggattctatagagtccaacaaagcattctttgagagaaagaaccagcatttatttgcacatctgccaaactgatggcctcaatgccagattccaatggcaatgatcaagttaaaccttgcgcttttcttctagttcctcttctttgcctgatcttaaaggagccagamgcaacagctaacaagtggtagaagaaatagaacaaaaccagtgaagaaataggccatgttttggcccattcctcaatgctgccggttgtagaa

SEQ ID NO: 166758 - DNA, 464 bp, Homo sapiens
aacatatgtttcatgtggcaatgataagagtgtgtattctgtcattgttgggtaaaatgttctctaaatgttttttaggtccatttggcctaatgtgcagtttagattcaacgtttctttgtyagtctttcatctagatgatctatctaatgctgagagtgggtcattaaaatcccctacaagattgaatcaggaaaaaaaaagaaaacctgaacagaacaataataattaatgagattgaattagtagcaaaaagtctccaaacgaagaaaagtccaggactggatggcttcattgcttaattttaccaaactttcaaagaatgtgttggagtctgtctttccctttaggtctaataatatttattttacatatctaggtgctctggtggtgtttgcatatatgtttagaattatcatatcctcttgctgaattaacccctttatcattacatattaataatt

SEQ ID NO: 166759 - DNA, 464 bp, Homo sapiens
aacatatgtttcatgtggcaatgataagagtgtgtattctgtcattgttgggtaaaatgttctctaaatgttttttaggtccatttggcctaatgtgcagtttagattcaacgtttctttgtcagtctttcatctagatgatctatctaatgctgagagtgggtcattaaaatcccctacaagattgaatcaggaaaaaaaaagaaaacctgaacagaacaataataattaatgagattgaattagtagyaaaaagtctccaaacgaagaaaagtccaggactggatggcttcattgcttaattttaccaaactttcaaagaatgtgttggagtctgtctttccctttaggtctaataatatttattttacatatctaggtgctctggtggtgtttgcatatatgtttagaattatcatatcctcttgctgaattaacccctttatcattacatattaataatt

SEQ ID NO: 166760 - DNA, 464 bp, Homo sapiens
aacatatgtttcatgtggcaatgataagagtgtgtattctgtcattgttgggtaaaatgttctctaaatgttttttaggtccatttggcctaatgtgcagtttagattcaacgtttctttgtcagtctttcatctagatgatctatctaatgctgagagtgggtcattaaaatcccctacaagattgaatcaggaaaaaaaaagaaaacctgaacagaacaataataattaatgagattgaattagtagcaaawagtctccaaacgaagaaaagtccaggactggatggcttcattgcttaattttaccaaactttcaaagaatgtgttggagtctgtctttccctttaggtctaataatatttattttacatatctaggtgctctggtggtgtttgcatatatgtttagaattatcatatcctcttgctgaattaacccctttatcattacatattaataatt

SEQ ID NO: 166761 - DNA, 464 bp, Homo sapiens
aacatatgtttcatgtggcaatgataagagtgtgtattctgtcattgttgggtaaaatgttctctaaatgttttttaggtccatttggcctaatgtgcagtttagattcaacgtttctttgtcagtctttcatctagatgatctatctaatgctgagagtgggtcattaaaatcccctacaagattgaatcaggaaaaaaaaagaaaacctgaacagaacaataataattaatgagattgaattagtagcaaaaagtctccaaacgaagaaaagtccaggactggatggcttcattgcttaattytaccaaactttcaaagaatgtgttggagtctgtctttccctttaggtctaataatatttattttacatatctaggtgctctggtggtgtttgcatatatgtttagaattatcatatcctcttgctgaattaacccctttatcattacatattaataatt

SEQ ID NO: 166762 - DNA, 569 bp, Homo sapiens
aacatgttatgtcaccttcacttatgaaggataattttgctggatattgtatccttgrctggcatttatttttccttcttcaggcttatgaagtgtctgctgggaactccactgttagtttgataggggttcccttgtaagtgactagacactttctcttgctgtttttagaactctctgtcttttgagagttttactataatatactatggataagacctttttgaattgtatccatttgaagttctctgagtttcttgtatctgctattattttgtgaaataggttttttaccctttttgttttatctttaacttctgggacaccaaaacattgaatatttggtaatttatgatgtcctatatgtcatatagactgcttatttggaaattttttttcttttatttttgtatgactggattatttcaaaagaagtgttttcaagttgtaaaattctttcttttgcttaatctactgttttgctgaagctttcaacaaaagctatttcaactccttttttattggaagctgttgctatagaattgttatgcttctttggaggtgtcata

SEQ ID NO: 166763 - DNA, 569 bp, Homo sapiens
aacatgttatgtcaccttcacttatgaaggataattttgctggatattgtatccttggctggcatttatttttccttctycaggcttatgaagtgtctgctgggaactccactgttagtttgataggggttcccttgtaagtgactagacactttctcttgctgtttttagaactctctgtcttttgagagttttactataatatactatggataagacctttttgaattgtatccatttgaagttctctgagtttcttgtatctgctattattttgtgaaataggttttttaccctttttgttttatctttaacttctgggacaccaaaacattgaatatttggtaatttatgatgtcctatatgtcatatagactgcttatttggaaattttttttcttttatttttgtatgactggattatttcaaaagaagtgttttcaagttgtaaaattctttcttttgcttaatctactgttttgctgaagctttcaacaaaagctatttcaactccttttttattggaagctgttgctatagaattgttatgcttctttggaggtgtcata

SEQ ID NO: 166764 - DNA, 569 bp, Homo sapiens
aacatgttatgtcaccttcacttatgaaggataattttgctggatattgtatccttggctggcatttatttttccttcttcaggcttatgaagtgtctgctgggaactccactgttagtttgataggggttcccttgtaagtgactagacactttctcttgctgtttttagaactctctgtcttttgagagttttrctataatatactatggataagacctttttgaattgtatccatttgaagttctctgagtttcttgtatctgctattattttgtgaaataggttttttaccctttttgttttatctttaacttctgggacaccaaaacattgaatatttggtaatttatgatgtcctatatgtcatatagactgcttatttggaaattttttttcttttatttttgtatgactggattatttcaaaagaagtgttttcaagttgtaaaattctttcttttgcttaatctactgttttgctgaagctttcaacaaaagctatttcaactccttttttattggaagctgttgctatagaattgttatgcttctttggaggtgtcata

SEQ ID NO: 166765 - DNA, 569 bp, Homo sapiens
aacatgttatgtcaccttcacttatgaaggataattttgctggatattgtatccttggctggcatttatttttccttcttcaggcttatgaagtgtctgctgggaactccactgttagtttgataggggttcccttgtaagtgactagacactttctcttgctgtttttagaactctctgtcttttgagagttttactataatatactatggataagacctttttgaattgtatccatttgaagttctctgagtttcttgtatctgctattattttgtgaaataggttttttaycctttttgttttatctttaacttctgggacaccaaaacattgaatatttggtaatttatgatgtcctatatgtcatatagactgcttatttggaaattttttttcttttatttttgtatgactggattatttcaaaagaagtgttttcaagttgtaaaattctttcttttgcttaatctactgttttgctgaagctttcaacaaaagctatttcaactccttttttattggaagctgttgctatagaattgttatgcttctttggaggtgtcata

SEQ ID NO: 166766 - DNA, 598 bp, Homo sapiens
gtaactaaggagaaacagattttaagcttctaaagtctctttgcttcagtagctgtagccacaaaggaaaataaaacctgaggtaagaaaagcagtaagactaaatttttaattctcaaacaatcttaggtatggttctctgttcggtttgataacagaaatcatctttacttttgcttatgccagacacctaaaagaaaattccctttggagtctcttaatctcccttttgtgcattcttttctgtacaytacttgtttagaagagttacctttcctttttgtaaccaggtaacttccctttagtacttttataaacatagctattctgtgagtctgttgcagtgacaacccataaaaaaaaaaaaaaagactgaagactgatgttaagccaagattgaacagtagaaaaaaaaaatcaagaaaccgtgaacctcctgagacacaacctccttgtctgaactatggctattaatttcattttatatattattcagattataaactcccagggcagaaacagtaatatttaaataatacatttctaaagaaaattggaaatacttacaaattggcttgtgtgttgttatgttcaacaa

SEQ ID NO: 166767 - DNA, 598 bp, Homo sapiens
gtaactaaggagaaacagattttaagcttctaaagtctctttgcttcagtagctgtagccacaaaggaaaataaaacctgaggtaagaaaagcagtaagactaaatttttaattctcaaacaatcttaggtatggttctctgttcggtttgataacagaaatcatctttacttttgcttatgccagacacctaaaagaaaattccctttggagtctcttaatctcccttttgtgcattcttttctgtacattacttgtttagaagagttacctttcctttttgtaaccaggtaacttccctttagtacttttataaacatagctattctgtgagtctgttgcagtgacaacccataaaaaaaaaaaaaaagactgaagactgatgttaagccaagattgaacagtagaaaaaaaaaatcaagaaaccrtgaacctcctgagacacaacctccttgtctgaactatggctattaatttcattttatatattattcagattataaactcccagggcagaaacagtaatatttaaataatacatttctaaagaaaattggaaatacttacaaattggcttgtgtgttgttatgttcaacaa

SEQ ID NO: 166768 - DNA, 587 bp, Homo sapiens
acttcctcttgttattatgattttacttctggactgtactgctgacagttttataccagtgattagagtgtttgccaatmctatcatattttattattttatactacatatatagtatgtattatgtatatgtatatatatgtgtatgtgtatgtatatatacatatgtggcatcatagcgtagctgcttcaattatgtagccaaattctctgtcacttactagctacatgaccttgggcaaattgcctaacctctccatatctccatttcctcaaaaaaaaaaaaaatggggatagtaagtgtgatggttaattttaggtgtcagtttgactggattaaggaatatctagagaacaggcaaagcattatttctgggtatgtccctgaaagtatttccagaggagaatgttccagtgaatctgtggactgagtgggggaagatctaccctcaatgtgagtggtaaccatcaaatcgactgagggcccagatagaacaaaaacagcagggggaaaactggtgttttctttctttctttcctttttctttttttccccctctctctcctggatctggaacactcttcat

SEQ ID NO: 166769 - DNA, 557 bp, Homo sapiens
tcaataaatgttaactctttttatgacatttgcccatgcttattttagacgagtcctagatttcaagttggtaaattttatggccaatataaagagtagatgaaaatgcatcaggataaaataggtttgtgatttttattcattataatgtaagaaattctcaatggagcttgtggtaaggaaaaaaataaattatgttattttcagaccagtaaataataaacaaccagaatctagtttgttagtagttattccactaggcgttagcatgctttaccagttagtcaaatagtactatccatatatattttatgtgctcaggtacacatacacatataagggcagatagattttggatgctaactcagcagtgtagtaagtggtgataatgattattcatgcagtattctcaagagttttctacataagattagagaaatattastaattaagccataaacctgtgtttgtaaactttattagagttgtataatatgtacttggtgattttcatttctcctgcattatactttatcttatctgtctagtcaaaatca

SEQ ID NO: 166770 - DNA, 557 bp, Homo sapiens
tcaataaatgttaactctttttatgacatttgcccatgcttattttagacgagtcctagatttcaagttggtaaattttatggccaatataaagagtagatgaaaatgcatcaggataaaataggtttgtgatttttattcattataatgtaagaaattctcaatggagcttgtggtaaggaaaaaaataaattatgttattttcagaccagtaaataataaacaaccagaatctagtttgttagtagttattccactaggcgttagcatgctttaccagttagtcaaatagtactatccatatatattttatgtgctcaggtacacatacacatataagggcagatagattttggatgctaactcagcagtgtagtaagtggtgataatgattattcatgcagtattctcaagagttttctacataagattagagaaatattagtaattaagccataaacctgtgtttgtaaactttattagagttgtataatatgtacttggtrattttcatttctcctgcattatactttatcttatctgtctagtcaaaatca

SEQ ID NO: 166771 - DNA, 476 bp, Homo sapiens
atttatcaaattgcataccttaaatatatgcattttattgtatataagttataatgccaataaagttctaaagagagaaaaataaataaatgcagtttcaaggaaagaaataaaatagctgtaaatctgacatatcagttattcatcatcactaatcattaggtaagtgcaaattgaaaccacagtgagatgccacttcatacccayagatgaaggatggctattattaaaaaatgaaatataagaaatatcagtgaggatgtggagaaattgctggtggaatgtaaaatggtacagctgctatggaaaacagtatggtggttcctcaacaaattaagcatagattaccatatgatctactaattccacttctggatatatacacaaaagaactgaaagcagggacttgaacaaatatttgtgcatactatttatagtaacattatgcacaatagccagaaggtataaacaaacca

SEQ ID NO: 166772 - DNA, 543 bp, Homo sapiens
atgctattttaaccttcaaccatctctgttcccttctttgagtctcatatcttacatggctcccatgcacacttgcacattaacaaatttgtatgcctttttgcctattaatgtattgtcagtttatttcascagattgaaaccttcagaggggaaaagaaaaaattcatttcactcctacagtgtttacaaattatatatgcacacaggaatcatgctatatttattttaatatcaccaatacctacaatatttatgatgtatcaagttaatcagtggatgtatgtataccaaattgaaattaaacatgtatcaagaagtagacggataagaatgagaggataaaagagaactatgctcacagatcatatgtactcatacatcagtcaaaatatgcagacagaaatagatttctatgtacaagaagtaaaacatattcctaaagctttcataaagccaaaagccaaaaatatatacattttttcaaatatttacatagatggactgctttagggaataaatatagcctcatcgtgctcaaga

SEQ ID NO: 166773 - DNA, 543 bp, Homo sapiens
atgctattttaaccttcaaccatctctgttcccttctttgagtctcatatcttacatggctcccatgcacacttgcacattaacaaatttgtatgcctttttgcctattaatgtattgtcagtttatttcagcagattgaaaccttcagaggggaaaagaaaaaattcatttcactcctacagtgtttacaaattatatatgcacacaggaatcatgctatatttattttaatatcaccaatacctacaatatttatgatgtatcaagttaatcagtggatgtatgtataccaaattgaaattaaacaygtatcaagaagtagacggataagaatgagaggataaaagagaactatgctcacagatcatatgtactcatacatcagtcaaaatatgcagacagaaatagatttctatgtacaagaagtaaaacatattcctaaagctttcataaagccaaaagccaaaaatatatacattttttcaaatatttacatagatggactgctttagggaataaatatagcctcatcgtgctcaaga

SEQ ID NO: 166774 - DNA, 543 bp, Homo sapiens
atgctattttaaccttcaaccatctctgttcccttctttgagtctcatatcttacatggctcccatgcacacttgcacattaacaaatttgtatgcctttttgcctattaatgtattgtcagtttatttcagcagattgaaaccttcagaggggaaaagaaaaaattcatttcactcctacagtgtttacaaattatatatgcacacaggaatcatgctatatttattttaatatcaccaatacctacaatatttatgatgtatcaagttaatcagtggatgtatgtataccaaattgaaattaaacatgtatcaagaagtagayggataagaatgagaggataaaagagaactatgctcacagatcatatgtactcatacatcagtcaaaatatgcagacagaaatagatttctatgtacaagaagtaaaacatattcctaaagctttcataaagccaaaagccaaaaatatatacattttttcaaatatttacatagatggactgctttagggaataaatatagcctcatcgtgctcaaga

SEQ ID NO: 166775 - DNA, 543 bp, Homo sapiens
atgctattttaaccttcaaccatctctgttcccttctttgagtctcatatcttacatggctcccatgcacacttgcacattaacaaatttgtatgcctttttgcctattaatgtattgtcagtttatttcagcagattgaaaccttcagaggggaaaagaaaaaattcatttcactcctacagtgtttacaaattatatatgcacacaggaatcatgctatatttattttaatatcaccaatacctacaatatttatgatgtatcaagttaatcagtggatgtatgtataccaaattgaaattaaacatgtatcaagaagtagacggataagaatgagaggayaaaagagaactatgctcacagatcatatgtactcatacatcagtcaaaatatgcagacagaaatagatttctatgtacaagaagtaaaacatattcctaaagctttcataaagccaaaagccaaaaatatatacattttttcaaatatttacatagatggactgctttagggaataaatatagcctcatcgtgctcaaga

SEQ ID NO: 166776 - DNA, 629 bp, Homo sapiens
ggtacacatgactgtgaccatcacatatgaaggtggtaagccacagggcacaccgtaaccctggtagctctagccatgttttatcttcttgcacaaaacttaagtggcatcaaaaaagttataaatgtttattgaaagcaataaaaaataagctacagtttatgaatatagcaaattgccttgatatcacataatagtctttctcatatgatgcaatatgaaactccaaatagatgtcaataaaaggattcctattcttaatttttttaaacttgctcacctrtaatcaaagatacagcaaagacaccttagtttttcttaaaagaggcagactggatgctaacaattaatatcacttattaaaaaacattattgaaatccaaaaaatgagagaatgatatctaaatgaaaagccaccctaaaagagtgaaataggctaaaaagtgatgttattcaacaatattgcttgatgaggacaagcttaattctcaactcgaatatcatgtttttttccatcatttagctccataagactggatctccatcttttaacctgtaacacatggataagtaaaaaatagattctgaactagatcagtaatacaaatggcaatggaatttgaggaatt

SEQ ID NO: 166777 - DNA, 614 bp, Homo sapiens
gtgaccatcacatatgaaggtggtaagccacagggcacaccgtaaccctggtagctctagccatgttttatcttcttgcacaaaacttaagtggcatcaaaaaagttataaatgtttattgaaagcaataaaaaataagctacagtttatgaatatagcaaattgccttgatatcacataatagtctttctcatatgatgcaatatgaaactccaaatagatgtcaataaaaggattcctattcttaatttttttaaacttgctcacctataatcaaagatacagcaaagacaccttagtttttcttaaaagaggcagactggatgctaacaattaatatcacttattaaaaaacattattgaaatccaaaaaatgagagaatgatatctaaatgaaaagccaccctaaaagagtgmaataggctaaaaagtgatgttattcaacaatattgcttgatgaggacaagcttaattctcaactcgaatatcatgtttttttccatcatttagctccataagactggatctccatcttttaacctgtaacacatggataagtaaaaaatagattctgaactagatcagtaatacaaatggcaatggaatttgaggaa

SEQ ID NO: 166778 - DNA, 629 bp, Homo sapiens
ggtacacatgactgtgaccatcacatatgaaggtggtaagccacagggcacaccgtaaccctggtagctctagccatgttttatcttcttgcacaaaacttaagtggcatcaaaaaagttataaatgtttattgaaagcaataaaaaataagctacagtttatgaatatagcaaattgccttgatatcacataatagtctttctcatatgatgcaatatgaaactccaaatagatgtcaataaaaggattcctattcttaatttttttaaacttgctcacctataatcaaagatacagcaaagacaccttagtttttcttaaaagaggcagactggatgctaacaattaatatcacttattaaaaaacattattgaaatccaaaaaatgagagaatgatatctaaatgaaaagccaccctaaaagagtgaaataggctaaaaagtgatgttattcaacaatattgcytgatgaggacaagcttaattctcaactcgaatatcatgtttttttccatcatttagctccataagactggatctccatcttttaacctgtaacacatggataagtaaaaaatagattctgaactagatcagtaatacaaatggcaatggaatttgaggaatt

SEQ ID NO: 166779 - DNA, 172 bp, Homo sapiens
caacaatattgcttgatgaggacaagcttarttctcaactcgaatatcatgtttttttccatcatttagctccataagactggatctccatcttttaacctgtaacacatggataagtaaaaaatagattctgaactagatcagtaatacaaatggcaatggaatttgagga

SEQ ID NO: 166780 - DNA, 476 bp, Homo sapiens
caattagacaagtgtcgagtttaagtccagagtttgttagttttctgcctcaatgatccatctaatgttgccagtggggtgtasaaatctctcactattatggtgtggttgtctaagtccttttgtagatcaagaagaacttgttttatgagcctgttgctctaatgttgggaacctatatattagaatagttgaggcttcttgttggattgtacccgttatcattatgtaatgcccttcattgtctttcttaatttttattggtttaaattctgtcttatctgaataaggatagtacttcctactcttttttgttttctgtttgcatggtagattttttctatccttttactttgagcatgtgtgttttgctatatgaaatgagtctcttaaagacaacagatggttggctcttttctttttatccagcttgctactctgtcttttaagtggggcatttagcccatttatattca

SEQ ID NO: 166781 - DNA, 620 bp, Homo sapiens
aagtttgcctgtccttgaagatcttgtggatctactttacaacatatggtctctgaaaatatgacgatacctagtgcatgtgaaggatattttcaaaatggtttggttcataaaactgtcagttgatttcatacatctaattgaaacattttccatctaaaatagggcaatttacagaagtgtctctctggtttatttacattgcatattcccataaagcagcaggtttgcaataaagcatttgacacccccatggtattttgaaagaaacaatatacaatctggcacaagttagcaccagtgtgaaatggcaggctgggggatatcttaaacagcagcaactttcaaaactaaatgaagtgtcatcttaaggaggctgctgttaatgcaatttaaattactcacctgaaattaatattctgctgagggaaataaagcaawttaaaagaccacataatttccgatcacatcattgacattatgtggtcatggactgttcccttatctaatatagaaacactccagtttcttttcacactaaacacatttttccattttaactacttggcttctaaaaaaaaagatccactcattccctgcagatggttaacaatttgaga

SEQ ID NO: 166782 - DNA, 620 bp, Homo sapiens
aagtttgcctgtccttgaagatcttgtggatctactttacaacatatggtctctgaaaatatgacgatacctagtgcatgtgaaggatattttcaaaatggtttggttcataaaactgtcagttgatttcatacatctaattgaaacattttccatctaaaatagggcaatttacagaagtgtctctctggtttatttacattgcatattcccataaagcagcaggtttgcaataaagcatttgacacccccatggtattttgaaagaaacaatatacaatctggcacaagttagcaccagtgtgaaatggcaggctgggggatatcttaaacagcagcaactttcaaaactaaatgaagtgtcatcttaaggaggctgctgttaatgcaatttaaattactcacctgaaattaatattctgctgagggaaataaagcaatttaaaagaccacataatttccgatcacatcattgacattatgtggtcayggactgttcccttatctaatatagaaacactccagtttcttttcacactaaacacatttttccattttaactacttggcttctaaaaaaaaagatccactcattccctgcagatggttaacaatttgaga

SEQ ID NO: 166783 - DNA, 556 bp, Homo sapiens
cataaactgtgcatccaacaaagttctaatatccagaatctgtagggaacagaaaacctaataccatgtattttcacttataaatgggagstaaacattgagtatacatggactgaaaggtggggacaatacacaccaaggcctatttgagtgggaagagtgggaagagagtgaaggtcaaaaaactgcctatcaagtactgtgctcgctacctggataatgaaatcatttgtacaccaatcctagtgacacataatttacccatgtaaaaaacctgcacatgtaccctctgaacctaaagtaaacattgaaagacaaaaatatcctaaattaagtatagtagaataaaaatttagtgaacaattggcctttgtctaatatatgcctgtcttctttgctcttagaaagttctaataatacattaagtatttgtggtgcccttattaaatcttaaattacctagtgaacatatacatacatatctaaccatgtaaaccttggggaaggttaaccaagcctttcctttggatatcaagtctatggtttattttattcc

SEQ ID NO: 166784 - DNA, 556 bp, Homo sapiens
cataaactgtgcatccaacaaagttctaatatccagaatctgtagggaacagaaaacctaataccatgtattttcacttataaatgggagctaaacattgagtayacatggactgaaaggtggggacaatacacaccaaggcctatttgagtgggaagagtgggaagagagtgaaggtcaaaaaactgcctatcaagtactgtgctcgctacctggataatgaaatcatttgtacaccaatcctagtgacacataatttacccatgtaaaaaacctgcacatgtaccctctgaacctaaagtaaacattgaaagacaaaaatatcctaaattaagtatagtagaataaaaatttagtgaacaattggcctttgtctaatatatgcctgtcttctttgctcttagaaagttctaataatacattaagtatttgtggtgcccttattaaatcttaaattacctagtgaacatatacatacatatctaaccatgtaaaccttggggaaggttaaccaagcctttcctttggatatcaagtctatggtttattttattcc

SEQ ID NO: 166785 - DNA, 556 bp, Homo sapiens
cataaactgtgcatccaacaaagttctaatatccagaatctgtagggaacagaaaacctaataccatgtattttcacttataaatgggagctaaacattgagtatacatggactsaaaggtggggacaatacacaccaaggcctatttgagtgggaagagtgggaagagagtgaaggtcaaaaaactgcctatcaagtactgtgctcgctacctggataatgaaatcatttgtacaccaatcctagtgacacataatttacccatgtaaaaaacctgcacatgtaccctctgaacctaaagtaaacattgaaagacaaaaatatcctaaattaagtatagtagaataaaaatttagtgaacaattggcctttgtctaatatatgcctgtcttctttgctcttagaaagttctaataatacattaagtatttgtggtgcccttattaaatcttaaattacctagtgaacatatacatacatatctaaccatgtaaaccttggggaaggttaaccaagcctttcctttggatatcaagtctatggtttattttattcc

SEQ ID NO: 166786 - DNA, 556 bp, Homo sapiens
cataaactgtgcatccaacaaagttctaatatccagaatctgtagggaacagaaaacctaataccatgtattttcacttataaatgggagctaaacattgagtatacatggactgaaaggtggggacaatacacaccaaggcctatttgagtgggaagagtgggaagagagtgaaggtcaaaaaactgcctatcaagtactgtgctcgctacctggataatgaaatcatttgtacaccaatcctagtgacacataatttacccatgtaaaaaacctgcacatgtaccctctgaacctaaagtaaacattgaaagacaaaaatatcctaaattaagtatagtagaataaaaatttagtgaacaattggcctttgtctaatatatgcctgtcttctttgctcttagaaagttctaataatrcattaagtatttgtggtgcccttattaaatcttaaattacctagtgaacatatacatacatatctaaccatgtaaaccttggggaaggttaaccaagcctttcctttggatatcaagtctatggtttattttattcc

SEQ ID NO: 166787 - DNA, 560 bp, Homo sapiens
gattcaaaagtctgagacaaggtttttcaatctttatattagtttttaatgagggaaactcctgggttaaactttcaacttttctttagtatgttatttgaggttgtcttgtctactcaagyttttagtaaataagcatatttaaaaatctgcaaacttaggagtggaagtagattaaaggatatttgtttaaggtaaaatgggagcaggaaattatattgttggagtatcagtcacttaggcacacaaagaataaggaaggttctttctgtaagcaaattacaaaaccagcacaaaggcaagtaaagcagtgattatggacttcaactaaccttacctttgcctggattctgtctaaattttatcaaaatatagcataggtacattcatagtataccttactcacgtcttcatcacttcaaaagcaagtgaagagccaacaagatttcttatttaaaatggcacttgtttacatttcttgcctttcctatcttttaactaaaatgcttatacaaacataggaaaagttgaaaatataccaccacctaaaattaagatct

SEQ ID NO: 166788 - DNA, 560 bp, Homo sapiens
gattcaaaagtctgagacaaggtttttcaatctttatattagtttttaatgagggaaactcctgggttaaactttcaacttttctttagtatgttatttgaggttgtcttgtctactcaagcttttagtaaatamgcatatttaaaaatctgcaaacttaggagtggaagtagattaaaggatatttgtttaaggtaaaatgggagcaggaaattatattgttggagtatcagtcacttaggcacacaaagaataaggaaggttctttctgtaagcaaattacaaaaccagcacaaaggcaagtaaagcagtgattatggacttcaactaaccttacctttgcctggattctgtctaaattttatcaaaatatagcataggtacattcatagtataccttactcacgtcttcatcacttcaaaagcaagtgaagagccaacaagatttcttatttaaaatggcacttgtttacatttcttgcctttcctatcttttaactaaaatgcttatacaaacataggaaaagttgaaaatataccaccacctaaaattaagatct

SEQ ID NO: 166789 - DNA, 560 bp, Homo sapiens
gattcaaaagtctgagacaaggtttttcaatctttatattagtttttaatgagggaaactcctgggttaaactttcaacttttctttagtatgttatttgaggttgtcttgtctactcaagcttttagtaaataagcatatttaaaaatctgcaaacttaggagtggaagtagattaaaggatatttgtttaaggtaaaatgggagcaggaaattatattgttggagtatcagtcacttaggcacacaaagaataaggaaggttctttctgtaagcaaattacaaaaccagcacaaaggcaagtaaagcagtgattatggacttcaactaaccttacctttgcctggattctgtctaaattttatcaaaatatagcataggtacattcatagtataccttactcacgtcttcatcacttcaaaagcaagtgaagagccracaagatttcttatttaaaatggcacttgtttacatttcttgcctttcctatcttttaactaaaatgcttatacaaacataggaaaagttgaaaatataccaccacctaaaattaagatct

SEQ ID NO: 166790 - DNA, 391 bp, Homo sapiens
attagtactatatacatatatactagtaatatgtatatactgttgatatatccaggcataccttggagataaygcagattttgttccagaccactgcaataaaatgagtcacctaaatttttggtttctcaatggatataaaagttatgtttccactctactgtagtatattaagtatgcaatatgattatgtctaaaattaaaatgtacataccttaactgaaaagactttattgcaaaaaaggctgataatcatctgaaccttcagtgaattgtaatctttttgctggtggagagtcttccctcaatgttgatggctgctggttgatcaaggtggtggttgtgaaaagttgaagtggctgtggcaatttctgaaataagacaatgaagt

SEQ ID NO: 166791 - DNA, 411 bp, Homo sapiens
taatatgtatatactgttgatatatccaggcataccttggagataatgcagattttgttccagaccactgcaataaaatgagtcacctaaatttttggtttctcaatggatataaaagttatgtttccactctactgtagtatattaagtatgcaatatgattatgtctaaaattaaaatgtacataccttaactgaaaagactttattgcaaaaaakgctgataatcatctgaaccttcagtgaattgtaatctttttgctggtggagagtcttccctcaatgttgatggctgctggttgatcaaggtggtggttgtgaaaagttgaagtggctgtggcaatttctgaaataagacaatgaagtttcctgcattgattgacttttcctttcatgaaaagtttcgctgttg

SEQ ID NO: 166792 - DNA, 391 bp, Homo sapiens
attagtactatatacatatatactagtaatatgtatatactgttgatatatccaggcataccttggagataatgcagattttgttccagaccactgcaataaaatgagtcacctaaatttttggtttctcaatggatataaaagttatgtttccactctactgtagtatattaagtatgcaatatgattatgtctaaaattaaaatgtacataccttaactgaaaagactttattgcaaaaaaggytgataatcatctgaaccttcagtgaattgtaatctttttgctggtggagagtcttccctcaatgttgatggctgctggttgatcaaggtggtggttgtgaaaagttgaagtggctgtggcaatttctgaaataagacaatgaagt

SEQ ID NO: 166793 - DNA, 636 bp, Homo sapiens
  misc_feature (1)...(636): n = A,T,C or G
gtattgagtggttaccactgatctatgctagtccarttcttacgatttgttatactatgtatggagttttcagccttcttcaaagaatagccttttgggtcagcaggaccatcagggacagagagcttaaagatactaacagagattctgtggcactaattcatggtagggttggatggtcagtcttctttttttttagtgtacatgatttactttcagtttattttagaaataagatattaggtatacttaggaggcaagattagtgagtttaggtttagcaaagatttcttaaatttgacagaaaaagcacaagctatagaagaanaatcaatcaattggaatttatcaaagttaaaacatttgctttttaaaagactgttaaaaaatgaaagggcaaactacagagttggagaaaatattcacaaaacacaaatttgacaatattatatatgtatatcctttgtgtgacatatgtgatatatttgtataatggcatactactcttacaacttaataagaagacaactcaattgaaaattggacaaaaaatttgaacagatacttctctaaagaaaatatattgatgacaaatgagcacatgtaaagatattctttatcattatccatgaggaa

SEQ ID NO: 166794 - DNA, 419 bp, Homo sapiens
ttagcattaaaaaaagatatcaaaatctattaatgctttctatgaccttttatagatgaagacaaggcaaaaacatttttcccaaaaaatcaatttaaattattactataaaatttctgaatgatctgctgtgcaataggggcatatattttcctaaaattaagacttaaataataggtttatattgactatcgattagtagcaaaactttagagatgtccatgaatcctsatattctggaagttgctagaaatatagaggaaattaaaattaacagtcttgtaccagattcttattgcctatacttcatatttctctgtatttgtagcttgtagtctctgcagagtcttttcaatttgaatggtaaagaataatggctgccaaacatggctaaccattaaaatcatggttgttaggaa

SEQ ID NO: 166795 - DNA, 594 bp, Homo sapiens
taaagggatgtggaaatgtctgtgtgccctggggagggatgtggaggtgcagagagtgctgggtgagtggtggagtcacaaggcagcagtattctgtactataagactaggggtaaggagtaacttcaagaacttcacttttaagaacaagcaagacatcttcctctcaccaaaaatagaaaaataagtgtaacaaaaatattgacctagtgtaagtgtagtacaagaagaagaccagaccagttgctctgcagagatgacccrtagattcaggtcccttttcccaaactctgctgccttatatgtcatacgctactcccttcacttggtaccatcttgaagaggaggagaggatgggtgcaatggaactggacaatttattgaagtcatataagcagagactgagttacctaaagaggcagcttaaattattaggtcaaatgaaagatactgcaatgactaaattttagtttttccaagctaaataattactgatagtaatggtggttgtaacaatggtagtgaagggtagtagttataaaaaaaggtcagaacaagttagaaaaaaattatagcatagtatgagggaattat

SEQ ID NO: 166796 - DNA, 594 bp, Homo sapiens
taaagggatgtggaaatgtctgtgtgccctggggagggatgtggaggtgcagagagtgctgggtgagtggtggagtcacaaggcagcagtattctgtactataagactaggggtaaggagtaacttcaagaacttcacttttaagaacaagcaagacatcttcctctcaccaaaaatagaaaaataagtgtaacaaaaatattgacctagtgtaagtgtagtacaagaagaagaccagaccagttgctctgcagagatgacccgtagattcaggtcccttttcccaaactctgctgscttatatgtcatacgctactcccttcacttggtaccatcttgaagaggaggagaggatgggtgcaatggaactggacaatttattgaagtcatataagcagagactgagttacctaaagaggcagcttaaattattaggtcaaatgaaagatactgcaatgactaaattttagtttttccaagctaaataattactgatagtaatggtggttgtaacaatggtagtgaagggtagtagttataaaaaaaggtcagaacaagttagaaaaaaattatagcatagtatgagggaattat

SEQ ID NO: 166797 - DNA, 594 bp, Homo sapiens
taaagggatgtggaaatgtctgtgtgccctggggagggatgtggaggtgcagagagtgctgggtgagtggtggagtcacaaggcagcagtattctgtactataagactaggggtaaggagtaacttcaagaacttcacttttaagaacaagcaagacatcttcctctcaccaaaaatagaaaaataagtgtaacaaaaatattgacctagtgtaagtgtagtacaagaagaagaccagaccagttgctctgcagagatgacccgtagattcaggtcccttttcccaaactctgctgccttatatgtcatacgctactcccttcacttggtaccatcttgaagaggagkagaggatgggtgcaatggaactggacaatttattgaagtcatataagcagagactgagttacctaaagaggcagcttaaattattaggtcaaatgaaagatactgcaatgactaaattttagtttttccaagctaaataattactgatagtaatggtggttgtaacaatggtagtgaagggtagtagttataaaaaaaggtcagaacaagttagaaaaaaattatagcatagtatgagggaattat

SEQ ID NO: 166798 - DNA, 594 bp, Homo sapiens
taaagggatgtggaaatgtctgtgtgccctggggagggatgtggaggtgcagagagtgctgggtgagtggtggagtcacaaggcagcagtattctgtactataagactaggggtaaggagtaacttcaagaacttcacttttaagaacaagcaagacatcttcctctcaccaaaaatagaaaaataagtgtaacaaaaatattgacctagtgtaagtgtagtacaagaagaagaccagaccagttgctctgcagagatgacccgtagattcaggtcccttttcccaaactctgctgccttatatgtcatacgctactcccttcacttggtaccatcttgaagaggaggagaggatgggtgcaatggaactggacaatttattgaagtcatataagcagagactgagttacctaaagaggcagcttaaattattaggtcaaatgaaagatactgcaatgactaaattttagtttttccawgctaaataattactgatagtaatggtggttgtaacaatggtagtgaagggtagtagttataaaaaaaggtcagaacaagttagaaaaaaattatagcatagtatgagggaattat

SEQ ID NO: 166799 - DNA, 636 bp, Homo sapiens
  misc_feature (1)...(636): n = A,T,C or G
gtattgagtggttaccactgatctatgctagtccaattcttacgatttgttatactatgtatggagttttcagccttcttcaaagaatagccttttgggtcagcaggaccatcagggacagaragcttaaagatactaacagagattctgtggcactaattcatggtagggttggatggtcagtcttctttttttttagtgtacatgatttactttcagtttattttagaaataagatattaggtatacttaggaggcaagattagtgagtttaggtttagcaaagatttcttaaatttgacagaaaaagcacaagctatagaagaanaatcaatcaattggaatttatcaaagttaaaacatttgctttttaaaagactgttaaaaaatgaaagggcaaactacagagttggagaaaatattcacaaaacacaaatttgacaatattatatatgtatatcctttgtgtgacatatgtgatatatttgtataatggcatactactcttacaacttaataagaagacaactcaattgaaaattggacaaaaaatttgaacagatacttctctaaagaaaatatattgatgacaaatgagcacatgtaaagatattctttatcattatccatgaggaa

SEQ ID NO: 166800 - DNA, 529 bp, Homo sapiens
taattttctggatattagggcccctggaagtccaagagataatacaagatttgatatgttaaaaatcatataggaatgtcaaataagaaatagtgtctaacttttggggaggttatatttgtataaatatgttctyaatatgtattctaaaattgtatgtgattcctaaaattctgataatatgccttaatatatgttatcaacaataattattatattaaattgttgtatgccacaaaaataaccaaattttcttgtcaattgtgtttttaactacagttattctaagacttctgtcatccacagacaattattgttttatttgaattctcctcaaaaagtagtttataatcagatacagaccaaaacttgcttctttttttagggaaattcatgaaaaggactcttaggagtactcttaaatacagctttctgataatcttggagatcataccattggactagcaaaaaacttccaggattctagttgaaaagctgacgcattcatgaggattgctaacccaacatc

SEQ ID NO: 166801 - DNA, 529 bp, Homo sapiens
taattttctggatattagggcccctggaagtccaagagataatacaagatttgatatgttaaaaatcatataggaatgtcaaataagaaatagtgtctaacttttggggaggttatatttgtataaatatgttctcaatatgtattctaaaattgtatgtgattcytaaaattctgataatatgccttaatatatgttatcaacaataattattatattaaattgttgtatgccacaaaaataaccaaattttcttgtcaattgtgtttttaactacagttattctaagacttctgtcatccacagacaattattgttttatttgaattctcctcaaaaagtagtttataatcagatacagaccaaaacttgcttctttttttagggaaattcatgaaaaggactcttaggagtactcttaaatacagctttctgataatcttggagatcataccattggactagcaaaaaacttccaggattctagttgaaaagctgacgcattcatgaggattgctaacccaacatc

SEQ ID NO: 166802 - DNA, 529 bp, Homo sapiens
taattttctggatattagggcccctggaagtccaagagataatacaagatttgatatgttaaaaatcatataggaatgtcaaataagaaatagtgtctaacttttggggaggttatatttgtataaatatgttctcaatatgtattctaaaattgtatgtgattcctaaaattctgataatatgccttaatatatgttatcaayaataattattatattaaattgttgtatgccacaaaaataaccaaattttcttgtcaattgtgtttttaactacagttattctaagacttctgtcatccacagacaattattgttttatttgaattctcctcaaaaagtagtttataatcagatacagaccaaaacttgcttctttttttagggaaattcatgaaaaggactcttaggagtactcttaaatacagctttctgataatcttggagatcataccattggactagcaaaaaacttccaggattctagttgaaaagctgacgcattcatgaggattgctaacccaacatc

SEQ ID NO: 166803 - DNA, 529 bp, Homo sapiens
taattttctggatattagggcccctggaagtccaagagataatacaagatttgatatgttaaaaatcatataggaatgtcaaataagaaatagtgtctaacttttggggaggttatatttgtataaatatgttctcaatatgtattctaaaattgtatgtgattcctaaaattctgataatatgccttaatatatgttatcaacaataattattatattaaattgttgtatgccacaaaaataaccaaattttcttgtcaawtgtgtttttaactacagttattctaagacttctgtcatccacagacaattattgttttatttgaattctcctcaaaaagtagtttataatcagatacagaccaaaacttgcttctttttttagggaaattcatgaaaaggactcttaggagtactcttaaatacagctttctgataatcttggagatcataccattggactagcaaaaaacttccaggattctagttgaaaagctgacgcattcatgaggattgctaacccaacatc

SEQ ID NO: 166804 - DNA, 608 bp, Homo sapiens
tctagattgctggtccccagagaagaaatgtgcctgaagtcttcactaatgttaatgcatctgccttgaagggagaaggctcacagagataggaactactgcaatcactccagaaaatgcctccttgaatttgaaatcagttctggtcatcagtgaccaacaataataagctcarttacagtgtgtgtagaataaatagaaactaaagtatcagcaaaaagagaaccagcctgtgtccagaatacagagtctaccttgtctataatggttcattgttaagaaaaatccttgtcatatgatcaaggaactcaacagcaagcccaaacctaatctcagccaacctttttaaccaattatcaggaacaattaaaaaaaaaagcctaaaacatgaatatggcaaagtgagtattttgacttctcttgcaggtgtatgcgtaaaaaaacaagtaaagctactacatcagtgtcctttgtttaatgaccccaactggccacattccataatatagggaagataatggatctcaaaaggtacaactaaaggtagcttaaaccatcaaattcactactcaaagtgtagaaacctgtcccagatcatccagttcaag

SEQ ID NO: 166805 - DNA, 644 bp, Homo sapiens
tctttgttttaaacactaagttttgggatttgtaacaaagcaaagattaataatacagtcaatatttttaaagaatcaaaacaaatctaaaggcctcttctttacaatgaccatgattttgttttacacggagcttccagcaaaatataatgmctatctgtgtcagtcagttttgcactgctatagaggaatacctgagactgggtaatttacaaagaaaacaggtttacttagcttgtgattctgaaggctgtacaggaagcatggaacctgcgactgctccacttctggtaagggcctcagggagcttaaaaatatagcagaaggcaaatggggagctggcatctcacatggtaagagagggagcaagacagagatggggagtaagtcccagacttttaaactatcagatctcacatgagctaactgagctcacttatcaccaagaggatggtgctaaaccattcataagggatccgccctcttgatccaatcactgtccaccaagccccatatccaaaactggaaatcacatttcaacatgagatttagaggtgataaacatccaaaccatatcactatgattttagaatcattttatcaatgaaaaaatatgattaaaataggcatgggaggatgtagaa

SEQ ID NO: 166806 - DNA, 644 bp, Homo sapiens
tctttgttttaaacactaagttttgggatttgtaacaaagcaaagattaataatacagtcaatatttttaaagaatcaaaacaaatctaaaggcctcttctttacaatgaccatgattttgttttacacggagcttccagcaaaatataatgcctatctgtgtcagtcagttttgcactgctatagaggaatacctgagactgggtaatttacaaagaaaacaggtttacttagcttgtgattctgaaggctgtacaggaagcatggaacctgcgactgctccacttctggtaagggcctcagggagcttaaaaatatagcagaaggcaaatggggagctggcatctcacatggtaagagagggagcaagacagagatggggagtaagtcccagacttttaaackatcagatctcacatgagctaactgagctcacttatcaccaagaggatggtgctaaaccattcataagggatccgccctcttgatccaatcactgtccaccaagccccatatccaaaactggaaatcacatttcaacatgagatttagaggtgataaacatccaaaccatatcactatgattttagaatcattttatcaatgaaaaaatatgattaaaataggcatgggaggatgtagaa

SEQ ID NO: 166807 - DNA, 644 bp, Homo sapiens
tctttgttttaaacactaagttttgggatttgtaacaaagcaaagattaataatacagtcaatatttttaaagaatcaaaacaaatctaaaggcctcttctttacaatgaccatgattttgttttacacggagcttccagcaaaatataatgcctatctgtgtcagtcagttttgcactgctatagaggaatacctgagactgggtaatttacaaagaaaacaggtttacttagcttgtgattctgaaggctgtacaggaagcatggaacctgcgactgctccacttctggtaagggcctcagggagcttaaaaatatagcagaaggcaaatggggagctggcatctcacatggtaagagagggagcaagacagagatggggagtaagtcccagacttttaaactatcagatctcacatgagctaactgagctcacttatcaccaagaggatggtgctaaaccattcataagggatccgccctcttgatccaatcactgtccaccaagccccatatccaaaactggaaatcacatttcaacatgagatttrgaggtgataaacatccaaaccatatcactatgattttagaatcattttatcaatgaaaaaatatgattaaaataggcatgggaggatgtagaa

SEQ ID NO: 166808 - DNA, 543 bp, Homo sapiens
aggtagtttttcagtccttaccctctttcctccctccaaccttatgtaggtcctgatgtctgttgttaccttttttgtgtccatatgtactcaatgtttagctcccatttataagtcagaacaggtaatatttggttttctgttcccatattcacttagaacaatggcctccagctctatccatgttgctgcaaaggatatgatctcattgctttttatgactatgtagtattccttggtgtatatgtaccacattttctttatccagtctactgttgatgggcatttaggttaattccatgtttttgctattgtgaatactgctgtgatgaatatacatgtgcatgcatctttatggtggaacaatttatatttctttaggtatatacccaataacgggattgcttggtcaaatygtaattctgctttgaattctttgaggaattctttgagaaagctaaatagctgtccacaatggctgaactaacttacattcccaccagcagtgtataagcattctcttatctccacttttttccactt

SEQ ID NO: 166809 - DNA, 537 bp, Homo sapiens
aaagggtcttactgaatgaatctcagtctagctctggcccaagcaacaatggtcagggtttaaagggtggggaccatgtgatacagaaaaggatggtaggtgaggcagacactgccaaatatctataatatggttcctttaaaatayagttaacagcagatactttcatatggagtaggtaggaatacctggaagaccttctctgggattaattacctaagaagaggtaaagcagatgatctcaagagaaacattgtaaggcattgtagaaataaagggattaggattttagttttgtgatttctaaatgatcatccaaggtgctatagcctaaatgtctgagtccccataaaaattatatgtcaaaacataatcactaatgtgatagtattaggaggtggggcttatagaaagtgattagatcataaggctagagccctcatgaatgggattagtgccataacaagaggccccagagagctgccttgcctcttcaccatgtgacaacacagaatgaaggtatcatccatgaacaaa

SEQ ID NO: 166810 - DNA, 537 bp, Homo sapiens
aaagggtcttactgaatgaatctcagtctagctctggcccaagcaacaatggtcagggtttaaagggtggggaccatgtgatacagaaaaggatggtaggtgaggcagacactgccaaatatctataatatggttcctttaaaatatagtyaacagcagatactttcatatggagtaggtaggaatacctggaagaccttctctgggattaattacctaagaagaggtaaagcagatgatctcaagagaaacattgtaaggcattgtagaaataaagggattaggattttagttttgtgatttctaaatgatcatccaaggtgctatagcctaaatgtctgagtccccataaaaattatatgtcaaaacataatcactaatgtgatagtattaggaggtggggcttatagaaagtgattagatcataaggctagagccctcatgaatgggattagtgccataacaagaggccccagagagctgccttgcctcttcaccatgtgacaacacagaatgaaggtatcatccatgaacaaa

SEQ ID NO: 166811 - DNA, 537 bp, Homo sapiens
aaagggtcttactgaatgaatctcagtctagctctggcccaagcaacaatggtcagggtttaaagggtggggaccatgtgatacagaaaaggatggtaggtgaggcagacactgccaaatatctataatatggttcctttaaaatatagttaacagcagatactttcatrtggagtaggtaggaatacctggaagaccttctctgggattaattacctaagaagaggtaaagcagatgatctcaagagaaacattgtaaggcattgtagaaataaagggattaggattttagttttgtgatttctaaatgatcatccaaggtgctatagcctaaatgtctgagtccccataaaaattatatgtcaaaacataatcactaatgtgatagtattaggaggtggggcttatagaaagtgattagatcataaggctagagccctcatgaatgggattagtgccataacaagaggccccagagagctgccttgcctcttcaccatgtgacaacacagaatgaaggtatcatccatgaacaaa

SEQ ID NO: 166812 - DNA, 537 bp, Homo sapiens
aaagggtcttactgaatgaatctcagtctagctctggcccaagcaacaatggtcagggtttaaagggtggggaccatgtgatacagaaaaggatggtaggtgaggcagacactgccaaatatctataatatggttcctttaaaatatagttaacagcagatactttcatatggagtaggtaggaatacctggaagaccttctctgggattaattacctaagaagaggtaaagcagatgatctcaagagaaacattgtaaggcattgtagaaataaagggattaggattttagttttgtgatttctaaatgatcatccaaggtgctatagcctaaatgtctgagtcmccataaaaattatatgtcaaaacataatcactaatgtgatagtattaggaggtggggcttatagaaagtgattagatcataaggctagagccctcatgaatgggattagtgccataacaagaggccccagagagctgccttgcctcttcaccatgtgacaacacagaatgaaggtatcatccatgaacaaa

SEQ ID NO: 166813 - DNA, 575 bp, Homo sapiens
gaaccaacattaggattaaataaactaattaaagataagtctcctgacttcacttcaaagtagcagaattgagagggatggtcctgtgaggcaccagcttactgagaaaaacggcagctgaagataggcataatgaaaggcctagccctcttcacagactgatgctgctggtgctgcattatatccatcatgtacctatgatgacttcagattcaaccctatccctgtcytcaggacaggaaaaatgatccagagagtcttgagcatcacattcactgaaaggtggacccatcagtggaaataaaacctgcactgaaaggcattttccccgggcctactgttgaacaaaggggaatcaacaaattggtatcacctctttatttgctgattttattacacaagacaaatagggatgtcttctttaaattgcctgacataaagttgctcgatttgattgaaatataatgatgtcctaagaaagattatgataaattggtccagaaacccatctgtaatgccaaaatatctcaccacctgaggcattttagttgtctccaggactggctccaacatca

SEQ ID NO: 166814 - DNA, 575 bp, Homo sapiens
gaaccaacattaggattaaataaactaattaaagataagtctcctgacttcacttcaaagtagcagaattgagagggatggtcctgtgaggcaccagcttactgagaaaaacggcagctgaagataggcataatgaaaggcctagccctcttcacagactgatgctgctggtgctgcattatatccatcatgtacctatgatgacttcagattcaaccctatccctgtcctcaggacaggaaaaatgatccagagagtcttgagcatcacattcactgaaaggtggacccatcagtggaaataaaacctgcactgaaaggcattttccccgggcctactgttgaacaaaggggaatcaacaaattggtatcacctctttatttgctgattttattacacaagacaaatagggatgtcttctttaaattgcctgacataaagttgctcgatttgattgaaatataatgatgtcmtaagaaagattatgataaattggtccagaaacccatctgtaatgccaaaatatctcaccacctgaggcattttagttgtctccaggactggctccaacatca

SEQ ID NO: 166815 - DNA, 575 bp, Homo sapiens
gaaccaacattaggattaaataaactaattaaagataagtctcctgacttcacttcaaagtagcagaattgagagggatggtcctgtgaggcaccagcttactgagaaaaacggcagctgaagataggcataatgaaaggcctagccctcttcacagactgatgctgctggtgctgcattatatccatcatgtacctatgatgacttcagattcaaccctatccctgtcctcaggacaggaaaaatgatccagagagtcttgagcatcacattcactgaaaggtggacccatcagtggaaataaaacctgcactgaaaggcattttccccgggcctactgttgaacaaaggggaatcaacaaattggtatcacctctttatttgctgattttattacacaagacaaatagggatgtcttctttaaattgcctgacataaagttgctcgatttgattgaaatataatgatgtcctaagaaagattatgataaattggtccagaaacccatctgtaatgccaaaatatctcaccacytgaggcattttagttgtctccaggactggctccaacatca

SEQ ID NO: 166816 - DNA, 518 bp, Homo sapiens
gaatacaaacatagaaataagaaatggaggaagggtgtcaatggggtatgaaagcgtttataaaatcttatgggaagtaattagtggatgaaggaatagaaatacaggaaaccacatcttagaaaatgtccaaagaggagcacatatcagaagagccttaccttgcctttcaaataccaagaggtcatatgggacttggaaattccaggttagaatagacacaggtgtgtgtaactttttgaaaacaagrgagtggaggataatggaaagcctgtagctgcataatgttcacttctcccacatcttcctttcgtttgaacacaacttgaagccaaagaatgcctccaaacaccaacaacaaaaatatatatatatatgtaaattaactaaaaatgggcacagaaagtagaacagtggttaccagaggctgagaggaggaatgggaagttactatttaataggtacagagtttcagtatgggatgatgaaaaaatctggagatagataatggtgatggt

SEQ ID NO: 166817 - DNA, 539 bp, Homo sapiens
taaataatgaaagaggtaaccctgagctgaagtatgagtgtttatgttgaaaaggcccactgtgtactcagcaaagtgaagaaaatgcattttctgaaacatgttatgaaaattcagaatacaaatgataaagagaagatgctaaagtttttagaaagaaaacaacaaaggtaaaaagcagatcaccttataactcaataatgaaaagasaaaaagcccaacttaaaaatgaagaaaggatctgaatagacatttctccccagaagagagactaatagccaataaacatatgaaaagatgttcaatgccaatagccatcagggaaatgcaaattaaaacctcaatgagatatcacttcacactctctaagatggctatgatgaaagagatagtaagtggtggagaggatttgatatattgagaccttgttacattgctgcttggaatatagaatggccaaacaattccactcctaggtatataacccaagagaaatcaaaacaaatgtccatacaaaaacttgtgcataaatgtttatg

SEQ ID NO: 166818 - DNA, 636 bp, Homo sapiens
  misc_feature (1)...(636): n = A,T,C or G
gtattgagtggttaccactgatctatgctagtccaattcttacgatttgttatactatgtatggagttttcagccttcttcaaagaatagccttttgggtcagcaggaccatcagggacagagagcttaaagatactaacagagattctgtggcactaattcatggtagggttggatggtcagtcttctttttttttagtgtacatgatttactttcagtttattttagaaataagatattaggtatacttaggaggcaagattagtgagtttaggtttagcaaagatttcttaaatttgacagaaaaagcacaagctatagaagaanaatcaatcaattggaatttatcaaagttaaaacatttgctttttaaaagactgttaaaaaatgaaagggcaaactacagagttggagaaaatattcacaaaacacaaatttgacaatattatatatgtatatcctttgtgtgacatatgtgatatatttgtataatgrcatactactcttacaacttaataagaagacaactcaattgaaaattggacaaaaaatttgaacagatacttctctaaagaaaatatattgatgacaaatgagcacatgtaaagatattctttatcattatccatgaggaa

SEQ ID NO: 166819 - DNA, 636 bp, Homo sapiens
  misc_feature (1)...(636): n = A,T,C or G
gtattgagtggttaccactgatctatgctagtccaattcttacgatttgttatactatgtatggagttttcagccttcttcaaagaatagccttttgggtcagcaggaccatcagggacagagagcttaaagatactaacagagattctgtggcactaattcatggtagggttggatggtcagtcttctttttttttagtgtacatgatttactttcagtttattttagaaataagatattaggtatacttaggaggcaagattagtgagtttaggtttagcaaagatttcttaaatttgacagaaaaagcacaagctatagaagaanaatcaatcaattggaatttatcaaagttaaaacatttgctttttaaaagactgttaaaaaatgaaagggcaaactacagagttggagaaaatattcacaaaacacaaatttgacaatattatatatgtatatcctttgtgtgacatatgtgatatatttgtataatggcatactactcttacaacttaataagaagacaactcaattgaaaattggacaaaaaawttgaacagatacttctctaaagaaaatatattgatgacaaatgagcacatgtaaagatattctttatcattatccatgaggaa

SEQ ID NO: 166820 - DNA, 528 bp, Homo sapiens
ttgttatcctttgtcatggcacgctcgccttcataaaccttggtaggaaataaaacaaattactacaatggactccaggtctgtgacagtgctagggtcctgctaaggaagaatggtcgctcaaacatccaaggaaggaactggccaacataaractttctggtggaaactacgaatggttttggaatccatcatcatagcgagtcagtcaagacttccctttatctgttatcagtaagccaaacaagagaagtacagaaacatacctgaataagcacaccaggctggttgtcagaataggtagtgaaggtctgtgtctgcttggtaggaatggtggtattacgcttgatgaggacagtcatgactccaccagcagtttcaataccaagggaaagaggagtgacatccaagagcagcaaatcttgaacattctcagacttgtctccagacaagatggctgcctggacagctagcaaacaaaaagttaacgttaaaagaagttaaaagaaaacccagtacatagctcct

SEQ ID NO: 166821 - DNA, 572 bp, Homo sapiens
acgttttcacctgatttcggggagataaaaataaaatcatgtcattcctccaaatctgagccatcgctggggtttaggaaaatgggctgcagtccgttgatgaagtatccaagagcggtgatagcctcaactgctcataagttatcgccttaagccgaatgagaatcgaacagtctgaggctttcaggagtaactgtcccaaaataatgatgaggattaacatgggtggttagcagttatgcatattgttatgaattagaactactaatagtaggtgctgcgtgggcaagtctcttttacgctcagctgatgttcctctgattgagacatctaaccacctgatccgcaagactcctggacaagaagatgagaattgaaactccgsgttctcatcggagagaaaatcagacccgggcctggcagagctaatgatttcatagcaagaggcgttccgggtagagactatgaaagatggggaagagaggatggggttttgaggttgcaggtgaatagcgcctagaggaagataaaaacctttcttccactcaggacaggggaacagggagagaact

SEQ ID NO: 166822 - DNA, 506 bp, Homo sapiens
gctggcgggaaagacctcccttttccagggtgctgccagggcctcggctctggaacggtgtgtgtgcaggacccggggactcctgtgccctccccgccccccagaatcccccggcagggttggttgtgttggagagtgcttcgccctcctttcctttctctctgcctattgttgcttcratgatgagtcatgcaggaggtagtagtgtgttgtgtgcgcgcgcgccgccgtgtgccgccgccgcggcgggcgggggtgggggaaggggggagcggcagcgggcaaggggcgggggagctgcggggccggcggcctagtcggggcgaccggcctctcaaggtcaagagtcactggagatatgtgaggctcagatgcctgggttttgcagaagtgatgggcggggacatcgcccacactccccggctgttgccttgatggtccagagcagggtctggcagtggagagtgcccctggtgaccaagaatgtcctacgtttgggcacaggg

SEQ ID NO: 166823 - DNA, 554 bp, Homo sapiens
caacttgtcaaggatccgaatgttgagaacccagaacagattcggaacagacttttggagctcttggatgaggtaaactgtcatctttttgtcctcaggataaaggcttcagcattctgtagttacgatggatttttactacctgaaatactatgttttagaacagaatatcgacaaaaaaactgcccttttcttgggttytgagccttccctacaccagttgcttccttgggaccataaattactggcaattggagttttgaggttgaaagctttctgaatgccttggcctaaaagagagagaatgagaatgtgtatgtatgtgtttgtgtttgtgtggagagagcgtgtgtgtgtatgtgtgtgtgtgttcatgtgttcatatctttaaaaccatggaggctttgactgtgaatttgccttgttctcaaattggtggccagtgaatattgtgcgtgcctcccttttcataggatgtctgaacatcagcagaactgtgaaagggttgtctgccccggtttttggtggataggttggattagaatagattgatt

SEQ ID NO: 166824 - DNA, 532 bp, Homo sapiens
attgtacagtatttttggttttgattagtctgatgcctagtttgctggatcgttcccctctgtattggaagttaatgcccctgatgatctttatctacagaatagctttaaggtggagaggggtaactattaattaggtacatcctgtacacaaagtagaaaggggctttgccctttgccaattcacagctagaattaatgctaacttcytgagagatattaaaaaaacatatgtacataataagattatttcaatgtaagcttctagcaaaaacttgtcactgagtctacttttgtaaggaagaaactttgatttctgaaaatatgatatctcaaaatgggcttcttgccctaataaaaggtgtctgttacttctgtggggtgagactttgggggatttccacttatattttttggaattaattcaatgagtatatattgcttttgaaaaaagataaaaatataatttttaattaaaaggacaggaaaactaccttattgtacctattgtaaaaaaattaaatgtactgta

SEQ ID NO: 166825 - DNA, 532 bp, Homo sapiens
attgtacagtatttttggttttgattagtctgatgcctagtttgctggatcgttcccctctgtattggaagttaatgcccctgatgatctttatctacagaatagctttaaggtggagaggggtaactattaattaggtacatcctgtacacaaagtagaaaggggctttgccctttgccaattcacagctagaattaatgctaacttcctgagagatattaaaaaaacatatgtacataataagattatttcaatgtaagcttctagcaaaaacttgtcactgagtctacttttgtaaggaagaaactttgatttctgaaaatatgatatctcaaaatgggcttcttgccctaataaaaggtgtctgttacttctgtggggtgagactttgggggatttccacttatattttttggaattaattcaatgagtatatattgcttttgaaaaaagataaaaatataatttttaattaaaaggacaggaaaactaccttattgtacytattgtaaaaaaattaaatgtactgta

SEQ ID NO: 166826 - DNA, 545 bp, Homo sapiens
gaacgcccacttttttttttcagggcattgatgtcattgaaattggaggtttggaggcagtggaagatcaacatgggtcccagtcagtccttgagagctccagataktcctcatggattccatttatccttgcttcctctgctttgcatcatctcctcttcctgacttccctgctgacttcaggtttcagcatctgatgcaaagacaaaagcctcgctgagactgattaaccagtttccacaattcaataaggcctagaccctattataagtcccttcttatatgtgaatcactctgagcgtttgtttctctgattgaaccctgactgatgcaacctcccccacatgctttggactgaataaatcccctggttacttagacttgaacgtttgccatctggagcaattataggtccctcaagggagaaattgaacttgatacacacacacacacacacacacacacacacaattcttttagttttttgcatgaagaattttttactcgcctttgcatgacattttgacaaagctacacagttctcc

SEQ ID NO: 166827 - DNA, 551 bp, Homo sapiens
taaggtaacagccccacacaggcagatgcaagctattctttccatgcactatggaaaggcagaggcacaaactccaaaacgactctttgaaattaaagtcaacccagggcccagaatttgttgataaaactaggaaatgtggcagaaacaacctcacaagaaacctagtgtaggtgtcttcccggtaccaccccaccacttctgggactcttcacatctttcagctgagagattcccacttgggcatcctgaagtagttttctggaacaaactgctctcccctaggctaagtttattgcataattttccttgggacagtttaactccccttttgttccaaaagatcatgaaaggacattcttgatgtcacaggctgaaaagacttgtacarcactgagaagtgcaactaagaaaatgatgttgaaagagagaaaacagggactcagcaacagagggagagagaaaaatagtagaacacagaacaatgatgttcatattaagctctaatttaaaatatgagaggaaatctttccagaaaagccaccaaaggg

SEQ ID NO: 166828 - DNA, 580 bp, Homo sapiens
caaagttctcgtgccatagttttcagctatgtcaggtcatttcaggtcttctctacacggtttattctagttagccattcatytaatcttttttcaaggtttttagcttcttgcaatgggtttgaacatcctcctttagctcagagaagtttgttattactgaccttctgaagccaacttctgtcaactcgtcaaagtcattctccgtccagatttgttccattgctggcgagaagttgcaatcctttggaggagaagaggcgctctgatttttggaattttcagcttttctgctctggtttctccccatctttgtggtttttatctacctttggtctttgatgttggtgacctacagatggggtttttgtgtagatgacctttttgttgatgttgatgctactcctttctgatagttagtttttcttctaacactcaggtccctgggctgcaggtctgttggagtttgctggaggtccactccagaccctgtttgcctgggtaccaccagtggaagctgcagaacagcaaatactgcagaaaaggaaatattgctgcctgatccttcctctggaagctt

SEQ ID NO: 166829 - DNA, 580 bp, Homo sapiens
caaagttctcgtgccatagttttcagctatgtcaggtcatttcaggtcttctctacacggtttattctagttagccattcatctaatcttttttcaaggtttttagcttcttgcaatgggtttgaacatcctcctttagctcagagaagtttgttattactgaccttctgaagccaacttctgtcaactcgtcaaagtcattctccgtccagatttgttccattgctggcgagaagttgcaatcctttggaggagaagaggcgctctgatttttggaattttcagcttttctgctctggtttctccccatctttgtggtttttatctacctttggtctttgatgttggtgacctacagatggggtttttgtgtagatgacctttttgttgatgttgatgctaytcctttctgatagttagtttttcttctaacactcaggtccctgggctgcaggtctgttggagtttgctggaggtccactccagaccctgtttgcctgggtaccaccagtggaagctgcagaacagcaaatactgcagaaaaggaaatattgctgcctgatccttcctctggaagctt

SEQ ID NO: 166830 - DNA, 518 bp, Homo sapiens
aattacaataaaggaattcctcattctagtattaaagaacctctctactatctgttatcatgaaaaccctctttaatgaggctcatgttatcatgtgtgcttcagaaagaagaaacaatcctttgtttaagtaatccacatggtcattccacactctatatgctgcattgcaggaaaaataatgaagtcatttcaggtatattcctcaaatgacccagcttctctttaacacggtatgcacctggaagattttatttcaagttcatgggagcatatmatcctgtctttgtccttcccacttggccacccactttgccaggatcagcagccacttactaaaggagaggccctgtctgctcagaggttttacccactttccacagaccttctttaaattcacccaatgtgacacgtttgggagccaacacttttgagatgcacagcacttcaattgtccccctagaggagaaagagccagcacattcccaagttctttctccttgtcaggaaacagacct

SEQ ID NO: 166831 - DNA, 444 bp, Homo sapiens
gaattctaatggaaatctgtgttcaagaagatcacactatgtaacaaacagcaaacaataaaggttttataatcttcaaaacctagaacatgctcttcttcaaaagtatatagattatcaatcacaaagcttgataatacatcatctccagaaattctgtggcatttgttctctttattattggcatttatttcactagaaattaagtcatgagtgttttcaaactattcttttgtaaatactattactcgtgcttatttgaaaaatctggtggttccaagatggctgaataggaacagctccagtctatagctcccagcgtgagtgatgcagaagaygggtgatttctgcattgccaactgaggtaccgggttcatctcactggggcttgttggatagtggatgcagcccatggactgtaagctgaagcagggcagggcatca

SEQ ID NO: 166832 - DNA, 642 bp, Homo sapiens
tttgtatggcacatatgtcaacagtttctctaatcctgctgtgaatgtaaattggtcaattaacctgtcaatatatcrgtagccttgtaggttgcttcaagacaagctttgggtgttggggtcaaattaatatttctgtaaaacagcctcatttttgtaatgaaaattcactaagtcttatatatcttcaggatgaacataatggacaactgttagcttcttttgctaagtacctctgccggcaagaaccttggcacataggaataggatcaccaaacttctatgtttcatcaagttagatgctgaacataaaccaaaggatatataaacctcatttccttccctcattttctccctctcttccaccctatttttagtcaggcttaatgatcatcatcatcatcatgataattataacaataacgtctaatattttgtgggttcttactctgtgttagattcaacactttgggttagatactatttttatttccattttacagatgaggaaattgaggcacagagattaggtactttgtcaaaatcatatatatagtgaggtcatattctaatctaggtagtctggctcctaaactgagttcctaacctctctgcaaaatcattatcttgtcatgtatatca

SEQ ID NO: 166833 - DNA, 575 bp, Homo sapiens
gaagaaataaaatgtccaaaactaaattgttgattttgccacactcctgcttctcctgtggtctgggccatctaagctgatgacttttttctttgaccatctacatgcaatctgttaccaaattctgctgcctccatgcttcaaactgttcccagaatttatccttttctatctccaccactatctatttgtactaacatattttgactgacttaaattagtcaatttaagtcatttaaatttaaggtgtgttctgtgctcccacttttggcatcccatgctttattctccacccagtaccagaatcatgcttttataatgtaagttgtatcatrtcattcctttgctcaaaaccttctaatggcttcagacctaatttaggataaaatccaacatttgtggccagagtttatatggtcttgtccctggctactctctaaattagccagattcccactgcaatactgcataacaaacaatcccccaaatctctatagctcaacatcacacatttgttttttcattcacaggtttgcaggtcagccaaggaagctctgctccctgctgtagtgtgg

SEQ ID NO: 166834 - DNA, 459 bp, Homo sapiens
atcacacatttgttttttcattcacaggtttgcaggtcagccaaggaagctctgctscctgctgtagtgtggcttcgtctccattctacatccctcattctgggactgttgtctccctagaaaaaaaataattttttttaatagcgagggcagtaggggcaaagccaaatcatgaaagccctttatggcttctgcttgaggcatgctggctaacactcttatgacctcttatcgttttccacctcttaattgtcctagctaattgttttaattaatgtaggtatatagtaggccttgaaatcaggcagtgtgatttctcccactttattcttcattttcaatattcttagcctattcttatttgtcttttcatagaaacattaaggtaaatttttcatagaaattgcattgaacctatagatcagttaaaggagaactgacatctttgttatgtgttaa

SEQ ID NO: 166835 - DNA, 602 bp, Homo sapiens
ctttgttatgtgttaatgtattgtgtactaaaacatctaatccatgatgaagatcttcctttcattagtgttttatggttttcagcatatagatcctaatgttttgtgagatttataagtgttttctttggaatcactgcattgttttcagttttatttcaagtgtttggaagcttgtttcttaaacctttgttayatactttaggctttattcatttttagttctgtttatttatttttttaataatgtgatcaaataataaggtctgtgtaatttttactcttttgaatttagttaggtaatttttttggccaactacctgatagttataaatatgctatggcagcaaagaaggataatgtttacaggataaaaatattgaatctgataatttttaattcaacattatcacttatactattaagatactttagatttatagatattgttctacctagtttttgcccaatctatcaaacaataagcattataggttcaagcacctaattaaagttagttttgttttctactgttattgggaatttagaatcggaattgctaacaaaatgccacttttgttcagatgtcttcaaaagtttaa

SEQ ID NO: 166836 - DNA, 636 bp, Homo sapiens
gcaggctgggccttatctctggctcctataggcacaactgagtcttttgcatgtttataaggacagcctcaggtatctgaggccctctttttcctagtcaagggctcctccacccacttgaaaggtattttagacatctgaggcaaatgtgcagttgtttaattccacaactgatcagagaatgtcaggcagtgtaaacatattttgaaaatgtttattttatttctttaaacacatatatatttgcacttgtagaaaaatgttaatagaagtcaaataagttttttaatgagttttaataatgtaaatacacctacctatacgcaaaaactgcacacacacagagatttaccagaaagagggcccattttatttgctaaatgggcatgtgctcaaagacctgtgaagtcatttcccttttctggattaatttgggggctagaaagggtgagatccagtggggtcatgccaccyatgaaatccttgcctaatggtaagagaatttcctcagtttctttttctaaccaggaactttccaagcaggtgatatgccaaccaagtttctcttttccacttggattgctcatatacttcattcaacagtctctagaatcatcttgatcatcatttgaatca

SEQ ID NO: 166837 - DNA, 605 bp, Homo sapiens
gtgttagtatgttttgaaacaaatacatacacagttggaaggtatatatttttgtctacttttttagtggacaatttggtagcttctttcaagttttgaaatgaataacccctttgccctagaaatttcatctctaaccatctattctacagaagtatttctctatctgcaaaacaattagcaagaatgcttatgtggcattatttataacagtcaaaaatagaaaataatccaatcctataggaatgaattaggttaattatgaacaaccatgctctggttaaaaaattaagtagttataagtatttgcagacatagaaatattatcaagtcatatttttgaataaagaagttacaaaggttggctataattctatttattgtaagtgattctgaaaagatgtatatattcacatatacacaatacaaaattgtatgcaattayagaattgggactggaaggatataagccaaaatgctaataattattatccttgggaggagattttatctggcagaatattttgcttttaatttctacttatattattttacaataagaatatatttatgcattatgcacattactcatataacatttaaaa

SEQ ID NO: 166838 - DNA, 605 bp, Homo sapiens
gtgttagtatgttttgaaacaaatacatacacagttggaaggtatatatttttgtctacttttttagtggacaatttggtagcttctttcaagttttgaaatgaataacccctttgccctagaaatttcatctctaaccatctattctacagaagtatttctctatctgcaaaacaattagcaagaatgcttatgtggcattatttataacagtcaaaaatagaaaataatccaatcctataggaatgaattaggttaattatgaacaaccatgctctggttaaaaaattaagtagttataagtatttgcagacatagaaatattatcaagtcatatttttgaataaagaagttacaaaggttggctataattctatttattgtaagtgattctgaaaagatgtatatattcacatatacacaatacaaaattgtatgcaattacagaattgggactggaaggatataagccaaaatgctaataattattatccttgggaggagattttatctggcagaatattttgcttttaatttctacttatattattttacartaagaatatatttatgcattatgcacattactcatataacatttaaaa

SEQ ID NO: 166839 - DNA, 535 bp, Homo sapiens
tggccattcacagtgtgctatttctgaatgacagtcttatccacggagtcatggttgtcaaaggttacaaaggcaaagccccttttcttgccactgccttggtcagtcatgatttcaatcacttcaattttcccatactgttcaaaataatctcttaggtgatgttcttcagtgtcttctttaatgccaccaacaaatatctttttcacagttaagtaggcacctggtctttgagaatcttctcttgagacagctctctttggttttacaactctcatccactttatgtagccttgcatccatggctgcatccacctcctccatgtgacaaacccaaagcccctggagcacttggtgttttggtctctcattaccacacagtccatgagcattccccattkttctgaatggctgctcagactctcatcggttgtttgaaagctctctgcacctgttcaggctctttgggagatgctgacttagacatcatggcagtgggaagagagactttaatgattctcccttggcagcatcc

SEQ ID NO: 166840 - DNA, 554 bp, Homo sapiens
caacttttgctccaggaactacaatagaaacatctcaggaaagctgagagaatccacagaccctttgaaggaggtagattgctgctgcaggctccatgggacagccaaggaactgtgagtctgtttgctttcttagctaggaggcttgtagcctaggataaattctcacccctgctcactggctacctggaaataaactcagtgctgttgttgggggcactgtggaagtgaaaccagccttttcggctgtggrctgcatgggagctgggtgaggcctgtggctgccagatttcctctacttccctggtaacctatgtgacacagcagaggcagccataatcccccctgggaacgtaactccattggcttgggaactacgccaccatctcccacagacacagtaactgcagcaagccctgcccaaggagagtctgagctcagacacacctaactctgctcccacctgatggtctttctctacttgccctggtagctgaagacaaaggacacaatctatcaaaacttatgaggtagagcaaagacagtgctaagag

SEQ ID NO: 166841 - DNA, 569 bp, Homo sapiens
gtgtacgcatagtgtattaagaaattcagggtggtgattggctcttccactcaccccaggacagataaactaaatatagaaaaatcttcacatggcaactaaaggatgcacacgcccatttccttcatatgaaaaacaaatttaaataacaacaataaaaataaaacaacaatggtcaaaaacctggaaacagatggtggagccatcacctcagtgatattatgatagcccacagcaaggaaaacataaagtttaggagctaagartaaccttagataactactaactcaactacgttcactttatagttgaaggaaatactggcaaaattccaagtggctttgcctggttccagagtgagatagaatgagttagtgtgagaaccaaagtgtctcctctgcttgttctagtttgagcagtttttatttatttatttatttttgacagggtcttgctctgtcagccaggctggaatgtagtggtgcaatcttgactcactatagcctcggctccagcagttcttctgcctcagcctcccgagtagctgggaccacaggtttgcaccacca

SEQ ID NO: 166842 - DNA, 434 bp, Homo sapiens
ttagaagtacagtttcacagtatgacacaaaatttggctatcactctcctagaaagttatcctaagaatatttaagagaagtttgcaagaattcagaacatttggatctaagaaaataataagatgcatagattacatrtttcataacaaatcccagcagtctggtcagtaactcacaattaaatatcttaatatttctctaacaaatatataaagtgtaaaactgagcaggataaataaagactataaacagcctcctatgagttctagacaggtggtgacacaaaatgaattttcaccaaacactggaaaatatatgtggtttacatacctttttaattgtcagaatgatagaaaagagaatgcagacctctgcatcaagagatgttcaggagagcatcatttattattcaattaaatgtatattaataatg

SEQ ID NO: 166843 - DNA, 563 bp, Homo sapiens
gtggtgacacaaaatgaattttcaccaaacactggaaaatatatgtggtttacatacctttttaattgtcagaatgatagaaaagagaatgcagacctctgcatcaagagatgttcakgagagcatcatttattattcaattaaatgtatattaataatggattagctaggagtagtggctcatgcctgtaaacctagcactttgggaggctgaggcaggagaatagattgagtccaggagtttgagacaagcctgggcatcatggcaaaaccttgtctccacagaaaaatacaaaaattagctgaatgtggtgacacacacttgtagtcccagctacttgagaggctgaggtgggaggatcacttgagcctgggaggtggaggttgcagtgagccaagattgtgccactgcactccagcctgggtggcagagtgagactttgtttctaaaaataataataataatggattagtttaaaagaaactatggtaatagtaatacaattgaataatattcataaattgaaaggatatcaattagtattcatttaaatagaatgaac

SEQ ID NO: 166844 - DNA, 536 bp, Homo sapiens
aacactggaaaatatatgtggtttacatacctttttaattgtcagaatgatagaaaagagaatgcagacctctgcatcaagagatgttcaggagagcatcatttattattcaattaaatgtatattaataatggattagctaggagtagtggctcatgcctgtaaacctagcactttgggaggctgaggcaggagaayagattgagtccaggagtttgagacaagcctgggcatcatggcaaaaccttgtctccacagaaaaatacaaaaattagctgaatgtggtgacacacacttgtagtcccagctacttgagaggctgaggtgggaggatcacttgagcctgggaggtggaggttgcagtgagccaagattgtgccactgcactccagcctgggtggcagagtgagactttgtttctaaaaataataataataatggattagtttaaaagaaactatggtaatagtaatacaattgaataatattcataaattgaaaggatatcaattagtattcatttaaatagaatgaac

SEQ ID NO: 166845 - DNA, 628 bp, Homo sapiens
agtcaatgacaataagacttgaaatacatgagtcctgattctgggacctgtggttagtatcatagtcatagctacaacatgaagtgcccacatttaaggaacagtagcaggggcgaggctgagtgttccaacactgcggacagaccaggctattagcagtagaggagctcagaatgaaaagcaagatgtgtaaggaatgctctgatttcaakatttcattccatgcatttgctcctccttctattccttgttccctctttcatgacacctagatctcctttggtatttaaaacaataaatttagtatcacttcccttctttttaaaaatcctatcctcaagcaaaatctgtcagataaaaatattctttatttacaaggatccaaattcttacttgtgctaagttctcccactatcactgggaatgagtcatgaggtcctgtttcatcttctcttctctcggcaacacctggcatcaactgtaggtcattttcagagcctcctcagccctggactgctaacatcattttggcaatcaaacaacttttattatgttgtagctctatttagatatcataggcctttaatttttcttccttggcattggccattgctccagtaaaattcca

SEQ ID NO: 166846 - DNA, 628 bp, Homo sapiens
agtcaatgacaataagacttgaaatacatgagtcctgattctgggacctgtggttagtatcatagtcatagctacaacatgaagtgcccacatttaaggaacagtagcaggggcgaggctgagtgttccaacactgcggacagaccaggctattagcagtagaggagctcagaatgaaaagcaagatgtgtaaggaatgctctgatttcaatatttcattccrtgcatttgctcctccttctattccttgttccctctttcatgacacctagatctcctttggtatttaaaacaataaatttagtatcacttcccttctttttaaaaatcctatcctcaagcaaaatctgtcagataaaaatattctttatttacaaggatccaaattcttacttgtgctaagttctcccactatcactgggaatgagtcatgaggtcctgtttcatcttctcttctctcggcaacacctggcatcaactgtaggtcattttcagagcctcctcagccctggactgctaacatcattttggcaatcaaacaacttttattatgttgtagctctatttagatatcataggcctttaatttttcttccttggcattggccattgctccagtaaaattcca

SEQ ID NO: 166847 - DNA, 628 bp, Homo sapiens
agtcaatgacaataagacttgaaatacatgagtcctgattctgggacctgtggttagtatcatagtcatagctacaacatgaagtgcccacatttaaggaacagtagcaggggcgaggctgagtgttccaacactgcggacagaccaggctattagcagtagaggagctcagaatgaaaagcaagatgtgtaaggaatgctctgatttcaatatttcattccatgcatttkctcctccttctattccttgttccctctttcatgacacctagatctcctttggtatttaaaacaataaatttagtatcacttcccttctttttaaaaatcctatcctcaagcaaaatctgtcagataaaaatattctttatttacaaggatccaaattcttacttgtgctaagttctcccactatcactgggaatgagtcatgaggtcctgtttcatcttctcttctctcggcaacacctggcatcaactgtaggtcattttcagagcctcctcagccctggactgctaacatcattttggcaatcaaacaacttttattatgttgtagctctatttagatatcataggcctttaatttttcttccttggcattggccattgctccagtaaaattcca

SEQ ID NO: 166848 - DNA, 628 bp, Homo sapiens
agtcaatgacaataagacttgaaatacatgagtcctgattctgggacctgtggttagtatcatagtcatagctacaacatgaagtgcccacatttaaggaacagtagcaggggcgaggctgagtgttccaacactgcggacagaccaggctattagcagtagaggagctcagaatgaaaagcaagatgtgtaaggaatgctctgatttcaatatttcattccatgcatttgctcctccttctattccttgttccctctttcatgacacctagatctcctttggtatttaaaacaataaatttagtatcacttcccttctttttaaaaatcctatcctcaagcaaaatctgtcagataaaaatattctttatttacaaggatccaaattcttacttgtgctaagttctcccactatcactgggaatgagtcatgaggtcctgtttcatcttctyttctctcggcaacacctggcatcaactgtaggtcattttcagagcctcctcagccctggactgctaacatcattttggcaatcaaacaacttttattatgttgtagctctatttagatatcataggcctttaatttttcttccttggcattggccattgctccagtaaaattcca

SEQ ID NO: 166849 - DNA, 579 bp, Homo sapiens
ttgggttgcatcagaatcaccaggagagactgttaaaacacagattgctgggcctcacccccagagtttctgttttagtaggtctggagtatgcctgaggatttgtatctcaaaaaagttcccaggagaccctgatgctaccagtctggtagccacatttgacgaaccactgatttacgatacttgacctgcccccaccttatgaccacaatcttccttttcagagctttactcctaacattcttcctaatccaagaactagccatgcatgcctcattccaaagcctagctgtcactctgttctgatggctgactgacaacatgttgtctccaacagtrctagctaatgaaaggccaacaaccttagactccaccttaactgggccctgatcccggggaagccagagcccatgggtccatttggaagtggtcacactaagtcctatgcctgttgtgcaggtgccctcaaatgtaaacagccttcacatgcctgggaactgactaagggagcaaaccctttctgccttctttctgcctaggtctctggtaccttattccaacctagagggtctccaatat

SEQ ID NO: 166850 - DNA, 398 bp, Homo sapiens
agcagaagatacagagagttccaacatactccttccctaatcccccatacacacagcctcctccaccaacatctcccacagcggtatatttggtacaagaggtaaaccaacatttaatgcataatcaacaaaacctatagtttacctcaaggttcagtctttgtgttgtatattctatgggttttgataaatgtataatgacaagtattcacaattatagtatcatacaaaatagtttcactgccctaaaaatcttctgtgctctacctatttatccctttcycccagccaattcctgaaaaccacagaagattatgtttttatactgtaaatcctaatgggagaacttcttataacctgccagtactcagcatgaccataattttgaaccagaagcc

SEQ ID NO: 166851 - DNA, 584 bp, Homo sapiens
aagatagggagtccaggtttgaacatgatcagattaaggtatctgtaaaatattcaaatgaaattacctcacagacaactggaaacaggtatatagagctcaagagagtaggtttggtctaaaaatagacagtcagcattagcagcctctataagataacagaacaatgaagagacctggaaagaagcagcaatatgagaagaggttgagtgagtgagtcacagtaggttggctgacgtctctgtgctctgaggtattgccctgctatttaacaaaaccratagtaaatctcttatggatgatgacagttttcagaaattctttttatagatggaactttcttggaactcctcagaaaacaccatgtgggcagccatatggtgaactagtccatctctcttagttccagctgctgtaacaaagtacagatggtccccgacttatgatggttggacttagaattttttgactttgcataaccctactgtaaggtaggagcatctgtaccacagactgagtggcttacaaacaacagaagtttatttttcacagttctggaagctagaagttcaagagccgggtac

SEQ ID NO: 166852 - DNA, 426 bp, Homo sapiens
aggctcacttgagcccaggagggcaaggctgcagtgagctgtgatcacaccattacactccagcctgagcgatacagcgagaccttgtctcwaaaacaaagaaaaaaaatgaatctgtaagttaaaacttttccataaaaaaaataggctgagatgacctcccaattaattattccaaaaagaaaattttgttttttaaaaatgccaattttatagaaactcttccagagaatataagaaggatcacctccaagctcattttataaagccagaaaaccttgatactaaagcttgagaagcaaattacaagaaaagaaaagtacaagtcaatttcaatcatgaatataaaggcaaaacatcctaaacctaataacagcaactctaaacagtgataacaatgataatacattacaaccacattgggct

SEQ ID NO: 166853 - DNA, 420 bp, Homo sapiens
tgagcccaggagggcaaggctgcagtgagctgtgatcacaccattacactccagcctgagcgatacagcgagaccttgtctctaaaacaaagaaaaaaaatgaatctgtaagttaaaacttttccataaaaaaaataggctgagatgacctcccaattaattattccaaaaagaaaattttgttttttaaaaatgccaattttatagaaactcttccagagamtataagaaggatcacctccaagctcattttataaagccagaaaaccttgatactaaagcttgagaagcaaattacaagaaaagaaaagtacaagtcaatttcaatcatgaatataaaggcaaaacatcctaaacctaataacagcaactctaaacagtgataacaatgataatacattacaaccacattgggcttac

SEQ ID NO: 166854 - DNA, 488 bp, Homo sapiens
gaattctcagctgaaggaatccttctgccttagcctcctgagtagctgggactacaggcttatatataccaccatcccttagctaatttttttgtttgtttgtttatagagaaagagtcttgctatgttgcccacgctgatctcaaattctcggcctcaagcgaccctcctatcttggcctccaaaagtgctgggattacaggcacgagccaccccacccatcctcctctcctcttctttcttttctctcattagcaccacagtgtacrtagcttcatttcagaatctgcttcaggagaggaaaagcaatcagggttggctgacagaattgagcaattatttcccttgaacctacatttggtgttaacattcacatcccatctacctgaaatagagccctaccattaccctcaattatgtatgctgatagtctaggtactatacagggagatgcaatctttgccttctggccaaacccagtgagtgtt

SEQ ID NO: 166855 - DNA, 582 bp, Homo sapiens
aattgatgggaggagctggccagaggcatccaaaagaacagaaagcttaaggaaaaaagctcctttttgggtggtggtgcaaagcagtcaacgccgcccaatgccttgactcaaacatatttcaccttggccaggtgcagtggtacatgcctgtaatcccagcactttgggaggyaaagactggaggatcacttgaggccaggagtttgagactagcctaggcaacatagcaagacccttatcgctacaaaaaaattaaaacttagccaggagtggcagtatgtgcctgtagtctcagctacacagtaggctgaagcaggaggatggtttgagcccaggagatcaaggttacagtgagctatgattgtaccactgcgctccagcttgggcaacagagcaagaccctgtctctaaaaaaaataaaaaatataaaagcacttcaccttcatgcaatcagggagctaaattaccttcaatatgagcatcttcacctttgaaaactcttcatgcttcaaagacttggtttttgtaagtataaggttattcaataccaattctagtgaatgagatgggtgaccaaat

SEQ ID NO: 166856 - DNA, 582 bp, Homo sapiens
aattgatgggaggagctggccagaggcatccaaaagaacagaaagcttaaggaaaaaagctcctttttgggtggtggtgcaaagcagtcaacgccgcccaatgccttgactcaaacatatttcaccttggccaggtgcagtggtacatgcctgtaatcccagcactttgggaggcaaagactggaggatcacttgaggccaggagtttgagactagcctaggcaacatagcaagacccttatckctacaaaaaaattaaaacttagccaggagtggcagtatgtgcctgtagtctcagctacacagtaggctgaagcaggaggatggtttgagcccaggagatcaaggttacagtgagctatgattgtaccactgcgctccagcttgggcaacagagcaagaccctgtctctaaaaaaaataaaaaatataaaagcacttcaccttcatgcaatcagggagctaaattaccttcaatatgagcatcttcacctttgaaaactcttcatgcttcaaagacttggtttttgtaagtataaggttattcaataccaattctagtgaatgagatgggtgaccaaat

SEQ ID NO: 166857 - DNA, 617 bp, Homo sapiens
gaattctaccttaattgatactagatatttttctcatcctataagtattcttaaaaattgctcttaacatggttgcattacgtgggaagagtctgatccttttaggtcttatttgtaagtcttgtttgtgaggacaagacctgcatttaatctggggttaatattttcccactactgagacaagattcttcttagatttctatctgatgcctccttaaatatcattttccactctacctgttggaaacaggcacttttgccatccaatataaaccctagacactatttccccgaattacttttcagtggttctctccctgtctcagtaggtctcctcccaagtgtgcactgatccctactcaatggaaacctctgagcgtctcaggcatctaygctttcctctcctgtctcttatattctgccctgtgaactccagccacattggtttctccaggtttgggaacataatcttggagacagccagccttccctggcttccccattcctgcactgagacctgaaagtttttctcaaactgtaaggttctggcaatcatagtgctcacctctttttttcccatccctcagggatcactgtcctttgttgcctggagtcca

SEQ ID NO: 166858 - DNA, 546 bp, Homo sapiens
aactaatattcactgagcgctcatcatgtgccattctgtcttctaaaagctctatttcttgtgacaaccttatgaaatatgtgcttatatgatccttatttttcaggtaggcaatgaaagcaaaaagaaattcatttacttgcatagattgtataggaattacatagattgtttagaaaggatgtgacagagaacatatttgaaggcaagcattctggctccagaaactttgcttttgattgctatccaaggttggagccctaataaaggatgggagaagtagacaatgcagtctactttcatatacccagtgctttagtaaaamtggattagaagttcttcctgtacacattttgtaatttctcaactctataccttgagtcatacatttctctttgctcaaaatgcctttccttccaaatactttatatgcttctctttatataccctcctcccaattaaaaaaatagccagtattagaagcttttctaagatacttagtaggaattaattgctcctttctctgaactcctgaggcattttgtt

SEQ ID NO: 166859 - DNA, 546 bp, Homo sapiens
aactaatattcactgagcgctcatcatgtgccattctgtcttctaaaagctctatttcttgtgacaaccttatgaaatatgtgcttatatgatccttatttttcaggtaggcaatgaaagcaaaaagaaattcatttacttgcatagattgtataggaattacatagattgtttagaaaggatgtgacagagaacatatttgaaggcaagcattctggctccagaaactttgcttttgattgctatccaaggttggagccctaataaaggatgggagaagtagacaatgcagtctactttcatatacccagtgctttagtaaaactggattagaagttcttcctgtacacattttgtaatttctcaactctataccttgagtcatacatttctctttgctcaaaatgcctttccttccaaatacyttatatgcttctctttatataccctcctcccaattaaaaaaatagccagtattagaagcttttctaagatacttagtaggaattaattgctcctttctctgaactcctgaggcattttgtt

SEQ ID NO: 166860 - DNA, 421 bp, Homo sapiens
aggtgagatgagtttctggtagacagaatacagttaggtcatttttaaaaatttatttagccattctgtttcttctaagggggaagagagtaagttmgctgacagtgtttttttgttttgttttgttttgtttttccttcagcactttgaatgtatcatctcattctttcctggcatctaaagtgtctgctgagaaattcgctgttactgataaggattcctttataggtgacagatactttttgattactgttttcagaattttctatttgtcattgacttttgacagttcaactgtaatgtgccatggagaagacctttctacattgtatctatttggaaatcttgtatatggatgtctaaatctcttgctagacttgggacttttttagctattatttgttacatagttttctaaccc

SEQ ID NO: 166861 - DNA, 421 bp, Homo sapiens
aggtgagatgagtttctggtagacagaatacagttaggtcatttttaaaaatttatttagccattctgtttcttctaagggggaagagagtaagttcgctgacagtgtttttttgttttgttttgttttgtttttccttcagcactttkaatgtatcatctcattctttcctggcatctaaagtgtctgctgagaaattcgctgttactgataaggattcctttataggtgacagatactttttgattactgttttcagaattttctatttgtcattgacttttgacagttcaactgtaatgtgccatggagaagacctttctacattgtatctatttggaaatcttgtatatggatgtctaaatctcttgctagacttgggacttttttagctattatttgttacatagttttctaaccc

SEQ ID NO: 166862 - DNA, 561 bp, Homo sapiens
gtgtgtgtgtgtgtgtgtgtgtgtgtktaccctcatgcacatatacatgtatggattcaccttcagctcgtgtgtgtgtgtgtgtatgcgccctcatccacatacacatgcaacgaatgctacaggcatcatgaagcacttctagtactccaaatacaaggaacttcaaaaaggttatagaataatagaattagaagataaaaattaaaactataagctttatttctcaacataagttccatcaagtttaagacacttttataagcgatatcagccatttagtccatccctgaagaactgaaggtcctgagaatttagccatggcaatgaagactttttacattataaactgaagaaaaattggttccctttaaagttttttttaagattaggaaacaaaataagtaagaaagcatcaaataaaaactgtaaggtggataccttatgattttccatcaaaattcttgcaaaatttcctttgtttgatgagaggaaggagcaggagtattgtcgcggtagagaaagactccagtgaagctttcctgggggtttttctgctga

SEQ ID NO: 166863 - DNA, 606 bp, Homo sapiens
atgttctcacttataacagagagctaaacattcagcactcatggacataaacatgggaacaatagacactgtggactacaggaaagtggaggaagaagtgggagatgggttgaaaaactacctacttggtactttgctcactacctgaggtcgatatacccatgtaactaacctgcacatgtaccacctatatctaaaataaaagttgaaaaaaaaccacagctatgcacagagttsaaaaaaaattttgtgtcaaaattaacttgtactaacttataacactgaacagaatctagtttgaggtactaagaaagataagacatgagtttgaaaagagctcctatcagaacagcatgacttcttcgaaaattgaagaaagaacaaacaccagacttattgtgaagcttgggtggaagaaagaatggtaaaatcattgatcctttatgaaaagtttatggggataataccccaaagaaatcagcagtttataaatggataactcattttaaaaagggatgagatgatgttgaagatgaagctcacaatgtcagaccatccacataaagtttccaggaaaaaattaatcttgtttgtgccctaattgaa

SEQ ID NO: 166864 - DNA, 575 bp, Homo sapiens
aagattgatcaccttatatttattccttcattacaatgaggacctccagagttttacagcctaagaaacgtgttttaagaggcaacttctccaagaacacttctctaaagaagactttttgtttgctctcttagactggttcaggtgtgactttactatgactttctaaacttctgctgaattctgctcttttcaccwctgtacaggaaagggcaggccttgttgactataggattgctatgaaactttcttaaaagttacccagaggtggtgtctgtctttcagaatgtggaagatagtatcactttaatttggccatctctgaagatggaaatagggaagggagttggtattataaggaggaattttgatgttattttttctaccacttgcatatgattaatggccaattacaggtattccaagttagtcataggatccagttattctcataaaattcaaatggtcacctagaagtcaagtttttttttcccataaaatattgggaaagatttatttgtttcattgcttttgttttgttttgttttgtttttggagacagtgtcttgctctgt

SEQ ID NO: 166865 - DNA, 624 bp, Homo sapiens
atgtaccactctgttgggggatattgacaatgggggcggctctgtgcacacatggagggagaaaggatatatgggatatttctgtacctttctctcaattttactgtgaatgtgaaactgctaaaaaaagaattcttaaaaaaatttcaaaacttatttacccccaaacatagcaagtaatgacaatatatatttatcactttctaagagttaggaatctgacaatgacttagatgggtgattctggctcaggatcccttatgaggctgcattcaagctgctggctggggctgcagtcttctgagggcttgtctggggtaggaggacccatgtgtaaggtggctgtgaagaagaagccccagttttttgccacatgagcctctcactaggttacttatgacatggcagctagttttccccagaccatgtgctacaagagagaaagagagtaagcaagctggaagctgtcctgtgttttacaatctgattktggaagtggtatttcatcacttctgctgtattctgttggtcagtgtgggaaaggactgtatagaggtatgaataataggaggctatctgtgagccttcctggaagttggctatcacactttctacaattttaat

SEQ ID NO: 166866 - DNA, 529 bp, Homo sapiens
aggccatgttattgtaagggtcatctacatgtgtgaggctaaatgttacctcttgaggagatttgctggatatgacttggggctatactcctaagtcttaatgcctgctgtcattgggcctacagaaaccatcaagaactttcattggaaaagactacagcaggctggctggcattttacctttgttgatatgtacccacagtccttctcattagccatttkgccagataatacccaaactcagagttaatacaatgtcggtgcatttattttttgttatactttaagttctggggtacatgtgcagaatgtgcagttttgttacataggtatacacttgccatggtggtttgctgcaaccatcaacccatcatctacattaggtatttctcctaatattctccctcctctagccccccatcccctgacaggtcccagtgtgtgatgttcccctccctacgtccatgtgttctcattgttcaactcccacttacgagtgagaacatgcagtgtttggttttctgttctt

SEQ ID NO: 166867 - DNA, 529 bp, Homo sapiens
aggccatgttattgtaagggtcatctacatgtgtgaggctaaatgttacctcttgaggagatttgctggatatgacttggggctatactcctaagtcttaatgcctgctgtcattgggcctacagaaaccatcaagaactttcattggaaaagactacagcaggctggctggcattttacctttgttgatatgtacccacagtccttctcattagccattttgccagataatacccaaactcagagttaatacaatgtcggtgcatttattttttgttatactttaagttctggggtacatgtgcagaatgtgcagttttgttacataggtatacacttgccatggtggtttgctgcaaccatcaacccatcatctacattaggtatttctcctaatattctccctcctctagccccccatcccctgacargtcccagtgtgtgatgttcccctccctacgtccatgtgttctcattgttcaactcccacttacgagtgagaacatgcagtgtttggttttctgttctt

SEQ ID NO: 166868 - DNA, 513 bp, Homo sapiens
tccacaactatttggattttctttccttttcttaaatagagatagrgctttaagattttttcatggaggtgttgcatatttttggttatgttgattcctaggtacctcagagcaggatcagcacactttttctgtaaaggaccagataacaaatatttgaggctttgtgggccatacagtttctgttaaaactactcaattcacttactgttgcatgaaagctgccacagacaatgtgtaacaggtgtgtctgggctccaataaaaccttacttacaaaaacaagtggttggcagaatttggctgattggccatagtttatcaaccccagctttacaggggttttggtttgtttgttggtttattgtgctgtcttgttgttgttgttgttgttgttgttttaattttcatttttaggttttgttttactattataactggtatctcttttacaaaaattatttataggcagttgttgctagtgtagagaaattaatactattgattttgtaag

SEQ ID NO: 166869 - DNA, 513 bp, Homo sapiens
tccacaactatttggattttctttccttttcttaaatagagatagagctttaagattttttcatggaggtgttgcatatttttggttatgttgattcctaggtacctcagagcaggatcagcacactttttctgtaaaggaccagataacaaatatttgaggctttgtgggccatacagtttctgttaaaactactcaattcacttactgttgcatgaaagctgccacagacaatgtgtaacaggtgtgtctgggctccaataaaaccttacttacaaaaacaagtggttggcagaatttggctgattggccatagtttatcaaccccagctttacaggggttttggtttgtttgttggtttattgtgctgtcttgttgttgttgttgttgttgttgttttaattttcatttttaggttttgttttactattataactggtatctcttttacaaaaattatttataggcagttgttgctagtgtagagaaaktaatactattgattttgtaag

SEQ ID NO: 166870 - DNA, 612 bp, Homo sapiens
tctttctccagtgtagtgaaaatttaaggagaagaaacttattaataaaattagtgaggagtggtgtgttcttaatgcatatttacactaagtaaattggcatctaaaagtgtcatgggagattggcctacaattagaacaaataagcagttctttgtcattcaactgaaacattatttagaggtgaacattttcagtcaaagttatttttgcctgcttattctttgtaattttccagaaactaatgttctctaaatgaaaaacaacagaaaaaaaaatccgatggcatattcttttcttagctgtttttttgagtctgtgctggattcatgtgtatttatatttggtctgtgcatttttcttgcagagcaccattttgcttggttgaactttgttttataagtgtacaaaggcttaaatcatcctgtgggcatctctgcatgtgtcacattcaccaggcaacttgtctaactctgtgaatatgtttcttttgaaggacttggctgattcattgtttgaagaaaagmaaataaacaacttaaatactgaaaaatgtatgagttaatatctctgacctgggctgagccaaaggcagaattataaagtataagc

SEQ ID NO: 166871 - DNA, 441 bp, Homo sapiens
ttcaaaatgatctaagtaaaataaagctctcataatacgtgaagaaacttcccaggtgattctaattacaatcaaatttgagaatcactttttaaatcctttgaaatctttgtttctagaacatgagaccaagtagcagtctttgattttgaccggaggtctcccctcctgttgaggtagagagaagaggaaatttgaaagcaaggtttttaaactattcaccacagaggccagggatctgtatcagggttgtggggaaatatagaggattgtggatatttaattgttcttaattttcactaaacaggcttttcaggcatatttaggaaaacargggaaaactcagaattaaatcagcactgtcttgtagtgggaaacagtgttaatagttaggagatgttcatttcagcaatttaagtaggttctagataaccagaattc

SEQ ID NO: 166872 - DNA, 462 bp, Homo sapiens
ataaactctgagaaatctgaataacaaaatgaaataacaaaattataaaaaggaggaaataaaacagcccattatccccacttcacagttataaacattatacacattttrggcatagatccatccattcatcaatccactcacctattttactatggaattttgtgtcacatgttatagtaaatctctcatttataactggccacccgacctgaagagtcactttcttctctgcttaccatctaaacatgtcccttttttgctgccagtgctggtaagtccattctccttgtcttcattcacatccctcccttcctcagctactcctattcattgaacctgcaagtatttatagagcacacattgctggtatgaaccagacagactctcttgcctccagagtaccagatcatcacccctattgatgatctgaactcctaagattgaaaacacagaaggttc

SEQ ID NO: 166873 - DNA, 462 bp, Homo sapiens
ataaactctgagaaatctgaataacaaaatgaaataacaaaattataaaaaggaggaaataaaacagcccattatccccacttcacagttataaacattatacacattttakgcatagatccatccattcatcaatccactcacctattttactatggaattttgtgtcacatgttatagtaaatctctcatttataactggccacccgacctgaagagtcactttcttctctgcttaccatctaaacatgtcccttttttgctgccagtgctggtaagtccattctccttgtcttcattcacatccctcccttcctcagctactcctattcattgaacctgcaagtatttatagagcacacattgctggtatgaaccagacagactctcttgcctccagagtaccagatcatcacccctattgatgatctgaactcctaagattgaaaacacagaaggttc

SEQ ID NO: 166874 - DNA, 629 bp, Homo sapiens
aaaccataggtttcagagtcaatcaggcctgatttgaggaccccagctctactatttatttaccatttgaccttggatgattcattttaatctctctgaacctcactttcctcaccataaaatgagaataataatactacgtcatggaacttttcagaggatacagggagatgccaaagaagcattcatatagagtttggcaattgctagtagctagtttttgttgaggactttgtaccaggcattgtgctaagtgcttcccactccttatctcatttaatcctcacaacaactctatgatgtagttaccaacacatttccgttttgtagatgggacaatgcagcttcacaatgttagatgcaaccaccagcaagtgtcagagccagccctctgactccaaaacccattctcctcttcatgatagggcgatctttaggcccattagaaagtcataagatcaaattagttgttcattatcagaattatttaatgaaatagaagaaaaagtataaaatagattagaawagaaattatcagtaggcttcatacagtaaagataaatatgaaaatttactttatataatataaaaacatgttttaggtatgtgtatatgtgtgtactgggtca

SEQ ID NO: 166875 - DNA, 562 bp, Homo sapiens
agtaacagtgcctgatgtagtttagatgcccagcgtttcaaatgtttgcttttaaacagttgaaaaagataaaacaactgcacctttcataagatttggcaatcccatcctttacatttcactggttttsgaatgggaagaaaagagtcgaatgtctcaagataaaacaaataaaatctgtacatttttaaagtctgttttcaaagttcctctgaacttcttcatggctaaagcctgcaaaactgggtcatacacctaagaaaccagctcatctttgttaagatgggtttcatttcttactgaccctgtcaacatctctgaagagctaatttgctagttcagtggctcatcatcagtttctcttacatgaaaatgacaaaggtcaactgcattaaaaactttttttttcttgatccaaggaatttcaatatttctgtccctctctgattgaattaacaagaaactcatttaattgcttattatacatggagaacataggttgtccttgctggactgtatccctatctgactgcatttgaatgacatttcaggctctatttca

SEQ ID NO: 166876 - DNA, 562 bp, Homo sapiens
agtaacagtgcctgatgtagtttagatgcccagcgtttcaaatgtttgcttttaaacagttgaaaaagataaaacaactgcacctttcataagatttggcaatcccatcctttacatttcactggttttcgaatgggaagaaaagagtcgaatgtctcaagataaaacaaataaaatctgtacatttttaaagtctgttttcaaagttcctctgaacttcttcatggctaaagcctgcaaaactgggtcatacacctaagaaaccagctcatctttgttaagatgggtttcatttcttactgaccctgtcaacatctctgaagagctaatttgctagttcagtggctcatcatcagtttctcttacatgaaaatgacaaaggtcaactgcrttaaaaactttttttttcttgatccaaggaatttcaatatttctgtccctctctgattgaattaacaagaaactcatttaattgcttattatacatggagaacataggttgtccttgctggactgtatccctatctgactgcatttgaatgacatttcaggctctatttca

SEQ ID NO: 166877 - DNA, 562 bp, Homo sapiens
agtaacagtgcctgatgtagtttagatgcccagcgtttcaaatgtttgcttttaaacagttgaaaaagataaaacaactgcacctttcataagatttggcaatcccatcctttacatttcactggttttcgaatgggaagaaaagagtcgaatgtctcaagataaaacaaataaaatctgtacatttttaaagtctgttttcaaagttcctctgaacttcttcatggctaaagcctgcaaaactgggtcatacacctaagaaaccagctcatctttgttaagatgggtttcatttcttactgaccctgtcaacatctctgaagagctaatttgctagttcagtggctcatcatcagtttctcttacatgaaaatgacaaaggtcaactgcattaaaaactttwtttttcttgatccaaggaatttcaatatttctgtccctctctgattgaattaacaagaaactcatttaattgcttattatacatggagaacataggttgtccttgctggactgtatccctatctgactgcatttgaatgacatttcaggctctatttca

SEQ ID NO: 166878 - DNA, 576 bp, Homo sapiens
aggcagagctctttatttcaaaagatcaggaactggactgtgactcatgtcttgtccacattcgtgaccaatgttttcttttttttttttttttttcattcttgaattatttaaattgaattcatcttttaggaaacttgggttcttcttcatcagtttttttttttttttccaagaagagggagtgcgtggcacccttttwtgagtgtttaaatagatgatgatgtcttttgattgcctccctagatggagtaaagccttgccagttttacagttaaagatcagaactgtttttcttgaaagtatttatataacaatcaaaacattcagtgttggaaagctaaagtcccagttagcatgatctgcatttatttttaggcaaattatttattaaccaggtatacaccgtctttgtttacatccttttgatgcttttgtcaggacatctttagacctaaatttatttttattggctttccataatcatagactaaactttaatttctatactcaggtctttcataaacatcggaaccttttgttccgttgtaaaataagtatagctaagtgtttgaa

SEQ ID NO: 166879 - DNA, 576 bp, Homo sapiens
aggcagagctctttatttcaaaagatcaggaactggactgtgactcatgtcttgtccacattcgtgaccaatgttttcttttttttttttttttttcattcttgaattatttaaattgaattcatcttttaggaaacttgggttcttcttcatcagtttttttttttttttccaagaagagggagtgcgtggcacccttttttgagtgtttaaatagatgatgmtgtcttttgattgcctccctagatggagtaaagccttgccagttttacagttaaagatcagaactgtttttcttgaaagtatttatataacaatcaaaacattcagtgttggaaagctaaagtcccagttagcatgatctgcatttatttttaggcaaattatttattaaccaggtatacaccgtctttgtttacatccttttgatgcttttgtcaggacatctttagacctaaatttatttttattggctttccataatcatagactaaactttaatttctatactcaggtctttcataaacatcggaaccttttgttccgttgtaaaataagtatagctaagtgtttgaa

SEQ ID NO: 166880 - DNA, 582 bp, Homo sapiens
gtcacacagtgaatgttagaggggagaattttacctcttatgtttctttctttctttttttttaatgtcaaagttaaagtcaaaacaaaattaatcaggaggggttatctataatgaatcaccatgcagctcaggaggaaagggtctagggggaagatatctttgccagcagccaaaggaatgttctttcaaagagtcacattagactataagctccatgagaaagattgcagatcttccatattcagcagcatgaatcaaaactcttcagctctagtctaactttctttttttattatatagcagtgggggttggggtttgtatgggctgtgatttaaatggttaattgaaaggaagccgtggtgagctgtttctggctacaatattacgcgacaatcttatctgagcttacagagttatttccaatttgtaaatgctgtatgcatttctaccagataaaacacttaaaaatcccagacctgagtaaagtgaccytgctgttctagagccttcctcacctgcccttttctgcctctctacctcctcctgttctgatgccccccaccgcaacccccacccca

SEQ ID NO: 166881 - DNA, 565 bp, Homo sapiens
atcttgggaagtccagcacactagcctggaagtttgtcagagactctgagcatcctaaaatcaggaaatttgtcttcttcatcaatgtaaccccaacacctagcagtaggaagtttccattgctggtaaaaataggctcacatgctgtgaggtataaatggtcatttaaaaggtaagttaatttgaagaacaagaccgagtccccagatccatttaatttttaatttttggcagtgtttcccaagaaccaggccactggttgaatgattaaattcttgctcatcttggagggaaaaaagatacattgctgtggacttttcagaagactaaatttgttatttgcaacccttggccttctttttgatattatctctttgagacctaatattggtgggttcacatgccttgctctttcaccattatagaactgggtttttcttcttctgctgtctatttaatttaattctcaaccttgagccttaatggaaagagaacatttttctcttcatagacacagtctgccagcyttttcctgctcgttgtccctcgaaaataagtcagtaga

SEQ ID NO: 166882 - DNA, 617 bp, Homo sapiens
aagaaagaaaagagccaggtgcagtggctcaagcctgtaatgctagccctttgggaggctgagacaggcggatcatgaggtcaggagatggagaccatctactaaaaatacaaaaaattagccgggcatggtggcgggcacttgtagtcccagctactcgggaggctgaggcaggagaatggcatgaacccgggaggcggagcttgcagtgagccgagattgcgccactgcagtccatcctgggtgacagagcgagactccagaaaaaaaaaaaagataaaaagaacgaaggaaggagggaagaaaggaaagaaggaaggaagagagagagagagagagaaagagaaaaaaagaaagagaaagaaagaaaaagagagagaatgagagagagagaaaargaaagaaagaaagaaagaaagaaagaaagaaagaaagaaagaaagaaagaaagaaagaaagaaagaaagaaagaaagagaaagaaaggctaagaactggcttatctttatgatgcgataggatgaaagagcccctttgtcctagactcagcacatggaaccaggtatgaggtttcaggggcctcactctactttcctgggcctcagtatttccacttgc

SEQ ID NO: 166883 - DNA, 617 bp, Homo sapiens
aagaaagaaaagagccaggtgcagtggctcaagcctgtaatgctagccctttgggaggctgagacaggcggatcatgaggtcaggagatggagaccatctactaaaaatacaaaaaattagccgggcatggtggcgggcacttgtagtcccagctactcgggaggctgaggcaggagaatggcatgaacccgggaggcggagcttgcagtgagccgagattgcgccactgcagtccatcctgggtgacagagcgagactccagaaaaaaaaaaaagataaaaagaacgaaggaaggagggaagaaaggaaagaaggaaggaagagagagagagagagagaaagagaaaaaaagaaagagaaagaaagaaaaagagagagaatgagagagagagaaaaggaaagaaagaaagaaagaaagaaagaaagaaagaaagaaagaaagaaagaaagaaagaaagaaagaaagaaagaaagagaaagaaaggctaagaactggcttatctttatgatgcgataggatgaaagagcccctttgtcctagactcagcacatggaaccaggtatgaggtttcakgggcctcactctactttcctgggcctcagtatttccacttgc

SEQ ID NO: 166884 - DNA, 586 bp, Homo sapiens
caagatacaaatctttttgttgttcttttaatcatttggaagaagaggagtcattgcttagaagatttttgcccttttctgcggataacaagtaaaattagctaacagctcaattattctgttaatgaggcaaccccctccccacttgcataaatttaatttatttttctttccagtgtcctttctgctaccatcaatcaactccccttccagaggaaaaaaattatacactaaaagtggggtatggactgggggctgatatcaaaattgaggttgatcatacattatactgtgaaagaggaaatgaacataaaggaaggggagaaaactgagtctcaacaagtcgccaggccagcctgcaaaagcaagcttgaaatttcctgttgggtaaagwctattcgattcagatgacatttacactaaaatagaagcccaaaattcaccactatgcaatatatccatctaataaaactgcactttgtaccacctaaatcgatgaaaagaaaaagaaaaagttccctgtactgaggctcacgctattatccaaccccgaaggtatggggtgaagcacattctttgtagactg

SEQ ID NO: 166885 - DNA, 531 bp, Homo sapiens
actcccaggccatcttctactttgtatgcagacaaatttttacttgtttgtttacatgaatgggagcattcatctatttctggggcttattctttttatctatcaatgacataattctacagctgttcatataactgccataacttatgctcaagagctctttgctaatttagagttcaaagatttgggatatatatatatatatatatatatatatatatatatatatayacacacacacacacacacacacacacataatctattgaaggacatggggattagttttggagccattgttgctattacaggttatgacgcagtaaaaacaaactgctgcgtgcatatcattgggacaaacagtgtggacttttaaaacattttgagggccaggagcagtggctcatgcctgtaatcccagcactttgggaggctgaggcaggcaggtcacttgagctcatgagtttgagacaagcctgggcaacatggtgaaaccccatttctactaacaatacaaaaatgagctgggca

SEQ ID NO: 166886 - DNA, 453 bp, Homo sapiens
tttttacacataattctgcctgctctatgcctttctagatgatcaaaatccagtctattttagtagaaaataaatgcaaacataagaggactcttattcttcatgggcaatcagtttgtcttcattagagtattctgctcaccgcttccagtaatgcatgtatatatatttatttttatctttctttactgttacgaggaagcagtataaacactctcacccccatttcctgcctcatcttcaatcaaaagagaaatgaccatgtcctcaagtctctgcattccagccctgagtacctcayctcgcttcctctaattttttgcttatgtggaaacctcttcttccttctcatcgacattgactttaggaaaaatgaaataaaccacttttcacacttatcatcattattgtcattatttaccttaaaaatacttgctcaggtcattataccaa

SEQ ID NO: 166887 - DNA, 499 bp, Homo sapiens
ttggtagtctcataattttgtaaatattcttttactgtatatattggattatcatctctctcttattttctttctaattatagaatattyctgatgaaataaaaatataagtaataactcagaaacacacgctacatcaaagtactaattgaaagattgcttttcgcttttcttaaagattgacagttatcaaaagtctttattatcgccttccctatctcacagaatagaaacattgaaataatatttttaactttttaattcttatcaaaatagtctatgtatgtagtttaatgagtcaaatagtgtgtaatctcccaccctaatcctgttctcttccaaatcctgcttctcagagcctatcacttgtatctcatttatttgtttatttcttcatatttttaaatgatatgctcatgttactattttttgacttttcctttttaatcattatttatctctcctttctatggaaaaggccacactaaagtgttgggga

SEQ ID NO: 166888 - DNA, 499 bp, Homo sapiens
ttggtagtctcataattttgtaaatattcttttactgtatatattggattatcatctctctcttattttctttctaattatagaatatttctgatgaaataaaaatataagtaataactcagaaacacacgctacatcaaagtactaattgaaagattgcttttcgcttttcttaaagattgacagttatcaaaagtctttattatcgccttccctatctcacagaatagaaacattgaaataatatttttaactttttaattcttatcaaaatagtctatgtatgtagtttaatgagtcaaatagtgtgtaatctcccaccctaatcctgttctcttccaaatcctgcttctcagagcctatcacttgtatctcatttatttgtttatttcttcatatttttaaatgatatgctcatgytactattttttgacttttcctttttaatcattatttatctctcctttctatggaaaaggccacactaaagtgttgggga

SEQ ID NO: 166889 - DNA, 330 bp, Homo sapiens
ctggccttgacttgctttgagttctttcaggaattcagacattggtttgtaaatccagagtttaagctcaattcarttttgaagaaaacacaaaatgtgacctcagcatcaacatgatccttgtagaatttcctaacacaaactaatacctatctagaaaatcacaaatgcgtacttttgttgaggtgcttattcttaaacaggttgttatatgcatttgaacatgagatacaattataatatttctttataattctaagtctctaatggtttatgtttatcaagcttgttcaacgtaaatttttgagatatatgtacaagaaattgaat

SEQ ID NO: 166890 - DNA, 330 bp, Homo sapiens
ctggccttgacttgctttgagttctttcaggaattcagacattggtttgtaaatccagagtttaagctcaattcaattttgaagaaaacacaaaatgtgacctcagcatcaacatgatccttgtagaatttcctaacacaaactaatacctatctagaaaatcacaaatgcgtacttttgttgaggtgcttattcttaracaggttgttatatgcatttgaacatgagatacaattataatatttctttataattctaagtctctaatggtttatgtttatcaagcttgttcaacgtaaatttttgagatatatgtacaagaaattgaat

SEQ ID NO: 166891 - DNA, 585 bp, Homo sapiens
acaaagaaccccacacttagaagggccacacagcaacaatcttatttgatcagaaatcctgtgggtaaaraatttagacaaaaagcccggtgggaatggttgtccttgcctctactctgctctggatgtctgagaccaggtattgggtcttacatgagcttggactggagggtccacctacaagatggcatctttcttcacaagcctggagtctgagctgaaatggctaaatacaggctcagctgggactgttgaccagggctgggacctcaaagggagcaagtagcagtctttcagaagcgagtgttcaatgagaacctgccagaaactgtctagctttgcatgactgaacctgggaagttacaaagcattgttctgtcataatctgttcactgaggcagtcacaaaagtctacgtcatttcaaaggacataaactcctccccttgatgaaaggaaaggagagtcaaagaattcaggaatcacctttttcaaatgtttcattccctttttccattccttaaaggtacaatctactctcccaccaggagagagctgtgctgagctctgccctttcactcccacaa

SEQ ID NO: 166892 - DNA, 585 bp, Homo sapiens
acaaagaaccccacacttagaagggccacacagcaacaatcttatttgatcagaaatcctgtgggtaaaaaatttagacaaaaagcccggtgggaatggttgtccttgcctctactctgctctggatgtctgagaccaggtattgggtcttacatgagcttggactggagggtccacctacaagatggcatctttcttcacaagcctggagtctgagctgaaatggctaaatacaggctcagctgggactgttgaccagggctgggacctcaaagggagcaagtagcagtctttcagaagcgagtgttcaatgagaacctgccagaaactgtctagctttgcrtgactgaacctgggaagttacaaagcattgttctgtcataatctgttcactgaggcagtcacaaaagtctacgtcatttcaaaggacataaactcctccccttgatgaaaggaaaggagagtcaaagaattcaggaatcacctttttcaaatgtttcattccctttttccattccttaaaggtacaatctactctcccaccaggagagagctgtgctgagctctgccctttcactcccacaa

SEQ ID NO: 166893 - DNA, 585 bp, Homo sapiens
acaaagaaccccacacttagaagggccacacagcaacaatcttatttgatcagaaatcctgtgggtaaaaaatttagacaaaaagcccggtgggaatggttgtccttgcctctactctgctctggatgtctgagaccaggtattgggtcttacatgagcttggactggagggtccacctacaagatggcatctttcttcacaagcctggagtctgagctgaaatggctaaatacaggctcagctgggactgttgaccagggctgggacctcaaagggagcaagtagcagtctttcagaagcgagtgttcaatgagaacctgccagaaactgtctagctttgcatgactgaacctgggaagttasaaagcattgttctgtcataatctgttcactgaggcagtcacaaaagtctacgtcatttcaaaggacataaactcctccccttgatgaaaggaaaggagagtcaaagaattcaggaatcacctttttcaaatgtttcattccctttttccattccttaaaggtacaatctactctcccaccaggagagagctgtgctgagctctgccctttcactcccacaa

SEQ ID NO: 166894 - DNA, 622 bp, Homo sapiens
gaagaaacatatgcaaactatgcatctgacaaagtctagtatccagaatccatcaggaacttaaatcaacaagaaaaaaaaacaaacaaacgaccccattcaatatgggcaaaggacatgaacagacacttctcaaaacaagacatacacaccatatcaacaagtataagaagaaatgctcaacatcactaatcattgtagaaatgtaaatcaaaaccacaaagagataccatctcacataagtcagaatgggtattattaaaaaaacaaaaaaagtaacagatgttggcgatgttgaggagaaaaaggaatgcttatacactgcaggctggaatgtaaattagctcagccactgtggaaagcagtttggagatttctcaaataacttaaaacataactactatttgacccagcagtcccwttactgagtatatacccaaaggaatataaagcattctaccataaagacacattcacatgtaggcttattgcagcacttttcttaatagcaatgacatggaatcaacctagatgcacatcagtggtggactggataaagaaaatgtggtactcatatacacaccatggaatactgtacaaccataacaaagaacaaaatcaa

SEQ ID NO: 166895 - DNA, 636 bp, Homo sapiens
gcatttactaggttttgaatttcaataattttatttctagaaagactatgtagctctcttctctaatctgctgtgccatgtttgataaattgtttctaattttttgatttcgtcttttatttcttgagatatttcacattacttattttatatcaaatctataactccatgtgtgtgtgtgaacatacacttatgcataaggactacatgtgccgtatgatctgagaaaggaatttcatttgcttttgctgagggccagagaaccctgcagacctggtactatttttggctctttgtaaggttgctgatgttacatgtaggtctgaggtcaagctcctccatcttaccaggctcttgggcttggcttccttaacgtagacttgctcattgctcaagttccttgttccagtctcagctcagtcatgcttgtttctttgtttttatttcttagagattccccttatattctatcaatcccataaaagcattaaaattatgtttgcattgtaattttctaatcatatcaagagctgttgtatcttagctgagacatctttctggtctccttgcctgccgtgctacagaaaccsacttgctggagtaatgtttagagaaatattttcatctctatcattt

SEQ ID NO: 166896 - DNA, 526 bp, Homo sapiens
gattggactccttccatatctgaactctttcactctggcctctagttccaagtcctgcttcctgtggtttgagtgttgcttgtgtggtcaacacgctcatgcctgacagtgactctggaaatgacaactatattgaaaagaggaggcttactttgtgtgtatatgtaggggaggaaccagatctggcaagcaggaaagatgattttgactcaaagtgaagatgaagctatgtccagggatagttcagaatatgggatcatgggcaagttatatattcaagatcctgagtttgacttggtcaggccttgagtctgctctccaccatgtcttggacaggtagggataaaaatgatcagagaatgagaacaggatgaaggaagcaatgatggacaaggagagagagttttggaagcttgggcttgtgcaacagaaaagactttttgattgaagstggggcatgggcaggtttgctctgcacacgtgtaagtgatgggagcccctttataacttggctgtgtggtcatcg

SEQ ID NO: 166897 - DNA, 411 bp, Homo sapiens
atgggcaagttatatattcaagatcctgagtttgacttggtcaggccttgagtctgctctccaccatgtcttggacaggtagggataaaaatgatcagagaatgagaacaggatgaaggaagcaatgatggacaaggagagagagttttggaagcttgggcttgtgcaacagaaaagactttttgattgaaggtggggcatgggcaggtttgctctgcacacrtgtaagtgatgggagcccctttataacttggctgtgtggtcatcgggaggtgactcttccttatttattcttatcgtccagaagagagtgaaatcctccaagtccccccaccccaccttttttttttttcacttttctaggccagtttgggagaggaggttctgcttagatatctacagtggcccagg

SEQ ID NO: 166898 - DNA, 541 bp, Homo sapiens
cccctgcattctgtgagccactctagcaaattaatcacacctgagcacagggctggagaacacttgatttgtaagcaagtttggctgaagttgtgggtaacctactacctttaacgggcatctaaagtagggagcagtcttgtagatctgaaaatttaacccatgggatctgatgctatctccaaatagatagtgtcagaattaagttaagtcataggacacccagttggtgtctgctggagaactgatgtgtgggaaaaaacctacagatgttgtgtcagaagtattgactttataagaagaggaacaggtgtgccttttcccatctctcaygcccactgtcagccgagtcactttcactcagtttaccctattcttcccagcacttagcattatttgaaataattttattcacttgtttacttatttatcatccatcttcttaacataaaccagagctctatggagcacacttctttatgttcaactctgtctggtgaagggttgacactcaacacacgtgtgtttaatcaaatttgaa

SEQ ID NO: 166899 - DNA, 541 bp, Homo sapiens
cccctgcattctgtgagccactctagcaaattaatcacacctgagcacagggctggagaacacttgatttgtaagcaagtttggctgaagttgtgggtaacctactacctttaacgggcatctaaagtagggagcagtcttgtagatctgaaaatttaacccatgggatctgatgctatctccaaatagatagtgtcagaattaagttaagtcataggacacccagttggtgtctgctggagaactgatgtgtgggaaaaaacctacagatgttgtgtcagaagtattgactttataagaagaggaacaggtgtgccttttcccatctctcacgcccactgtcagccgagtcactttcactcagtttaccctattcttcccagcacttagcattatttgaaataattttattcacttgtttacttatttatcatccatcttcttaacataaaccagagctctatggagcacacttctttatgttcaactctgtctggtgaagrgttgacactcaacacacgtgtgtttaatcaaatttgaa

SEQ ID NO: 166900 - DNA, 618 bp, Homo sapiens
tggtttggctgtgtccccacccaaaatctcatcttgaattgtaatccccaaaaaccccatgtgccaagggacagaccaggtggaggtaattgaatcattggtgtggttttccccatgatgttcttgttatagcaagtgagttctcacgaggtctgttggctttataagtgtttggtagtgcatccagcgttcattcgccttcctgctgccttgtgaaggaggtgccttcattccccttctaccaggattgtaagtttcctgaggcctccccagccattcggagttgaactgtgagtcaattaaacctctttccttaataaattgcccagtctcgggcrgttctttatagcagtatgaaaacagactaatatagtttgcttttacaaagtattttttaagggtaaaattaattgtatgtctccttatttagtttatcaaagtaggtctgtgcatacattaatgaaggtatacaggtaattctggtctttcactaatattcagtacataatcttccatctaaaatctgcttttttcttctgtgttgctacgttagtaaatgttcccattttctaactagttgttctgcaagaaacaggattctcaggaattttttgttga

SEQ ID NO: 166901 - DNA, 618 bp, Homo sapiens
tggtttggctgtgtccccacccaaaatctcatcttgaattgtaatccccaaaaaccccatgtgccaagggacagaccaggtggaggtaattgaatcattggtgtggttttccccatgatgttcttgttatagcaagtgagttctcacgaggtctgttggctttataagtgtttggtagtgcatccagcgttcattcgccttcctgctgccttgtgaaggaggtgccttcattccccttctaccaggattgtaagtttcctgaggcctccccagccattcggagttgaactgtgagtcaattaaacctctttccttaataaattgcccagtctcgggcggttctttatagcagtatgaaaacagactaatatagtttgcttttacaaagtattttttawgggtaaaattaattgtatgtctccttatttagtttatcaaagtaggtctgtgcatacattaatgaaggtatacaggtaattctggtctttcactaatattcagtacataatcttccatctaaaatctgcttttttcttctgtgttgctacgttagtaaatgttcccattttctaactagttgttctgcaagaaacaggattctcaggaattttttgttga

SEQ ID NO: 166902 - DNA, 618 bp, Homo sapiens
tggtttggctgtgtccccacccaaaatctcatcttgaattgtaatccccaaaaaccccatgtgccaagggacagaccaggtggaggtaattgaatcattggtgtggttttccccatgatgttcttgttatagcaagtgagttctcacgaggtctgttggctttataagtgtttggtagtgcatccagcgttcattcgccttcctgctgccttgtgaaggaggtgccttcattccccttctaccaggattgtaagtttcctgaggcctccccagccattcggagttgaactgtgagtcaattaaacctctttccttaataaattgcccagtctcgggcggttctttatagcagtatgaaaacagactaatatagtttgcttttacaaagtattttttaagggtaaaattaattgtatgtctccttatttagtttatcaaagyaggtctgtgcatacattaatgaaggtatacaggtaattctggtctttcactaatattcagtacataatcttccatctaaaatctgcttttttcttctgtgttgctacgttagtaaatgttcccattttctaactagttgttctgcaagaaacaggattctcaggaattttttgttga

SEQ ID NO: 166903 - DNA, 449 bp, Homo sapiens
gccaccatgcccagctaattttatttttagtagagacggggttttgccctgttggccaggttagtctcaaacccctgacctcaggtgatctgccctcctcagcttcccaaagtgctgggatgacagtcgtgagcaaccacgcctggctcagacttcttatggaaaagctggattcaagaagacagtggacaagatggttaaagttctggggaaatattataactaatctagaattctatacccatgtaaactatcaatgtgtgagtcaaataaagactttatacatacaaagacccaggtgtttacctccaacacatgtttactaaagaaaccactagtgaaatgaaggataaaacaaggaaaaagtgtgtggggtctgggcaaaaatgaaactatttggttatgcaattctatctaaggtwaaatcccagcacttgccttaaaaacca

SEQ ID NO: 166904 - DNA, 359 bp, Homo sapiens
agaattgattaaaacactttttccattctctactcaagttattggtttatgyctacaggctgagtgcctcggatatcaggatagaaattttatactgaaggaaaattactatatgataaaattgaaaaacttattaggttcatgatcattgtttgataacctatacttactctttaatagtaacttacataaagctttttaaaaatatataatctattgtatttattacacttatgtttggacataaagctttatgtcatcccgtctatgatctggaagttgaaacaaggtggtttcaactgaacactttgcatcctgttgtggatcacttgaagacctaaaatctgtttcttagatac

SEQ ID NO: 166905 - DNA, 359 bp, Homo sapiens
agaattgattaaaacactttttccattctctactcaagttattggtttatgtctacaggctgagtgcctcggatatcaggatagaaattttatactgaaggaaaattactatatgataaaattgaaaaacttattaggttcatgatcattgtttgataacctatacttactctttaatagtaacttacataaagckttttaaaaatatataatctattgtatttattacacttatgtttggacataaagctttatgtcatcccgtctatgatctggaagttgaaacaaggtggtttcaactgaacactttgcatcctgttgtggatcacttgaagacctaaaatctgtttcttagatac

SEQ ID NO: 166906 - DNA, 608 bp, Homo sapiens
aagaaacagggaaagtggaaaaatgttcacttaccaaaatgcaaataaaataagatttcttttttgtatgtaaaattttaaaagctttataattatatctaatttagttatagatcaaatgacatattttgctgttataaagtaagtagcaataattttaggtcaagcagtttggyggtaagaattaagattaaaaaaaatagtcacagccttcaacccagtaatcctatttctggaaatccaccttaaaatataaaccaagattgtgtaaatattttaagattaaaatgataattgtaacattatttataatactgaaagtctaaaactaatccacaggatcaacaataaatgagtatttaaataaagtatgttgtagttatactgtaaataaataaaaatgaaggaaatgttgccaaagaaaatatttctggagacttcatactactaaattatcagcaagtgtaggtgaccaaaatatggataattattttatccataatattttacaaagttttccagttttccatgactattcctctgtggtacacacagaaaatttcccatccaaaaccgtttgccatttcttctctactagcaaaatttcg

SEQ ID NO: 166907 - DNA, 543 bp, Homo sapiens
tgttacattggggtgtagggtttccacatatgaatttgaatggagggaacacaaatactcagtccatagcaatatgcataaattagcaggattttttcaaacttacttctcacttgtaatttgcaattttaaccaagggtttaatctaggaccagaatgggaaagatattatatagaatgctagatgagatccaatagggtgagggcaaaggaaaggctgctatttattattctatatttcaacaagtaaatgatagcatctaaacaaaaaaaaattcctgcaaaatgtcataaattaccacacactaatatcaaagtgcctaaaataaacaaactcctatcatgaaggraagtaaaattcaactaacaggtgttcccacaaaggagaaaataaggtcattcctttgaacctaggtggctgaaaagagtgagaaaagatattctctaataagacttctataataggttcctgaggcttgacagcctaaagccaaaacaaaacaaagaaaaaaaagatagagtccttagaagcagaccagtgaa

SEQ ID NO: 166908 - DNA, 606 bp, Homo sapiens
aatcagaatttctgacagtagagcccacaaatctgtaagtacaatacattccctgggtctttctaaaataccctaaagttgagaacaggtcttctgtttatctgtgaaaaatgaaaggggctattaccacctataaatatgtagatttgtgatgaattgggcatttatgggaacaacaagaatattagtcaaaaacagacctggggttgagtctgagactaggaagtggcagcagaatttttaaatttctaattctatattttcatgatttaactacctatcctctaattcagtgtttcttaaactttagtgtgatcagatcgcaaggagctgatagaatccaagcttacmctttcaaagactaatttttaggcaggtgttggggcccaggaattgcctttttaacacgcagtcaggtagtattgtgaggaaatgatccacaggttgaagtctcttgatcctgttcttttgtctcttccaagatgttcttcccttcaggtctcttttttttttattgcctcctcatcttctctatttctttgggttcttctccttagtttgagcagacttaagccactcatatcctaagattattttcttatcaat

SEQ ID NO: 166909 - DNA, 470 bp, Homo sapiens
attatgctgtctaaagccagtctggcatatattgtgctctaaggatcccatttatcaatgactcctgtggcatttcaggggggattttcatgtaattcgcttctaaagtccatgtaatatgcctcttctgagtgaattacatacattgttattcatcattattgattcctgtctccagcagtaagcaacagatacaaatctgcttatgaaagggaagaaaagctgggagtgtgcattattaaacataactggaagcacaggttttaccttatttgtcttataaatcatcatatggattttgaaaaacaagcacaaagttgataatgttgtttactatgctctcaatatcaaayaaaattccaaatttattattaaattaataaaaaactcaagcagtaagctaaaataattcgtgtttttagaatcaataagtcatgatgatgtcttctgtaatgaaaaattagcaaaag

SEQ ID NO: 166910 - DNA, 577 bp, Homo sapiens
tgaaactagaaccctatcatatacaaaaatcaacacaaagttattaagctctattaccattgcacaccaatttcctgtttctccttcatccaagcaatggctatagagtttcagttatgcaagatgaaatctagagatctgctgtacaacaatatgcatacagataaccataccatactgtatacttacttaaacattttttaataaggtggttttcatattatgtgattattaccaaaaattttaaaaaatgattccagcttacaggcaagcataggrgtgcttttagtgtttaacaatctgaagattgattcccttctcatgaaattgtaaaaaattctattttgattgtgtgtctctgtgtgtgtgtgtgtgtgtgtgtgtgtaaaattacttcatgatatataaaacaataaaattggaagtggtctaaatatgctttgtaaaaccatagtttttattgaaggctaaatcaccacaaatttacactgtaacattaccagtattttattgtctcatctgacagaaggacttgtccttagtgtcagataagtagtttggtggaaaaagactcttg

SEQ ID NO: 166911 - DNA, 557 bp, Homo sapiens
tacaagtttcacccatgtgtctaaattccagacaaaagaggaagttgggtgggacttctgggattcctgcttaaaaggaaaaacagaaaactcaaacatttactattaacaagcttctccttcagctgcttggaatgtgtataaaatgctggagatctgcgtctatcttagctatgagacaactttacatgcttgatggcagatgggaaagaaggatgcagatttccaataatttccaatcatacaattctgagctgcctttactcactttattcaygtaaaaaaaaaagcccttatatatttactaatatatttaggattttctgttacttgcagtcaatacaatcctaaatggttcacttatcaatgaaactaaatgatctcaattgataaatcaatcaagaagttggccttggatacataagattcaagtaggtatatgagcagggctctagacatacagaaaggaagcacattagtatattagaactaggaaattacattgaatgctctctaaacatacattaattccttcaacatgaacttgtagtccaaaa

SEQ ID NO: 166912 - DNA, 584 bp, Homo sapiens
tacacaatggccatcctgagacttttcttgtattcttttcttgatcctgtgtggggtcaggtgggatcctgtgtgttcctaagcatatcatttgcctgaagcacatcctcaaagagcttcctaagaaggggctcttcagagttaaattctcatttcttccatgtcagaaaatgtttctattccagccatttgctttattaatcattgtgctgaatakagatgttaggttgaaagcctttccatttcagaaatttaaatgtggtgcttcaccaacttctctagtaggaattttccggaagggtgaggatggagatccgagctccgctttccttcatttcagcctgatacgctgctttctcccagaactaactatattattcacaaataattcaacgtttccaatccaataaaactgaagattacctgattttcaggaatcacagattactggccacaaacagccacctatggtcttaagatcttatgtttgcttgttgtttcctacactgagaaaaaatattgttaatggccaggcgcagtggctcacacttgcaatcccagtgctttggctgaagtgggaagat

SEQ ID NO: 166913 - DNA, 319 bp, Homo sapiens
aaaattgaataaagtccagtatggaagcaagttagtagggttttttcctcctttatctctgacatttgatctgaaagcaagccgagaccaagaactgcacagagagcatgggtagcacattctcttaacgaaatygtatttttaaacaaaggaaatgggaaaaggaaattcttcagctacagaatgcagaagaaagctggtgggttgttttttctttattttatttggcttttgttccttcccaaaacctgctttgagttcagcccagttgttctgttacagtagcatagacacctaaaacttgaagggaaatgtatca

SEQ ID NO: 166914 - DNA, 552 bp, Homo sapiens
tttgtgctgacttgaataaacctggaatcatgtatccatgtcaactaagaattatataaaatgtttctcttcaaggctcataccaatcagaatagttaacttgagaattaattgcttccaactaacatgcatttattataaattatccaaaatgaaggatttttatattataaatattctgttataaatttataaagaatatgaaatcttttaaaatgtctaagttaaactttatagataatgaaatggaattgtgatagaagttatatttatacagatcttacatgttaactctgtgaaacaaagggaaaaattcaagtttggtctttgatgaccaaagtagtatgaaattatttctcaaagtttagcaaaawcatgcatagattaaaaattaaaacccaaggaggagactgcaaaggaaaataatgaaaagacactcactcaaatgccagattctaatctaggtcctatatggcagagaaaaaaaaggaatttcttatatagattgtattttaatagtgagagacaaaaattcaactgataagaacagat

SEQ ID NO: 166915 - DNA, 552 bp, Homo sapiens
tttgtgctgacttgaataaacctggaatcatgtatccatgtcaactaagaattatataaaatgtttctcttcaaggctcataccaatcagaatagttaacttgagaattaattgcttccaactaacatgcatttattataaattatccaaaatgaaggatttttatattataaatattctgttataaatttataaagaatatgaaatcttttaaaatgtctaagttaaactttatagataatgaaatggaattgtgatagaagttatatttatacagatcttacatgttaactctgtgaaacaaagggaaaaattcaagtttggtctttgatgaccaaagtagtatgaaattatttctcaaagtttagcaaaaacatgcatagattaaaaattaaaacccaaggaggagactgcaaaggaaaataatgaaaagacactcactcaaatgccagattctaatctaggtcctatatggcagagaaaaaaaagraatttcttatatagattgtattttaatagtgagagacaaaaattcaactgataagaacagat

SEQ ID NO: 166916 - DNA, 514 bp, Homo sapiens
aaagaaattaagatggaaataaaaatttcttgaaacaaaaaaaaaataacatactggtaagaatatgtagaaaagggaattagtgcattgatggtaggtaggtacataagtcaaccagtatggaaaacagtatgaagacttctcaaaaatcttaaaacagagctaccatatgatccagcaatcccactactgaatatttgtccaaaggaaaagaaatctgcatatcaaacagatacctgtgtatttatcacagcactattcacaatagcaaaaatatgccatcaacataaatgtccaaaaccaggtataggacctaatagaccaagtggttaaaygccccaaaacaagcaaggttaagtgcccaaccaagccgagtcagttttgccacatcagagctccaattaggaaaaccttggtttctgacatgtgaaatggagcagctatccaaagagagttgaggcagaacctagtgagaaaagggttatgctatagtagatgcgaagatgtgccactc

SEQ ID NO: 166917 - DNA, 557 bp, Homo sapiens
ctagaactgcatgggcctaatatacttgggttgaaacttggcttgaagtgtattctatagatcattatggctctgttggatacatattttttatgccaacaaattgtgtagaaaataatctttcctcaaatccgttaaatttttccatctctggtttcaaccctcttattttttgtggacagtcacaaaattctcttttaattccttttggacaatttccaatagctcttccaatacattttctccttcatttgctctcagctcaacacaatatgccttagagtccctaatggctttagtgttcacaggaagtctttattttctctcccagtcttgacaacaatttattttagcaccttgatccttcaattttttctcagagttattttcaactggattatttttcctgtcttatatagtcttctttataaaggcaagttgtggagctgagccctttatttgaaagactagagtaaaagaagtctacttgtttccatagccccatttattgtastgtaattaactaaggaaacatgaaatcagatctagatttaaac

SEQ ID NO: 166918 - DNA, 573 bp, Homo sapiens
cttttttccattttaaattaaacagaatactatcacagtcttaatctacatcttttaatattgtaattacagatataataagctgagttttgccaagtgaaagaaagatttgatctgtctttaattccacaccttttattgactcttttattttcttttcagtgtaccaggtcagatgtttgctgagcctragaattatttggtattctgcctattcaagaactctgcacaccttagaaatggcagaaacttctattccttggaattgtgagaatatattttctgttattttaagtctttcgagtttgtcatttctcatcattattaggtattcctaggaaattatacatacatatatacatacgtacacacatatgtatatattaggcttaaccatctgtatgttctttgaacattaattttgataattattaagataataaaagtaaacaggaataacagtagttaacaaatatggaatgcacctggttattttgcaaaatgcttttacatgtgaatgttatttaaagacaattctattaaataaggatgaggctgttattttcacttttc

SEQ ID NO: 166919 - DNA, 628 bp, Homo sapiens
ttttataatttaaattaattttggatttcagggataaatcatgttatactgtcaggaacaaaggataactttcctggttgacatataatcatttttacatattgtgaatttgattagttaggattgaggaaatttttgtccatgttcataagagattttagtctaaagtttatttttcttgtgatgtctttgtctggttttaatatcaagttaatactggccctacaatgaatttgaaaatgttctagtatttgtaagagtttttgagagactgttacagttcttttttaaatatttggtaaaattaaaaagtaaagccacagaatttgatttgtgggaagtatttagcttactaatttaacttttatactttcataagtttatttagatttatatttctcgttcagtcagtttatggtgcgtgtttctttctaagaacttktgtttcatctacattatctaattttttggcataagagtctttttaaataattttttcttctctatgtcctatactgatatgcccctttccattctcggttttagtaattttagttctctctcttttcttggtacatgtagcataaggtttgctgattttgttaatatttttgaataacaaatattt

SEQ ID NO: 166920 - DNA, 382 bp, Homo sapiens
actttttgtaaaatgggtggcatttgcctataacccaagcacagcctcctgtatattttaaatcatttctagattgcttatacctggtatcatgtaagtattatattatttttaatgtttacattattatttttattgtttttgcaaacgtttttgattcatagttggttgaatttctggatgcagcacccacagatatggaggttcaactgtattccctttcaacrtaactgtgttgcattaccaggaaataaaatcaaatacatgaaatggattgagattctttaataatttttccatatgtgtaactgcaaaagcagaataacatccccccaacacaaaagatgtccacttcccaatctctagaatctgtgaatatgtt

SEQ ID NO: 166921 - DNA, 634 bp, Homo sapiens
aaggacattgtacttctagctaaaaatatgaatttcacagtgtggagggtgaaaaccagttctcagtgttttaattttaacataatcatctgccaatttttctagttataatttagtcataaagactatattttttctrttcaattatattttatcttttaagttaatatatacagaattcataaaactactgcactcagaatgcaattaaatttgcttttaaattgtgaaatacccatttaaatcatttttcttgcctgacaagcagatgttcaagaaaacagcagctccaaattaaagtataacgtgtagaaaaaagatacatccccttgtgtgtgaaatcttaacaatcttgctttagtttttaaaatagtactattattttctttccatttctcttttattaaaagccaagtttcttgtctgaaaatgtgtctttcagatagcggtatttatttctaatacagcacttcatctccttgaagatataattaaatgactttcaaccaaacacctttattctgctggattctcattttaaagaataaagtaaaaatttactgtattcttgttctgaggcccttgctttgtgccatgccaaaaataaaaatggcctataataatttcatctggt

SEQ ID NO: 166922 - DNA, 526 bp, Homo sapiens
tcattgatttagaacctcttggaagtgcatctttattggagtgaaacatacatgcctcaattattttagcttctttagtaaaagtgaacatacaaataaatataagaacctagaaagatctggagatgtaaagcaagattataatgtatttttattttagaaagaaatgaagagaacttggaactaaggtttgtttttttgcatcacataactgtttagacttcattagtaaggttacctactgaaaaaataatttaaktggtcatttgcttattaaatgtaatttaatataactttgaaagtaatagcagcaataaaaacaatattatacagtcatgaaaataacaacagtgaaagtcttcctaaatattaatagcagataaaagtgaattttacaagtctctaatctataattatttgtaagttatctaaacagaaactaaagttttcaaatagcagcatcaacagtttacatgagagtatctttaccttttaattttaggtaatttattactttcctcattta

SEQ ID NO: 166923 - DNA, 502 bp, Homo sapiens
gtacaggacactgaagatttgattgagcaaatcttcagatactagtaaaagtaaaaacaaataaaccttaatagaatcattaaataaaattgagggtcactaaaggagcattagaacattaattcatttatacattcaacatttcttttttaacctccatcgtatatcaaaccttgtccttgacactgggaatacagcaatgaacaggagagaaagtgttattgtctcatagagtttatatttatttctagaagacaaatgtgaacaacataaaaacttaataaaagtgctaattatgaaaaataagtggkagaacaatgaaatagcagggggctatggtcttgataattgaaaaggaagaacactgatttacttaaataatgatagagagcatcactttgtggaaggtgtttcaattctgacctgataaatgaaaaggaactggctttgggatgatccaatgtgtaactccttttaataaagtaagagattcagtcatcaa

SEQ ID NO: 166924 - DNA, 427 bp, Homo sapiens
atcattaaataaaattgagggtcactaaaggagcattagaacattaattcatttatacattcaacatttcttttttaacctccatcgtatatcaaaccttgtccttgacactgggaatacagcaatgaacaggagagaaagtgttattgtctcatagagtttatatttatttctagaagacaaatgtgaacaacataaaaacttaataaaagtgctaattatgaaaaataagtgggagaacaatgaaatagcagggkgctatggtcttgataattgaaaaggaagaacactgatttacttaaataatgatagagagcatcactttgtggaaggtgtttcaattctgacctgataaatgaaaaggaactggctttgggatgatccaatgtgtaactccttttaataaagtaagagattcagtcatcaa

SEQ ID NO: 166925 - DNA, 603 bp, Homo sapiens
acgtatttatgtgaacaagttttcaaatcaggtggatgagtacctatgagcataattgctggattctatgggaatactatgtttagctytgtaagaaactaccaaactgtgctccaaagtggctataccatgtgtcatccctaacagaaatgaatcagagttcttgttctccacatcttcaacaccaattagtattctcagggcttttttaaatctatttggcaacaaaattaaattaaacaaatctattgaggcaataaaaatctataacaaaatttaccatcttaatcatttttaagtgtacagattactagtattatgtataaccacagtatgcaaccaatctccagaacttttttaatcttgcaaaaatgaaacattgcgccagacgcagtggctcacacctgtaatcccagcacattgggaggccgaggcaggtgaatcatttgaggtcaggagtttgaggcaagcctgggccacatggcaaaaccctgtctctactaaaattacaaaaattagccaggcatggtggcatgtgtccatagtcccagctacttgggaggctgaggcaggaacattgcttgaacctgggaggcggaggtt

SEQ ID NO: 166926 - DNA, 603 bp, Homo sapiens
acgtatttatgtgaacaagttttcaaatcaggtggatgagtacctatgagcataattgctggattctatgggaatactatgtttagctctgtaagaaactaccaaactgtsctccaaagtggctataccatgtgtcatccctaacagaaatgaatcagagttcttgttctccacatcttcaacaccaattagtattctcagggcttttttaaatctatttggcaacaaaattaaattaaacaaatctattgaggcaataaaaatctataacaaaatttaccatcttaatcatttttaagtgtacagattactagtattatgtataaccacagtatgcaaccaatctccagaacttttttaatcttgcaaaaatgaaacattgcgccagacgcagtggctcacacctgtaatcccagcacattgggaggccgaggcaggtgaatcatttgaggtcaggagtttgaggcaagcctgggccacatggcaaaaccctgtctctactaaaattacaaaaattagccaggcatggtggcatgtgtccatagtcccagctacttgggaggctgaggcaggaacattgcttgaacctgggaggcggaggtt

SEQ ID NO: 166927 - DNA, 644 bp, Homo sapiens
tctattgtgcactataacatcagaatattttatgctattaaattataacttgaacccattgaacaacctctctcaatcctcttcttctcacttcagtcctcagtttctgctttgataatatcaacttaaaaaaattaggttccacatatgggtgtaatcatgtggtatttaccttattatgtctgccttaattcgtttaacataatgtccttccgtttcatccatcctggcacaaatgacaataattmattctttttatggctgaatggtattccattgtgtgtatgtatcttagtcattgtttgatacttagcttaattccatatcttggctattgtatatagttctgcagtgaacatggaggttgatatatgtttttgacaaacttattttattttctttggatgtatacccaggaatgggattgctggttcatatggtagttctatatttaattttttgaggagattttatacaattttccataatggctatactagtttagaatcctaccaacagctcaccaacacttgttttcttttgtctttttgattttctacacagcctcaccaacacttgttttcttttgtctttttgataatagccattttaactagaatagtgatatatcactgtggttttga

SEQ ID NO: 166928 - DNA, 571 bp, Homo sapiens
tgacaaacttattttattttctttggatgtatacccaggaatgggattgctggttcatatggtagttctatatttaattttttgaggagattttatacaattttccataatggctatactagtttagaatcctaccaacagctcaccaacacttgttttcttttgtctttttgattttctacacagcctcaccaacacttgttttcttttgtctttttgataatagccattttaactagaatagtgatatatcactgtggttttgatttgcatttccctgatgattagtgatgttgaccattttttatatacctggtggccatttgtgcgtcttcttttcagaaatgtctmttaaagtttttatttttaaatctgattttttgtttgttgttgttttgctattaagtcgtctgattctctgatatattttagatagtaaccccttgtcagatgtatggttgcaaatattttctcccatttttaggttgtctcttcattctgttaatagtttagtttgctgtgcaaaagctttttaatttgatgttgatgtaatcccatttgttgatttttg

SEQ ID NO: 166929 - DNA, 684 bp, Homo sapiens
tgatttggggtcttttttcacctgtattcattatttttgagcactttcttactcttaggcacagcatgatattcaaggatcatcatgtgtatcttctaccccagccctggaatgtaccatgttttaaaatagtttcattcctttctgtggagaatcaaatttagaaacgaagatcttggcaataggtttgcagacaggtactgaggtgttgctactcttaaagctctctcagtgaacacaggctcacacatacacatctaaattaattttartatctctccatatatactgaaaactttgagttacaccaatactttctattttgattcactatatatgactcattcgaatttcctgcctttgcatatttgcaagtcccttccataaagtcgaaaattagcttccattttcactagtatatttacttatttaattaatccacctatatgtaaatatttatatttacttatgtaagtaatatatttacttatttaattaatcctcctatatgtaaataatctcccatcactttggacagtctctcaaccacaggtgacccccctgcaccagctcaagctccagcattccatgccctaccacacaaatgatacaatgcactggattgctgttgtcatcaccactcaccaaatacaaatgtcccacaagtgaactgagactcttagc

SEQ ID NO: 166930 - DNA, 684 bp, Homo sapiens
tgatttggggtcttttttcacctgtattcattatttttgagcactttcttactcttaggcacagcatgatattcaaggatcatcatgtgtatcttctaccccagccctggaatgtaccatgttttaaaatagtttcattcctttctgtggagaatcaaatttagaaacgaagatcttggcaataggtttgcagacaggtactgaggtgttgctactcttaaagctctctcagtgaacacaggctcacacatacacatctaaattaattttagtatctctccatatatactgaaaactttgagttacaccaatactttctattttgattcactatatatgactcattcgaatttcctgcctttgcatatttgcaagtcccttccataaagtcgaaaattagcttccattttcactagtatatttayttatttaattaatccacctatatgtaaatatttatatttacttatgtaagtaatatatttacttatttaattaatcctcctatatgtaaataatctcccatcactttggacagtctctcaaccacaggtgacccccctgcaccagctcaagctccagcattccatgccctaccacacaaatgatacaatgcactggattgctgttgtcatcaccactcaccaaatacaaatgtcccacaagtgaactgagactcttagc

SEQ ID NO: 166931 - DNA, 442 bp, Homo sapiens
tttccagtgctttaatgtgtttagagaacccaaagtgagttactattttatttttaattcaaacttggcttaggtttggtcctctaggagataaactggaagacattggttttgaaagaataataacaataacaatattaaggtttatgttatttactaattgttttttattcattcccaaatggctgaaaatgcctcttggcaaattttccaagtgtttgcaggtgccgagtatgtcaaaatttcacctgcaratttctatgaatgtgatttcagtaagcttcgtgctgcacagtatatggtaaatgcaataaaaacagatggacctagggacagctggagtctgagaagaaaaaatgaaaataacaacaagagcaacagaaacaataatctggcaattgttatcaatgtatttctcatctttcattggattagggagtag

SEQ ID NO: 166932 - DNA, 637 bp, Homo sapiens
aatgtcaaatacctcatgttctcattcgtaagtgggagctaaacaatgggtatatgttgacatacgaagtggaataacagacactggagactccacaggtcagagggtgggagggagtttagggctaaaaaattacctgttgggtacaaagtatactattctggtgatcagtgtaagaaaagcccagactttattactatgcaatatacccatggaacaaaactgcacttgtaccccctaaatctattaaaaaaaaaaaaaccaaagttcttaaaacagctcgccatgccctgaatgattaggcatgtatcctcaatatctctaccttttttctagcctcagtatctaccactttatctcccttyttgttccagtcaaaatgaacacaattctgaatatactaagcaagttcctgtctcagagcctttgcacttgctcttcatctgccttaaaggcttttgccagataactgtatgtctgttttcaagtaccagttccattagaaaagttttttctaaccatataatttacacgaggtacatgttctttgcctaaccttaattatctccttagccccacctgacacactgaacacgtagttgctggtttattgtttgtcttcgctacatgtaatata

SEQ ID NO: 166933 - DNA, 637 bp, Homo sapiens
aatgtcaaatacctcatgttctcattcgtaagtgggagctaaacaatgggtatatgttgacatacgaagtggaataacagacactggagactccacaggtcagagggtgggagggagtttagggctaaaaaattacctgttgggtacaaagtatactattctggtgatcagtgtaagaaaagcccagactttattactatgcaatatacccatggaacaaaactgcacttgtaccccctaaatctattaaaaaaaaaaaaaccaaagttcttaaaacagctcgccatgccctgaatgattaggcatgtatcctcaatatctctaccttttttctagcctcagtatctaccactttatctccctttttgttccagtcaaaatgaacacaattctgaatatactaagcaagttcctgtctcagagcctttgcacttgctcttcatctgccttaaaggcttttgccagataactgtatgtctgttttcaagtaccagttccattagaaaagttttttctaaccatataatttacacgaggtacatgttctttgcctaaccttaattatctccttagccccacctgacacactgaacaygtagttgctggtttattgtttgtcttcgctacatgtaatata

SEQ ID NO: 166934 - DNA, 578 bp, Homo sapiens
gagcacactgatgtgctcttcagagaagattggatggtccaagaaaacttggaagaataagactttaaatacaaccacctctcgcctttgagtagctaactcattttaggcttctagctaatcatgacttctcaagaaastgttattttccccttataaattagacttgttttatacacccacccccaccacacacacacacaaataaaatagcacttctttctcaacaccaagcagagttctagcacagaggagatgtgcaatacctattagttcaatgggtgtatgaaataaagagtgaataggggtgcatatatgaagggatggatggttgaatgggcaccacgatggatgacaaattaaatcatggagttaacataaatattcttgagttcacaataaagcaaaaagaatgtggaagcatgtcaggtacattatctcatatgaataaagatattatctttagggaggtgcttacatagtaaatataatgtgttgccatcaggggagattatagtaattgccacttttgcagagtagaagagttatagacttgggagctaagccaacttggtttc

SEQ ID NO: 166935 - DNA, 578 bp, Homo sapiens
gagcacactgatgtgctcttcagagaagattggatggtccaagaaaacttggaagaataagactttaaatacaaccacctctcgcctttgagtagctaactcattttaggcttctagctaatcatgacttctcaagaaactgttattttccccttataaattagacttgttttatacacccacccccaccacacacacacacaaataaaatagcacttctttctcaacaccaagcagagttctagcacagaggagatgtkcaatacctattagttcaatgggtgtatgaaataaagagtgaataggggtgcatatatgaagggatggatggttgaatgggcaccacgatggatgacaaattaaatcatggagttaacataaatattcttgagttcacaataaagcaaaaagaatgtggaagcatgtcaggtacattatctcatatgaataaagatattatctttagggaggtgcttacatagtaaatataatgtgttgccatcaggggagattatagtaattgccacttttgcagagtagaagagttatagacttgggagctaagccaacttggtttc

SEQ ID NO: 166936 - DNA, 441 bp, Homo sapiens
aacatataacactatataaatcatatataaagaattttataaagagcagatgaaaaatcatgatctgtataaaacatagttgatcaatgatggtgaagggacgtaaaaagcacacactgtggctatgtcagataaagcatttttccttcatgaaaaaggttgaggtctatatttgagtgactcattggtacactcgggggatggaaaaaaaatggccttatgacattacacaatttttttaacatctctgagctacaccgtaaaaaaaaaaacttgtgacatttaattttcatattgcgtgtgagtaaacaaacacaacaaaaattgatacasagctagtaaattggtcttcatttttgtttttaaattttagatctacaaagtggtagtaatttataattcaaataaaattagtactctgagattgaaaataatttacct

SEQ ID NO: 166937 - DNA, 494 bp, Homo sapiens
atacagcctaagttatcagagattctaccctggtagagacttaaattttaggccctggagggagggaagaataaaaagagttctccttcaggcatttaaaatttcaaaataaatggcccatcagttgaaattctggagttcaaagcagtatttccttagtggattgaagagaatattttccaacagttctgcccctaacattcgtagaatggtatggaacaaatgtacaaatatatatatatacatacacacacacacatacacctaatatagaatagaatataagtaaaatatgtccttgtatcaactttacagatatatattcaaaataactcaacrtctaaacttataaataaaattctcaaagtcttctgtaggtcacacaaagatagcttggacttagcccccagctttactgctgcttctctttttcttcacgtactgcaaggggcttcagatgcatttgtatgggtaccacagcccattaatcaaag

SEQ ID NO: 166938 - DNA, 625 bp, Homo sapiens
gagtaattgtttaacattgttacattatattcttgccataaaatgtcaccaaccattaacaaaaatttttgagaaatatcccagctgacttgaaaatatttcacaaagtattattgagtgagaaaagcaagattctgagggtgtgtatttggtggctctaaagaagaataagaaaggatgttttctaagttggcaacttgatttaactggttaactaaaggagactggaaaagatattggttggaaggagaagaacaaaacaataaaggataaaaaagagagactgatccctgtagaacatgtgtgatataattgtgtttatcccttgctcatgaaaattttgtgcattcttatatgtacaataaaacttttaaatataaatatgcagtttcctgaatctgtgctagtcatatgaagcaatacctaagtatgtaccacagacttaataatttatttggtcctgattacccctagtaaaactaagcaatgactrctgacatttgtccttcaaaattctcagagagaaaggcaaaatgtcagtcctactcagttaccttcatagtatccactacattcagacatgactgagaaaattaaaggtgtgcagatagctgtctgatactca

SEQ ID NO: 166939 - DNA, 627 bp, Homo sapiens
tacctcaacttttatctctgatgctggtgattaatttttcccaatgtaccctcttctctgggacttggctgtattacagttttcttttaaaaagtcttgttccatataaccaatagaatctttgtgtattaaatacacatacacacacattattgtagtatcattgtgctggatgaataattttcataaattcaagagctagagaggctatatgtaaatagataattgaattatagtgggaaatgcacaagaaacagagtaattgtttctgagaatgggtcagtgaaatttttattaataaaatggcatctaaactggggtttgaagaataagtttttttaaaaaatacaattaatgaagtgtaaagggatattgtattttatataataggaaaccatcaattgaagattttgtctaagtaacaaataatagcaaataatctagcaaacaatattacctctatcagttaagatgtatcctgttagataacaatatactttaaaaaggttactaaatttccacycattgactaatactgtaactccatagtaacgatgtagttttataaatatagagctgataattcataattattatatctttcttacaacatggaatttttttata

SEQ ID NO: 166940 - DNA, 629 bp, Homo sapiens
ggttgtttctattattttaaactattttgagagttctctaaatattttaatatctktgaattatttggccatgagtaactacatgaattgggcaaaattattcttactgtgaatatatcaacagataaattataaattcacagagcatatttaattgagtttctcttcttatcatttggtgttccatatcttgttcattctggaaatgagaaagaattcctgcaaactgaacaacagattctatttccacttctatgcaagtgtggacctggataataacaaccacagtacatatgaatgaggagtgacagtgttggcatagggtgacctgattcccttatatgtttatagacctgtaaagtctaggatgtagtttcttagttattttcgctattatagacaagacagaggaacaatgatctttaatgtgctatttcagagcatgaatcacactttacaagccattcctgtcagcccataatataaactaatcttctaataagacactgtgtccttccatatagttcagtgaagtgcatagtgatttcaaccttaatggaaaatgattatcttttactgatgtgaccttttaacccaaactacagtccaagttcatctctatattttac

SEQ ID NO: 166941 - DNA, 387 bp, Homo sapiens
ttctaagtggagaaaccaaaaaagagaaagtttgtataatatgctacaactcatctaaactattattttttatcgttctattaatgttggctttttaatggaaggctaattcattgatttttaaaacttgttatttatttttctaatttatcatgtgttgttcattatgtttttatctcaagctacttgttccagttttgtctatctccccatttagaaagttatttcgctaggacttttaccttctctctttttamctcaatttttttgttctgtatattattactttcacattgttcagattttatcaattttttttttgttttctcttttttaatttcaatttttattttagattcaggaggtacatgtgcaggattgttacaa

SEQ ID NO: 166942 - DNA, 591 bp, Homo sapiens
atgacagcatctttcagtttaatttccacttgtaatatttactgtatattttgtgtactatacattcaatcaaacaatatgaatactatctgaatgatattatttctatacatgttttttcattgtagtcattacacaaaataagctgggtctaatatctggagtgattgagtttttaatatcaaccttgtgtcctgtaaccttgctaagtgcattagcttttatagctcttttatagttcctgaatattttatatatacaatcatgccacccgtgaataaaggaaatttaattgtctgccagaaaagacaaacaccctttaaaggaacacagcaaatccagcactcaacaacacaaacttaatgttcagcatccaatgaaaaggtactagatagtcaaagaagcagggagtgacatataaccagtagaaaaatcagtcaatagaaacagacccagaaattatagcaaatgattgaataagcagacaaggactttagaatagaagagttttaaggaaaacctaaacacagtgaggagaaacatggaagatacaraaaagaattaaacggaacttctagagatgaaaaatat

SEQ ID NO: 166943 - DNA, 595 bp, Homo sapiens
ggccccagaagcacctaattttgaaggctcagaagtgtgatagctggcagaaaagaagactaatcggcatactaatttatcagggtgtgttggcacaactattattaagcataagcaactgtttaagacatgctgcattcaytaaggttatatgtgctgccaacaaattactacatgcttaatttaaacctttttgtgccttccttagtaatccaggacttgtcaatatttaattgcgctaaatctttgattctttagataagaagcaattaacctacacaataaaactataatttaggaattacagactttcaaagtgatggaactgaaagagattttatatagcatctagtctaacctctacatgtgacacctgggaaaactgaagtctagagcagctgagagacacacctacagttacacagggcaaaggcaattctggcatttggttttattaacttattctaattttttcttactacaggaaaccaatatttggcttgcctaaatacacataccaacaatttaacactggacatatgtgttcccatctcaactctgcataatttggggttcacaaggcaatgaaagaaag

SEQ ID NO: 166944 - DNA, 595 bp, Homo sapiens
ggccccagaagcacctaattttgaaggctcagaagtgtgatagctggcagaaaagaagactaatcggcatactaatttatcagggtgtgttggcacaactattattaagcataagcaactgtttaagacatgctgcattcactaaggttatatgtgctgccaacaaattactacatgcttaatttaaacctttttgtgccttccttagtaatccaggacttgtcaatatttaattgcgctaaatctttgattctttagataagaagcaattaacctacacaataaaactataatttagraattacagactttcaaagtgatggaactgaaagagattttatatagcatctagtctaacctctacatgtgacacctgggaaaactgaagtctagagcagctgagagacacacctacagttacacagggcaaaggcaattctggcatttggttttattaacttattctaattttttcttactacaggaaaccaatatttggcttgcctaaatacacataccaacaatttaacactggacatatgtgttcccatctcaactctgcataatttggggttcacaaggcaatgaaagaaag

SEQ ID NO: 166945 - DNA, 595 bp, Homo sapiens
ggccccagaagcacctaattttgaaggctcagaagtgtgatagctggcagaaaagaagactaatcggcatactaatttatcagggtgtgttggcacaactattattaagcataagcaactgtttaagacatgctgcattcactaaggttatatgtgctgccaacaaattactacatgcttaatttaaacctttttgtgccttccttagtaatccaggacttgtcaatatttaattgcgctaaatctttgattctttagataagaagcaattaacctacacaataaaactataatttaggaattacagactttcaaagtgatggaactgaaagagattttatatagcatctagtctaacctctacatgtgacacctgggaaaactgaagtctagagcagctgagagacacacctacagttacacagggcaaaggcaattctggcatttggttttattaacttattctaattttttcttactacaggaaaccaatattyggcttgcctaaatacacataccaacaatttaacactggacatatgtgttcccatctcaactctgcataatttggggttcacaaggcaatgaaagaaag

SEQ ID NO: 166946 - DNA, 508 bp, Homo sapiens
ctatatcttattatattttccaaataggtcagtgtttgaaattccctttcctttaaacatctatgtctaatatttttcacttttgtaccataggatgtgaccccttgaraaaatatacaccattcatcacctcttgtattttcctgggattaaacagagaaactataataaaataagctgcataaatacctaagaaagaccttccaaggttcttatgatgtaagcaacttcctacttaaaaggaatgccaatacctcagtggctaataccaaagaattggataataacttctctatacaacttctagtaactaatggcaaaatgacagtatgtgtgtcagttgctaggacagagtaatggattctgctgtatgttcatatgaaacatatatacagcccaaggagaagatgtgatgtatttaacgtgatcttcatttaacatctgattaaggcaaagctggtgcatttttaaaaacagtctttcaaaaccaagagacaggtcagtgaaa

SEQ ID NO: 166947 - DNA, 470 bp, Homo sapiens
actaggataatatggtataagataatatcctatactagggtgacggaggattctggagacaggaagcaaaaacagtcaaagaaaaactgactgaagatgctaggaatgaaaaatataattgttaacataaggaactcaacagatcacttgagaacaaaacagaatgcacgtagtcatgaaatgaacacataaagtaaaaaatcaggtcaagaaccctcccacagagattaaaacagttaaacaaactatccaagtaaaagttaagagacatgaaggagaaaaatagaagttaatatttgtatgttagggrtctcagagggagagagcaaaaataagtatcggtgagaaaatactttgaaaagtcatcaagattttttcagaattaaaggatgatgtggtagattttgcaaaaatggcccccacgttgtttcacctccctacagccatgcgcgttggtagtcctctcccag

SEQ ID NO: 166948 - DNA, 589 bp, Homo sapiens
gttgtattaatcctggttaataagttggtcagaagataagaaaaaacagytggaagagggagtctcgtttaaatctcccaaaggtaggtgtgaacttgagcatattaaatagctttcaataattcgatgtgctcattttgtcagcattttaattctcatccctttatggaccaatttgagtgacataactcagcccacacctggtttgacgtgacagatagattcgaagcaccacacattgttctcacctttacactgctaagaaacttactagaacagattcagagttgagtgagttgtgctccactctaaccttccacccagggcatgacatgtctttgaaaggacagcactttgagaatcaagttcaggggtagaatcaacgattgctcttcaagcctggtaaatatgacaagatatctagcactgtcttttcttttctcttcaagcctgcttatattcttatattctttctcttaaactcttcctcttcttttcttctccaaccctctacccactaccaccatcctgctcataagaatggcttagaaaccaaaccaaacaaaaccaatctgaagcaaaccaaagg

SEQ ID NO: 166949 - DNA, 562 bp, Homo sapiens
tattgagctatgccttctactttctgaaccctcccaaaagagtcatgaaatcccttgcattgagtttctaaacaataaacatgcaactacagaatttcatctagcttctgtcctacccaaagtgacatcaggactcaaagcatgaatgagaaggtattttggcaggaaaggtattattttacttccagaaatgtataagctcttgatagttaaggccttaacaaaaagcttcctaaactattataatacatataacatttctctacactttggtgctttatttcattatgacttttataaaaagcggtaaaggtaaatcatgtattcatccttattttttttcctgaaaatcagcaaaattctgaacctgttaatttatcatcactagcaactaaggaattctcaacaaaaagtaagcatcatacttagaacacattcccaactattaatttttccactttcatgattcaattttaatctcatagcaaagatgaaaaggtttatsttttagaggaaattcactctcctcagcccttcttcctaaaatctatatttggattca

SEQ ID NO: 166950 - DNA, 510 bp, Homo sapiens
tgactgcagatgcttcccactaagtatcgtcaagtcagcgtaaagaatacatttttggtgctaatgcagcttgatgcaagtcctactagcagtgagggaaggaaattgctgcatattttaggacacactgcatttctttatttttgctaytctccactctattttaagcttagacacactcatacaaaattaagtttaatacacagtttaaagacatatagtacacaattttaataattaatcacgtgatgataaggaaagcaaagccaatatacttctgttcttcatgattcatagaaaaggtaaccaaattccaggtcaagaccatggtctgaacacatgcctttacttgtggtttctcttaaacctcactaaagtgactaaggagattatcttttaaaggcacaaacccaaagacaaatgaaatggaagagaacacaacatcaacaaaactttgcaagctatattacaaatggataggtggttaatgacccaaacaggcacaagaaa

SEQ ID NO: 166951 - DNA, 604 bp, Homo sapiens
tcaaatggtaattctatttttagttctttgagaaatctccaaactgctttccacacagctgaactaatttataatcctatcaacagtgtataaagctctctttttgccagaatcttgccaacatctgttatttttgactttttagtaatagccgttctgactggtgtgagatgctatctcattgtggctttgatttgtatttctctgatgattagcgatggtgagtattttttcatgtttgttggctgcttgtatgtcttctttgagaagtgtcygtataacatctgattctgattaaatccttacttaaggaaaaaaattaggagactaatccactgggaaaaatactcagcaagacacaaaaacctgcacttaactaccattctattatatcttcctccctgtggctgtgtcttagtctgaacttcaataattaatcttaggaagtagcacagttttgttgaaatgataaaaatatagagtttattgacacacacttaatgtaatcttagagatctagagactaaagagaaaataaaatgcacagttaatcacaaaatattgccacaagagaggaaacatacatgattgcaatcataaaatt

SEQ ID NO: 166952 - DNA, 164 bp, Homo sapiens
gactatatgtttcctggactataaactccttgaggtcaggagtccttagccacctctacccttcttggcaagaacccacatcactcagcaggacrgcctgggcacattcggaacttcccaaaccctgtgtctgacagttgactgactattggcgttagcattgc

SEQ ID NO: 166953 - DNA, 270 bp, Homo sapiens
tgggtgaaatcagtaggatcggccttactaattcttaaaaggcagagagcctggtcaggatgcagatgacagggctttctgcaaagttattgcctgcggagaatcacctgttctttgctcaaaggatttctgagccacagaaccctaaccccagttgttcccagccccaaccacaggaattagtccctgatatcagactctggatacatggagagttacagytcagcctctgttctgccttctggttcacatcattgtatagactccttg

SEQ ID NO: 166954 - DNA, 603 bp, Homo sapiens
cactcccctgcctttctccccccgggccccattcacatactctgctgagtctaccatgttgtgccatctccctctcttttctcctgtgaatacatcaactttctgtttgtgagaccatcctgtaatgcagttggagggcaatggggcaagaaggcaactgagaattggatttcagatatcgctaatcatgtacctatgtatgccacctcctagataccatctccacccccactctgctgttcatcgctgttgctaacctgttacctgaaaacctaggccacgatatgaccagttaacacaccaaagtaatttgaagaattatatgcaagtaacaagaaacatttagcgatcatccagaagtgcttactagtaaagtaagaatatgtcagaaacatgcctgttgtttaggtactgagatagacattctgactctatgkttcaaaacctgggttccctggatctctgtgtaggaaccaggtccttaagttatgtgcaatatgttaaaaagtcacagaaattgcacacttaccaacaatattttacaggctaggtaaagtatgaatttttatgttgaactagaaatacataacctttgtgtagtaa

SEQ ID NO: 166955 - DNA, 603 bp, Homo sapiens
cactcccctgcctttctccccccgggccccattcacatactctgctgagtctaccatgttgtgccatctccctctcttttctcctgtgaatacatcaactttctgtttgtgagaccatcctgtaatgcagttggagggcaatggggcaagaaggcaactgagaattggatttcagatatcgctaatcatgtacctatgtatgccacctcctagataccatctccacccccactctgctgttcatcgctgttgctaacctgttacctgaaaacctaggccacgatatgaccagttaacacaccaaagtaatttgaagaattatatgcaagtaacaagaaacatttagcgatcatccagaagtgcttactagtaaagtaagaatatgtcagaaacatgcctgttgtttaggtactgagatagacattctgactctatgtttcaaaacctgggktccctggatctctgtgtaggaaccaggtccttaagttatgtgcaatatgttaaaaagtcacagaaattgcacacttaccaacaatattttacaggctaggtaaagtatgaatttttatgttgaactagaaatacataacctttgtgtagtaa

SEQ ID NO: 166956 - DNA, 550 bp, Homo sapiens
gggggttacaaatctccacttttttctcacccagcaggtattaggaagatgcaccctgccgtgctatcctgaagaaaacctctgccccaggaacaaacagtcaggacagtctggactctattatttcatttcttccacacaactaattgtttgtttctagagaaactgaacatgygtcatcttgtttcactgcttttggtaactacacatttcagtgattactattctacagattcacacagagtttctttaaggcacataacctacttaattataaggattcttgtattcatcacttcttcacatcttcaatggtcctactgttttcaacttacttgctcaacctggatactaggcttccaaattaattttatttatttgaacatgtttttattttattctttaattgacatataatgattgtacatattcatgtggtatgtagggatgttttgagacacatagtgtatagtgatcagattggggcaaatagcatatctatcatctcaaatacctattatttctctgtgttgggaacattcctctagct

SEQ ID NO: 166957 - DNA, 550 bp, Homo sapiens
gggggttacaaatctccacttttttctcacccagcaggtattaggaagatgcaccctgccgtgctatcctgaagaaaacctctgccccaggaacaaacagtcaggacagtctggactctattatttcatttcttccacacaactaattgtttgtttctagagaaactgaacatgcgtcatcttgtttcactgcttttggtaactacacatttcagtgattactattctacagaktcacacagagtttctttaaggcacataacctacttaattataaggattcttgtattcatcacttcttcacatcttcaatggtcctactgttttcaacttacttgctcaacctggatactaggcttccaaattaattttatttatttgaacatgtttttattttattctttaattgacatataatgattgtacatattcatgtggtatgtagggatgttttgagacacatagtgtatagtgatcagattggggcaaatagcatatctatcatctcaaatacctattatttctctgtgttgggaacattcctctagct

SEQ ID NO: 166958 - DNA, 422 bp, Homo sapiens
ctttaaaagcaatctacaaccctttctatggcaaycttgacagctcagtcattttcctcaaccggaaatacttcaatggtagtgggaggatgctctaacttttggggcagaatttcagagcagttctgatgttcaatagaaatctgcttctttgacttgttcaacagtagatgcaagttatgatcttcctgtcaactgactttggatttttgaaagtcactatgcagtttcccctccattttttctttctccaagactaaacatctccaagatctttactaatgtctcatatggtataaaattcctttctctcctttgtcatcatgatcaaaatttctctatttgtcagtatctcttaaaataaactctgtctatagtcctctcccagataagcacttgccaaggttctttaagattcaagg

SEQ ID NO: 166959 - DNA, 449 bp, Homo sapiens
aaaacaggtgcagacatgtaagttctcaacaacaacaaaagtaattgcccatatcattttccaggaagcagccagagggtagcttcccccaaagaagagaatgagccaagataaaggaagacatggaatatagaatattaagaagtccaacctagaaggaaatggaaatctctaggatgatgtaaatcttcagctgaacaacaataaaaaattctgcaatgacaaayaagtgtagggcacagcaggcaccccagccagaacaggccgtgtgactctgaggcagcacgccactatcgatgtcactgcctcctcagcctcgtgccacctcctccctgggatgaaacaatgggaggatgtgctccaccaaccaaggagataaagtcaaaaaataggaagatgtgagatccaggaaacagagaatccaagcaggaaaaaggcagaaggaattc

SEQ ID NO: 166960 - DNA, 318 bp, Homo sapiens
accttattttccaaccacataaaatacataatcattgctaaagacttattcacagcatactgttgataaatcaatggagtagacggctagctggcttctgtcctaattaataaggcctgcctccctgtctgtatatgaggactaatggaaatgaggcagtttatactagtaaataccatggtatatraggctgcccatctcgtcactgtccaaagagcatgccatgcccctaaatacatacaaaagacaaattcatggagaagggatacataccaaaatactaacgtcaaggtagtctagcagaaggtgaattttctc

SEQ ID NO: 166961 - DNA, 589 bp, Homo sapiens
tcgtattgtttattctaacacattttatatatttccttactattgtaagtagaaccttttatttactctattttcttactgccctttattggtatgaaagaaatgcattgattttttgttaatttatttcatacttggcctttttgtgaactcttattagttttaggtgattttccattgatattcatagtataaaaaggagtatatayagcctttctccctggctcctggcagagatcttcagaatcccgtgggatttcctgagtgctaggagtgcctatataatgctaatgaagcaactcctagtggctccctaaggttggaacttgggaccagctcaatctcaggggctagaaattgaatttgattgcttggccaacaatttaatcaatcatgcctacacaatgaaacctcaataaaaactctggacatagaaactcagtggagcttcctggttgtgaacatgatgatgtgctgggagggtggtgtgcctggattctacaaggagagggcttggaagctccatgtctgggaccctcctgcccctcacccatgtgtctcctttataataaaacttataaaactatgc

SEQ ID NO: 166962 - DNA, 530 bp, Homo sapiens
aaagagatttctaagcagcaaagcattcaatatttgacctggctacttctaacagggtatggtcatatgtagaaaatagattacctgaaattggaacttatatttaaagggaagcaaagtgtgaaaagtttgaaaaatttgtggcctaaccatgtggtcagaaagaaaaatgaaaaaaaaaattttctggggaggaattcaagctggttgcagaaattcatataagtaaagaggagctgaatgttaatatccaaacaatgtggaaaattcatcaaagagagacattcaccgcagaacctctcatcacaggcccagatgcctaggagggaagaacggttttgtggactgggcccagggcccttctcccctgcataatgtcaggacgctggttactgcatyccaggcacaccagccatggctaaaatggccccagatatgtctcaggccactgcttcagaggatgcaagccacaagaaaccttggtggcttccaagtataagcctgagggtgtgcagaggataagagttgag

SEQ ID NO: 166963 - DNA, 430 bp, Homo sapiens
atgcagttcaacttttctatatacagacagtccttacattgcaaagtagtctgggaccattaaaagcacgatgcaagctgaaatttctgatatgatgaagccagcctttattggcagtgaaatgttcttcttcagtcttcttgtagctgccattttcttcaatatggcaactagaacctttctacctgaatgctagccaaactgagtagaagacatttgaagctgcactgaaaccaaaaatttagcgsagactactcatgtaatgaagatagtactagctacattagattttcttgtcatttgagtgtacctagaattttatttttcctacgaaatgaatcttgggtcctctctctaaactagcttcatatcccatggtgaggtaatctgttgtgatttatatatttatatatagatttattatataata

SEQ ID NO: 166964 - DNA, 531 bp, Homo sapiens
gagcaacatgaagcaaaactttgctgttagaaaaacggaggcttggttgtgcagtgtgtgagacagaaagtgtcttgtctatgaagcagctacagtttgtcatagtattctagaaaccaaatgaacatagacacgtagatgtgattccacgacattamctgttcatattgcttcactcaaatcaagcaagacctgaaattatcaagttattaatttgctataaaaattcttcctttactttagcaaaaagatttgagactgtcagcagaaacttcctccaataagtgacacgcaaacatacacacacatacatacaagcatgcaaacacaaatattaaggaatacacctgcaaattagttttaaaaacaaattcatgtttggtaaaagagctaaaacacagtcaaagcaaataatttttcaggacgataaaagctcatgagtccactgatttttatttgtctgtatttacagtctttgtttctgctattgttttaagtacctacatgttttccatcattttcaagggtatt

SEQ ID NO: 166965 - DNA, 488 bp, Homo sapiens
tttattctctccggtttccccattactaccaaagagaaaagagaaatcatagtaggatcaattcatttgcaaaatacacttttccttgaactgtatgctgctccattattattataattaacatgttaccctggaatctgacacccgtctgctaccactataattcacacacatacaatatgattgtgagtgttcakacacatatatatatataaataacaggaaaagaaataaaaccagaatttcatgttatcttcttaatattggttactagccttatactaatagttattggtatattccctttagccaatgctttatatcttattagctctactggtatgttgaaccactttttttacattacacaaaaacatttatgataatctgataacaaatgcacattttacacaaattaaactagaatgtaacacaaagaaattgctttaagtcgataagttttgtggttggttgtcataaagcaacag

SEQ ID NO: 166966 - DNA, 488 bp, Homo sapiens
tttattctctccggtttccccattactaccaaagagaaaagagaaatcatagtaggatcaattcatttgcaaaatacacttttccttgaactgtatgctgctccattattattataattaacatgttaccctggaatctgacacccgtctgctaccactataattcacacacatacaatatgattgtgagtgttcagacacatatatatatataaataacaggaaaagaaataaaaccagaatttcatgttatcttcttaatattggttactagccttatactaatagttattggtatattccctttagccaatkctttatatcttattagctctactggtatgttgaaccactttttttacattacacaaaaacatttatgataatctgataacaaatgcacattttacacaaattaaactagaatgtaacacaaagaaattgctttaagtcgataagttttgtggttggttgtcataaagcaacag

SEQ ID NO: 166967 - DNA, 562 bp, Homo sapiens
attgatgatttgataggtgctgcattgaatctgtcaattgctttgagtagtatgaacattttaacaatattattcttctaattcttgaacatgtagtatcgttccattatttgtgtcctcttcagtttcttgaatcaatgttttatagatttccttgtaagaatcttttatgtctttggttaagtttattcctaggtattttattttatttgtagctattatagatgagattattttattgatttctttttcagattgttcatgatcagcatataaaattgctacagatttttgcatgttaattttggatcctgaaattttactgaatttatcatgtctaatagttttttggtggagtctttaggcttttctgaatagaacatcatatcatttgcaaacaaggataattttcctttttccttcccaatttgaaacacattttatctctttctcttctctaatggctctagttaggagttcaaatactatgttgaataatygtgaagaaagcgggcatccttgtcttgttccagatcttagaggaaaggctttcaatttttcc

SEQ ID NO: 166968 - DNA, 368 bp, Homo sapiens
aggctgaggaaattcaagtattatgttccagattccagaaccagcaagaagcagcwtcagaatttgaatccagctttctgggagtcaacacctgtgtatcaactgttttactatcactaaaggggcctctgtctcataaaacagaaatttgattatttggactcaagcttattagaaataatattatgtctttgcctgtgttagtcttatgctaatagaaagcaaacagactaacaaaaataattaacaaaaccccttaccccaaaatatagttactaatactccaaggtaatatcattatgcttttccccacaagtcagtccttgaaaccacctcaaaaccaatcaagatccctgatcttgagattc

SEQ ID NO: 166969 - DNA, 553 bp, Homo sapiens
agcatgtgaacaatcagatctagatttccttcccagttccactgtttactacagttttttcttaaagatttattttccgattctcaattccttgtctctataatatagataataaacacttagagttagtttttcagagttactatgatgtgataatacataagaaagcacctaacatattgtctggactaataaagattcattatgctattatcttccttcctctgcaactgtaccagatatttctttgtcgttrcttatggttcattaatttttgtatctttattttttattgaagccatttaaatagtcacaaaacatattaattaggagggactaggcatagactgtttggctagaaaataagtagtctcttatattttaatattctcaggtcatctcaaatggaagatcacattactgggagatcagagtgtatacattgctattaatagttacctacttaatatcctttctctctcttcactggcaaattttattcacttagatgggcaccaatacactcaactaaaatatgtgatttttcctttct

SEQ ID NO: 166970 - DNA, 640 bp, Homo sapiens
gtttttgcagtgacatgaaccataaagttttatgcatccagtgcatgtgtatttatatatatttattcactagaatccaattgaccttgtattacagcccatatgcattaagatgcttatcgattttagaagacagttaatttctaaatgttaggaaaatgttattatactatatgcatatgttgaaatatctggtatgctcataatttttgtaagcgcttaactcactatttaaaaaatgttctgaacagatagtgttrcaatataaaatactaaacttagaacacatgattttaaatagtagatgactgtacaattattaattagtattacagatttgagacacatttatcttcaaaccaatttaatgcaaattagagcaaatgattacatggcagcataattatatctagcttgtgacctaccaaagataggaaatggcacacgagattaaaactggaggaaagaaatagaaaatcttgacccaaactaatatctctgtagttcaattacatgctactaaacactggctgtaccctctgctttctttagctgaaaacaccagtgctgtgttccctccagtgatctgtattcaagtacttgagaatttctcatcagtactagtgattctcactctggg

SEQ ID NO: 166971 - DNA, 560 bp, Homo sapiens
tttgaattgttaatatgaatttctctaacttttagatataaattaaacaaaaatccttaatctcttttttaactaaaaaaattcaggaggctgaggcaggagaatggcgtgaacccgggaggtggagcttgcagtgagccaagatcgtgccactgcactccagcctgggcgacagagcaagactccgtctcaaaaataatgatgatrataataataataataataataataataataataatttattgtgataatatacacataacataaaattaaccatgttaatcatttttaagtattctgttcaatagtgctaagtacaacatattaaacttctaaaagtattaagaagtcataaactctcttttctgattgttgtaaatttatttgtattaaggcaaaacatcttcctgagaacaacttcagtttcccattctccactggtgtgacctatcattcctacattctattagcattcaaattagaagtgaaaatgagataataagtatacagattcgttttgatccctaatgaaatatgaaaagaattaacatgaattg

SEQ ID NO: 166972 - DNA, 592 bp, Homo sapiens
ggtgaaactaaatagaatggcttaagtaaatayatgtataagttggtgtgaaacattgtaatctgaggttgcatgaatttcttggacagcgtttatctctatctgccagttatggtggtgggacggggtggttcaagttggatatcgatggattattttcattatcagcctatccataggaaatatgttggtgcattaatattttccaagttgaagttcctaaggagatgtaagaaaactgaatttgcccaaagcaagaggaagaaaaataaggaatatattttagtgtgataatgtaacagatcatataggctttctagtacataaatttttgctagtgtgacacaaggcatccacaggttgaaaacatgcaaacactttcattaatatgaatgtatgcaaaatatctcctatatgatacttgctcagcaaatgttaacatttatttaatatttctgttgtggaaataactcatggaaacagaggaaatatttattttctggagtaagttttgagtataagaaaatttccatccacctctgctcacaaacaagaaatggaactcttagtctgaaggctcagtcacctgaac

SEQ ID NO: 166973 - DNA, 592 bp, Homo sapiens
ggtgaaactaaatagaatggcttaagtaaatatatgtataagttggtgtgaaacattgtaatctgaggttgcatgaatttcttggacagcrtttatctctatctgccagttatggtggtgggacggggtggttcaagttggatatcgatggattattttcattatcagcctatccataggaaatatgttggtgcattaatattttccaagttgaagttcctaaggagatgtaagaaaactgaatttgcccaaagcaagaggaagaaaaataaggaatatattttagtgtgataatgtaacagatcatataggctttctagtacataaatttttgctagtgtgacacaaggcatccacaggttgaaaacatgcaaacactttcattaatatgaatgtatgcaaaatatctcctatatgatacttgctcagcaaatgttaacatttatttaatatttctgttgtggaaataactcatggaaacagaggaaatatttattttctggagtaagttttgagtataagaaaatttccatccacctctgctcacaaacaagaaatggaactcttagtctgaaggctcagtcacctgaac

SEQ ID NO: 166974 - DNA, 592 bp, Homo sapiens
ggtgaaactaaatagaatggcttaagtaaatatatgtataagttggtgtgaaacattgtaatctgaggttgcatgaatttcttggacagcgtttatctctatctgccagttatggtggtgggacggggtggttcaagttggatatcgatggattattttcattatcagcctatccataggaaatatgttggtgcattaatattttccaagttgaagttcctaaggagatgtaagaaaactgaatttgcccaaagcaagaggaagaaaaataaggaatatattttagtgtgataatgtaacagatcatataggctttctagtacataaatttttgctagtgtgacacaaggcatccacaggttgaaaacatgcaaacactttcattaatatgaatgtatgcaaaatatctcctatatgatacttgctcagcaaatgttaacatttatttaatatttcygttgtggaaataactcatggaaacagaggaaatatttattttctggagtaagttttgagtataagaaaatttccatccacctctgctcacaaacaagaaatggaactcttagtctgaaggctcagtcacctgaac

SEQ ID NO: 166975 - DNA, 648 bp, Homo sapiens
tgtatcttataccaatctgtgccccgataatgtcttccacatagtgcattttaaactaatatttgaagaataaattacataagtaacagttgatatggctgatagtcacggttacaaagacagttttttttatcatatacatacgcctgttttatttacaaattatttctccagattgaagtttttctcttactctattatggtgtacaacaattaagggaaagagagagttaaaatgtaaataaggagaattggcaaccacgcctctacaaatgttaggtcatcttcaagtgatgatctattatcatcrgtgacaagatgtcaaaattaggaagcagaaaacccctgcagctaatgtatggtaaattaactaattagtctattagtatccaagatcacactgtaaatggtttccaagtgtcagtatttaccttactaaattttaagaggcgatagccagaggttcaaatattggaatgttatttcatgaatgatataattcacttagcgcaaccgtatttctttttcctttgtaaataaagttaaaatatccatactttcatgcatcgtaatttagaagccgctacctatatatgctttttagtgataatttcatgtgtgaaaaagcataataaattgtccaaaaaa

SEQ ID NO: 166976 - DNA, 594 bp, Homo sapiens
gtcatcctttctcaattcttggatttatcaacaagacaactgtgcctatctgctgcacataaggccagggtccttgattactatccccacataattttggatcatgagtcctagacagcacacagtgcacaattcccatgctcatgtaggtcattcagtttcaacttcgactctccattcytgttttacattctcactttatttttggttgctgtggctttttctttcttatttttcaaatttgctatgtattaacaattgtatattatccaaaatttcatttttatagtgaagatagagctttgtatattatcccctgtcatagtgataagaaacgtgaatttgataaaaatctccatttacagtaaatctgtagcaaacattttgaaaaatgatcatttcatgatttaagtttatgcttatgtactaataaatacatttaagagaaacaagaagctctacttagctttgaatagatcttgaaccttcataatgagattatcactttgtttttctcaagtgttactcatagcctgtgattatgtacaatacacaaatgccaaaaaaatgccagcaacatatggagatggtcat

SEQ ID NO: 166977 - DNA, 587 bp, Homo sapiens
tatagtaaccaaaattgaatgtaatcaccatgactaaataagaaaaatggtcagctaggagtctaagcagtcattgattcaacaaaatatttgagtggcttctatgtgacaggtcctatgacagatgtttatttatatatatcacataatctaccccattatctactaataaactattaatgattagtttattttaatgctatctactatccttttagcrtcttcttgattgcatattatattttaaattatgttaatatttcattacacagtgaagctcaacgtcaggaattacatgttagaacacatgttaccactgtatgctgtaatagatttttattactgaagcaaactgttacaatgttattggtatatactggcttgacgactaaataaaggagcccgagtacgttaaaaactggaacttattagagagtaaacattttatctttgatttctaatttttctttttctttggcccagacttcttggatgatgcccagaggatggagggactctagacatctggcaatagaaaaaaacaagagaatgttcttgatacactcaccatgtcacagcattgcaga

SEQ ID NO: 166978 - DNA, 541 bp, Homo sapiens
ttttgatttgctttatttcatgtattattgagtagatacataaaaatatatgtaagttgaatttctataatgtggactttctttctcagttaacttactttggagaattacaagcttaraggaatcaatgttacttcaatagaaaacagatcctaagagttgggtgtgtaattaataattcataaaaatatatacatttttaggtaggtatctatggcttcaacatctatttaagtatcttattattatgtactcttaagttttgaagaaggaattataaaatttataattttaattgtataattttgtggtcaaagaatatgttgtatctaacatattaatcattctttgggatgtgttaagaactttgtggtgttgtatgtgtccaatttgtaaaatattccaaatgtgcttagaaatttgaatattatgtattcttgactttctgaaaacagggtcatttttctctgctaaacttattacttgcataatcaatttgtcagatttattctctaagtcaatgtccctcatgattcccatg

SEQ ID NO: 166979 - DNA, 587 bp, Homo sapiens
aacatcgcgaaaccccatctctactaaaaatacaacaacaacaacaaaaattagctgggcatggtggcgggtctctgtaatcccaactacttgggaggctgacgtaggagaattgctagaacctggaggcagaggttgcagtgagctgagatcgagccactgcactccaccctgggcaacagaagggaaactccatctcaaaataaatcaataaatcaatacaatacaaatatctacaaaatctccaatatattggaaaaaatagttaaacatctcttaacccctaatcaaagaacaaatcacaaggaaaattagaaactatttcatactagatgataataaaaatataaaagagagagagagcaaaatggccatctagacgcagcccagtggaagagctcccacctagagaccaaggcgactggcacactcctaacagatcttcagagggaaggcaccaasagcagacagcggaaacacacagaagctgggcttcggtggaaggaactaggaatgctacatggggctaccatgcaccaggactcattattggcccccagcaattttgggagaaccagtgagttgga

SEQ ID NO: 166980 - DNA, 344 bp, Homo sapiens
atattatccaagagaacttccccaacctagctagagaggccaacattcaaatctaggaaatgcagaaaaccccagtaagatgcttcacaggaagaccatccccaagacacataatcatcagattctccaaggtcagaataaaatgaaagaaaaaatgttaaaggcagaaaggtcaggtcacctacaaaaggaggcccatcagacaaacagtggacttcttagcagaaatcctataagccaaaagagattgggggacaatattcaacattcttttgaaaaaagaaaagaaatttcgacccagaatttcattcccaaccaaaytaagcttcataagcaaagaagaa

SEQ ID NO: 166981 - DNA, 459 bp, Homo sapiens
ctgtataattttccttaaaaagtgttttttgtttttttccaaagcaactatcctcaaaagagctgggcatagttctcctaggggcagcaccagtgttgaagtgtggggggaaactgttctaaatccttcaaacaatgtcacctttggagcagtaaaactgctcyctttttcccatgagagatgacaagcatgccccagcaatcatttcttgaaagcggatgcccggtgagagaaggatttgatttgctgaagggtcagccaagttaagccagtttcttcctcatttcttccctggctggaggttttgatggtggtgatggtggttgaactgaacccacttagaaaactgtcaaaggtttctggactctcaggtgtgccgtctcacatttggtctgctacagcaggtgcttcaaggctttcttctgccaagatttctttgttttattttatgatgttttc

SEQ ID NO: 166982 - DNA, 459 bp, Homo sapiens
ctgtataattttccttaaaaagtgttttttgtttttttccaaagcaactatcctcaaaagagctgggcatagttctcctaggggcagcaccagtgttgaagtgtggggggaaactgttctaaatccttcaaacaatgtcacctttggagcagtaaaactgctccctttttsccatgagagatgacaagcatgccccagcaatcatttcttgaaagcggatgcccggtgagagaaggatttgatttgctgaagggtcagccaagttaagccagtttcttcctcatttcttccctggctggaggttttgatggtggtgatggtggttgaactgaacccacttagaaaactgtcaaaggtttctggactctcaggtgtgccgtctcacatttggtctgctacagcaggtgcttcaaggctttcttctgccaagatttctttgttttattttatgatgttttc

SEQ ID NO: 166983 - DNA, 459 bp, Homo sapiens
ctgtataattttccttaaaaagtgttttttgtttttttccaaagcaactatcctcaaaagagctgggcatagttctcctaggggcagcaccagtgttgaagtgtggggggaaactgttctaaatccttcaaacaatgtcacctttggagcagtaaaactgctccctttttcccatgagagatgacaagcatgccccagcaatcatttcttgaaagyggatgcccggtgagagaaggatttgatttgctgaagggtcagccaagttaagccagtttcttcctcatttcttccctggctggaggttttgatggtggtgatggtggttgaactgaacccacttagaaaactgtcaaaggtttctggactctcaggtgtgccgtctcacatttggtctgctacagcaggtgcttcaaggctttcttctgccaagatttctttgttttattttatgatgttttc

SEQ ID NO: 166984 - DNA, 580 bp, Homo sapiens
aacattgggcctcttcatttatcattactaatacaatcttgaaaacattctccactttatttgcctccatgcaaattccatgtcttggaatttcctgggttcatcaygtaatagaaagaatgggctttgtacagacaaattcaaatattagatgttttctgatccctttaggtctttgagactcagtttcttcatctgtaaaacttgggcaattgttctttctatgaatgattatttcttgtatgaatgaacactgttaataaggttgagttaatgtttgaagagtatttgaaacataaaataatgccagatttataaacattctttttataacatgttgtattagtccattttcaaactgctatgaagaactacccaagactgagtaatttataaagaaaagatgtgtaattgccttacagttacacatggctggggaaacttcaggaaacttacaatcatggcagtaggtgaaggggaaacaaaacacatcttacatggcagcaggacagagagagacagagagagagagagaaagagagagagaaaggcagaaagagagagagagagacagtgagag

SEQ ID NO: 166985 - DNA, 580 bp, Homo sapiens
aacattgggcctcttcatttatcattactaatacaatcttgaaaacattctccactttatttgcctccatgcaaattccatgtcttggaatttcctgggttcatcacgtaatagaaagaatgggctttgtacagacaaattcaaatattagatgttttctgatccctttaggtctttgagactcagtttcttcatctgtaaaacttgggcaattgttctttctatgaatgattatttcttgtatgaatgaacactgttaataaggttgagttaatgtttgaagrgtatttgaaacataaaataatgccagatttataaacattctttttataacatgttgtattagtccattttcaaactgctatgaagaactacccaagactgagtaatttataaagaaaagatgtgtaattgccttacagttacacatggctggggaaacttcaggaaacttacaatcatggcagtaggtgaaggggaaacaaaacacatcttacatggcagcaggacagagagagacagagagagagagagaaagagagagagaaaggcagaaagagagagagagagacagtgagag

SEQ ID NO: 166986 - DNA, 613 bp, Homo sapiens
ggaatggtatgcataaggtagaggcctatttaattagaatggccagaccaatcttttctgaggagttagtaattaagccaagtcccagtgggtgataggagtcagccrtgtgatgttagaaggcaacagcagagacagaagcacctggaaagactctgagaacttgggatgctcgtgtacatgaaggacactgttgtaacttgggttagatggttcaaggaaagtggtctgagagtagggacaggctggttaatgccaggccttgtaagccataagtgtaagtagggtaggttaaactgctgttaacaattagacgtcaaaataaagactcaaacacaaaaggattctatttctcattcaagttcatatccaaagtgtctggtagttgggaagctccctctaatacattgattgagaaacctatggtcctgcaatcatcatttggctttgccatttcctggatctagtcacatttttgcactctgccaatgaaaggagaactagagtatgaaagaagccacttgcttcttaaaagagttgacccagaagtagtaaaactcacctctgctcacattctattgggaaaaccagtcacagttgtggcagtttaaaa

SEQ ID NO: 166987 - DNA, 570 bp, Homo sapiens
cacagttctttaaaggaatgattacttcactttactttgtccttagctgcttcttttaagacaggacatttccaggtatagaattcaggagagtaaaagtatttttgataaagtttaaagggattttctcaaagtatgtgattttctcaaaagtaggagtatttgatttctcatataattctccaataattctttttaaaaaatgtttgttcagagaaaaatttggaaagctagaaattacaattatcttttagtggaaaacattgttttcctatacagtaaacttttattattatttttttttgatgcagtctcgctctgttgcctaggctggagtgcagtgttgcaatctcagctcactgcaatctcctcctcccgggttcaagtgattttccagcctcagcctcctgagtagctgggattacaggcatgggccaccamgtccagctaatttttgtagtttttagcagagatggagcttcaccatgttggccaggctgatctcgaactcctgacctcaggtgatttacctgccttggcctcccaaagtgctggtattacaggcgtgag

SEQ ID NO: 166988 - DNA, 634 bp, Homo sapiens
tattttacttcctagaaaaaaactgagtttaataagtcaatgtataagttatacagggaaatgataaacttctctttgaaatttttgggaaacagaacaaataaattatgtagtgaaataattctacattttacagactcttttaaatcctgactttaataatgactctcagatggcatctgtgattcacagatgaacctgtagagtctaaagagaaggctatagtgattggggaggttatttactcagcccttgccaaagttccggtcccagtttgcttcctgaaaagagtgtctgaaccagtgactatcaatgcatgaggacaaagggaaaaaaatgtagggagagaatctcactatatttagaatctctcayacgagttttgtgggttattttttaaagtgtacatgatcacagattaaaatcttttgatatgaaagataaggaggtgtatggagataatatgtaatgtagaaaaaaatacagttagacagataaccaactagctgtattggatcaaacctctctctgagaacaaccaaaatagctgaataaaggggaaagaaaagaaaacaacaaatcgtttgaagatatctgagatcttactgaggctgccaagatttgtgaattcaag

SEQ ID NO: 166989 - DNA, 589 bp, Homo sapiens
agactctcactttcaatttagatcaaaggaggagcaagctattctgttttgagctctgccattgtaaatattgatggtgaaatggaccctaagataagattttctgggmagaattgcaacatataaagcatatatggatattaatttttactccaagtcaattttgaatatatttgaaagtgaatgtttaggtagtaatactacactttgaatgatatgcaatccttctaactaatatttttatggtgataataattttggttgtctcatccttgatcatcagcaagtttagagttccggagatgataagtaagtctttcactattcttccaaagagcaagcttgaatcccaaaacaaattttgtaaaatttccacgtcaaatcaaattctggtacatttgtgttgtgggtaatttcttattgcatagtatccatactctcaacaccttcaatatcatttactttgttgatcagcatatgcagtaccaaaggaacttaaagttgccaaagcacacaggccgagtctgtcttccatattcttattattggttagttgttttatatgaatgattataagatggcagttttg

SEQ ID NO: 166990 - DNA, 572 bp, Homo sapiens
ttattttctaaagtggaagtcatcccaaatttatgatggcaaaaagaggctcagagggtctgtgtcagttctccaaagccatatagcatttaaatggaaaagcaggtatataaaacctaaacctttcactccaaatctcacatttcttccacctaactctgctatcctcaataatcaatagtccagattcaatgatatagctattagagggtccccattcagacaatcaaaaataagaatttgtagaaaaatatattttagtagttggcaccttaatttcacgtagggtaagaactttatttagaaagatcctttggttactttagctaggaaatgtgaaaacatagtggtttgagtgagaggagatacttaactgctttgcttragaagaacaacagatatttggatttggaataaagagaataggaggacaaaaacaaaaaaaaagaaaaaggaggaagctggaaaacattgtagtggtctgcaacctgtaaagaaatgctgtctaggagaaatctctgtggcaaattggcgagaagaattatcataacaagaaattgcttattttaata

SEQ ID NO: 166991 - DNA, 624 bp, Homo sapiens
ttttatatagattaggagaggaacacaggacaggaagccagcaactggctgagctaaaattgaaacctgccagcctggctccagaatctatcttctgaggaattacactttgctgcctcttatattgccagataggctgtttgcaagaatattgagtaagatggtaagcaaaataacaggactagcatgcacacacacgygcgtgcacacacacacacaaacacaaacacagacacacatatacccttcaatttcctaaggattcagggaaaacaagaaatttgtccctgtaaatgagagctttccaaaacatgaatgctgcaacaggttccaggagatattgatgcctttggccctggggcagccagatggggtctagggtagccaaagccaggtcagttgcaaccccaatctgccgcttccaggctccttggagcgttttggagagaagcagggtctgaggttctacatacctccaggccactgacaagatgagtgatgtctgtcattgttgctgtgtgcccagttaggctggatgcagacagggaggtgctgtactacttggcattacacctcagaagccagctgcaacgcacagccttgctgtggaaatggaggaaacag

SEQ ID NO: 166992 - DNA, 530 bp, Homo sapiens
gatatgttttgcttccaggcaaatcttcaagagacattaagggattcctctattggtcttttctctttgctatgagactgggctgatccatatggggcctgytccttcaggtttgtctcaggagaagatgtagggagagctgaagctacccagcaagtacttaataatgttacatttaaaaaataatgttttctagagagatatttgtgcatggatcactcccttggtttaagcaaatttgttttacaaaaatggaaccaaagataggcatagcattctccaacttccggagataatctgcaattacctgtattaaaaatatgtaaataaaaagatataatgaaaatgttgattgtgtatctataaagaaaacaatgataaattatgaaaatttcttttgaagatattctacttcaagttatagagtatatggaaagaactgtaaatcattatctaggattctggaatgtaaagtattcaaagcagtcaatattttttaaggtaatgatgtattccctctcattcctgaa

SEQ ID NO: 166993 - DNA, 642 bp, Homo sapiens
ggaatttgtattgtaaagagtaggtatgtgatattcaatttttctatacataagcatatcaggagagatattttctttgtttttgaaattgtacttgagctcattccttaatccaggagagatgagtaaaaatcttcctctggttttcatttattcatcaagaactattgattgagtgcccatgtttatcaaatactgttcctggctctgtttacttaagattgtgcatcagacttaagtatgaataatatgtgagattatggattaaatctgcaaacctgtatttaactctgttttcacatttccacatactacttaaatgagagctttccaggccatccattattgaggttaccactgccttgactaaagataaagaagaaacattcaaaacttggttttattatatgagctttactaatcgaatggatttgtgaagttatctaccatctattttaatcatgaaggataatagctgtcacacgcrtcaatgtcacatttattttgttatggcagagtacagaagtaaactgacttattttccctagagtttttgcacaaaagggacatggttagctgctcctaactgaactgcattaatggatcattccttatatgtatcctagcaacactgaaaacaac

SEQ ID NO: 166994 - DNA, 479 bp, Homo sapiens
cacacaaatgagcaaaggcctagggacattcaagaatctacagttggtaaagatgttcacttctacagttggtgaggttacatgcttttaaaaacaatcactcttattttcaagcatttcattataatgactttttactaattcagtttgacctctaagagtaaaaacctatgacgttttattatatgtggtatgactataaagctataaaactaattttcatgtgcagcctaacaccccacagataactktaaagtcacattcaaaataaactatttgttattcttgtgtagttatttactttctggagtacccatttcaatactttcttacttttctttttgtatttccctagacccattgggaaaatcacgttgagggtgttggcttattatttctttgcctcctctttgccctatgtaaactgaaaaatgatacatgtattcttggagtgctttttgatgaatagaattttgaca

SEQ ID NO: 166995 - DNA, 474 bp, Homo sapiens
tcccactgggtacttcccacaacacctggaaattcaagataagatttgggtggggacacagccaaaccatatcaatttcccttttgagaagacacctatagatgctagaaacaccagtccaactttctcattctgccatcccttcgctaaaggaaacaagagtgtcaaaagaaagtcttttacatatagctattaggttatctgtttgatcaatttagtaatttatttgatgtttagtttaacctgatttcatctgcttgaataatgttgtggaggggttgaaataaggtataaaaaagtatgaaattggaatgtggaagtcataagaaaatgaaagaatagaagattgtaggttgcagcactgatttatcaaatcttccaaaactcctggaawgcctatcacatttttcagtggatactgaattcagtagcattttaatgctttgaaaaagctagtcagctctacaggggacc

SEQ ID NO: 166996 - DNA, 613 bp, Homo sapiens
cttgaagaacatacattggcctgggacaaaatctgttgagcctgcagagcagacaatggcttttgacaaaagtccgttgacagtctttagcctttcttcctgcaatatgagttcarttactgaaaactcagggaaggaatcagagataattgttttcttctttggcaggtccagatgttaggcagataagggaacttcagataacaatttcatactgtcctttgggagagacaggattaagagatagtgggagctgtggtcaggggtcggggagtggagatgagagagaccttgaggcttcttcttcagttgagcatgtcaacatgccatttttggggggtattagtttctgaaccccaacacatggaagtagcacagttgataacttgtgtcagattaatgtatttaaagacaatcctaaatagggattccattctctccttggaggaacctttcttgaaataagacaaatttatttatcttctaagcatatttatgttagcaagagactgaatgtaatattcaggggaatatacttagtttcattattttttcttcctgtataaaacacaggttggaaaggacatttgtcataagaggactttttccccca

SEQ ID NO: 166997 - DNA, 613 bp, Homo sapiens
cttgaagaacatacattggcctgggacaaaatctgttgagcctgcagagcagacaatggcttttgacaaaagtccgttgacagtctttagcctttcttcctgcaatatgagttcaattactgaaaactcagggaaggaatcagagataattgttttcttctttggcaggtccagatgttaggcagataagggaacttcagataacaatttcatactgtcctttgggagagacaggattaagagatartgggagctgtggtcaggggtcggggagtggagatgagagagaccttgaggcttcttcttcagttgagcatgtcaacatgccatttttggggggtattagtttctgaaccccaacacatggaagtagcacagttgataacttgtgtcagattaatgtatttaaagacaatcctaaatagggattccattctctccttggaggaacctttcttgaaataagacaaatttatttatcttctaagcatatttatgttagcaagagactgaatgtaatattcaggggaatatacttagtttcattattttttcttcctgtataaaacacaggttggaaaggacatttgtcataagaggactttttccccca

SEQ ID NO: 166998 - DNA, 613 bp, Homo sapiens
cttgaagaacatacattggcctgggacaaaatctgttgagcctgcagagcagacaatggcttttgacaaaagtccgttgacagtctttagcctttcttcctgcaatatgagttcaattactgaaaactcagggaaggaatcagagataattgttttcttctttggcaggtccagatgttaggcagataagggaacttcagataacaatttcatactgtcctttgggagagacaggattaagagatagtgggagctgtggtcaggggtcggggagtggagatgagagagaccttgaggcttcttcttcagttgagcatgtcaacatgccatttttkgggggtattagtttctgaaccccaacacatggaagtagcacagttgataacttgtgtcagattaatgtatttaaagacaatcctaaatagggattccattctctccttggaggaacctttcttgaaataagacaaatttatttatcttctaagcatatttatgttagcaagagactgaatgtaatattcaggggaatatacttagtttcattattttttcttcctgtataaaacacaggttggaaaggacatttgtcataagaggactttttccccca

SEQ ID NO: 166999 - DNA, 613 bp, Homo sapiens
cttgaagaacatacattggcctgggacaaaatctgttgagcctgcagagcagacaatggcttttgacaaaagtccgttgacagtctttagcctttcttcctgcaatatgagttcaattactgaaaactcagggaaggaatcagagataattgttttcttctttggcaggtccagatgttaggcagataagggaacttcagataacaatttcatactgtcctttgggagagacaggattaagagatagtgggagctgtggtcaggggtcggggagtggagatgagagagaccttgaggcttcttcttcagttgagcatgtcaacatgccatttttggggggtattagtttctgaaccccaacacatggaagtagcacagttgataacttgtgtcagattaatgtatttaaagacaatcctaaatagggattccattctctccttggaggaamctttcttgaaataagacaaatttatttatcttctaagcatatttatgttagcaagagactgaatgtaatattcaggggaatatacttagtttcattattttttcttcctgtataaaacacaggttggaaaggacatttgtcataagaggactttttccccca

SEQ ID NO: 167000 - DNA, 607 bp, Homo sapiens
ttcctcctggttcagtcttgggagggcgtatgtgtctaggaatttatccatttcttctatattttctagtttatgtgtacaggggtgttcataatattctgtgatggttatttgtatttctgtcgaggtcagtggtaatatcccctttgtttctgattgtgtttatttggatcttctctcttctttattagtctagctagcactctatcttattatcatttttcaaaaaccagttcctggaattgttgatattttgaatggtttttcatgtcccagtctccctcaggtcagctctgattttggttatttcttgtcttctactagttttgaggtctgtttgttcttggttctctagttcttttagttgagatgttacattgttaaattgagatctttgtaactttttgatgtgrgcatttagtgctataatttctctcttaacactgccttagctgtgtcccagggattctggtatgtggtatcttcttttttttcattagattcaaacaagttgttgatttctgccttaatctcattatttacttaaaagtcattcaggagcaggctatttaattcccacatttttttatgatttagagtgaatttc

SEQ ID NO: 167001 - DNA, 591 bp, Homo sapiens
cttaatattttctatccttcacattctccctcctgcatgttacacaaagagatactgagctggagaaaataagctgcatttgtctttctgcctcttccctaaagaggggtgtagaaacctgaatgcattcattgatcatgcctcctgctgtgcccagcctggcctgcacagggtgcccatcttacagaaaakctcctgtgaatcaggaagacacagaaaggaatttcaaattacccactctccaccattgtccttacattacacattttcctgagattacacgttacatacttagattataattacatatcgcccttagattacagctgagtaatctaataaaccaatctactgaaatgtgataaagtgagccaattatttctaagatgtctgtcacagaacaagcagccctttattgcttactcacttattttgcttgtggcctagcaaagtatctcttgtggaccagtagcattggtattacccgggaacttgttagaactacagactctcaggcttaggctgacctcatcagagcctacattttaacaagcccctcaggtgattcatatgtacattacagtttgagaa

SEQ ID NO: 167002 - DNA, 591 bp, Homo sapiens
cttaatattttctatccttcacattctccctcctgcatgttacacaaagagatactgagctggagaaaataagctgcatttgtctttctgcctcttccctaaagaggggtgtagaaacctgaatgcattcattgatcatgcctcctgctgtgcccagcctggcctgcacagggtgcccatcttacagaaaatctcctgtgaatcaggaagacacagaaaggaatttcaaattacccactctccaccattgtccttacattacacattktcctgagattacacgttacatacttagattataattacatatcgcccttagattacagctgagtaatctaataaaccaatctactgaaatgtgataaagtgagccaattatttctaagatgtctgtcacagaacaagcagccctttattgcttactcacttattttgcttgtggcctagcaaagtatctcttgtggaccagtagcattggtattacccgggaacttgttagaactacagactctcaggcttaggctgacctcatcagagcctacattttaacaagcccctcaggtgattcatatgtacattacagtttgagaa

SEQ ID NO: 167003 - DNA, 591 bp, Homo sapiens
cttaatattttctatccttcacattctccctcctgcatgttacacaaagagatactgagctggagaaaataagctgcatttgtctttctgcctcttccctaaagaggggtgtagaaacctgaatgcattcattgatcatgcctcctgctgtgcccagcctggcctgcacagggtgcccatcttacagaaaatctcctgtgaatcaggaagacacagaaaggaatttcaaattacccactctccaccattgtccttacattacacattttcctgagattacacgttacatacttagattataattacatatcgcccttagattacagctgagtaatctaataaaccaatctactgaaatgtgataaagtgagccaattatttctaagatgtctgtyacagaacaagcagccctttattgcttactcacttattttgcttgtggcctagcaaagtatctcttgtggaccagtagcattggtattacccgggaacttgttagaactacagactctcaggcttaggctgacctcatcagagcctacattttaacaagcccctcaggtgattcatatgtacattacagtttgagaa

SEQ ID NO: 167004 - DNA, 591 bp, Homo sapiens
cttaatattttctatccttcacattctccctcctgcatgttacacaaagagatactgagctggagaaaataagctgcatttgtctttctgcctcttccctaaagaggggtgtagaaacctgaatgcattcattgatcatgcctcctgctgtgcccagcctggcctgcacagggtgcccatcttacagaaaatctcctgtgaatcaggaagacacagaaaggaatttcaaattacccactctccaccattgtccttacattacacattttcctgagattacacgttacatacttagattataattacatatcgcccttagattacagctgagtaatctaataaaccaatctactgaaatgtgataaagtgagccaattatttctaagatgtctgtcacagaacaagcagccctttattgcttactcacttattttgcttgtggcctagcaaagtatctcttgtggaccagtagcattggtattacccrggaacttgttagaactacagactctcaggcttaggctgacctcatcagagcctacattttaacaagcccctcaggtgattcatatgtacattacagtttgagaa

SEQ ID NO: 167005 - DNA, 553 bp, Homo sapiens
tgagttgaactatactgaagagaagccaattagtatgtatctgtgatattttaatattgtattaggcttgcttatctccagcataaacaaaagattgtgagcagggcagccagcatagatgcgagtttttggaaaactgctagtatcagtaaaaggaggataattccagattgtctgtcttcttctttctcctctatctcccttttttcttcacctcttcccgcacagaaatgactgccctcaaaggaaacaaaagtcaatattccaaatgttctttggccactgaacatttggaaatattaaagttctcaaaatrcaaggcaaaaaacagtaaaacacacaagcaagcaaacaaaaaatgcctagctctaaggtcttaacatttactggtaaattttgagagaagtgattccatttcttcatggacataattattcattgttccaatcacttttgcatgcacacgattttgtcatcatttttatgagtaacaaacaagcttgtgaggtggtttgacttttctgcatttcattaatcaaattccctggttgcc

SEQ ID NO: 167006 - DNA, 525 bp, Homo sapiens
aaaggaagaaaaggtaaacaattctgtgagactggttttgctctcttatattaatctctttccaaacccccacgccatttctttgttgtcctctgagttttctcacattctggtacagcttccaccactccagaacataattattttgttaatgtgggtgttatctacawtagactctcagctcccagtgccaagactacatctaagcgttaagtcgagtgtctgccacatagtatatactcagtaaatatttgctgaagaaataaatgttttctggccaaggtttgttataaacactctagcatccacatgacagcctcattctttttccatttcatttgtctaaagttgtcagcaaatttactgagcacctagtatctagcatgtgcagaaatacaatgtaatagcatgacaagcatttgcctaggcttcagaaagtgtatttatgctctattacaaatatacaacttgtttcatggctctcttcagccaaaataacctctactaggatttggacataacatg

SEQ ID NO: 167007 - DNA, 489 bp, Homo sapiens
ggactgaggccaactctgcattcagggaggccgaaggcagtgccaggtgagtttggacacactttccagccacctgccccgtgtgacgatcccgcgaaatgcttccaagccagagatccacttcataggctggcttaggcttttgaaataaaacacccgcctgaaacaagcattggcaggttctatttcagggatggggcagaggcaaggaccctggccttgtctccatacagctttaggtgatgcagggtttttgaatttggcctctatttcaagcactttctgaaaaagaaaagcataaccaggatagttccaaggcagacagttcttctgtttattttttcacagragcgtgtgagaaatggagacagagggattggagagatgaagatgggggatccgtggtctctgaagcccccaatgcttgtgtgagggtgagagctcaggtgcgggacagcctggacatggggaagggctttcctctacata

SEQ ID NO: 167008 - DNA, 551 bp, Homo sapiens
aatgaatgaataaataccacttagaagtggcaggcacatgggaagcactctagaaatacttgttgaatgaatgaaataaagcatttacagcagyagcaatacatggtaagccttcaataaattttaacatttactattccaatgtcaaaattctatcatcaaggggtactcctctccctcacactcacaaaggataaaagaagctcccaagttggtgctgagagtagggaggggggggaaatgtagaatggataggagcaggaggcccatccctgagaacctgggaagggatgtccaggaggtcccaggacaggccctgggaaagaaagggccctgagtgggctcacaatctctttcttgcatttccatcctgaggcttccagaattcttgtccattctgattgtggagctctgaatatttggggattaacagtatgatctgctattcccagatgcaacatttccttaccatcaaacagtccccttccaagtacagcttaaggagcacaggaaatggaggtaactaccacaatggaaaatttctattttgt

SEQ ID NO: 167009 - DNA, 488 bp, Homo sapiens
tttatgtgcaggtgtgttacatgggtatattgtgtgattctgaggtttggggtaggaatgatcctgtcacccaggtactgagcatggtacccagtaggtagtttttcagcccttgcctctctccctccctcccctctctagtagtcaccagtgtctattgttcctatatgtgctcartgtttagctcccacttataagtgagaacatgtagtattaggttttctgttcctgcattaatgcacttaggataatggcccccagctgcatccacattccagcagaggatataatttcattctttttcatgactgcatagtattccacagtgtgtatatatattttctgtatccaatccaccactgatgggcacctaggctgattccataactttgctatacaagtttttaagaggctgcttgctttgcaaactcagctttaagacagacccctggcccatcccccaagtcaatgctatatagaaatcctag

SEQ ID NO: 167010 - DNA, 534 bp, Homo sapiens
ggggagcatggattgcaggctggtagtgggggaagcagggaggccagctaggaggttttgcagcagtgcaggccggagatgctggaagcttggcctcctttgtggtggggttgaggttgggaagttgcagcagattcagttcatgctttgtagggggcattgacagggacagctggtgggttggacacaggttgtggggaaaataagaatcaataataactcaaggataaccattatttgcaactagttcaacatagctagtcttgttttgttttgttttctccagtgctggtaatgtttctttagttgaacatcaaatgaaatagcggtcttccatttgagggctgtattgcataggggaaaatgtgtatctctaaacactggactcattctcagcctggaaagatactcataagatgagagacatgcagaacataaggccagtgagttcgtgcttcccttgtttcactcactggggggcrtacactcatttggtgggatagtagggatagtagataaatttaagactgtgct

SEQ ID NO: 167011 - DNA, 436 bp, Homo sapiens
accatgtaaccaaaaaccaattgtacccccaaaactattgaaataaaaaaaaagatttgcctccttgaagcatgttctttagacctttagtaatagcagctaccgtttactgggcactcatgtgctaggtaccatgctgcacacttcatgcatagtatctcatttaatctggattcctcccataagttcacatagatgtgaaataatcttcacttgatcttagccaaaaggccgagaagtgataggtgtgatatgatattaaagtgtcctttacttcttcactgtgatacctgtcacacttataaataattgttcactctctgtcttctcttggatttttaagtcccatgagaatacaaatgtcttttcttgcatgatgctgaatccttcagcatgcagcccatatcacaygtgccatggaacacatgctgaattc

SEQ ID NO: 167012 - DNA, 590 bp, Homo sapiens
agctgtgtcacccaggcccagattcttctcccagtcaccatcctgatgactttctctctcctgagagtgtgggggtgaatggaggctaaggtaggggaaagtacgttaaaagaggttcctcctcatggaagcacacacccatggggaagaagttctcctaacccttaagaagttctatgccaacatgaaggaacaactagaatctatattgcactataaggttttcctcatttgtgattgatgtaaactgacgagaaatcaggtgtctctatgaatatcccatagacttccaagatgtgcacaggtattgctgttgcaagrcttagtttacggacccagagaggcttatatgtcacagtgatgatgtatgagaatggggtcagaagaggagatgtgcctataggtcaagagggcacccccaaaaactccctgggcttcttacattccccgagtttttgacgtacttctgtccagatagaaatgcaagtgccttgagaggagggcacgtgtatgatctttctcagaattggccctgttcatcttcggtgtggctcagcaatggttccatgatttttttctccatccacatg

SEQ ID NO: 167013 - DNA, 602 bp, Homo sapiens
aatgaaatacaaataatttagctacataaatgtcaaatttcctatcatgccaaccatttaagtattttcaggtgagaatgttaacactgtataactgaactgattttaagaagttttaaggaagtttaaaatactttttttttttttttttttttttgagacagtctcgctctgtcacccaggctggagtgcagtggaatgatctcgactcactacaacctctgcctcccaggttcaagtgattctcccacctcagcctcctgagctgggattacaggcacgcaccaccaacgcyggactaatttttgtattttttagtagagacagggtttcaccatgttggccaggctggtttcaaactcctgacctcaggtgatccacctgccatagcctcccaaagtgctgggattacaggcgtgagccaccgcgcccagccaggtttaaaaatattttaagttaaaaaattgggtgggtaaatgggatattatagcctagtgtgatacaatgtaaacagtatgtgtcagggaccagtaagtgtgacagcacctgagtaagagaaggaaacagggtgcggcagggcatacatagctaagtattgcata

SEQ ID NO: 167014 - DNA, 602 bp, Homo sapiens
aatgaaatacaaataatttagctacataaatgtcaaatttcctatcatgccaaccatttaagtattttcaggtgagaatgttaacactgtataactgaactgattttaagaagttttaaggaagtttaaaatactttttttttttttttttttttttgagacagtctcgctctgtcacccaggctggagtgcagtggaatgatctcgactcactacaacctctgcctcccaggttcaagtgattctcccacctcagcctcctgagctgggattacaggcacgcaccaccaacgccggactaatttttgtattttttagtagagacagggtttcaccatgttggccaggctggtttcaaactcctgacctcaggtgatccacctgccatagcctcccaaagtgctgggattacaggcrtgagccaccgcgcccagccaggtttaaaaatattttaagttaaaaaattgggtgggtaaatgggatattatagcctagtgtgatacaatgtaaacagtatgtgtcagggaccagtaagtgtgacagcacctgagtaagagaaggaaacagggtgcggcagggcatacatagctaagtattgcata

SEQ ID NO: 167015 - DNA, 334 bp, Homo sapiens
tagtacactcccaattaataaaccmacctcacatttctggagtgaactgcatttttgatatattgttgaattctgttagttaaaggtttccaagaaaattattacttcatctaacttctcaaatatacttgtaaataaatatatcatgtattctaatgttcttttattttactctcaatctccctatatcttcttcaattctctttttttatacctctgtgctcccacttacatgttctttttcttccctttctttcccttttctctcctcttccttcttttccttttcctcctcttttctttcttcttcttctttcttcctcctcatcctcat

SEQ ID NO: 167016 - DNA, 334 bp, Homo sapiens
tagtacactcccaattaataaacccacctcacatttctggagtgaactgcatttttgatatattgttgaattctgttagttaawggtttccaagaaaattattacttcatctaacttctcaaatatacttgtaaataaatatatcatgtattctaatgttcttttattttactctcaatctccctatatcttcttcaattctctttttttatacctctgtgctcccacttacatgttctttttcttccctttctttcccttttctctcctcttccttcttttccttttcctcctcttttctttcttcttcttctttcttcctcctcatcctcat

SEQ ID NO: 167017 - DNA, 519 bp, Homo sapiens
acactaactgtcttctttacagcaatcaatctggtaggcacaaaacattaatattccccaacttgtgaattagggctgagtacatagtaataaaaatgcaatttaaagtagaactgactacatatttttaaatatcaaactactttaatgctttttattatataaactctatacaatgtttaagcagatttttgataaatatatatttggctttacattttattccatagcttatattttcaccaatgaataagttgaatatcatatttttaattgcaattttcttctaacttctaaaatcagaacaccatcaattttagtgattccgaacctttcattttcatttggcaattcataaaatctccacatttttctatttaaagacactgaacttaatcsttggaataaagaggattcagttagtgggaaaaatgtgagtagagggagacagatggtttcctgaacttgggggagagagacagacaatttgaaaaggctcaagtattctactccccacac

SEQ ID NO: 167018 - DNA, 565 bp, Homo sapiens
tgttgttcctattcaaaacttattgctcaggctcaactagactatcaccccttctgttaatctctttcagcaacatttaggcctgtcatatcttctctctgaattcgtaacacatcgtgccttatgatgttcatttggcagttggatacatgataccatgtgacaccagattactgtcatcacatttttaaaagtatcttttcatgaattttagtcaatatatctccaactatattctgagtaacttatggatgaaatgatcatttataattcctggcatgctctacaatgacttaagtgccttataaagtaatgaatgaatatttgttgatgtttgtgattaagcattcataactggcatcccaaccaatagagtcaaaaatgacaattccctgatgcctgtttgcaatttattaactcaaattatactgacattttactaagctyattttgttacaaaggtttaatatttgtttctcccccaaatgtaatcttcacaaaacatcaaatataccatatttaataatataactcatattttgtattataaatacaacaaatttgg

SEQ ID NO: 167019 - DNA, 384 bp, Homo sapiens
tccttgctcgggaggaatacaccaggaagccttccaacatggttgaaaaggctggtagaaaaccttggtttttatagctcacyattttaaaaaatgagaatgcattgccattgaatttttgccttctaagaaggaatttttcttgagagaaagttgtcagctcatgtgtagtatttcaaaggtctgagaaaatacatatttgtcttgaccttagttctcatcagaactggtgtgaatgccataattttcatttttcctgtgggaaataaagagggtgaggaataataagtaaagtgacattaagtgttctttgagatgctaatccattatattcctgtttccatccctgttgctggccctgtataccccttaaacacaaataat

SEQ ID NO: 167020 - DNA, 625 bp, Homo sapiens
attgaactgtagtgtctcattttagatttacaggtgacaatatttaatcagataaaatgaggaaagctaaagacttcttcaggttcagtaaatatgtaaatggaaaaaytgaaattagaattgacaactgatgtaccttttaattttttcctctcattgatttacatggtctttgtttttctgactttctattttgaaacaaaactgtctgaatctctgtataggaaatatttaaagatcaaaaactccaaggattgaacactcagcgaatgtctattggtcatctttaaggaattgggttgtcctggttaggataagttggcaggtcaggatcccttgaaaaataaaggagctgcagaactgccttagaaagaattataatttacttatttgtttccaaacactctgctaagcaatttataaacattattgcatcctgaaattgccttattcatattttatagatgaaggcactgagctatacaaaaattaattcctcaatggtacagagctagcaaatggcagaagtaaggttagaacccaactctatatgactctaaaaatgtatgcttatttaccacaacatcatgctgccttcttcatctgagatagttttttaattgaa

SEQ ID NO: 167021 - DNA, 497 bp, Homo sapiens
ggactcaagctcaaggaatttaggttggacgtgaggagatgagcccaaagcagaagaagtgggaggaaagagttacaaaaatagataaaagattggagagtatttaaatttagaaagctagagaaggactcagagaaaaacagggtagtaagctcactaggccgaaatgttgcaaagtgattaaggaaacatagagctccacgggagctaacagtttctaaatgaaaggacatgatagatataattatgtcatttcaagtatttgatcttaattattttacaacactatcctgtaaaaactgatatgaaatttgcatcttatgcatatctcctacttaaatccctctcttatctttttagaataatacaacatataattagtagcatattagcagttaaattctgccatttcaaggatgcataattttcaactctttagaaaatctctagccaaaattcacaggaaatggaacakgtggattccttttgtaattaaa

SEQ ID NO: 167022 - DNA, 566 bp, Homo sapiens
gtgatatcatattgctgactgctgtaagtatcactcaatactttttgagttctacrgcaaatcttgaagcctttctgtgaatcacttctaaaaggaagagaccaaaaataatgggaataactcattgtgcattacttatattttaaaaatatcattttaaaataattttaatatatttattattttaaaaatatattattatttaaaatgttatcaaaatgtcattattatgacttataatgttgaactttaaaaaatctacaatcttaaaatataagtcattcataccactaaaatcaatgttgactttcttatatttctttgagtaagccaaaactactgctaatacaaatatggatagttaaccgtaaaggacaattcatgctagcatgctagatacataatgaccactaagtttatgtaaatttgttttagaatatcagtcctggaattacactttcaagaatgctttccatctttgtaagtactataattaagtatgattttctaatacgattattatgccttggtttccactgacaattacaatattgaaaaagcctttc

SEQ ID NO: 167023 - DNA, 566 bp, Homo sapiens
gtgatatcatattgctgactgctgtaagtatcactcaatactttttgagttctacggcaaatcttgaagcctttctgtgaatcacttctaaaaggaagagaccaaaaataatgggaataactcattgtgcattacttatattttaaaaatatcattttaaaataattttaatatatttattattttaaaaatatattattatttaaaatgttatcamaatgtcattattatgacttataatgttgaactttaaaaaatctacaatcttaaaatataagtcattcataccactaaaatcaatgttgactttcttatatttctttgagtaagccaaaactactgctaatacaaatatggatagttaaccgtaaaggacaattcatgctagcatgctagatacataatgaccactaagtttatgtaaatttgttttagaatatcagtcctggaattacactttcaagaatgctttccatctttgtaagtactataattaagtatgattttctaatacgattattatgccttggtttccactgacaattacaatattgaaaaagcctttc

SEQ ID NO: 167024 - DNA, 600 bp, Homo sapiens
aatagatgtaactattatgataccgttgcaagcaaagtgttcttttaaaaatatgtaacaactttacatatttcttttttttaatataaaaataggctattattgagggttggtttatttattgtcagcctattaaatagttatccaccrtgactacaggtaagaactctctgtggagcataaaaacaaacaacgactaccatgaatctcgtggtatcttccagacatactgaatctgaatccttaggtaagagcttgaatattttaaaacttcccagtttattctggaagacattaaaggtaaagaaacactaccatagaccttaataagattttttacttgcttcaaattcctaggaacttgaagactatttgctataatttaaaagatctgtattcatttaacaaatgttagcaaagtattttgtgctaaatataaagagaactacaaaatatgtgaaaaattgatttttaggatcttgaagtacacatggactatgatcaaggagagattaactgtcatggcaatttacagaagaaagcaattaacatgtcattgaagaagtaatcagggagatgaaattagagttaggtggttgg

SEQ ID NO: 167025 - DNA, 373 bp, Homo sapiens
aaactctcactttatacagtttgaaaaatattggtagtataaagagatagttactatttttgtggatatctacaatcacttgaataatatactttgccctaaaggagggtgtgcataattcccacctctccactctttgggtatggactgcacatactgatgtttttcccaagaacatagtagggagagggagtaaaaaggagtaactttacagtggggaaatctgatagacattactttagtgaggtgatcaaggccaacaytgacagtgataactcatgttatgactgaagttgatgtcaatgactgctaagcaaatagaacagagacttcctcctcaaatcatggcttaaccaaagaacattgtgtattg

SEQ ID NO: 167026 - DNA, 485 bp, Homo sapiens
catgatagttgtacaaaaacaggcacrtagaccaaaagaacagaataaagaacccagaaaaaaggccatacccctacaactatctgacctttgacaaagtcaacaaaaactagcaattggttaaaaaaaaaaaaaaaaaaaaaacctttggtaaggggggccaggataactggctagccatatgcggaaaattgaaactggaccatttccttacaccatatatgaaaatcaactcaagatggattagagacttaaacatatgactcaaaactgtaaaaatcctggaagacaatgtggacaatactattttggacatggaacggcaaatgttgtatgacaaagatgccaaaagcaattgcaacaaaagcaaaaattgacaaatggcatctaattaaactaaaaagtttctgcacagcaaaagaaactgtcaataaacaggcaacctacagaatgggagaaaatttttataaaatatgcatctgaca

SEQ ID NO: 167027 - DNA, 454 bp, Homo sapiens
cagccatgggcaggctgtaccctaaaatgccacagagttgaagcttcccaagactgaaggagcctaccccatgcatcagcatgacctggatgtcagacgtggagtcaaagkatattatttggaagctttaagatttaatgactgccccacttgattttggacttgcatgggcctgtagcctctttgttttggccaatttctcccacttggaataggattcattgcctgtatcctccttgtatcttggaagtaactaacttatttttgattttacaagctcctaggtggaagggacttgccttgtctcagatgagactttggacttgaacttttggatgaatgctggaatgaattaagactgttgggaaggcattattggttttgaaatatgaaagggacatgagatttggcaggggccaggggtgcaataatatggttaggctttgtgtcccca

SEQ ID NO: 167028 - DNA, 485 bp, Homo sapiens
catgatagttgtacaaaaacaggcacatagaccaaaagaacagaataaagaacccagaaaaaaggccatacccctacaactatctgacctttgacaaagtcaacaaaaactagcaattggttaaaaaaaaaaaaaaaaaaaaaacctttggtaaggggggccaggataactggctagccatatgcggaarattgaaactggaccatttccttacaccatatatgaaaatcaactcaagatggattagagacttaaacatatgactcaaaactgtaaaaatcctggaagacaatgtggacaatactattttggacatggaacggcaaatgttgtatgacaaagatgccaaaagcaattgcaacaaaagcaaaaattgacaaatggcatctaattaaactaaaaagtttctgcacagcaaaagaaactgtcaataaacaggcaacctacagaatgggagaaaatttttataaaatatgcatctgaca

SEQ ID NO: 167029 - DNA, 454 bp, Homo sapiens
cagccatgggcaggctgtaccctaaaatgccacagagttgaagcttcccaagactgaaggagcctaccccatgcatcagcatgacctggatgtcagacgtggagtcaaaggatattatttggaagctttaagatttaatgactgccccacttgattttggacttgcatgggcctgtagcctctttgttttggccaatttctcccacttggaataggattcattgcctgtatcctccttgtatcttggaagtaactaacttatttttgattttacargctcctaggtggaagggacttgccttgtctcagatgagactttggacttgaacttttggatgaatgctggaatgaattaagactgttgggaaggcattattggttttgaaatatgaaagggacatgagatttggcaggggccaggggtgcaataatatggttaggctttgtgtcccca

SEQ ID NO: 167030 - DNA, 467 bp, Homo sapiens
aaaaccttgtctctactaaaaatacaaacattatctgggcgtggtggcacacacctgtagttccagctactcrggaggctgaggcaggagaatagctcgaacctgggagacagaggttgcagcgagccgagattgtgccactgcactccagcctggtgacagagcaagattctgtctcaaaaaaaaaaaaaaaaaaaaattgtaccttcaattgtgttctaatagaaatttgaacaggaactcataaacatacactgtatttttagtctagagaatggatacaacggtaagatagaatcagtcaactattaaaatttttagaaatgttgtgaattgatgaacatctcattagtagattgaaatcacccatgtttgaaatagttacattacaactcatggcttctgcttctccagagaaccagttgttaaatattcaccagcatatgattggttaaggaagtcacact

SEQ ID NO: 167031 - DNA, 467 bp, Homo sapiens
aaaaccttgtctctactaaaaatacaaacattatctgggcgtggtggcacacacctgtagttccagctactcgggaggctgaggcaggagaatagctcgaacctgggagacagaggttgcagcgagccgagattgtgccactgcactccagcctggtgacagagcaagattctgtctcaaaaaaaaaaaaaaaaaaaaattgtaccttcaattgtgttctaatagaaatttgaacaggaactcataaacatacactgtatttttagtctagagaatggatacaacggtaagatagaatcagtcaactattaaartttttagaaatgttgtgaattgatgaacatctcattagtagattgaaatcacccatgtttgaaatagttacattacaactcatggcttctgcttctccagagaaccagttgttaaatattcaccagcatatgattggttaaggaagtcacact

SEQ ID NO: 167032 - DNA, 458 bp, Homo sapiens
atctctattttatgcctcatcatttattttagtaaaaacacaacatcagaaagagcatacaacaaatggtgaggcagtcctagtccaacttgggtcaatgctgacgttaatttcttgagtggaagaggctcatgaatcacaggacaacatactatagccaaatatttcctatcccacctgttacagtcttatgctaacatcattatttgaagttacacctattgaaagaggaagaacaataccttttgaaacaagaagagcaatgcttttwgaaacaaagtgaaaattggccgggcacagtggctcatgcctgtaatcccagcactttgggaggaccgggtgggcagatcacctgaggtcaggaggtcaagaccagcctggccaacatgaggaaacctgtctctactaaaaatgcagaaattagctgggtgtgttagtgcatgcctgtaattgcagct

SEQ ID NO: 167033 - DNA, 388 bp, Homo sapiens
aatatatctctctgccaattgttggacattataagctgtatagtatattccttggtccgaagaaataatgatcagccttgcaacttggtgtgatatcttcggttctagttttgtatagcactctaaatatttgtgtctatcaccagataagcaaagaccatactgaagtcagtgtctattcctatcaagacccayttgtagccctttagacatactagaatcagtctgacttactagttgtgttcagagtcttcctctggggaatctgcctgcagtatttgtctcttttgttggcaaacaaaatagttcttattggtctttgacattttggagggtgcaagaataatatgtctagatttagcctatctttgcattactgcaaccatct

SEQ ID NO: 167034 - DNA, 388 bp, Homo sapiens
aatatatctctctgccaattgttggacattataagctgtatagtatattccttggtccgaagaaataatgatcagccttgcaacttggtgtgatatcttcggttctagttttgtatagcactctaaatatttgtgtctatcaccagataagcaaagaccatactgaagtcagtgtctattcctatcaagacccatttgtagccctttagacatactagaatcagtctgacttrctagttgtgttcagagtcttcctctggggaatctgcctgcagtatttgtctcttttgttggcaaacaaaatagttcttattggtctttgacattttggagggtgcaagaataatatgtctagatttagcctatctttgcattactgcaaccatct

SEQ ID NO: 167035 - DNA, 388 bp, Homo sapiens
aatatatctctctgccaattgttggacattataagctgtatagtatattccttggtccgaagaaataatgatcagccttgcaacttggtgtgatatcttcggttctagttttgtatagcactctaaatatttgtgtctatcaccagataagcaaagaccatactgaagtcagtgtctattcctatcaagacccatttgtagccctttagacatactagaatcagtctgacttactagttgtgttcagagtcttcctctggggaatctgcctgcagtatttgtctcttttgttggcaaacaaaatagttcttawtggtctttgacattttggagggtgcaagaataatatgtctagatttagcctatctttgcattactgcaaccatct

SEQ ID NO: 167036 - DNA, 596 bp, Homo sapiens
tgtagcaccttaagaagctgagagaaagaaaaccaagtatgagtatgaaaagaggaaataataaataytgaaggagaagccagtagaatagaaaacaaacaaataatagagagaattaacagccaaaaattgatttttgaaaagttagtaaaaaagggcaaccattagacagccagccagacagccagagaacatgaattatcaatatcagaaatgatagatggagtattaatacagattctatagacatatcatgaacgaatttgacaactcaaataaatgaacaagtttcttgaaaaatttaaataatcaagacctgacatgatataaaccagaaaatctagatattatgtctgttataacaaaaacttcacacacacacacacacgcacacacgcacacacacagaaagagagagcgagagagagaatttaagaccagataggtattctggtgaattatgtaaaatattcaagaaagagatattactaatacttcaccagttgttttcagcatgtagaagaattttactgggcctgaataaccctaacaccaaaacctatgaatttcattacaatattatgaagatactgtgg

SEQ ID NO: 167037 - DNA, 596 bp, Homo sapiens
tgtagcaccttaagaagctgagagaaagaaaaccaagtatgagtatgaaaagaggaaataataaatattgaaggagaagccagtagaatagaaaacaaacaaataatagagagaattaacagccaaaaattgatttttgaaaagttagtaaaaaagggcaaccattagacagccagccagacagccagagaacatgaattatcaatatcagaaatgatagatggagtattaatacagattctatagacatatcatgaacgaatttgacaactcaaataaatgaacaagtttcttgaaaaatttaaataatcaagacctgacatgatataaaccagaaaatctagatattatgtctgttataacaaaaacttcacayacacacacacacgcacacacgcacacacacagaaagagagagcgagagagagaatttaagaccagataggtattctggtgaattatgtaaaatattcaagaaagagatattactaatacttcaccagttgttttcagcatgtagaagaattttactgggcctgaataaccctaacaccaaaacctatgaatttcattacaatattatgaagatactgtgg

SEQ ID NO: 167038 - DNA, 487 bp, Homo sapiens
tttttaccatggaagatcatcccctccatgtgtacacagaagcaaactttggagagtgagcggataggggtatgaaaaaaagaagataatcaaacaataatggtccagtgaaagacagactctggagagcagcagcaagttatctctattgtccataagaaaaaattataaatgaagataggttaatttttgtattgtggtatgaacacttaacatgcgayctacctcttaacaaatcttgtgcactatacaatactgttaactataggcacaatattgcacagcagatctctagaacttatttatcttgcataactaaaagtttatatctgttgaacaacaaatccctattttctcccccacctccaaccctggcaaccaccattctgctttctgttttaatgactttgactattttagatatctaatttaagtggaatcatgcagcactgaccttctgtaactggcttatttcattaagcataat

SEQ ID NO: 167039 - DNA, 487 bp, Homo sapiens
tttttaccatggaagatcatcccctccatgtgtacacagaagcaaactttggagagtgagcggataggggtatgaaaaaaagaagataatcaaacaataatggtccagtgaaagacagactctggagagcagcagcaagttatctctattgtccataagaaaaaattataaatgaagataggttaatttttgtattgtggtatgaacacttaacatgcgacctacctcttaacaaatcttgtgcactatacaatactgytaactataggcacaatattgcacagcagatctctagaacttatttatcttgcataactaaaagtttatatctgttgaacaacaaatccctattttctcccccacctccaaccctggcaaccaccattctgctttctgttttaatgactttgactattttagatatctaatttaagtggaatcatgcagcactgaccttctgtaactggcttatttcattaagcataat

SEQ ID NO: 167040 - DNA, 610 bp, Homo sapiens
tgaaatagcaaactgacatattaactaagataaagatgaaatgattttaatatatttagtaataaaaaagtgtgtgtgtgttttaatgaggtattatagcaagaggggatttaaagatattgatgctctaaaagattctctaatagcagtgtcattcaattgattttttcaaatattaaagcacttaagaaaaacacwtgcatgatgccacatgcattcttttctttgattacattttaattaattagattaacaatattaaattttaaaaactatatgtggcataattccttatacacattgatatcatagctgaacattaacaagaacagattaaaagatataattaaattcattgagcttgcattacaacaattgaaatccattgagtttgaattccaactacctactgactcgagcttactatcccagcatctaccagctgcaggcacatatatgccacaaggtaggagtagttgcttaatgctattagatcatgaaatgaattattttgatttgtttgtgtttgtatttacatgttgttgtgttgttatcgtgtgtttccgcagaaaatttctggatggcttaagttaatgaactactattaagt

SEQ ID NO: 167041 - DNA, 454 bp, Homo sapiens
ctcacccctttggggcagtttgggaggtgggaggacaagagccagggcctcggggttgcttcctgkacagacagggaacaggctccatgacctgagggctgattccagcagggtgggcaccctgcatgtgcctttttccatacctatgaaagggggcaccaccgagtgcagagtcaatgagctaatgcaggtgtccagcgtacactgagcactcaacagtgttgctgtcgtcgtgatttcatcctcataacccttgggtggccccgttttcgcctccttccctgttttgagcgtctcctcagagggtctcatctatgagacagcggtggaatgaggctgggtttctaagggagctccagctctggaaggccggttactaggattggttgaaaacgaaatctcattgcaaaataagttccctcctccatggggctaaacacgggggatgctcctt

SEQ ID NO: 167042 - DNA, 409 bp, Homo sapiens
cagtgacaccagggactctgacttctctgggtttgggcttcactgtgcaagctgaacctgcagagtaggaaggtgctgaaatctctatggggaaggaacgcagcacacagcaccagcacatgaagcacagcagcgtgggcaccagtcagggaaggttccgaaaggaagtgactcctgcactcacaaaggcactgagtataattctaagcggcagcctggtgaagttttgggggtaaacgagcaggtctactagggagagggctctctagtcactgtgaacagtgtttgcaaaggtctcaagctcaatcagcackgcttattgggggaaacttccaggaccttcctcacaggagtgaggaaacgtgggttttgggaagacaagggagaagggctgggtcagattatggga

SEQ ID NO: 167043 - DNA, 406 bp, Homo sapiens
cagtgacaccagggactctgacttctctgggtttgggcttcactgtgcaagctgaacctgcagagtaggaaggtgctgaaatctctatggggaaggaacgcagcacacagcaccagcacatgaagcacagcagcgtgggcaccagtcagggaaggttccgaaaggaagtgactcctgcactcacaaaggcactgagtataattctaagcggcagcctggtgaagttttgggggtaaacgagcaggtctactagggagagggctctctagtcactgtgaacagtgtttgcaaaggtctcaagctcaatcagcacggcttaytgggggaaacttccaggaccttcctcacaggagtgaggaaacgtgggttttgggaagacaagggagaagggctgggtcagattatg

SEQ ID NO: 167044 - DNA, 409 bp, Homo sapiens
cagtgacaccagggactctgacttctctgggtttgggcttcactgtgcaagctgaacctgcagagtaggaaggtgctgaaatctctatggggaaggaacgcagcacacagcaccagcacatgaagcacagcagcgtgggcaccagtcagggaaggttccgaaaggaagtgactcctgcactcacaaaggcactgagtataattctaagcggcagcctggtgaagttttgggggtaaacgagcaggtctactagggagagggctctctagtcactgtgaacagtgtttgcaaaggtctcaagctcaatcagcacggcttattgggggraacttccaggaccttcctcacaggagtgaggaaacgtgggttttgggaagacaagggagaagggctgggtcagattatggga

SEQ ID NO: 167045 - DNA, 641 bp, Homo sapiens
tccaaaatggattcagtaaaaatcaaaaactaacccccaaaagccctggaccagaagaattaaatccaaattctactagaagtacaaagaagagctggtaccaattcacttgaaatattccaaacaattgaagaggaggtactctaacgcattctacaaggccagcatcaacctgataagaaaacttggtaagaaatacaatgaaaaaaagaaaaccacatgccaatatccctgaggaacatagatgcaaaaattctcagtaaaataccagcaaaccaaatcmagcagcacatcaattgtgattcatcacaatcaagtaggctttattcctgggaagcaaagttggttcaacattgcacaaattaataaatgtgattcatcacataaacagaattaaaaacaaaaaccatatcatcatcttaatagacacaggaaaaaccttcaataaaatccaacatccttttataataaaaacccttgagaaactaggcattgaagaaacatgcctgaaaataataacagccatctaggacaaacctgcagccaacattgtactgaatgggaaaaagctggaagcatttccctggagaactagaacaggacaataatgcccattctcaccaattctattccacaacagt

SEQ ID NO: 167046 - DNA, 505 bp, Homo sapiens
acatggaaacagggaggggaacatcacacactggggcctgtcagagggtggggtacttgtggagggatagcattaggataaatacctaacgtagatgacgggttgatggatgcagcaaaccacgatggcacatgwataactatgtagcaaacctgcacgttctgcacatgtatcccagaactgaaaagtataataaaaaaaattctcatgaattactataacaggcttctaactgttttctctgctgctgtctgtcctcacttcaatcagttttcctcacagctgctacctgagctttctgaattcaactccattggtgttaactctcctgcttaaaacttgttaatgtctccccgcttcccttacagtaaagtacaccacattttataggatacaaaattctccaagacctaatctctacttaacattccagccttatattccctttgctttttaaactccaagcaacagccaccagaaactacgtttcatgaactgtgcctac

SEQ ID NO: 167047 - DNA, 604 bp, Homo sapiens
  misc_feature (1)...(604): n = A,T,C or G
aatactactgtccttcatacaaccggaaacgcaccactcaccnnnnnnnnnnnnnnnnnnnnnnnnnnnnnnnnnnnnnnnnnnnnnnnnnnnnnnnnnnnnnnnnnnnnnnnnnnnnnnnnnnnnnnnnnnnnnnnnnnnntgatatctttcttaatacaagtgtatacaagcacaagcatgtggttggcacaagaaggaaaaattgctcatgacaattacagtccccgtttctgtaactggtcaygcggtcctagctggttctaccttccaccacccattcagtattccctttgccttcagaaagcaccttggcaggtcatggtttttttcctggtggagtgacccaaaccttcattcctgaggggtctgagccatttgtagtcctgcttggattgatctgttgtcgttttccattgaccttaatcacagggcatggtaatactgagaggcaccctaatggatctcctgtattcaatgcatacttttccatacctccattgtggagtagtagattgatttcatcttgatagtctgggtcaatcaccccagccaacaatgtaactcccttcttagcctgttgaattaaaggtaggaggagccc

SEQ ID NO: 167048 - DNA, 564 bp, Homo sapiens
aagcaagtacttagttttagtattgaataaaagcaaatcttgtgctatcaatgaatttgaaaatacatttcaaccttttgcattcttgcacatgaaatcttagtgctatgtaacatatgtgatgattatagtagtagtatctgttttatctattggtttataagcttctggagttcagagaccaccttcaatctgcactcaactgcctaccttgctatgcctgagcaacatgatgcattctcttgatcctaacggccacatttatatatttgtttaattatgacattcctgatcatctcacattcttaggagatttccctccaataagaataaaccataccttcccagctcttgttatcttaccattcccacrttgattctcatttttatccctctcctattgccaaagaaggagaagggacagtatataatagttgagtaattgcgagaaagaccaaaaaaaagtccctgacagcttttgggaagcagcctggttgctaaccatcagtctgtggtattcctctgtggaacaaaattccatagaatataaacatcagatgagga

SEQ ID NO: 167049 - DNA, 564 bp, Homo sapiens
aagcaagtacttagttttagtattgaataaaagcaaatcttgtgctatcaatgaatttgaaaatacatttcaaccttttgcattcttgcacatgaaatcttagtgctatgtaacatatgtgatgattatagtagtagtatctgttttatctattggtttataagcttctggagttcagagaccaccttcaatctgcactcaactgcctaccttgctatgcctgagcaacatgatgcattctcttgatcctaacggccacatttatatatttgtttaattatgacattcctgatcatctcacattcttaggagatttccctccaataagaataaaccataccttcccagctcttgttatcttaccattcccacgttgattctcatttttatccctctcctattgccaaagaaggagaagggacagtatataatagttgagtaattgcgagaaagaccaaaaaaaagtccctgacagcttttgggaagcagcctrgttgctaaccatcagtctgtggtattcctctgtggaacaaaattccatagaatataaacatcagatgagga

SEQ ID NO: 167050 - DNA, 182 bp, Homo sapiens
ggtattgattataaagacctatccagaatataacagtgagggaaaggaggtcatggcatgtttaaagtctcccagcttttcagttacatgctaagtgtarctaatcctagttagttttgagcccccttctctctgccccaaccccctgccccaaaatgcctgtttaaaatgactacagtaga

SEQ ID NO: 167051 - DNA, 455 bp, Homo sapiens
tgagtcttcagggatttctgggtatacaatcatgtcatcagcaaacagtagcagtttgacttcctctttactgatttggatgccctttatttctttctcttgtctgattgttctggttaggacttccagtactatgttgaatagaagtggtgaaagtgggcatccttgtcttgtgccagtatatcttgttcccattcagtataatgttggctgatggcttttattaacttaaggtatgtgccttctctgctyattttgctaagcattttaatcataaagggatgctggattttgtcatatgtttttttctgcatctattgagataatcatgtcatttttaacactatacatatgatgtgtcacatttattgacttgtgaatgttaaaccatccctgcatccctggactgaaatacacttgatcatgaattatgtttttgatatgctgttgaattc

SEQ ID NO: 167052 - DNA, 455 bp, Homo sapiens
tgagtcttcagggatttctgggtatacaatcatgtcatcagcaaacagtagcagtttgacttcctctttactgatttggatgccctttatttctttctcttgtctgattgttctggttaggacttccagtactatgttgaatagaagtggtgaaagtgggcatccttgtcttgtgccagtatatcttgttcccattcagtataatgttggctgatggcttttattaacttaaggtatgtgccttctctgctcattttgctaagcattttaatcataaagggatgctggattttgtcatatgtttttttstgcatctattgagataatcatgtcatttttaacactatacatatgatgtgtcacatttattgacttgtgaatgttaaaccatccctgcatccctggactgaaatacacttgatcatgaattatgtttttgatatgctgttgaattc

SEQ ID NO: 167053 - DNA, 465 bp, Homo sapiens
gttgaattcatttaccagttctaggaattttttgagtcttcagggatttctgggtatacaatcatgtcatcagcaaacagtagcagtttgacttcctctttactgatttggatgccctttatttctttctcttgtctgattgttctggttaggacttccagtactatgttgaatagaagtggtgaaagtgggcatccttgtcttgtgccagtatatcttgttcccattcagtataatgttggctgatggcttttattaacttaaggtatgtgccttctctgctcattttgctaagcattttaatcataaagggatgctggattttgtcatatgtttttttctgcatctattgagataatcrtgtcatttttaacactatacatatgatgtgtcacatttattgacttgtgaatgttaaaccatccctgcatccctggactgaaatacacttgatcatgaattatg

SEQ ID NO: 167054 - DNA, 577 bp, Homo sapiens
attctttagtcctcaggggttgatactgaaattggccaattattttatccatgtggagaaatattttaatataacccaaagattataattaagatactgtgcataaaatactttgaaataataatgttgagggtcagaatgaaatttgtattgttagtaagatttttaaatgaaatattttaaatasaaaagtggagaaaaatatgaaacatatatcacaaaatttaacaaatgtgagagccttgacatgtaagcttcagctatttttttcataaacaactcagacacagttcaaatcttttaaaaattcctctcattatatttcttctctttcacacatttgtgaaactatttttttccaattgttttaataatacattttcttatgtagctccttaggaggtttttaagttgttaaatttcattttaaattatttaatttttttgacattgacaaaattgcatatatttatgtatacaacatgatggtttgatatatgtatacattgtaaagtggctaaaaataaagataattaatatatgcattacctcacatacttttttttgtgctgcgaat

SEQ ID NO: 167055 - DNA, 577 bp, Homo sapiens
attctttagtcctcaggggttgatactgaaattggccaattattttatccatgtggagaaatattttaatataacccaaagattataattaagatactgtgcataaaatactttgaaataataatgttgagggtcagaatgaaatttgtattgttagtaagatttttaaatgaaatattttaaatagaaaagtggagaaaaatatgaaacatatatcacaaaatttaacaaatgtgagagccttgacatgtaagcttcagctatttttttcataaacaactcagacacagttcaaatcttttaaaaattcctctcattatatttcttctctttcamacatttgtgaaactatttttttccaattgttttaataatacattttcttatgtagctccttaggaggtttttaagttgttaaatttcattttaaattatttaatttttttgacattgacaaaattgcatatatttatgtatacaacatgatggtttgatatatgtatacattgtaaagtggctaaaaataaagataattaatatatgcattacctcacatacttttttttgtgctgcgaat

SEQ ID NO: 167056 - DNA, 535 bp, Homo sapiens
tttagtggatggaggtaaggaaaaaataaagcgtatgaagtcgaaggttgagcactatgtggaaaagttttattgttaagcagggaacctgtgtctaggctctggggatgagatgcctagacttgggagggggtgtggggagaactagggtgggtccttcaaagccaagacactgcaaacgctatttgtgcccttaggatagcaaagtctctgatggttgctgttgkgctgatgatgtgtgaactgtcccggggagggtctcctgcttgggatatggtgatataagatgtggtgcccagctgcccctgctatgcacaggtcatgcgggtcaggattgggtggcccagtccactttgcaccagtatcagccggctcatggccaagtcagggtttatcagtggccacagtggtgggaggtgaagacagtgctcttctcatatactccttttatttattatactcccctgcccatttctaccatctacatcatatggcatatgggaacacgaagtttgatcctggacactaccctcag

SEQ ID NO: 167057 - DNA, 591 bp, Homo sapiens
tatgcctgaacctcttcttcaacctttctgtcagactaaaatctattctctctttgmacctactgcatggttaagaagatacttcaaatgtcagatagcttttttttctaattttagaaaaggaattagaaaaaaaagaagaagaaaaggaattagaaaaacattttctaattttaaaagtaatagctaaattttgctgtccgtgctagtttctggagtgagatacaggaaatctatatttttctacatgatcacttttttaatatttggaaatgcctagcatgttccagtttccttttctctgttctgaatcaatacggttacttcttcaaaggttccttcattgacatggtttcttgactatatattcaatgaactgaatagataaacttagaacgtggcaggtactcttccaggagttggctatataagggtaaataaacacagctcctccaaccatggcttatagaatttaagggagagaaagagagcaaaaaacaaacaaacaaaaatgtgagtaaatgtaaaagtcaaactgctgataaatgctatgaagaaaaaatctgagagttcaatgatagagagttaaag

SEQ ID NO: 167058 - DNA, 591 bp, Homo sapiens
tatgcctgaacctcttcttcaacctttctgtcagactaaaatctattctctctttgcacctactgcatggttaagaagatacttcaaatgtcagatagcttttttttctaattttagaaaaggaattagaaaaaaaagaaraagaaaaggaattagaaaaacattttctaattttaaaagtaatagctaaattttgctgtccgtgctagtttctggagtgagatacaggaaatctatatttttctacatgatcacttttttaatatttggaaatgcctagcatgttccagtttccttttctctgttctgaatcaatacggttacttcttcaaaggttccttcattgacatggtttcttgactatatattcaatgaactgaatagataaacttagaacgtggcaggtactcttccaggagttggctatataagggtaaataaacacagctcctccaaccatggcttatagaatttaagggagagaaagagagcaaaaaacaaacaaacaaaaatgtgagtaaatgtaaaagtcaaactgctgataaatgctatgaagaaaaaatctgagagttcaatgatagagagttaaag

SEQ ID NO: 167059 - DNA, 615 bp, Homo sapiens
ataactagctgacacatagccaggcataaagaagaaaagtggagttaaaggaagaattttgttcccaagagagaagtcacagacaaatgacaaattgggagaatgtattggaaatttatactccaggaaaacaatcaatatccctgatatttaaactgctttgaaaaccaaagtgatccatataaaatcctgttaaaaataagatattaatagaaaaactgatgaaatttgaatatgatatatagtttgataaagcatttttactggtttcaacagttgtactatggttatrtgatacattaatgttaggggaaaggtggatgaaaggtatacagcaatactttgtattatttgtataacttttctgtaatactaaaattaataaaaaataaaaataaaaaaataaaggggaaaaggaccaaaatatctaccaaggatgtgattttgcagcaaaaagtaggcaaatgccccttaaatatgtcaaaaaataatcaaatttactcatagaaggagaactgtattaaaccttcagttggatgctattttacctttggtaacagcttgacaaaaactttagaagaataataaacttttaggtaaatttctgaaaaacat

SEQ ID NO: 167060 - DNA, 615 bp, Homo sapiens
ataactagctgacacatagccaggcataaagaagaaaagtggagttaaaggaagaattttgttcccaagagagaagtcacagacaaatgacaaattgggagaatgtattggaaatttatactccaggaaaacaatcaatatccctgatatttaaactgctttgaaaaccaaagtgatccatataaaatcctgttaaaaataagatattaatagaaaaactgatgaaatttgaatatgatatatagtttgataaagcatttttactggtttcaacagttgtactatggttatatgatacattaatgttaggggaaaggtggatgaaaggtatacagcaatactttgtattatttgtataacttttctgtaatactaaaattaataaaaaataaaaataaaaaaataaaggggaaaaggaccaaaatatctaccaaggatgtgattttgcagcaaaaagtaggcaaatgccmcttaaatatgtcaaaaaataatcaaatttactcatagaaggagaactgtattaaaccttcagttggatgctattttacctttggtaacagcttgacaaaaactttagaagaataataaacttttaggtaaatttctgaaaaacat

SEQ ID NO: 167061 - DNA, 555 bp, Homo sapiens
gtaaagagcatacattctctggatattatcccactaccacttttaaattcccaaaatactttgagggatacctgaagtatcacatagctatataaaaacatactggcaaggaacaaatcagaagtattcatcctaaatatattataaaaagcagtttaaattcagaggacctctgcttctattccatgwtcctattatagatatggatggtacttctaaggagtattaaataaatattacttctttataaactcaatatataatgtttaacataacacctatgtttaatatagccaattacgctccttataatgaatgtaaagatgaatttgacagcagctaaagcattatcgggccacagagaccaatttgtttattttgttattttccatatttctgaagctcacaagaacaaagaacaagaaacaaagatggccagggagactcaggaatacaggtagacagagaaacagagacaacaaagcctaatgacattgtttggcctttttttcctccattccattggccagtgccattccctgattgtatagtttt

SEQ ID NO: 167062 - DNA, 555 bp, Homo sapiens
gtaaagagcatacattctctggatattatcccactaccacttttaaattcccaaaatactttgagggatacctgaagtatcacatagctatataaaaacatactggcaaggaacaaatcagaagtattcatcctaaatatattataaaaagcagtttaaattcagaggacctctgcttctattccatgatcctattatagatatggatggtacttctaaggagtattaaataaatattacttctttataaactcaatatataatgtttaacataacacctatgtttaatatagccaattacgctccttataatgaatgtaaagatgaatttgacagcagctaaagcattatcgggccacagagaccaatttgtttattttgttattttccatatttctgaagctcacaagaacaaagaacaagaaacaaagatggccagggagactcaggaatacaggtagacagagaaacagagacaacaargcctaatgacattgtttggcctttttttcctccattccattggccagtgccattccctgattgtatagtttt

SEQ ID NO: 167063 - DNA, 662 bp, Homo sapiens
taagcaatgaagataatatatcaaaagaataaagtcaaaaactacacaataatctcagtagatgcagacaaaagtcaatacttcttcatgataaaaacactcaacaagaggtagtagaaggaagtttcctcagcctgaaaaaaagcatcaatgaaaaacgaataacatcgtatttaacagtaaaacccgaaagtattctctaaaatcaggaacagaagaaggatgatcactcttatcagctttcttcaatatcaccctagatgttctatctaagataattaagcaaggagaagaaatactgtgaaactagatagaaaagaggaagaataaagctatacttttagatgatataatcttgtacatgaaaaaaatccaacaaaatccattaaaaaagataggagttattaagccagttaaacaagttcttgagayataggaataataataaattaaaagattgttttctatatgtttgcaacaaacaatctaaatataaaattaagaaaatattttacttaaaatagcatcaaaaagtaaattctcaaaaataaatttgacaaagaagttaaaagcttatactgtgaagctgtaaaacatttttcatggatagaaacataatatagttaagatgcaaatatttttaaaaatcaatgtgtatgttc

SEQ ID NO: 167064 - DNA, 585 bp, Homo sapiens
aaacaaaacccattgctaatgcatgcttatgagagacacagtggtctcattaaaactgaagctttttaaagccataatttctcagggctcatccatgttaaaaccagtattttccatttgagcttatttcctactcatctaattggagggctcttgtcagtacctatttctgaagcatctctgatgtagtgaaaatgatgttgaggacaaaatggctatgctagtatcaatatgaaattcattttatttttattgaagtaagccattcaggcaaatcacttttttttaaactggcactttactaagaacatatcaaggtgaacaacatatacgtacttataaaaaggatagttatcttaaaatacttccagggatttttttgtaggtctatattaaattatggagatttgggcaaaaatcattgaatttttaaaatccaacattctgtatacttcgtccctaaattggaaaactacccaatttattccttttatgacaatatttcttgataytgagagcctagtttcatacacagtgatgatgttcaaagggggagatttcttatgattttaccaggcatgtcta

SEQ ID NO: 167065 - DNA, 556 bp, Homo sapiens
gagtctgctccagatgagttaagtgtccggccaatcagtcatatccaactatttgagtcttctcagctgaggctccagtcaatggagaacagagtcaagccataatcctgtgccttgtccagactcctgaacaacagaatctgtgagtgtaataaaatggtttctattttatgccactaagtaatgagtagtttgttatacagtaatttatatctagaacagtcttagaatttaagcagatttcctggggcaagagacatagctgagtagcttttaggtaagggtttttyaaagaaatctattcagatggagcaaaggagggctggtagtgaccagtgagaccaaatgaactgcttcacaggaacttggtatattagtctgttctcacattgctataaagaactacctgagactgggtaatttatgaagaaaagaggtttaattgactcacagttctgcaggctgtgcagtaagcatggctggggaggcctcaggatatttacaatcatgttgaaagttgaaggggaagcaagcaaatattcacatggccggcagg

SEQ ID NO: 167066 - DNA, 560 bp, Homo sapiens
  misc_feature (1)...(560): n = A,T,C or G
tcaaaagtataagataatttgaattgtcaaattttctaccttgtggctgngtccggtggctcacgcctataatcccagcactttgggaggctgaggctggcagatcacctgagtcaggagtccaagcccagtctgaccaacatggtgaaacttcgcctctactaaaaaaaaatacaaaaatacttagccaggtgtagtagtggcacctgtaatcccaactacttgggaggctgaggcaggacaatagcttgaacccaggagatgggggttgcagttagctaagatcatgccactgcactgcagcctgggcaacagagtgagactccgtctcaaaaaaagagagaaaaaaaaattctaccttgaattatcaattaaactgggattatctcttagctarcttaataaagactacacaggatctttatgaaaaatgttaaattttattctaggacataaaaggaggcctacataaggatcatgcccagggttggggtaattcaacattagaatgttatcaatatttctcaaactaagttgaaaattaatgcaattccaattaa

SEQ ID NO: 167067 - DNA, 562 bp, Homo sapiens
ctgtagaataagattttggaagccccaacctacaatatgctttggaaggcaggatccaggctgtgggtgaagatctcyagtcttaggacacttcctgctctccaggaagcccaagctgtgagcagatatgcctgcctgcttggaagttctgtgtgttgagtggaacctcctcctcaatagcttcctgccactgctacttattctttcctgggcaagactgagggtaagtctagtaagtccctctttcacatccaggctccttggagatgagaaggcaagcactctattccttcctaagacttgtttatccaggactcaactctccaggccttccagcctttgctcagtgctattgtcatcccctttcatctggattattgcagtagcctcatagctagcctttgatattttgactcctctaatgtccatggcagccaaagcagaaaatataaataatcctatcttgtccctacttaaaacacttcagtggttcttcatggaacttggattgaaacccaactctctaaattggcctaatgccctgagacgtcctcctcctccc

SEQ ID NO: 167068 - DNA, 557 bp, Homo sapiens
gctaacatggtgaaaccccatctctactaaaaatacaaaaaattagctggatgtggtgacaggtgcctgtaatcccagctactcaggaggctgaggcaggagaatcgcttgaacctgggaggtggaggttgcagtgagctgagatcacaccagtgaactccaacctgggcgacagagcaagactctgtctcaaacatacatacatacataaaaaaatgctctctgttttcaccttcagtatttactgtagagattgaattaagcttaagaggaggaatataatgtaatgattaaggattaataattaaaatcatggtctttagatgcagacggaattgggttatgatcctggcttcatcagtcactagatgtcacctcaggaaagttgttaagggccctcagaatactcacaaaatggaccattcaaatgcacyttccagaatgtagcaagaatctaattggcactatggctgccatgggtaaaagggggctggagttgtcatttcttcttattgtttagtctctttcgtgtctttcttccgtaactagttgctcca

SEQ ID NO: 167069 - DNA, 580 bp, Homo sapiens
ctgattctcggccatacataatatattagaatatacttgattttacataacagaaatctaagttgaactgctttatgaaaaaagggaatttactggcctagataactgggaaacccaaggggttacatctaggggtgccaacacagtcaacaagactctgactctctttatcatgtggctgtctmtgagacaacttcattttcacaataattcttttcatgtggcagcagagatgttgctgcttactccaggtttccaagcactttggttataactatctgaaaagaagaaggtacttctttttcccagcatttacataaatctctccaaaaggacacactaataatattattcgggtcatgttttctatttcagatcaatttctgtgtctaggggctggccatgctgggtcatgcgcttactctattggctgggaaatcacaatcatgtgactggagggctggtggagggcctgttccccaaaggcaaagttaccaaagagacaaaaatgtaatggatatccactgaacacaaatcgctcggattacttgatgacgttgataatacaatttattaaagt

SEQ ID NO: 167070 - DNA, 626 bp, Homo sapiens
aagaaagagactatttaaagtattgaatgatactgttgtatttcctctggtgcattattacatctataattgaccagcaccagaactttgaatttgcttgggcttctcccagaagcagactctaagataggaatgtttgtgcaaattacttactgggggagtgattctaggaagcaatggttaagagttgagaacagtgtgagatagagaacgaaaggtggccaacaaaagtaggctagcaactagttaacaccayggacaactggagcatcacctcacagaagaactcagagccagtatagaacatgcctccttcagtccaccaaggggtgaggggctggggtatttacatcccaacagtcttcagtcattggttgagggctagtctcaggtggggcaaggaatacatgccctagcacttctggcctatgatgtacaaaggtgccccagttaaaggaagccctaaaaaaattggacagtatgccagttgcagctgctacaacttgcttggaaatatgtaacctgctttcaattccagtggtccttcaaacagatacaccatattaccaccctctggataagctgttggagggaattggaaaaaggttatttcagtctgacataag

SEQ ID NO: 167071 - DNA, 557 bp, Homo sapiens
gagacgctctcccattttaggaacacgtattgagaattcacaatgtgccagataatgcattaataactttataaataatgttgcatttaattctcacctgaaccgtgtgatgtgctatcttgactatccctatttcacacagcaacagaggcacagagatgttaagtaatctccctatggatgcatgactaataaagcgcagagctaggtttggagactaggttttttttttyctttcattttaagttcagggatatgtatgcaggatatgcaggtttgttatataggtaaaagtgtgccactgtggtttgctgcacagatcatcccatcaccaaggtattaagcccagcatgtgttagctattctacctgatgttctccctcctcccacctccactctccaacaggccccagtgtgtgtttcccgccctcatgtgtccatgtgttgtcatctttcagctcccacttataagtgaaaacacagggtatttggttttctgttcctatgatagtttgctgaggataacagcttccaaatccatctatgcccccaagaag

SEQ ID NO: 167072 - DNA, 450 bp, Homo sapiens
atttattgaaagaatgaatcaatgaaggaatgaatgcttatgcactagccatcaacagaacacttgtgggaataatttgcttctactagttagggctcatacacttttccctatcagagtagtaattacctgatgtggtaggtaggataatgggcttccaaagctgtacacatcatactccccagaacctgtgagtatgttaggctacatggcagatggaattaaggtttaagatcagctgatcttaaaacagaggtattaacttggatcatccagatgggcccaatgtaacagtccttaaaagggggaaaggaagaaaaacgagttgagtcmaaggccatagtgatgagataaaaggggattttgacctgctgttgctgactttgaaaaggaacggggccatgaaccaaagaccatgggtggcctcttcagagtctgcaaaaggcaaag

SEQ ID NO: 167073 - DNA, 451 bp, Homo sapiens
aaatcaccatttattgaaagaatgaatcaatgaaggaatgaatgcttatgcactagccatcaacagaacacttgtgggaataatttgcttctactagttagggctcatacacttttccctatcagagtagtaattacctgatgtggtaggtaggataatgggcttccaaagctgtacacatcatactccccagaacctgtgagtatgttaggctacatggcagatggaattaaggtttaagatcagctgatcttaaaacagaggtattaacttggatcatccagatgggcccaatgtaacagtccttaaaagggggaaaggaagaaaaacgagttgagtccaaggccatagtgatgagataaaaggggattttgacctgytgttgctgactttgaaaaggaacggggccatgaaccaaagaccatgggtggcctcttcagagtctgcaaaa

SEQ ID NO: 167074 - DNA, 452 bp, Homo sapiens
ccatttattgaaagaatgaatcaatgaaggaatgaatgcttatgcactagccatcaacagaacacttgtgggaataatttgcttctactagttagggctcatacacttttccctatcagagtagtaattacctgatgtggtaggtaggataatgggcttccaaagctgtacacatcatactccccagaacctgtgagtatgttaggctacatggcagatggaattaaggtttaagatcagctgatcttaaaacagaggtattaacttggatcatccagatgggcccaatgtaacagtccttaaaagggggaaaggaagaaaaacgagttgagtccaaggccatagtgatgagataaaaggggattttgacctgctgttgctgactttgaaaaggaacgkggccatgaaccaaagaccatgggtggcctcttcagagtctgcaaaaggcaaag

SEQ ID NO: 167075 - DNA, 553 bp, Homo sapiens
cagcatcatctacccaatggatcaaagaaaagggaatgctataaacaatatctttgttatttgaaaatactatttgtatttgaatattaataaatttagagtggcttaaaaaytcaataagcatgtttgctttttgccaatctactcattttgaatagaacaatttcaaaattaatttttttttttttttgctaaatccaagtgctactcgaataattagcagtaactggtgaaaaactctgagggagtaagtaataactaatgaaaaatgtttggaaaaaggaaaaatgtttctattttagtatgtatatatcttaagatacaaattgtattttattgaaaacaatgtatatgaaaaacaatcaaataaaaacattctcttgaatttttaaacttttttttaaccaatgaatatactcaaatatatgtgctcagacaagaaaataatatcagtgaaatgattctaaagagtttatctgcctctgtcaagtcttctgaattatctttatctgttgtgtactcaagtgtattcacatataaaatccacttctaa

SEQ ID NO: 167076 - DNA, 476 bp, Homo sapiens
ctgggccttgcgagttcatccttagcattccctgtctcccttctctgctttgtaattttttatagaacttatcactgtgttattaactgcatgttttgaaaaaatgctgattatatcactattactgtgcttccttcatgtagcgaaacacgtttgagattcattcatgttgtgtgtctccgtaattcattcctttgtattggtgggtagtagttcactatgttgacatatctaaatgtatccatttgccagctgaaagacttctggatcatttctagtttatggggcttatgaataaagttgccataaatatttgcrtctgggtttttgtgtgaatatatttttatttctcttgggtaaatacctaggagtgagatcactaattcatatggtaagtatatgttcaagtggttgtaccattttgcactctcaccaacaatgcatgagagtagttctaggtgtcccaaatctttgcc

SEQ ID NO: 167077 - DNA, 551 bp, Homo sapiens
ggaaaagtgaaggtgagaaataattgcccttaccatttaataaaaaaggtaagtgtgagcagaaatgacacacagagttttataaaaaattaatgtgtggccctgagtgatgggatctgtatctgggaggcaaagggtggagactaaaggggccaagtagacccaaatggagaaagtgaccttgagagtargtgcaaaataaaacagaacaacaacaacaaaaaaaaccatgggcatgaaaccagtatggaggagaagagacattcccctaggcaaatggagcctatctccctgtaatgttcaaatatgtaaaatacaaagatgaaagggaggaggtaaaaggagaaagagagtcctctgcttcaactagccatgcgtctgttattgggcaaggcatatgatctcctggaattcagagtcattttctattaagtgaggtaaaaggactataatgagtgatttttatattgtcctgtgtagattttagggatgctagaaaggggccttctcaaggagtaggtttggttccaaagtggttgaaaaccaatgat

SEQ ID NO: 167078 - DNA, 551 bp, Homo sapiens
ggaaaagtgaaggtgagaaataattgcccttaccatttaataaaaaaggtaagtgtgagcagaaatgacacacagagttttataaaaaattaatgtgtggccctgagtgatgggatctgtatctgggaggcaaagggtggagactaaaggggccaagtagacccaaatggagaaagtgaccttgagagtaagtgcaaaataaaacagaacaacaacaacaaaaaaaaccatgggcatgaaaccagtatgraggagaagagacattcccctaggcaaatggagcctatctccctgtaatgttcaaatatgtaaaatacaaagatgaaagggaggaggtaaaaggagaaagagagtcctctgcttcaactagccatgcgtctgttattgggcaaggcatatgatctcctggaattcagagtcattttctattaagtgaggtaaaaggactataatgagtgatttttatattgtcctgtgtagattttagggatgctagaaaggggccttctcaaggagtaggtttggttccaaagtggttgaaaaccaatgat

SEQ ID NO: 167079 - DNA, 553 bp, Homo sapiens
cagcatcatctacccaatggatcaaagaaaagggaatgctataaacaatatctttgttatttgaaaatactatttgtatttgaatattaataaatttagagtggcttaaaaattcaataagcatgtttgctttttgccaatctactcattttgaatagaacaatttcaaaattaatttttttttttttttgctaaatccaagtgctactcgaataattagcagtaactggtgaaaaactctgagggagtaagtaataactaatgaaaaatgtttggaaaaaggaaaaatgtttctattttagtatgtatatatcttaagatacaaattgtattttattgaaaacaatgtatatgaaaaacaatcaaataaaaacattctcttgaatttttaaacttttttttaaccaatgaatatactcaaatatatgtgctcagacaagaaaataatatcagtraaatgattctaaagagtttatctgcctctgtcaagtcttctgaattatctttatctgttgtgtactcaagtgtattcacatataaaatccacttctaa

SEQ ID NO: 167080 - DNA, 478 bp, Homo sapiens
ataagtgagaaacacacaaaccaactattgcaattcatggatatgagtgctataaaaatattttagaagggaaaacaggaagaacaaagtgaaagagcgaattatgagaaacttgatttggagactgattgaagggacttttcacagggcctaagttatataagaaaaacagtaaatcaaacaagatatttattttggtggataaaaagagggcttgccaatctattagaaagtaatataaaaagtttactaagataaggtaagtgggagctggaatatatagggttgtgccattaagaaaaaatgttcaaatttatagactcagagcaattctaagaaaccgcaaagtttagatcaaaatcataagtgctggtagctgagtgttggyagtcatgggatgagaataagaaggtacattccattcattagtctgtctgttaagtatacctgtgttttgagtataaatgtgttttctaaa

SEQ ID NO: 167081 - DNA, 241 bp, Homo sapiens
aatatgaattcacagttacatacaatgaataagtctaaagagctaatgtacagcataaggactacagttagtaaaactgagtaatattgagaagaaacggttaccttgaccctttcamgggctcgaactagattgcacctgctctaagtccagccagtcacttcagcgccagcagggatgaacttcactttcttgaacccgttgggttcaaccccttacaggcaggagcacgtaggtgagc

SEQ ID NO: 167082 - DNA, 609 bp, Homo sapiens
cttgaaaatatattttcccaaaatgtgagtttcctttttactcttttactggtctcttwtgatgcaaatatttttaaaaattttcatgaagtccaatttgtcattttcctgtttgttttcttatgcctttggtgtcttttattcaagattttaaaaaatgtggtacacgtgttatggagaaaccaggtgttcagtctagttcctgctgcctgctcaccacaaagaaaaccaatcaccgagacaattattgccaaaaaggatggctttaattggccagttgctgcagccaaggggacagaagattggtctaaaaatccacccccttgaccaactaaaactaggggtttacatagcaggaaaaaacgtaacaatgtgtaagaaaacagaaactatggaggggcatggaagcaattatgattaacacagggtctaacatttcattgtctggatgaagtgatccagtgagttctttaataatttttgagaggcctaaaggttcattcctggagtaggagctcagataaaacaaatgtaagtttcaagctttaagaccagaagtgtttttaacaagaacaagaacaacaacaacaacaacaacagcaacaacaa

SEQ ID NO: 167083 - DNA, 609 bp, Homo sapiens
cttgaaaatatattttcccaaaatgtgagtttcctttttactcttttactggtctcttttgatgcaaatatttttaaaaattttcatgaagtccaatttgtcattttcctgtttgttttcttatgcctttggtgtcttttattcaagattttaaaaaatgtggtacacgtgttatggagaaaccaggtgttcagtctagttcctgctgcctgctcaccacaaagaaaaccaatcaccgagacaattattgccaaaaaggatggctttaattggccagttgctgcagccaaggrgacagaagattggtctaaaaatccacccccttgaccaactaaaactaggggtttacatagcaggaaaaaacgtaacaatgtgtaagaaaacagaaactatggaggggcatggaagcaattatgattaacacagggtctaacatttcattgtctggatgaagtgatccagtgagttctttaataatttttgagaggcctaaaggttcattcctggagtaggagctcagataaaacaaatgtaagtttcaagctttaagaccagaagtgtttttaacaagaacaagaacaacaacaacaacaacaacagcaacaacaa

SEQ ID NO: 167084 - DNA, 609 bp, Homo sapiens
cttgaaaatatattttcccaaaatgtgagtttcctttttactcttttactggtctcttttgatgcaaatatttttaaaaattttcatgaagtccaatttgtcattttcctgtttgttttcttatgcctttggtgtcttttattcaagattttaaaaaatgtggtacacgtgttatggagaaaccaggtgttcagtctagttcctgctgcctgctcaccacaaagaaaaccaatcaccgagacaattattgccaaaaaggatggctttaattggccagttgctgcagccaaggggacagaagattggtctaaaaatccacccccttgaccaactaaaactaggggtttacatagcaggaaaaaacgtaacaatgtgtaagaaaacagaaactatggaggggcatggaagcaattatgattaacacagggtctaacatttcattgtctggatgaagtgatccagtgagttctttaataatttttgagaggcctaaaggttcattcctggagtaggagctcagataaaacaaatgtaagtttcaagctttaagaccagaagtgtttttaacaagaacaasaacaacaacaacaacaacaacagcaacaacaa

SEQ ID NO: 167085 - DNA, 585 bp, Homo sapiens
caaaactgattatttttgtaaatatttaccatttagtgcctgggtccatgcagaatatcttaggtaatgttgtattgaatttttcagtaaggatgaaaggcracattctcaatgtccttaacaaataacaggtaagactccaaagatgatgaaacttcattgaaaaatatttgagtgttgtgtgagtacatgtacagattcttatgtgagtacatatacagagaagactaactctcacgtctcgatgttatctatacacagaacaaaagtaggtaaataatattggattttcctctattataaaaaggtctatgtttgatttgtttattcagtgtaaaaatagtaaaattatataagaatatgaattgactgctgtattttgaagagtaaacaaaacctggaacaaaaggtactatcctgagtttattattacctgacaaacagagattcatttgacagattctaatcaagatggtcatctcctcctggcactactgctgaggctggaggatgacattttattaaattcgtatgctagtgaattgtcagcacttattttgcttgtatgttctgctgctttcagcg

SEQ ID NO: 167086 - DNA, 592 bp, Homo sapiens
aaaagaaatgtgggcaatatgcacaccgcattctgatgccagactgactgggttcaaattacatcttcatcgcttctatctgtaccttgggcaagatatttggcactgctaaaagccagtttctacacttgcaaaatgggtagactgttgtagaacctcaatgagtattacatgagttaagaagtgtaatgcacattgaacaatgcatatcatacagtaagccctcaagtattaatgattattatcatatatgccacagagaacaagatacaatctggagatttgaaaatataaaggtactcaaacaatgtgtccaaagcacaagttgacatttttattcttgattgcaataaacaattatagcagggaaacgttttacaggartgatgaatgaagtgagcaaaaccacatggcaacctaaggacaatatttagcccctaagcaattttgcactcaaatataaaacatttactcaatctaacatgtttgtatcttacatagacatataaaacacacatttatgatggatcaaaacaaaactccaagaagcagatgtccatcacttttgatctgattataaaaaaccaccagt

SEQ ID NO: 167087 - DNA, 614 bp, Homo sapiens
ttctgttgtttacacagtcacacagtcattagtaatttgatgatcaaataaagaagaaattactttagcattaaaaaaatctggatcatgtggacattgcagaaaacatcacattgctccactttattaatgtcctctactcattttattgaaagatcaagaagtagctacactattggaaaacttgtgagacattcaattcagaggatgaagactaagccctatgaagattcagagaccagttcagtaaaaatatttacagacctattagaagcatactagatattgtttctaaattaacaaataaatttaagtatcttatatgttttactacaaaataggtacaatgcctaatagacctatgctcactrctaaagtacaatttcacacataggatgcttctgtgacccataaaaaggtaacctgagaggctttgtggggtgtacatgttgtgaggtaagtattattcccctatgggccatatgctccaatagaacatagtattatgctgaaagggttattagtaaaaaaaaacatgttgcgaggtgtttgtggtgagtcctagaggaaaattcagaacatagcccactgagtcctagaacaagactatgcta

SEQ ID NO: 167088 - DNA, 567 bp, Homo sapiens
ggaaccaacccccgaggataccagggaaacactgtagtgtgtgcgtgtgtgtgtgcrcgcatgtatgtgtgtgtgcgtgtgtgtagttgctccctacgtttcttttaccatttgaacatgaactatcattagagaaattaggctctgtccaaattatataacacaaaatgtttttcttacttgttacatagataagattaaaaggttcatgaactggaaaagaagaaaaaaaggtgtgcacatgagtttaatgaggaaaaggcctctaacattgcatgtgtttcatgtctttttttaacatcactgagggactaccttcttgagaaaactaaatacaaatctggtgttactctcctgctggaggcacaaactatttctttatcctataaaaggtacctgttcccctgaaaattaatatgattagcctgaagacatattgaaaaatgacaaccactttattaggttactaagatcatcttttcctgtctattcagaaaaacaaaggtttcaataattcagaattataatccactagtgataaaaacaaattaatcactattatcatta

SEQ ID NO: 167089 - DNA, 551 bp, Homo sapiens
tgaactcaatgtaatcactagtttccatgaaagtaacaagggaagaagaagagaatagtggggcaatgtaagaacgcaaatcaccattgccgactgaaggtggagcaagggggtcacgggccgaagaatgcaggcaccctctagaagtgggaaaaagggagaaaattgatttttccctaaaaaacactgagaacaaaattttcattggtgaatgatgctctagccaaaatgagggcctataaagtcattggttagggcaaaatatgaaaagaccatcaatctggaacatattcagtaccaaataatacaatccattcattctttcctctttttttcttgtttacataaaactaaaaggatatcaaatttagtgagttgaagaactatgctcacacatttccttttcattgcatggtctatatcagaaaagagattgaggyaaaaaccaatttgagagggtggaaatgttcatacagagcacgcatgtatgaaaatattgaacgtaaagcttgatttttatttttacttatgcctgttttgtttttacagat

SEQ ID NO: 167090 - DNA, 504 bp, Homo sapiens
agtacatagacctttgtctgatgcatagtttgcaaatatattctcccattctgtaggttgtcgtgtactcagttgatagtttcacttgctgtggagaggttcttttgtttaattaggtctcataggtcaatttttgtttktgtttcaatttcttttggcttatttgttatgaagtctttgccaggtcctatgaccagaatgatattttataggttatcttccaaggtttttatagtttttggtttagattgaagtttttaatcaatattgagttaatttgtgtgtctggtgtaaggaaacggtccagtttttatcttccacatatgactagtcagttatgccaacattatttattgaattgggattcctttcctcagtgcttgttttagttaattttcttgaagatcagatggctgtaggagtatggcattatttctgggctctctattctgttccattgatctatgtgtctgttttcatatcagtaccatgatgttttggtta

SEQ ID NO: 167091 - DNA, 504 bp, Homo sapiens
agtacatagacctttgtctgatgcatagtttgcaaatatattctcccattctgtaggttgtcgtgtactcagttgatagtttcacttgctgtggagaggttcttttgtttaattaggtctcataggtcaatttttgtttgtgtttcaatttcttttggcttatttgttatgaagtctttgccaggtcctatgaccagaatgatattttataggttatcttccaaggtttttatagtttttggtttagattgaagtttttaatcaatattgagttaatttgtgtgtctggtgtaaggaaacggtccagtttttatcttccacatatgactagtcagttatgccaacattatttattgaattgggattcctttcctcaktgcttgttttagttaattttcttgaagatcagatggctgtaggagtatggcattatttctgggctctctattctgttccattgatctatgtgtctgttttcatatcagtaccatgatgttttggtta

SEQ ID NO: 167092 - DNA, 548 bp, Homo sapiens
gtgatgagaggggctgccttgaagactcctgacatgctctagagacattttccccattgtcttggtggttaatatttggctcctcattacttatgcaaatctccatggccagtttgaatttctcctcagtaaatgggttttttctttctatcgcatctttaggctgcaaattttccaaacatttatactttgtttcctcttgaatgctttgctgcttagaaatttcttccactggataccccaaatcatctatctcaagttcaaagttccacatatctctagggcaggggcaaaatatcgccagtctctttgctaaaatatagcaagtgtcacttttactccagttcccaacaaattcytcgcctccacctgacaccactgcagcctggatttcattgtccatatcattatcagcattttgatcaaagccgttcaacaaatttcaaggaagttgcaaattttcttacatctttctatcttctgagctctccaagactctaggaagtccaaactttcccacatcattttttcctttctcagggccctcc

SEQ ID NO: 167093 - DNA, 511 bp, Homo sapiens
attataaatgacactgcctaagtatgttaataatgaacatttcatcatagttgaaaatttcacctagttctagtatcattaaatatgagactaaatgacctaataattttaataatatcttagttttgcacaggactctgcattttagtttgtacagggctctacagattatttgataagtatagyatattgatttttataataaccttgtataattaccaagctggtattaacatgattaacaacaaatatatataaagaaaagagagcctataaaataactcatttaatgttaaatacacatacacacacacaaacacacacacacacacacacacaagtgcacgcaaaatatataaaaacagaaaataaaacagtattagtggccagaataaaggctaagaccagcaagaacaaataagcaaggtttctggtataacggtagctctgttttcattaaacagtattgaagacatattataagctatatctaagttagacttagagttgt

SEQ ID NO: 167094 - DNA, 352 bp, Homo sapiens
tttgtaatcaatagcattttttttacagaaaagtaaaatatatgcacacatataaaaaagaattgaatccatagagtactcaacaattaattagcatggcagcacaagttaatttgcttgtggatctccaaagagtttaaattaatttatgtaactgaataagtgttgtggttgtgtttctgtyttgttttgttaaatatgtttcaaacaatgaaaatcaaaccataatatgtgaagtcctaacaatcagtggaacatggtttggaaaccaacaattcactataagcaggccagtttcaccctgtacgctgacctccctgtgtaattaatggaaggaaagcagtccacactg

SEQ ID NO: 167095 - DNA, 608 bp, Homo sapiens
aagcacaggagatgctcctgtgatctacgcaatggtatttattaagttggaaaaaacagttttgggttctgaacaccaaggttcataattcccagcggatcctgcatttagaccccacacatagcagtagtacagccagctgtcatcactgacactttaaactatttattatgaaatatttcatcctacaaaagaaaaagcaaactttaccaatatcttgtaactccatgtagataaccacaatyctgaatacttttcctgcttttatttatatgcttatttaatgcataaatataaattttatataaaataaatatttatataatttatataaaataaatgcataaatataaatatttgtatgcatgtatatgcatatttgtatacaattcaaccattatattgtttttagcacaaaatatatattatcgcttgtgcagctgtaattcatttatttactgctatacatttcactgaatgaacaaatctcatttatttatctcttctcctaagttgtttccaatatatttctgttgtttaatttgctatcacaaccaatgatcttacgaattttcttgtatgtcggtgttggtcattacatttgcaca

SEQ ID NO: 167096 - DNA, 608 bp, Homo sapiens
aagcacaggagatgctcctgtgatctacgcaatggtatttattaagttggaaaaaacagttttgggttctgaacaccaaggttcataattcccagcggatcctgcatttagaccccacacatagcagtagtacagccagctgtcatcactgacactttaaactatttattatgaaatatttcatcctacaaaagaaaaagcaaactttaccaatatcttgtaactccatgtagataaccacaatcctgaatacttttcctgcttttatttatatgcttatttaatgcataaatataaattttatataaaataawtatttatataatttatataaaataaatgcataaatataaatatttgtatgcatgtatatgcatatttgtatacaattcaaccattatattgtttttagcacaaaatatatattatcgcttgtgcagctgtaattcatttatttactgctatacatttcactgaatgaacaaatctcatttatttatctcttctcctaagttgtttccaatatatttctgttgtttaatttgctatcacaaccaatgatcttacgaattttcttgtatgtcggtgttggtcattacatttgcaca

SEQ ID NO: 167097 - DNA, 608 bp, Homo sapiens
aagcacaggagatgctcctgtgatctacgcaatggtatttattaagttggaaaaaacagttttgggttctgaacaccaaggttcataattcccagcggatcctgcatttagaccccacacatagcagtagtacagccagctgtcatcactgacactttaaactatttattatgaaatatttcatcctacaaaagaaaaagcaaactttaccaatatcttgtaactccatgtagataaccacaatcctgaatacttttcctgcttttatttatatgcttatttaatgcataaatataaattttatataaaataaatatttatataatttatataaaataaatgcataaatataaatatttgtatgcatgtatatgcatatttgtatacaattcaaccattatattgtttttrgcacaaaatatatattatcgcttgtgcagctgtaattcatttatttactgctatacatttcactgaatgaacaaatctcatttatttatctcttctcctaagttgtttccaatatatttctgttgtttaatttgctatcacaaccaatgatcttacgaattttcttgtatgtcggtgttggtcattacatttgcaca

SEQ ID NO: 167098 - DNA, 584 bp, Homo sapiens
caaaataagcccccactaattataatctaattttcagttactaaatgaaagctgaaaaaggtcagtaayggcagaacttagaaaatgggagaaactttatttaaatagctcacagggataaaatcaggggtgtatgttttgttatgtgcatttctcgtggaattttgatagaacatagactccaaatttttaaaattcagaacctcatgcttttacctgtaagcattcatttttctcaaaaacccacaactaaatcaggatgttttttatatgcaacaatttaagaacataaaatgaattcatttttatattcataaatgttatatagccagggaataaaacaggaccctgtcttccctgcccgtggagtattttcttatacaaaattggtgttgattgcaagaattcgtcatgttgctggctgctaaaaccatctccaactaacctttcagcagtggttcaaagtatgaaccctggggctatacctttttgtccaagtcctggctttctcatttattagctctattacctcgtgcaagttatttaaactgtggctctgtttcttcctctgtagagtgggtgtg

SEQ ID NO: 167099 - DNA, 584 bp, Homo sapiens
caaaataagcccccactaattataatctaattttcagttactaaatgaaagctgaaaaaggtcagtaacggcagaacttagaaaatgggagaaactttatttaaatagctcacagggataaaatcaggggtgtatgttttgttatgtgcatttctcgtggaattttgatagaacatagactccaaatttttaaaattcagaacctcatgcttttacctgtaagcattcatttttctcaaaaacccacaactaaatcaggatgttttttatatgcaacaatttaagaacataaaatgaattcatttttatattcataaatgttatatagccagggaataaaacaggaccctgtcttccctgcccgtggagtattttcttatacaaaattggtgttgattgcaagaattygtcatgttgctggctgctaaaaccatctccaactaacctttcagcagtggttcaaagtatgaaccctggggctatacctttttgtccaagtcctggctttctcatttattagctctattacctcgtgcaagttatttaaactgtggctctgtttcttcctctgtagagtgggtgtg

SEQ ID NO: 167100 - DNA, 642 bp, Homo sapiens
ttccaaaacttttctgatcactcttcacataaaattaataattattcttgtttggaggaaagatatattttggttaatggtgtttaaacttatcatctgccatgaattacagaaattataatgtaaaagtagaaaaaccttctgttgatggataaaagagtacacttgaataccagaaaagagcctggctgatcctagattggaatcctctccactctttcaaattttgcacttagatcttcaaaagtatgtcatcatgagtttctttgaaacaaaaaccacatttagaatatatctaaatgttctatttgctatcataggataatgtaaatctartaatgtttttcttccacattcctcattagcatagaatgtttttaaaaatctcaatcaataatgaatataattcaataaactcttcaaaaattaaaataaaagatttccactgagcctttaaatattttaatttgataagaaaaggtccaatttttttagtgttgctaatacaaaaatgtaaaaaattcttaaattttacaaaggtacattggatgtacacaaataccattttggaaagaaagtaatgcaattttgttctcactcataggtgggaattgaacaatgagaacacttggatacagggtg

SEQ ID NO: 167101 - DNA, 642 bp, Homo sapiens
ttccaaaacttttctgatcactcttcacataaaattaataattattcttgtttggaggaaagatatattttggttaatggtgtttaaacttatcatctgccatgaattacagaaattataatgtaaaagtagaaaaaccttctgttgatggataaaagagtacacttgaataccagaaaagagcctggctgatcctagattggaatcctctccactctttcaaattttgcacttagatcttcaaaagtatgtcatcatgagtttctttgaaacaaaaaccacatttagaatatatctaaatgttctatttgctatcataggataatgtaaatctagtaatgtttttcttccacattmctcattagcatagaatgtttttaaaaatctcaatcaataatgaatataattcaataaactcttcaaaaattaaaataaaagatttccactgagcctttaaatattttaatttgataagaaaaggtccaatttttttagtgttgctaatacaaaaatgtaaaaaattcttaaattttacaaaggtacattggatgtacacaaataccattttggaaagaaagtaatgcaattttgttctcactcataggtgggaattgaacaatgagaacacttggatacagggtg

SEQ ID NO: 167102 - DNA, 617 bp, Homo sapiens
atgtttttgcatggtattactcccccacctcccactttttttggactattttactaatttatagaatactcataaagaaactcaacaatgatcacctcagcaatatgagagcctaagaattgttatggayatgggttactcaataggactggctgagatgaagaaatatactctaatctggggctgttagacgcagtggtaattaacacatgtgcttattgagtacttacatgttactagcatgatggaggaactgaattttttggtttaatttcattttaattaaaatttaagcttaaatagtcatgtgtaccttgtggctaccactgccagcagcataatgacaatgacatcatggcgtggcatttttaagggctattgatgtttttttaaaaaaaggtgaatattttaaatgcttactcaccctgggcaaaatagtgagaacttgtcactacaaaaaatagtttaaaaattaacaagggtgtggtggcaacatctgtagtcccagctacttatgaggctgaggcggaaggactgcttgagcccaggagtttgaggttgcagtgagccataatcgcgccactgcgctctagcctggatgacagaacaagacccca

SEQ ID NO: 167103 - DNA, 588 bp, Homo sapiens
taagttaactatcatggtaaccaacagcagaaggacaaagaagtataagcacctctttcgccatccataaattcccactgggtaaagttgtgcattctcagtccttggcaggttattctgttgggttgctagtatgtattgttctcgtgtcatctgaaaaagaaaaaagaaagaaagagaaagaaggaaaaaaaaagaagcattaaaaaaaataaacccatgatttttttgaaacaaaagaacaatgtacgttaaaataattggcagtgagcattcaaataactattgttgtgtaattaaaatgttatagaaaacttcgaatcattttgttcaatatagttttttagagatgtttaattcattgttatatccacaatatatatattatttccagtcagatttgtcccatttcaacagtaagtttttcccttgggaggctcaggtctacctccagttacyggtaactaaagaactctactcatgtccaagtgatacagtttggatctatgtccccaccaaaatctcatcttgaattgtactctccaatgttggagatggctcctggcgaaaggtgatgagatcatggca

SEQ ID NO: 167104 - DNA, 525 bp, Homo sapiens
ttttccagaaaatgatatcaacctctacctacacctgacatctcagtgtaattcttgacatttccttcttcacatttccatttccaatcaccaagtcttttcagattttaccttctctatagttcttgaaataatttttctctttctgtcttcattgctatcatgggatctaaccccccaackctctaacctgggctatggtgaccacctctaaagtgctctccctgattgtctctccaaaaaatgtttctcttttctatatccagaatgacttactcaaaatgcaaatacaatttgcattgtaaattgctctgtttaaaaactcccaaagactttgcattggtaatcggatgaatatcaagagtccaaaatagtgttcaagcagtacaaaatctgttctttgtatttctccctcctctcctctgatgacatgaacctcctcaatttgaatgattcaataatattttattccttaaatgtaaaatacttcttgttttttggactttggtcttcttattcacatac

SEQ ID NO: 167105 - DNA, 525 bp, Homo sapiens
ttttccagaaaatgatatcaacctctacctacacctgacatctcagtgtaattcttgacatttccttcttcacatttccatttccaatcaccaagtcttttcagattttaccttctctatagttcttgaaataatttttctctttctgtcttcattgctatcatgggatctaaccccccaactctctaacctgggctatggtgaccacctctaaagtgctctccctgattgtctctccaaaaaatgtttctcttttctatatccagaatgacttactcaaaatgcaaatacaatttgcattgtaaattgctctgtttaaaaactcccaaagactttgcattggtaatcggatgaatatcaagagtccaaaatagtgttcaagcagtacaaaatctgttctttgtatttctccctcctctcctctgatgacatgaacctcctcaatytgaatgattcaataatattttattccttaaatgtaaaatacttcttgttttttggactttggtcttcttattcacatac

SEQ ID NO: 167106 - DNA, 525 bp, Homo sapiens
ttttccagaaaatgatatcaacctctacctacacctgacatctcagtgtaattcttgacatttccttcttcacatttccatttccaatcaccaagtcttttcagattttaccttctctatagttcttgaaataatttttctctttctgtcttcattgctatcatgggatctaaccccccaactctctaacctgggctatggtgaccacctctaaagtgctctccctgattgtctctccaaaaaatgtttctcttttctatatccagaatgacttactcaaaatgcaaatacaatttgcattgtaaattgctctgtttaaaaactcccaaagactttgcattggtaatcggatgaatatcaagagtccaaaatagtgttcaagcagtacaaaatctgttctttgtatttctccctcctctcctctgatgacatgaacctcctcaatttgaatgattcaataatattttattccttaaatgtaaaatacttcttgtyttttggactttggtcttcttattcacatac

SEQ ID NO: 167107 - DNA, 525 bp, Homo sapiens
ttttccagaaaatgatatcaacctctacctacacctgacatctcagtgtaattcttgacatttccttcttcacatttccatttccaatcaccaagtcttttcagattttaccttctctatagttcttgaaataatttttctctttctgtcttcattgctatcatgggatctaaccccccaactctctaacctgggctatggtgaccacctctaaagtgctctccctgattgtctctccaaaaaatgtttctcttttctatatccagaatgacttactcaaaatgcaaatacaatttgcattgtaaattgctctgtttaaaaactcccaaagactttgcattggtaatcggatgaatatcaagagtccaaaatagtgttcaagcagtacaaaatctgttctttgtatttctccctcctctcctctgatgacatgaacctcctcaatttgaatgattcaataatattttattccttaaatgtaaaatacttcttgttttytggactttggtcttcttattcacatac

SEQ ID NO: 167108 - DNA, 485 bp, Homo sapiens
cttgtattctttctgagttggccccacaaagcactgggattacaggcatgagtaaacatgcctggcctcctctagcatttagatgctaaattctgctggaaaaaggagtacaaaatgaatacaagtagtaagtagtatcttgagtattttcttcccatacacccatgggagtatttggtgcatcttactacctcacgtacaccattctttcatcaaactatccaagctaagtatttaaatttaattttttccctacaagaaactctatgctaaagctcattaagtttgattttgagagtctctgtttttgtatcacagttgtagaaaattaatcacattctttattttttgagacattatcattattgtttcctagaagtttctctctggttttacttatttatttaattcttttattccttttccctwgccatagacaggcactctcatgtgtttgatataggttctttactcttaaagaattc

SEQ ID NO: 167109 - DNA, 474 bp, Homo sapiens
gcttaacacttttaaataactccttaagaaaaaagtgaatttattaaagctgtattttgttcgtttagatatttccttggaataacakttgagaacatatcttgaaagttcaaaagactcagatgcaccacctcaaatttgtgacagcaacgaaagtgtgcatgaaattggctcacactacatattacagatgatcagtgcattgaatacacataacttggccagtgtggctaaaagacttggaactgcactggttaacaaaacttcatctttttctgacctcctttaatataagaaaacctaattattataataatttctctataataatggaaacatgcttatttattgtatggtttccaaaaggccatttaaatttatcaccagaaatagcctgtgagttagtgagggcaacttatgttaatattcaaatgctacttgaggagactccatagcatgtctagagagtaaaaa

SEQ ID NO: 167110 - DNA, 466 bp, Homo sapiens
cttttaaataactccttaagaaaaaagtgaatttattaaagctgtattttgttcgtttagatatttccttggaataacagttgagaacatatcttgaaakttcaaaagactcagatgcaccacctcaaatttgtgacagcaacgaaagtgtgcatgaaattggctcacactacatattacagatgatcagtgcattgaatacacataacttggccagtgtggctaaaagacttggaactgcactggttaacaaaacttcatctttttctgacctcctttaatataagaaaacctaattattataataatttctctataataatggaaacatgcttatttattgtatggtttccaaaaggccatttaaatttatcaccagaaatagcctgtgagttagtgagggcaacttatgttaatattcaaatgctacttgaggagactccatagcatgtctagagagtaaaaa

SEQ ID NO: 167111 - DNA, 466 bp, Homo sapiens
cttttaaataactccttaagaaaaaagtgaatttattaaagctgtattttgttcgtttagatatttccttggaataacagttgagaacatatcttgaaagttcaaaagactcagatgcaccacctcaaatttgtgacagcaacgaaagtgtgcatgaaattggctcacastacatattacagatgatcagtgcattgaatacacataacttggccagtgtggctaaaagacttggaactgcactggttaacaaaacttcatctttttctgacctcctttaatataagaaaacctaattattataataatttctctataataatggaaacatgcttatttattgtatggtttccaaaaggccatttaaatttatcaccagaaatagcctgtgagttagtgagggcaacttatgttaatattcaaatgctacttgaggagactccatagcatgtctagagagtaaaaa

SEQ ID NO: 167112 - DNA, 466 bp, Homo sapiens
cttttaaataactccttaagaaaaaagtgaatttattaaagctgtattttgttcgtttagatatttccttggaataacagttgagaacatatcttgaaagttcaaaagactcagatgcaccacctcaaatttgtgacagcaacgaaagtgtgcatgaaattggctcacactacatattacagatgatcagtgcattgaatacacataacttggccagtgtggctaaaagacttggaactgcactggttaacaraacttcatctttttctgacctcctttaatataagaaaacctaattattataataatttctctataataatggaaacatgcttatttattgtatggtttccaaaaggccatttaaatttatcaccagaaatagcctgtgagttagtgagggcaacttatgttaatattcaaatgctacttgaggagactccatagcatgtctagagagtaaaaa

SEQ ID NO: 167113 - DNA, 589 bp, Homo sapiens
tgcatggcagaaacttttctgatatcaagagatcaatttaactacagttatttacaggtgccaatttcctctggagtaaactgttacagtgggcctcatgcaccagttagataatacaagccacactttactgcacagaatcctggactatgcattttggctttgcagaattgagagcagaaatgtaaaaataggatagtgatattacttttgtctatgggaattgctgagtcaaataacaaaaatcatctatttgggaaaaacctaacttcatgattacactcaggcacaccgactattaatatgaatgaggtaacaaccataaatacaatcataaccaaagaacaacagtaattcaartttcctcagttcataaatgttcttagaatgttttcttagtatgttaggtgctgttcccaagcctcagtataactccatgatcgccgttgatgcaaaggcaaacaccacactctcctcagttcaacgtctgccctaccagtctttctggcctctgactcttccctatactactatatatacatttgatatctacactgacatagctgggcgctgtacttgttgatgagaa

SEQ ID NO: 167114 - DNA, 533 bp, Homo sapiens
aggacttcacttttagagaatcatgatagcatattggctcagctacagagttgaagtcagagaaaaatgtattcagatgccagttatatgacttcgtgttgtgtcttgtgtaaacatgtttgcaagctattttgactatcagaaattaattttacttattaggaaaaaaggacaatacattctttcctttattgatrtaagcactaaatgaactatgtacgtgagatgctgatagagaagctgcatgtagcaagcactcaaatactttaaaagaaaatatctatttaccactgccatgtgtccagctataaatttgtagtctagctaaagaactaaaacgtgttcacagaaaactgttaaatagaaacacaccataggtaaaacccatcagtagagggaaattcatagatcaaactcaagataccccagcaatgtagtgatgctatataaatctctcaatcctctatcatgaaggtttaaagtcaaaaggataaaaaacaagcatatctaaaattagtgactaaggaacacat

SEQ ID NO: 167115 - DNA, 533 bp, Homo sapiens
aggacttcacttttagagaatcatgatagcatattggctcagctacagagttgaagtcagagaaaaatgtattcagatgccagttatatgacttcgtgttgtgtcttgtgtaaacatgtttgcaagctattttgactatcagaaattaattttacttattaggaaaaaaggacaatacattctttcctttattgatataagcactaaatgaactatgtacgtgagatgctgatagagaagctgcatgtagcaagcactcaaatactttaaaagaaaatatctatttaccactgccatgtgtccagctataaatttgtagtctagctaaagaactaaaacgtgttcacagaaaactgttaaatagaaacacaccataggtaaaasccatcagtagagggaaattcatagatcaaactcaagataccccagcaatgtagtgatgctatataaatctctcaatcctctatcatgaaggtttaaagtcaaaaggataaaaaacaagcatatctaaaattagtgactaaggaacacat

SEQ ID NO: 167116 - DNA, 532 bp, Homo sapiens
cagctacagagttgaagtcagagaaaaatgtattcagatgccagttatatgacttcgtgttgtgtcttgtgtaaacatgtttgcaagctattttgactatcagaaattaattttacttattaggaaaaaaggacaatacattctttcctttattgatataagcactaaatgaactatgtacgtgagatgctgatagagaagctgcatgtagcaagcactcaaatactttaaaagaaaatatctatttaccactgccatgtgtccagctataaatttgtagtctagctaaagaactaaaacgtgttcacagaaaactgttaaatagaaacacaccataggtaaaacccatcwgtagagggaaattcatagatcaaactcaagataccccagcaatgtagtgatgctatataaatctctcaatcctctatcatgaaggtttaaagtcaaaaggataaaaaacaagcatatctaaaattagtgactaaggaacacataatagataaagaagtaaattaaggtaacaaaaatataa

SEQ ID NO: 167117 - DNA, 593 bp, Homo sapiens
attatcctacctagaaaactgataaaaggattggtgcttacctgccacctgcagagtaagcttctaactttccatttagggaaatcaaaatagatacagtttttctcagtatatgtgatagattgagtctgatgactgtaagattaaggcatttttcaagaacaaacatggaagtatgtaaataatgagtatatagcttagaattaacaaatgcaaatattacaaatgcaaatactaaaaaatgggtgtgaggtagtaattgacaccatcccgagaactctatgtgacaggtactgtgccactgcattattccagaaaattaatttactacaaatatcccaccctctatgtcagaaatgttcttctcctacttattggygtagctagctgttgcatccctttcacattttaatgcaaaaggcacattctcgataaggtctttcctggctaccttatctaaaattgcaattcctcttcaccaatgcttcttactcctgttctgtaattaatttttctccttagcaattataactacctaacatactgtatattttatccatcttgcttattaaatgtcttatgcttccagaggc

SEQ ID NO: 167118 - DNA, 570 bp, Homo sapiens
cccttccacactgttctgacttacttagattatctttcagatttcaccttaatgtcagtttctccaataaagttcttcccactgccccgactagtttaatccaatccctcttatgcattttataactatttacttcttcatagcaattatcataattatagttagttaatatctgcataattgtttgtgttatgtctctctcctcaccagcatataggattctatgaggctagagactrtgtttatttggttcactgagcctgaagaaacagcttgaccatagtagatgcattataaacatgtgttgaataaaacaaagaaggaagggagggaggaggaaaaagacagcataatcaatcaaaaatatgttctgcttcaggagtttgggagaatccaagagaggaacaaaatgctaaattatttaaagtgatatccaaagatcaagcctatatgaatatatcacagaaaaatctgaaaacatttagctgtcctctaaaagtttcagctgaaatcattttctgcaaactgaatatattccaacatgattcttctaagaaattatttagactt

SEQ ID NO: 167119 - DNA, 570 bp, Homo sapiens
cccttccacactgttctgacttacttagattatctttcagatttcaccttaatgtcagtttctccaataaagttcttcccactgccccgactagtttaatccaatccctcttatgcattttataactatttacttcttcatagcaattatcataattatagttagttaatatctgcataattgtttgtgttatgtctctctcctcaccagcatataggattctatgaggctagagactgtgtttatttggttcactgagcctgaagaaacagcttgacsatagtagatgcattataaacatgtgttgaataaaacaaagaaggaagggagggaggaggaaaaagacagcataatcaatcaaaaatatgttctgcttcaggagtttgggagaatccaagagaggaacaaaatgctaaattatttaaagtgatatccaaagatcaagcctatatgaatatatcacagaaaaatctgaaaacatttagctgtcctctaaaagtttcagctgaaatcattttctgcaaactgaatatattccaacatgattcttctaagaaattatttagactt

SEQ ID NO: 167120 - DNA, 516 bp, Homo sapiens
gggacaaaatgctaccagtctctgtgctaaagcatagcaagagagacctttattccagttcccaaaaagttcctcatctccatctgagatcacttcagcctggacttcactgcccatgttactatcagtattttggtcacaaccaytcaacaagtttctaggaagtttcaaactttcccacatcttcctgtcttattctgagccctccaaactgttccaacctctgcgtgttatccagtttcaaagtcacttccacattttcagctacttttatagcactgccccatactcctggtaccaatttcctgtattagtacattcttacactgttgtaaataactacctgagacagcgtaatttatgaagaaaagaggtttaattgactcacagttttgcaggcttaacaggaagcatgactgggaggccttaagaagcttacaatcttggtagaaggtgaagggcaagcaagcaagtcttacaatggcagaggagggagagagcgagaaggggaaaatg

SEQ ID NO: 167121 - DNA, 516 bp, Homo sapiens
gggacaaaatgctaccagtctctgtgctaaagcatagcaagagagacctttattccagttcccaaaaagttcctcatctccatctgagatcacttcagcctggacttcactgcccatgttactatcagtattttggtcacaaccattcaacaagtttctaggaagtttcaaactttcccacatcttcctgtcttattctgagccctccaaactgttccaacctctgcstgttatccagtttcaaagtcacttccacattttcagctacttttatagcactgccccatactcctggtaccaatttcctgtattagtacattcttacactgttgtaaataactacctgagacagcgtaatttatgaagaaaagaggtttaattgactcacagttttgcaggcttaacaggaagcatgactgggaggccttaagaagcttacaatcttggtagaaggtgaagggcaagcaagcaagtcttacaatggcagaggagggagagagcgagaaggggaaaatg

SEQ ID NO: 167122 - DNA, 598 bp, Homo sapiens
ttagccataatctgaactagattgtcacaaatttagatgttaattgtratccctagggcatccactaagaaaatgactaatatatattataaagaaatgacaagggagttaaagtaatacactagataatatcaatttatgtaaaatatggcagcaatggagagaggaacaataaaacccactatatcagtgtgtatgtgtgtgtgtataattaaaatgtatattaataaacaaatgcatgcatatataagtaaaatgacagacaaatcctacctcatcagtaaatacattgcatgtaaatgtattaaacactctattgaaaagccggcaatcagcaggatggattttgaaaaaaatgatttaattacaaaatgtctataagagacatacttgtgattcagtgacatgagcagttgtaatataaaaggatataaagtgatatgtcctacaaacacactaaaaagagctggagtggctgtgttaatattaaacaaaatatattttaatagaaaaattgttcttagcgacaaagaaaggcatttcataatgataaaggtaaaatatatcaggaaaaataacaattaaaaacttgaaaaca

SEQ ID NO: 167123 - DNA, 598 bp, Homo sapiens
ttagccataatctgaactagattgtcacaaatttagatgttaattgtaatccctagggcatccactaagaaaatgactaatatatattataaagaaatgacaagggagttaaagtaatacactagataatatcaatttatgtaaaatatggcagcaatggagagaggaacaataaaacccactatatcagtgtgtatgtgtgtgtgtataattaaaatgtatattaataaacaaatgcatgcatatataagtaaaatgacagacaaatcctacctcatcagtaaatacattgcatgtaaatgtattaaacactctattgaaaagccggcaatcagcakgatggattttgaaaaaaatgatttaattacaaaatgtctataagagacatacttgtgattcagtgacatgagcagttgtaatataaaaggatataaagtgatatgtcctacaaacacactaaaaagagctggagtggctgtgttaatattaaacaaaatatattttaatagaaaaattgttcttagcgacaaagaaaggcatttcataatgataaaggtaaaatatatcaggaaaaataacaattaaaaacttgaaaaca

SEQ ID NO: 167124 - DNA, 554 bp, Homo sapiens
tttttgtgcattttgttttctaacttgttgctgttataaagtaaaatttcagatacttgtattatattctgctctatcagtartcttcagaagatttttgttttctctcagcctttcagctgagtcagatatccaaacatattgacttaacatcagtaaataatgataattttgtttcatttttgtcaatagttctttcatcccttatttattctggttcatttgcctagtgcttccaggataatatcacatagttctggtaattattgtttaaactacctagcctctgcaaggctgagataacttagtaaagcataaagtttctttctaactagagtgttgaccatgaagctttggtacaaggccctacccttactaaatccttacaagcacctggatgttctgactacatgccatagaatagcagctattcaacataggtgcatatatccaaggggttcttaacgtgataaactgggttacaagaagaaaatatatcatagaattttagtgtatacattttatgttacatttttaactttcattttgagtga

SEQ ID NO: 167125 - DNA, 554 bp, Homo sapiens
tttttgtgcattttgttttctaacttgttgctgttataaagtaaaatttcagatacttgtattatattctgctctatcagtaatcttcagaagatttttgttttctctcagcctttcagctgagtcagatatccaaacatattgacttaacatcagtaaataatgataattttgtttcatttttgtcaatagttctttcatcccttatttattctggttcatttgcctagtgcttccaggataatatcacatagttctggtaattattgtttaaactacctagcctctgcaaggctgagataacttagtaaagcataaagtttctttctaactagagtgttgaccatgaagctttggtacaaggccctacccttactaaatccttacaagcacctggatgttctgactacatgccatagaatagcagctattcaacataggtgcatatatccaagggkttcttaacgtgataaactgggttacaagaagaaaatatatcatagaattttagtgtatacattttatgttacatttttaactttcattttgagtga

SEQ ID NO: 167126 - DNA, 534 bp, Homo sapiens
atctcatgtaggccttgatattaggcttttcggtttaagggtagggtcctcccctggggacctgccttcttctgcccagagtttccctgcctcctgtccctatcattagagctcaccaaatctttcttctgtttgatcaagkctgctattgaggatctctgatttacttttcagctcaatgtatttcttagttaaattttttctgtttatttttaaatttttattaatattttaatatctgttaattttttctgacaaatttctgaatctttttttgtgtaatcttggcattgatgagtttccttaatattgctgttctgaatatttatctatgtcttcacattgaaggattatttattccagtcattgttctctgggttggcttgttttctctagtgcatatgtgtttagaagttctgtgcagttttcctggtgatttccttagtcctcaattgctgcctcttttgttgtactagatggtgacctaagtccaggtttgctgttgctctcacactatatcaaagtgctgccctg

SEQ ID NO: 167127 - DNA, 412 bp, Homo sapiens
atgcaagtgaagaggctacaatcagaagaaaaccaaaggacaaagaaggaccaaaccaaaggacaagcaccagccttgctttttgatcattaatrttactgcctttttttctcccttttaaataatgatttttcaaacaggctgtgatggtagactatattctttgaaactgtatttataccattttgtcattgacactttctattctgcctaagaaaggtaaatgttacccagaggagaattcttttaaattgaggtttttctatttgaggaagaagcctattattgaaattctgaaggccataaagataccatttagtgaatttcagagtaaatcactttttgcttttttgcattgcagttttatctagtctaaataacttcaggtgaaactgccctactcactttaaag

SEQ ID NO: 167128 - DNA, 489 bp, Homo sapiens
ttgaaaataaacaataaaaattgaagatataaaaataagtctagataaaaatatatatattttgaaaacttttaaagttgcaaccaaacacttggaatgagattttcaaagaataaaaaatcctatccacactataagatattaaaatcagtattgtggaggagaaaattgactgacttctgagaatacatcgaaactacaagagaagattcattaataaaaagttgatagatattcaatatttaggaaactgtcctagaagaaggaatcagaaaaagtgaaaaaagaagcaatatttgaagggatagtacaatataattttatgggctgaaaataaaatggcatcttcaaaaggaaaagactgataatgacaaagatgaccacaagatgatgctagtggtacttgtcaatatyttttgagtgtatgaaatgtgcacaactcaatataagatacctgtctttatacttgttatttaaccctcaaaacca

SEQ ID NO: 167129 - DNA, 530 bp, Homo sapiens
cttaaatttatgcatttatacattgagaagaataaaggtggcctcagaactttctactatattacaatggcaggacatgtgtgtcacagatacaatgggagactttatagtaacataaaatggttaaataaaactggtaaataatatgtttmattaaaatattaaagtgattgcattagtcatggttctccagaaaaacagaactaataggagagtatatatacatatataatattacattatattatatacacctacatgcatatatacacagtatgtatatatgcattcacatatatgcatacatatatacacatatagatacatatacaaatacatgtatacgtatactcacatatgtgtataataagtaatgtgtttacataatattattgaggttgaaatcttccatgatctgccatatgcaacctggaaacccaggaaagcaggtggtatagctccagcctgaatctgaaactctgagaactaggagttccaatggtgtatttctcagaagacacatattgcca

SEQ ID NO: 167130 - DNA, 500 bp, Homo sapiens
tacgtagttaattgctgccggtaaagtatttgtaaacaaaaagtacaatataaattcttaataatagtaattagtaaagctgagtgatttttaaagaaaaatctattcagyttggcttatttctggcattttaaactcataaaatttctttacagtttctattggctaaacaagtgacaatgcacaaaacaaatcacaagcagtcaggcaatttaagaatgcatcactcatttgcccactggaagataattttgaaacaattatctatgattatgcaaatatatgcagaattcttaacctgtaaagtatttattgagaacattataggcttcacttaaattgggttcactagctacctggttagcaggttaggacaaaaaaaaaatagagtgttttatttagcaaaaaaggatcattctgcaaatacagtcaaccaccagagaagtcacacacatccaaaactataatagaaggttacacaccaaaactggtcattggag

SEQ ID NO: 167131 - DNA, 588 bp, Homo sapiens
tctcagtctgttcctgtggctattatagtatatgttagattagataatttataaaaaatagaatagacaaatgcactgtcctcacatggcaaaagaaagataagtcccaggcagctctctgacatctcttttataagatcattaatcccattcataataatggacccctcatgacttaatcactcctgaaagggcccccacctcktaacactgcaattaggattaagtttcaatatgagttttggagggacacaaacattctagccattgccctggtgtaaccttgtatgaaattgttcatgctacagctcataggattttcataaaaacatactttgaattatacctgaataagcctcaaacaggatgctataagcaactagagttgatataattaaaaaggaataatagtctgaattttaaatctatccattggtgtagtgctgggatgagtgtttaaattgctaattgaaaaataagatagcaaaggtacaataatggtaagagttctgattatattagaggacaaagtggttcatgaatacatgatttatgacatctgcaattggttatagcagtctctatgga

SEQ ID NO: 167132 - DNA, 588 bp, Homo sapiens
tctcagtctgttcctgtggctattatagtatatgttagattagataatttataaaaaatagaatagacaaatgcactgtcctcacatggcaaaagaaagataagtcccaggcagctctctgacatctcttttataagatcattaatcccattcataataatggacccctcatgacttaatcactcctgaaagggcccccacctcgtaacactgcaattaggattaagtttcaatatgagttttggagggacacaaacattctagccattgccctggtgtaaccttgtatgaaattgttcatgctacagctcataggattttcataaaaacatactttgaattatacctgaataagcctcaaacaggatgctataagcaactagagttgatataattaaaaaggaataatagtctgaattttaaatctatccattggtrtagtgctgggatgagtgtttaaattgctaattgaaaaataagatagcaaaggtacaataatggtaagagttctgattatattagaggacaaagtggttcatgaatacatgatttatgacatctgcaattggttatagcagtctctatgga

SEQ ID NO: 167133 - DNA, 588 bp, Homo sapiens
tctcagtctgttcctgtggctattatagtatatgttagattagataatttataaaaaatagaatagacaaatgcactgtcctcacatggcaaaagaaagataagtcccaggcagctctctgacatctcttttataagatcattaatcccattcataataatggacccctcatgacttaatcactcctgaaagggcccccacctcgtaacactgcaattaggattaagtttcaatatgagttttggagggacacaaacattctagccattgccctggtgtaaccttgtatgaaattgttcatgctacagctcataggattttcataaaaacatactttgaattatacctgaataagcctcaaacaggatgctataagcaactagagttgatataattaaaaaggaataatagtctgaattttaaatctatccattggtgtagtgctgggatgagtgtttaaattgctaattgaaaaataagatagcaaaggtacaataatggtaagagttctgattatattagaggacaaaktggttcatgaatacatgatttatgacatctgcaattggttatagcagtctctatgga

SEQ ID NO: 167134 - DNA, 576 bp, Homo sapiens
ctgcaattggttatagcagtctctatggacctacaatatctagtattttcacagttgtgtatagtgtaaagtaagggttagtacaagttctctaaaaggtcagatagtaaatattggaggctttgctggccatatattctttatagcaactactcaactttgccattgtactgtaattgtagccamagacaatatataaacaattgagcagggtgtattccaataaaactttgtattgatacaaaaatttgaattttgtataatttttataaatcacaaaacatttcttttgtttttttttccaaccattttaaaatgtaaaagaaaaaatatcttaataggctgtacaaaaacagatggctggctagattttccctgtggttcagagtttgctgatcccagacctataactttttactcaatcaatgttagaaaagctggagcaaacatgattggggcaatacataacagaaagttcagtaaaaacatacttgttaagatgctggattgacattaaagctctgaagattgtggtttaacttaaatgtaattacttgcgtctgtcacgttaatgaa

SEQ ID NO: 167135 - DNA, 576 bp, Homo sapiens
ctgcaattggttatagcagtctctatggacctacaatatctagtattttcacagttgtgtatagtgtaaagtaagggttagtacaagttctctaaaaggtcagatagtaaatattggaggctttgctggccatatattctttatagcaactactcaactttgccattgtactgtaattgtagccacagacaatatataaacaaytgagcagggtgtattccaataaaactttgtattgatacaaaaatttgaattttgtataatttttataaatcacaaaacatttcttttgtttttttttccaaccattttaaaatgtaaaagaaaaaatatcttaataggctgtacaaaaacagatggctggctagattttccctgtggttcagagtttgctgatcccagacctataactttttactcaatcaatgttagaaaagctggagcaaacatgattggggcaatacataacagaaagttcagtaaaaacatacttgttaagatgctggattgacattaaagctctgaagattgtggtttaacttaaatgtaattacttgcgtctgtcacgttaatgaa

SEQ ID NO: 167136 - DNA, 576 bp, Homo sapiens
ctgcaattggttatagcagtctctatggacctacaatatctagtattttcacagttgtgtatagtgtaaagtaagggttagtacaagttctctaaaaggtcagatagtaaatattggaggctttgctggccatatattctttatagcaactactcaactttgccattgtactgtaattgtagccacagacaatatataaacaattgagcagggtgtattccaataaaactttgtattgatacaaaaatttgaattttgtataatttttataaatcacaaaacatttcttttgtttttttttccaaccattttaaaatgtaaaagaaaaaatatcttaataggctgtacaaaaacagatggctggctagattttccctgtggttcagagtttgctgatcccagacctataactttttactcaatcartgttagaaaagctggagcaaacatgattggggcaatacataacagaaagttcagtaaaaacatacttgttaagatgctggattgacattaaagctctgaagattgtggtttaacttaaatgtaattacttgcgtctgtcacgttaatgaa

SEQ ID NO: 167137 - DNA, 576 bp, Homo sapiens
ctgcaattggttatagcagtctctatggacctacaatatctagtattttcacagttgtgtatagtgtaaagtaagggttagtacaagttctctaaaaggtcagatagtaaatattggaggctttgctggccatatattctttatagcaactactcaactttgccattgtactgtaattgtagccacagacaatatataaacaattgagcagggtgtattccaataaaactttgtattgatacaaaaatttgaattttgtataatttttataaatcacaaaacatttcttttgtttttttttccaaccattttaaaatgtaaaagaaaaaatatcttaataggctgtacaaaaacagatggctggctagattttccctgtggttcagagtttgctgatcccagacctataactttttactcaatcaatgttagaaaagctggagcaaacatgattggrgcaatacataacagaaagttcagtaaaaacatacttgttaagatgctggattgacattaaagctctgaagattgtggtttaacttaaatgtaattacttgcgtctgtcacgttaatgaa

SEQ ID NO: 167138 - DNA, 609 bp, Homo sapiens
gaattgccacatcactactcttgtgctttgggaccaatattaagtaaaataagggatactaggacacaagaactgtgatagcttggccatgaattggataactgtgactgctactaagtgactcatgggtgggtagcgtagactgcatggatctgctggacaaagggataatttgtttcctgggggaggatggagcagaatggtgtgagatttcatgatgctgctcagagcagctggtgcacaatttaaaacttatgaattgattatttttaaaattctctatttagcattttcagaccttggtagatagctgtaactgaaaccacmggaagtgaaatctcagataagagggtgcctctgtcatttttactgtagttgtgattgtaggatgccaaataaaatcaattaaatttatatttatgtttagatgaccatggaccaggttgctttgagagagtaaaacataatcaggacatagtgacaactcttaaaaagtgtgtaatttatcgagtgtaaagggaactgagagttagaaacatcttgtaagacagtgaaaacataagctcctacccacatttcataaacatatgtttatttctgcccaatatc

SEQ ID NO: 167139 - DNA, 609 bp, Homo sapiens
gaattgccacatcactactcttgtgctttgggaccaatattaagtaaaataagggatactaggacacaagaactgtgatagcttggccatgaattggataactgtgactgctactaagtgactcatgggtgggtagcgtagactgcatggatctgctggacaaagggataatttgtttcctgggggaggatggagcagaatggtgtgagatttcatgatgctgctcagagcagctggtgcacaatttaaaacttatgaattgattatttttaaaattctctatttagcattttcagaccttggtagatagctgtaactgaaaccacaggaagtgaaatctcagataagagggtgcctctgtcatttttactgtagttgtgattgtaggatgccaaataaaatcaattaaatttatatttatgtttagatgaccatggaccaggttgctttgagagagtaaaacataatcaggacatagtgacaactcttaaaaagtgtgtaatttatcgagtgtaaagggaactgagagttagaaacatcttgtaagacagtgaaaacataagctcctacccacatttcataaacayatgtttatttctgcccaatatc

SEQ ID NO: 167140 - DNA, 428 bp, Homo sapiens
gaagtgagcctcaaaggcagaagctaggagagtaagaacaatctggcttttgggaggtgggtcagagcctgtgattccagtttaaagatgtgaatactgtaagggtgcctggtacacagccagyagcccctaagacacaggtgggtggaggcctaggacccggcacactctgtaaagctacaaggagagtagctgtgtctgaggaaaagggcaaatctttgctatcagcaaggacagcacaggtctctcctcccacccacaaagcccccagcttacaccaaatatgtctaactatgcccacattctgagtcaaaatgcgatcagattttatgtagcagacctcataaaaaggacaaagccctgtagactctgctctgctcagctccaccctcccaggcctgctgtttgcttcccagcctcatattgca

SEQ ID NO: 167141 - DNA, 519 bp, Homo sapiens
ttccattatatatgttagggctacaagttttattcaaatcatgactttagctgcattgccaaagtttcattatattgtatttcagttagttataatctatcaycgtgatttttattgtgatttcttctttgactcatgaactatttagaagtacattgcttaattccagatagggattttatgattttaatggattacctctttgatactaatttatagctaatgccattttttaattttaatttttgtgggtacatactaggtacatttaatattattcattaattctttattttttttttttttttttggcaaaagcagggtctccctatattgccaaggctggtcttgaattcctggactcaagcgatcttcttatttcagcctcccaaattgctggctttacaggtgtgagccaccatgcccggccagttaattttattttgatcagagatcattctgggactttaaaaatgttttaatcctttgaaatacgttaaatcatgctttatagttcat

SEQ ID NO: 167142 - DNA, 546 bp, Homo sapiens
acattgctcatcaaatagaactagacagcctcaacacaaaaactgagaacatgcacctcacacacaccagccactgggtatttcataataaagaaaaatgggatcaaacaaggcattaggaagagaaaaacaggttcagccagatgctatggaaatcctgattcttatcagggcaaacaatcagaattactatgatgcttcttagggagagtctactctgaacagacacagaatattgagaatattgtatttcatactgtcttcacgtggaccaggcaattagaattatgcccgtttgatagatgaggaaagtcaggttgagagagcacgtgtttgtcgggtggcagaaacaggaactagaccaatgtctgtttaattgcagtcagtcactcaacttcaggttatggagcatataaggatatgtgtrtgtgtgtgcgtgcgcgtgtgtgtgtgtgtgtgtgtgtaaagaaccattttcctcccttctaaaatcagaataattccattagccccagggtctagtagaataaaatataaaactatcat

SEQ ID NO: 167143 - DNA, 555 bp, Homo sapiens
cgtgtaaggacctcccctcaaattcagtctcttttttttattggatacaattgctctgggtttaatttgggttctgagcaaagtgtcactaactctctagcacagcttctgtgtttgagggttagataagaccaagaagtgggggctataagaagaattacttgttggattactttgacccaacaagggaagcagcatctcagcccagaagtgttcaacaatagaaaggccacccacaaagcaccaargagattggctaaatgtctgtgaggaaactcaggataattctctttcaccttcgagaatctgattttatgatggtggtagagatttcatatttaaggtgttttgagagcttggtgaagacacagtaggggttgcgtaaatgattgttgttcctttgaggttgaagggaacattctggacatctcaaaccattcagttggcaacttactacagggctcatacatagacagtgtccacctactgtccatccccccacactgaaaagtgatgctggccactcactgaaaaggctgccgtgaaagcagcaag

SEQ ID NO: 167144 - DNA, 424 bp, Homo sapiens
tcacacaagaaaaaaaaaaaagcagtgatttgatataagacttcactctggctgcttagtaacatagtcttaatgtcctttttggcttgactaggtggatcaaaaagtttgattcgcttttcttgctgcaraagtcctagattattgggctagaaatgaaaaccatttttctttttcagtcagggaaaaagaaaacatttgccacatcattatatacaatatattgtagtggaaagcacttagaaaaatgcccaaggcaggtagttactgcacaacaccaagaagacaaaacttaagttcaatggcaaagaaaatttgccatattttccccagctatggaccctgatcccttacagataacaccatcagggcttggcacttaggcatccagaaaaatggcatgtagattggcatcatggaattc

SEQ ID NO: 167145 - DNA, 424 bp, Homo sapiens
tcacacaagaaaaaaaaaaaagcagtgatttgatataagacttcactctggctgcttagtaacatagtcttaatgtcctttttggcttgactaggtggatcaaaaagtttgattcgcttttcttgctgcaaaagtcctagattattgggctagaaatgaaaaccatttttctttttcagycagggaaaaagaaaacatttgccacatcattatatacaatatattgtagtggaaagcacttagaaaaatgcccaaggcaggtagttactgcacaacaccaagaagacaaaacttaagttcaatggcaaagaaaatttgccatattttccccagctatggaccctgatcccttacagataacaccatcagggcttggcacttaggcatccagaaaaatggcatgtagattggcatcatggaattc

SEQ ID NO: 167146 - DNA, 593 bp, Homo sapiens
tttaaaagtctcctattaatctacctttctaagaccactaactataggactataatgctttctgtgtgtgtttgtgcatgcatgtatatgtgtatatgygcatataatgaatatgtatttatatggttaatatatatacacacataaaacacagcatgtatttgttttaaaatgaaccgctgaatcatgctgtgtaaactgtagttagaatttgtctcttagtaatctatctttagagtaaaaacacatcttgctttatattttttagggtctttggacagaagagaggaatcggttggtgcataagttaggttttcatttctgagttggttgattggataaggtttaggtgaggggagaagagcttgagatggacaaaataggcaaagaatataaataagaaatggttttcaaaaaggaaatgggtattttaaaacagaatccaggtgagagaggggtgaggggattgaataacagactcaaagcagtaagtcaatgctttgcccccacccagaatctgaatctgagctaactagtttcaaacaatacaggggacttagtatatgagctttgatgtcaccaaggaaacaacc

SEQ ID NO: 167147 - DNA, 561 bp, Homo sapiens
tatcaatgggagtacagtgcttatgtgcagttcctcctgcctttaatcttacagatcctattcatttccaatgttccaatcagtacctttacccttgtcccctctagtgatgttatttcagacatttgtrctacagttagagtctcttatcacagattgcattttttcctgggatcccctgacctcctaaattttttttcaaatatgtatacatgaaggttcaccctttgcactgtaaagttctatgggttttgacaaaggcataatgtcaggtatcctccctcacagtatcacacagaatagtttcaccactctgattgtgcttcacctgtttatccctctgtcttccctctcaaactcctggcaatcattgacgtttttactttctctataatttttcctttttcaaaatgtactataattggaatcaaatggtatgtaatctcttcaaagtggcttctttcactaaacaatatgcatttacattcttccatgtctgtgtgtgtcttgatagctcatttctttttataactgaataatattccataacacggatgctcc

SEQ ID NO: 167148 - DNA, 586 bp, Homo sapiens
tgattggttcatgaatggacctgtcctctaaaatggtgaggtcagaatgaagctcagagctttgttagatgcttgtgggaagtaaaggtgtctcactctatggtggagcatctagctccagctcctgctgatggacacttgcaaccacaagggaaatagatgttgtagttaacacataaggaagggcaaaggtgagacaggtgtggagaaatggaggcagatccctgataaaactatggctgaaatgtaatactatggtgctttttctccaagtgaaccaatacatttattttattatcagtttgatttgggttttcagtgataggtacattaaakcctcctgatgcttaaaaagccaataactaaggtatcaatgactggggcagtgcaactcaccctatgttcattaacgaatttatttgttccaacccatttccaagaagcattgtgggatgttaagagggactgtctttgggagactgaggtgggtggatcacttgatatcaggagttcgagagtagccttgccaatgtggtaaaacaccgtctctaccaaaaatatgtaaactagctgggcatggtggcag

SEQ ID NO: 167149 - DNA, 586 bp, Homo sapiens
tgattggttcatgaatggacctgtcctctaaaatggtgaggtcagaatgaagctcagagctttgttagatgcttgtgggaagtaaaggtgtctcactctatggtggagcatctagctccagctcctgctgatggacacttgcaaccacaagggaaatagatgttgtagttaacacataaggaagggcaaaggtgagacaggtgtggagaaatggaggcagatccctgataaaactatggctgaaatgtaatactatggtgctttttctccaagtgaaccaatacatttattttattatcagtttgatttgggttttcagtgataggtacattaaagcctcctgatgcttaaaaagccaataactaaggtatcaatgactggggcagtgcaactcaccctatgttcattaacgaatttatttgttccaacccatttccaagaagcattgtgggatgttaagagggactgtctttgggagactgaggtgggtggatcacttgatatcaggagttygagagtagccttgccaatgtggtaaaacaccgtctctaccaaaaatatgtaaactagctgggcatggtggcag

SEQ ID NO: 167150 - DNA, 586 bp, Homo sapiens
tgattggttcatgaatggacctgtcctctaaaatggtgaggtcagaatgaagctcagagctttgttagatgcttgtgggaagtaaaggtgtctcactctatggtggagcatctagctccagctcctgctgatggacacttgcaaccacaagggaaatagatgttgtagttaacacataaggaagggcaaaggtgagacaggtgtggagaaatggaggcagatccctgataaaactatggctgaaatgtaatactatggtgctttttctccaagtgaaccaatacatttattttattatcagtttgatttgggttttcagtgataggtacattaaagcctcctgatgcttaaaaagccaataactaaggtatcaatgactggggcagtgcaactcaccctatgttcattaacgaatttatttgttccaacccatttccaagaagcattgtgggatgttaagagggactgtctttgggagactgaggtgggtggatcacttgatatcaggagttcgagagtagccttgccaatgtggtaaaacmccgtctctaccaaaaatatgtaaactagctgggcatggtggcag

SEQ ID NO: 167151 - DNA, 532 bp, Homo sapiens
ggggagtcaatttaacactcaataagtgcaaattctaaataaggcattgcacctacaggtgggagtaaaaggacctaccatcctggtgtgcctrgaaatgaaacacttccagggacatgggaattttagggcaaataccagtaaggtcccaggcaaagcagggcagtcagtcactctaggtggtgacctgttcttgtggagatttgaatctatagaaagccatgattaagcaaaaattgtgggagatgttatggtaggctgaataatgacttgtcgtatatatcttcacatcctaatcctctgaacctgtgaatgttaccttatatggcaaacatgacttttcagaagtgatttagttaaaggtctttagatgggtagattatcctggattttctgggtgggctcaatgtaatcagaaggatcatcaggagacgcaaagtcagaggaggagaagaacaggtgatgattagagtgatctactttgaaaatgaagaaggggaccatagccagtgagcaaaggtggcccctacag

SEQ ID NO: 167152 - DNA, 662 bp, Homo sapiens
cttcacacacaatatttctgataaattatatttcatggattctcacaaaaattgtggtgggtttataattatagagtcaaaaaatgctactttactgagtatattctgacaggaaagaacttctattttgactaagagtcaatgtgaacagaaatttctgcttataattgcgcatatctgattaacatagaatttttcatagcttcgcttctgyccttctatctctcaaacttcttttttctcttctgcccctcaaattctgaagccaagtaccccaggacacattcctgttcatacacagtctctgtactcactccttcatatcattatgcagatgagttggccatgtgggtaggaggagtgttcttgaagccacacttacacagaggcaactagcaacaacttactgtccgtagacattatgagacaggtaactatgttacccatggagttacccgtggaaggtcttgactgcaaggtgtccaggttcttggagttttgaacaaagaattggacaaaatgcacaaagcaaggaaagaacaaaacaacaaaagcagagatttatcaaaaactaaagtatgctccacaaggtgggagcaggcttgaacaaacgctcaggagccctggttacagaattttctggggtttaaaggtttcccatt

SEQ ID NO: 167153 - DNA, 609 bp, Homo sapiens
tggaatgtggggactagctgcctaaatcctccttaggcagacartggtgttcagatcctgccttgggtccactttatttgttcagagtttgtcatcttgtaataaaaatgttgactcctcatccacaataccatttccttttcatcatactttctctgatgttcccaatcaagcaaactctttctcctcttctagaaatagctctttagatttcatagactagtaaaatttgcagacctagggttgtgaactttttattttgccaagtaaagacattgaaaaaacaacaagcaaaagagacaactacccaataatgtgcgcaatttgtgatcaccagctttcacacagagaaaacacattatcatctaaggagaagaaaataaaagaggaagagaaggagagagaaaaggaaagatagaaattatatgggccataatggtggtggttacatgagcgtatacatttgtcaaaaaatcattgctgttcattagaaggtgtgcattttgacaaaacaaaaaacaaggcaagatatgaagaatgaaaagtcccatatcctaatcaggcatatctttcttgaacccaagagctgcgtctgcatttggaactatg

SEQ ID NO: 167154 - DNA, 475 bp, Homo sapiens
acaaatagacaaattttcctttactattaactatttggttacctcaatgaatattttatagatgaaatacaggacagatactctaatttttttttttactattttccaaataatttgcttcctatcaatgtccaaagatgaacattgaggctgttgttgttattgctgtttatatgtttgyttgtatgttgcttttgtatcattttgaactcaaagatttgaacatgtgatgtattttaatctattgcacttgttttcaatttaatggtgcacttgttccatttttgacccatgggcatattctcagttcttttggctcctgagtccttttggcattgcagtcttttacgtcttttttgttatctggaatgacaagatattctcatttgcctagtacattttctcctgacccagaatcagccatttctccagtgggaaatggtatttagaaagtgtactgtaaaagctagagaag

SEQ ID NO: 167155 - DNA, 455 bp, Homo sapiens
caaatagacaaattttcctttactattaactatttggttacctcaatgaatattttatagatgaaatacaggacagatactctaatttttttttttactattttccaaataatttgcttcctatcaatgtccaaagatgaacattgaggctgttgttgttattgctgtttatatgtttgtttgtatgttgcttttgtatcattttgaactcaaagatttgaacatgtgatgtattttaatctattgcacttgttttcaatttaatggtgcacttgttccatttttgacccatgggcatattctcagttcttttggctcctgagtccttttggcattgcagtcttttacgtcttttttgttatctggaatgacaagatatwctcatttgcctagtacattttctcctgacccagaatcagccatttctccagtgggaaatggtatttagaaagtgt

SEQ ID NO: 167156 - DNA, 503 bp, Homo sapiens
acaaaaatgcagtggacaggctgaatgtgacactcagattagccaggtcttagtatcatgcacwcccctagaagtatgagcttttactggggctgaaacccactggaaacatggaactaaaacttgggaagaagtagctttgcttttatcagaagacgaaaaatggaccctgggcagacaagaccaggagaaaacaaatttgttcctaaataaccttcatggcagaaatgtttgccaaggtgtagacatcaaacaatatgattatagcttactatctattgtttaaataattttcaaaaaaaaggtgaactcatgactctcatacagatatacaaggaacacatgtcaaaatttgcatttaagtcattaagcaaaatgaggatacaatgcagatgtcacaagtagttcaaaggagaatctgaagaacatccatggtattagcttgggaatattgaaatgaacttgaagatgaatgcaaaacagtctttccatagtgagggagg

SEQ ID NO: 167157 - DNA, 472 bp, Homo sapiens
tactggaagttctagtcagggaaattaggcaaagaaaagaaagaaaatgcatccrgactgaaaaggaaaagttaacctacttctatttgcagatgacatgatcttgtatatagaaaatcctatggaatagatatacaaaaaaattagaactaataaataagttcagcaattttgcaggatactagattgatatacaaaaaaactgtatctctatatactagcaataatacaaatatgaaattaagaaaacaattatattttcaatagcatccagaaaaataaaatatttagaaataaatttaacaaaagtggcataaacctgtaaaatgaaaactacacaatgttgttgaaaaaattatggaagaaataaatgaatagaaagacacccaatgttcacggattgaaagatttattattgttaaatggcaataccctccaaattaattcatagattaaatacaattcctataaa

SEQ ID NO: 167158 - DNA, 516 bp, Homo sapiens
ataaaaagctgatggggaatttcataacagagatcagagttacaatatttgaacccactaatcaagcctaatataataaaataactagattttactgaacaaaataaatattttagaggaatatggtcaataacaccacaggggtgcaatcagcaaaatcaagactgggaaaccatacaggacaaatgacacagatcaaataagaggcatatcaaacaaagccagtgtacagactttgtacagatcctgattctaaccagccaaatgcttaatatatgtatatgtatttatatatatatatatatatatatatatatatatatatatatatayacacacacacacatatatatgaaaatcagggacatttgaaaactgatatggtctggctctgtgtccccacccaaatctcacgtcaaattgtaatccccaagtgtcaggggaggggcctggtgggaggtgattgaatcatgggggcagacttccccttgcttttttcatgattgttagtgagct

SEQ ID NO: 167159 - DNA, 388 bp, Homo sapiens
tttttccttttgggtagcatggcttgagccatcttgtcaggcatacctagcktcagattcttttctgctaacagattttctctgtgaccctggagacattttctaacttttctgagactcatttattcaaatgtttatgtgacaggcattgtgctgggccctggagatacagtgatcaatggcatcctataaggttttgatatctgtgaagtcactgccaccattgacacattctagggactcagtaaattgtagctgtgtccgataccatcatttggaaagagcactatcagattttggattcaaactgaatgcagccaagcactgccttttggtaaaaatgtggacacagtaacactagtagggggcagtgtgagggtgggagatg

SEQ ID NO: 167160 - DNA, 503 bp, Homo sapiens
tgtacctctcttatcatctttttaacagatatccatgcgtacagaggaagcgtctcatgcaatgaagaagaccaggtaaggaggagtcccactgaaacacaaaaagtggctcataaccatgcccaggactctccatcagtccttatcccatctacattggaagggttactgtctcctcaccactagactttattattagtgtctctctatttaagctaatttgaaagcagcttatccatgatcaacaatgagcaaatgcttagaatcctaccmcaaatgttcctacatccccattcatagttttggtaattcaatttataaaaaataacccccattaacacatataaataatgctattaaagaacattgcaggaagactgcatttttaaaaaaattataaaatccccaggcagtgaggaaaaaaaaaaaaaaaaaacaacagggaaggacaagcaatatgctcagttacccagatttggcgacagaaccaaagctaggattca

SEQ ID NO: 167161 - DNA, 503 bp, Homo sapiens
tgtacctctcttatcatctttttaacagatatccatgcgtacagaggaagcgtctcatgcaatgaagaagaccaggtaaggaggagtcccactgaaacacaaaaagtggctcataaccatgcccaggactctccatcagtccttatcccatctacattggaagggttactgtctcctcaccactagactttattattagtgtctctctatttaagctaatttgaaagcagcttatccatgatcaacaatgagcaaatgcttagaatcctaccccaaatgttcctacatccccattcatagttytggtaattcaatttataaaaaataacccccattaacacatataaataatgctattaaagaacattgcaggaagactgcatttttaaaaaaattataaaatccccaggcagtgaggaaaaaaaaaaaaaaaaaacaacagggaaggacaagcaatatgctcagttacccagatttggcgacagaaccaaagctaggattca

SEQ ID NO: 167162 - DNA, 503 bp, Homo sapiens
tgtacctctcttatcatctttttaacagatatccatgcgtacagaggaagcgtctcatgcaatgaagaagaccaggtaaggaggagtcccactgaaacacaaaaagtggctcataaccatgcccaggactctccatcagtccttatcccatctacattggaagggttactgtctcctcaccactagactttattattagtgtctctctatttaagctaatttgaaagcagcttatccatgatcaacaatgagcaaatgcttagaatcctaccccaaatgttcctacatccccattcatagttttgstaattcaatttataaaaaataacccccattaacacatataaataatgctattaaagaacattgcaggaagactgcatttttaaaaaaattataaaatccccaggcagtgaggaaaaaaaaaaaaaaaaaacaacagggaaggacaagcaatatgctcagttacccagatttggcgacagaaccaaagctaggattca

SEQ ID NO: 167163 - DNA, 503 bp, Homo sapiens
tgtacctctcttatcatctttttaacagatatccatgcgtacagaggaagcgtctcatgcaatgaagaagaccaggtaaggaggagtcccactgaaacacaaaaagtggctcataaccatgcccaggactctccatcagtccttatcccatctacattggaagggttactgtctcctcaccactagactttattattagtgtctctctatttaagctaatttgaaagcagcttatccatgatcaacaatgagcaaatgcttagaatcctaccccaaatgttcctacatccccattcatagttttggtaattcaatttataaaaaataacccmcattaacacatataaataatgctattaaagaacattgcaggaagactgcatttttaaaaaaattataaaatccccaggcagtgaggaaaaaaaaaaaaaaaaaacaacagggaaggacaagcaatatgctcagttacccagatttggcgacagaaccaaagctaggattca

SEQ ID NO: 167164 - DNA, 608 bp, Homo sapiens
gatcagctctgggacacctgaggtgaaattctgtagttgcaaggctaagagatagctgactccgacccaacctgtgataatcttacctgggaaatgggacctgtgagtaccctcctggcagcagctagcttatctggagatatcctaaccttgaaaacttctacggcaagatgtctcagcctcggcactattgacattgtggggtcaggtaattctttcttgtggaggctgtcccattcacwgtagagtgtttagcagcacccctagccttcatctactagatgccacttgtacaccacccacccatcacaatactgtgacaaccaaaaatgtctccagatactgccaatatcccttggagatcaaaatcatccccacttaagaaccaatgctctataagtacaggaaaagaacctcaggcacctgtttgggagctggaaggtcagaagactgggaatgacaaattgtactaatacttcatctgctgacaggggctggggataccctcccaacacttgttcttttagaattcagtcatggcatttacagtgtcatacaaccaaaactttaaaaatgaagaaagataaaagcaagtttaaccttttgtg

SEQ ID NO: 167165 - DNA, 522 bp, Homo sapiens
gaattcagggccacattaaactgtccatcctgtactctttacttcaaacccccatacatagatatattaaaaaaaaaaaaaaaaaaaaaaaaaactggctcctgggatcatggcagaggggaggaaggactagattgcagctccggcatgtggaggctcgcattgtgaattttagcttcagattggctgcaagaacaaatcaraaatactgagaggaccacagaccctctgaaggaagcggactgctcctgcaggacccaggagacccacaaatactgtgagtgccccaactgcggaagtgggaaaggtagaccctcctcccccaaacacacacccccagtggagaagctgaaggtctgtttgcaggagaagtttccaactttacctggagctgagtcaagttagagagccgagcgaaatacagaggaagcagcagaaaagccctgggagctcactgggtccccaagcagtccattcctgcctggcaccacggggatccatcatgagggtgcccagagatgc

SEQ ID NO: 167166 - DNA, 526 bp, Homo sapiens
tcctgtactctttacttcaaacccccatacatagatatattaaaaaaaaaaaaaaaaaaaaaaaaaactggctcctgggatcatggcagaggggaggaaggactagattgcagctccggcatgtggaggctcgcattgtgaattttagcttcagattggctgcaagaacaaatcagaaatactgagaggaccacagaccctctgaaggaagcggactgctcctgcaggacccaggagacccacaartactgtgagtgccccaactgcggaagtgggaaaggtagaccctcctcccccaaacacacacccccagtggagaagctgaaggtctgtttgcaggagaagtttccaactttacctggagctgagtcaagttagagagccgagcgaaatacagaggaagcagcagaaaagccctgggagctcactgggtccccaagcagtccattcctgcctggcaccacggggatccatcatgagggtgcccagagatgcagggggtaaaattcaacaaggagaaggaatt

SEQ ID NO: 167167 - DNA, 606 bp, Homo sapiens
aattctggctgactgcagcctcaacctcccaggctcagtagatcctcccaactcagtctcccaagtagctgagaccacaggtgcatgccaccacaccctgctaatttttgcattttttgtagagatggggtctgtgttgctcctccaggtctagaactcctggcttcaagaaatctkcctgcctcagccttccaaatgttgggattacagacatgagccactgtgcccagcctagaagttttgggatctacttattttttttttcccttagcaaaagggaagttaggacaatttactatgattattgacagcatcttgaatttctacttcatatatttgataagtatattgatttgtaggccttttgtaataacttaaaggtcttctaatgtttgtatcacaaggcttggcaaatgtttaagaaattacatgggaagaaaaagaaactacatggagaatgcgtctcatagtgaagccttttaggtcaattaaggtacactaaaaaaaaaaagtgaagcaaaaagggtgaaaaaaaggtgtagatttttatgaattcagtgctagagggcatctgttaacatttgtagcaagactagattttaatct

SEQ ID NO: 167168 - DNA, 606 bp, Homo sapiens
aattctggctgactgcagcctcaacctcccaggctcagtagatcctcccaactcagtctcccaagtagctgagaccacaggtgcatgccaccacaccctgctaatttttgcattttttgtagagatggggtctgtgttgctcctccaggtctagaactcctggcttcaagaaatcttccygcctcagccttccaaatgttgggattacagacatgagccactgtgcccagcctagaagttttgggatctacttattttttttttcccttagcaaaagggaagttaggacaatttactatgattattgacagcatcttgaatttctacttcatatatttgataagtatattgatttgtaggccttttgtaataacttaaaggtcttctaatgtttgtatcacaaggcttggcaaatgtttaagaaattacatgggaagaaaaagaaactacatggagaatgcgtctcatagtgaagccttttaggtcaattaaggtacactaaaaaaaaaaagtgaagcaaaaagggtgaaaaaaaggtgtagatttttatgaattcagtgctagagggcatctgttaacatttgtagcaagactagattttaatct

SEQ ID NO: 167169 - DNA, 397 bp, Homo sapiens
cctcatgtagaacagggatccaggagatcacaagagaaatagaccctcaaccttgatgcttctcaaaggtctgagacggtcctatttctcatgagacaggcttttaaaggagcatgaaccaccttccatgctgatttacctggtgtcatgtatcatggcaaatggctgggtttggagcagataattgcattggtgaaagtatttttgttaatcttggtaatatcaaaacatatccctatactctttcatactttccaaagtcaagtctcaattttttaatttttaaaaatgtcatagcaacacratatataagattcctaattttcacacaaggaaactgaggtccgcaaaggttgaatgactcactcaaatttccatagtaaagtagaggatttgg

SEQ ID NO: 167170 - DNA, 606 bp, Homo sapiens
aattctggctgactgcagcctcaacctcccaggctcagtagatcctcccaactcagtctcccaagtagctgagaccacaggtgcatgccaccacaccctgctaatttttgcattttttgtagagatggggtctgtgttgctcctccaggtctagaactcctggcttcaagaaatcttcctgcctcagccttccaaatgttgggattacagacatgagccactgtgcccagcctagaagttttgggatctacttattttttttttcccttagcaaaagggaagttaggacaatttactatgattattgacagcatcttgaatttctacttcatatatttgataagtatattgatttgtaggccttttgtaataacttaaaggtcttctaatgtttgtatcacaaggcttggcaaatgtttaagaaattacatgggaagaaaaagaaactacatggagaatgcgtctcatagtgaagccttttaggtcaattaaggtacactaaaaaaaaaaartgaagcaaaaagggtgaaaaaaaggtgtagatttttatgaattcagtgctagagggcatctgttaacatttgtagcaagactagattttaatct

SEQ ID NO: 167171 - DNA, 612 bp, Homo sapiens
ttttttgaaacctactcaaatctgaatttgaggtgatgttttttaattaaaaagaaagaaggggtcacctcaaaaccacatgaagaaaaccagtctgayaggttgtttttcacatgcaatactactttatctctctgaggttatgagaaaaagtggggtaatggggaagagaaattgactgtttcattattaaagatttcccatatgccaaaaatcatgaagcaacaataacaaataccctcatgcccaccaccaagatttagccgagattaacatttaccatatttctttttcctttctcttctttttttgagaaataaaacattacagacatcaattgatttcctgtgcatttttcccctccttccctagaggtaaccattataccaaaattcttgtgtatccttcttgcatattttatttttatttttattataaatgggtgtatctatatgttaacacgtagtctttatgtttttatgtggtatgtcattggtttcatatcgtatgtataattctgcaacttgcttttttcactcaacctgtttttgagatatattcatattaatatatgtagttctatttcatttcatttaaatgctgtatcaatat

SEQ ID NO: 167172 - DNA, 612 bp, Homo sapiens
ttttttgaaacctactcaaatctgaatttgaggtgatgttttttaattaaaaagaaagaaggggtcacctcaaaaccacatgaagaaaaccagtctgataggttgtttttcacatgcaatactactttatctctctgaggttatgagaaaaagtggggtaatggggaagagaaattgactgtttcattattaaagatttcccatatgccaaaaatcatgaagcaacaataacaaataccctcatgcccaccaccaagatttagccgagattaacatttaccatatttctttttcctttctcttctttttttgagaaataaaacattacagacatcaattgatttcctgtgcatttttcccctccttccctagaggtaaccattataccaaaattcttgtgtatccttcttgcatattttatttttatttttattataaatgggtgtatctatatgttaacacgtagtctttatgtttttatgtggtatgtcattggtttcatatygtatgtataattctgcaacttgcttttttcactcaacctgtttttgagatatattcatattaatatatgtagttctatttcatttcatttaaatgctgtatcaatat

SEQ ID NO: 167173 - DNA, 523 bp, Homo sapiens
actccacaaccaatccaacaacaaatcacattagctgtaccgtgaaaatatatccagcatccaattatttttacactccactaccatcaagattcttgctaccatcatccctcacctggatgattatacaatagcttccaaatgattctccctgctattaaaaataagtcagatcatggtgtgcttctgctcacagatgttcattttactcagttaaagcccaagcccctaccctgaccgacggagccctgtgggttctccagctcaacccacacatctcctccttcctycctgcactccagcctcagggcctgtttgccactcctcaagcccaccactctcatccaggggctcagcacttgctgttcactctttttggaattccccagcccctatagctacatggctcacttcctgtcctcctccagtgacacttcaaatgtcactttctgagtgatgtttgtggactttatacctactacagttacgtatatagagaaaatatctgcaagatatataagaa

SEQ ID NO: 167174 - DNA, 563 bp, Homo sapiens
tgctgtgctggcagaccgaatgttttttaaaacacaaagcttgcagtcctgctgctgtgctcaaaatccytgcatggctcttcttgaaacaggtttagtgtttctactcgagttccttctctgtcgttcaacacaaacacatacacacccagttctgtttcacgcttttgtctttattatccctcgtaactgcccgccctgcaaccaacccgctcaaacaagcaccctgactggcgcattcttactcattctagcctgggtttcaacttcaaggagcttcagcgcccctcactcccttgccctgaaagctggctaaactacgcaccttttctccccttttgaaatgacctttccagatatttctatggaattcagtgccattttctgccgctgttctcaccacattcattcatcatgtttagttttaaaagtaccagattctgtcgatttctccaactgaactctgaaatctttgaggtcagggagcttgcctcattctattttgtattcccagtacgtgacacatggctggacacaccagaaattgtccgaccaagtttgtg

SEQ ID NO: 167175 - DNA, 295 bp, Homo sapiens
taggaggagcatgcttgaggggatggagagggtagggtaggtagggataggctaagattatccttgtatatgtgggcagagtccccagtgcaggtagtatatagaagttatagtcagacagaagtggtccctgtagcagggtgtctgatcctggaatccaggaagcccctgaaatggcatgtgaactcaagaagttcccagggttcccaggtgtgaccattttyctgggccaggggccatagctttcatgagattctcaaggaagttagtgagacttataaatggttaaaaaaaa

SEQ ID NO: 167176 - DNA, 509 bp, Homo sapiens
ttcttgaagattagttgattagttttatttaagagatgataatgatttaaactaatatatgccattgctaaagcctccrgaatccccttagaagtctagacttctgtagattcatatttagcctgagagttgctggcttcagagggagatgagccctttatttttctttctttggagggaatacagagggaggcaaagaaaaccaaagtgaattattactaaaggactttgtgattactaatactaatgtaaacagaaattaagattttttttttctttttctttttctcattctcattctttctttcccaaacagatggggcacaatcatttttagctgctttgtttgcattggacaggtaaggaaggccaaaacattcattgattattgacagtgacttctaaattcttatctaattaattccattggcaaagctgtgtttaattaatgcctagcttaattaagcagaacccataaatgcccatgtgatataatccatagtctattt

SEQ ID NO: 167177 - DNA, 207 bp, Homo sapiens
ttctcttctaaagtcataatatatgccaaggagaagaaaacaccatgctcgtggtagaagtctccaatatatatgcatgcatgcatgtgcrcacacacacacacacacacacacacacacacacagtgaacaggcctttagttatacacattcttgtgtagtccattcccaagatgattttggactagtctttataaccaatagaat

SEQ ID NO: 167178 - DNA, 584 bp, Homo sapiens
aattacagtggacccagctggtccatggacctgctttgcagttattccccaggttctgaatgtataattgaaatagacacacttagcaactggaagaattcctatgggatgagggccgctggaacttcccttttctaccaaggtagtaaatctggggaatttcagagactaataccwccgtaacagtcttgaaagaagcaaagatggtacctatcacacactcatttaactcaccaatttaacctatgcagacattcatggattatagagaatgactgtggattatcgcagtcttaggtagtggcagctgcagctactgacctacatgtagtatctttgctagagcaagcaaacatggctatgggcacatgacatgtaactaatgccttttgcgtcatactaatttgcaaagacccccagaagtagtttgtttgtaccttacaggggaaatagtcttccttcagggctatatcaattctcctgctctctgccatgtataatctgcagagaccttgattgtctttatgctacattgacaacattatgctgatgggctctaatgagcaggatggaccaagtactta

SEQ ID NO: 167179 - DNA, 518 bp, Homo sapiens
caaatgacttaaaaaaggaagtagaaatggaataaacttatcagtcttgaagaacttatgtattgcttggcttccgttttcacatctatgagcaacagtgtatctcattccccattttccttaagagtagctatcattgttgcaacagtgcattcttaaaacctcatagacacctttgtctatttctcaattgtttcattcatttaatacatactgaagatccagttaatcaattcttgattatttttctcttcycaattttctcattcccatggccatgagcatcccttaggctaagcatttattcccccaggctgagattatcttaatttatctccttccttgaatatcccttaggtacctccctgccaaagtaattttcaatgacatcactcttctgcttaaaaaaaaaaaaaatctcagctgcaaatcacaagtctctggtcctctgctttgttttgttttcgaggctccatctacaaacagggcctcctctggccctgtaatctaatttccca

SEQ ID NO: 167180 - DNA, 518 bp, Homo sapiens
caaatgacttaaaaaaggaagtagaaatggaataaacttatcagtcttgaagaacttatgtattgcttggcttccgttttcacatctatgagcaacagtgtatctcattccccattttccttaagagtagctatcattgttgcaacagtgcattcttaaaacctcatagacacctttgtctatttctcaattgtttcattcatttaatacatactgaagatccagttaatcaattcttgattatttttctcttctcaattttctcattcccatggccatgagcatcccttaggctaagcatttattcccccaggctkagattatcttaatttatctccttccttgaatatcccttaggtacctccctgccaaagtaattttcaatgacatcactcttctgcttaaaaaaaaaaaaaatctcagctgcaaatcacaagtctctggtcctctgctttgttttgttttcgaggctccatctacaaacagggcctcctctggccctgtaatctaatttccca

SEQ ID NO: 167181 - DNA, 518 bp, Homo sapiens
caaatgacttaaaaaaggaagtagaaatggaataaacttatcagtcttgaagaacttatgtattgcttggcttccgttttcacatctatgagcaacagtgtatctcattccccattttccttaagagtagctatcattgttgcaacagtgcattcttaaaacctcatagacacctttgtctatttctcaattgtttcattcatttaatacatactgaagatccagttaatcaattcttgattatttttctcttctcaattttctcattcccatggccatgagcatcccttaggctaagcatttattcccccaggctgagattatcttaatttatctccttccttgaatatcccttaggtacctccctgccaaagtaattttcaatgacatcactcttctgcttaaaaaaaaaaaaaatctcagctgcaaatcacaagtctctggtcctctgctttgttttgttttcgaggctccatctacaaacrgggcctcctctggccctgtaatctaatttccca

SEQ ID NO: 167182 - DNA, 674 bp, Homo sapiens
tatcttaacaaacatattcttcataaggctttcactattataatttttcatttttctgtaaattcactttgtctcatagctctaacaagattatctttactcaagactaatatactggaaaagcacataaattctacttttctgccctcaagagaagggcctaagaagtcaaaataatttcttgtatcctattacaccatatgaattgccaccrgagaattatgcttgtttattaatggcactatattagccacctacaatggttaatagataatagaggtgggttttgtaatgcagagaaaaattcaagggaccacatattgtaatgcaatgtgcctcagtctggggcctagaagggaagatgatgggacaaccacttttagatctgccatatctaaaaaaccataatgttacatattaatgttttctttaggtatatatacagataccattaactaggttaaccacagaacaggaagggttattttagaattataactgttaccttccaatgatagacacggggagtaattgaaaaacatggaaaaacctaaaaagagaatgaaggcatctataaaaagagactgcctctttttaatactttatatggcagtgaagaaaagaacaaaggaacctcttttcagttatctttttatttcctcaaatttgatttt

SEQ ID NO: 167183 - DNA, 446 bp, Homo sapiens
tgatcacattttacaatccttctggaatttcttccctagagcactgctcttagctgggtggcccccttctccatcttttggcactctctgcgttccctccctctacttagcagacccagctttctgattgatcctactccctggcctcttgctttttttatatatttttttcttttgagacggggtctcactctgtcatccaggctagagtgtagtggtgcaatcacagctcactgtagcctcaacctgccaggctcaagcaatcctccccactcagcttcctgagtagctgggactacaggtgygcaccaccatgcctcgctaatgcttaaaattttttttgtagagatggggtctcactatgttgcccaggatggcctcgcactcctgtgctcaagcaatcctcctgccttggcctcccaaagttccacgacttcttttctctc

SEQ ID NO: 167184 - DNA, 399 bp, Homo sapiens
tttccaatctggtccatttgttctccaggcatgccttatagctattaccttaggatyttccccttttgggattgataatagagattcttacatattaacgtcatctttttaaaaaatcttattttattggggtaccaattcaagtatatatatacattttttttcttttttaagagtcaaggtattgctatgttacccaggctggatttgaactcctgagctcaagcagacctcccacctcagcctacctagtatctgggactataggcatgcactgccatgcctggttcagatcttaataatgcatgtttggtagctaaaccgtctgattctttatttctggaagggactttagtctactctcacacttgattgttcatttagatggatatagaattc

SEQ ID NO: 167185 - DNA, 407 bp, Homo sapiens
caacaaacagccatatggaagggtgtgcgagatcatctctcctggaaagacccccgttcctgggggccactccttcattggaaaagaacgttgctaattatactcatgtttgcttatgttatttactaattctaggatgcaaagccagaatatgagcaatgaccaccacgcctgacaaacctgttcctgcacaaatctgtactcttcaatcaacaaaacctgatgcaaaaaacagaaaaagggggagatgtaggagatcggtcagggtggtgggaaaaaytgtagaaagatgcaaaccttcttgaaaggctgggaggttttacaaaagctttgggaaaggatttggctgaaggcagccagattctctaatccagtgcctgaaagcttaggttagataacaaggggat

SEQ ID NO: 167186 - DNA, 524 bp, Homo sapiens
atagatctacatgcccaacaaacagccatatggaagggtgtgcgagatcatctctcctggaaagacccccgttcctgggggccactccttcattggaaaagaacgttgctaattatactcatgtttgcttatgttatttactaattctaggatgcaaagccagaatatgagcaatgaccaccacgcctgacaaacctgttcctgcacaaatctgtactcttcaatcaacaaaacctgatgcaaaaaacagaaaaagggggagatgtaggagatcggtcagggtggtgggaaaaattgtagaaagatgcaaaccttcttgaaaggctgggagsttttacaaaagctttgggaaaggatttggctgaaggcagccagattctctaatccagtgcctgaaagcttaggttagataacaaggggatgtaaagaaactgctctagataagttagtttacttaggcctcggaacctggcctttaatcatctgcacacaggactgctctctctgagttgggggttgggggg

SEQ ID NO: 167187 - DNA, 569 bp, Homo sapiens
acccaccatcacaatacagttttagaataattccatcacrccctaaaatttgcttatgttcctatgcagccaatcctggcccctactctttggacccaaacagccactgatatttctactattaaaatcatacaggatgtaatcttatgtacctggcctctttcacttattttgagactcattcatgttataccacattttgttcatgcattcacatgttgatggttgtttccagattttgactatgaatttggctattatgaacattcatttagaagtctaaatgtagacatatgttttcatttcttccagttgatacttagcagaactgctgggttgtatagtaagcatatgcttaatatttttaaaaactgccaaactttttccaaattgactataccgttttgcattcctatcagtaatgaataagatttctaggacttcaaatcctcgccaacacttggtattatcacttgtgatattaattggtacttctctaatgaacaaggatgttgagtatcttttcatctacttgttggccattcatatatattctcttaagaagtatc

SEQ ID NO: 167188 - DNA, 570 bp, Homo sapiens
aatcatctaccgtagatctctcctttggaaaaactaaagtgaggggcactgatctgaagtattgtaaaggtcactgaaagactcataaacttaaaaaacccaaatgtcatataagaaaagagaagcctagaggtaaayttacataattatgattctcttaaagtatccatataatataactagtttggataacttagaaaatttaacggcaaatggctggcaaaagaactataatctattttttaaaggaaactagctagagtatatgggccaatattaacaatgaaataaaatcaaaagaaaatatttgacctcagacaggaattctcaaatattttaggccaaaaacctttcattttatttcatctaaattttcttattaacctttggtacttgcttatatatgttttacttacaattgttatattcctttgagacaaaatattttacttaactttgacctttgcttctttatatctaactaaagcctgtaatccctggagtttttattttaatgattagttttccttagaacactttaagagaagaaatacaaagtgatttaatata

SEQ ID NO: 167189 - DNA, 570 bp, Homo sapiens
aatcatctaccgtagatctctcctttggaaaaactaaagtgaggggcactgatctgaagtattgtaaaggtcactgaaagactcataaacttaaaaaacccaaatgtcatataagaaaagagaagcctagaggtaaatttacataattatgattctcttaaagtatccatataatataactagtttggataacttagaaaatttaacggcaaatggctggcaaaagaactataatctattttttaaaggaaactagctagagtatatgggccaatattaacaatgaaataaaatcaaaagaaaatatttgacctcagacaggaattctcaaatattttaggccaaaaacctttcattttatttcatctaaattttcttattaacctttggtacttgcttatatatrttttacttacaattgttatattcctttgagacaaaatattttacttaactttgacctttgcttctttatatctaactaaagcctgtaatccctggagtttttattttaatgattagttttccttagaacactttaagagaagaaatacaaagtgatttaatata

SEQ ID NO: 167190 - DNA, 570 bp, Homo sapiens
aatcatctaccgtagatctctcctttggaaaaactaaagtgaggggcactgatctgaagtattgtaaaggtcactgaaagactcataaacttaaaaaacccaaatgtcatataagaaaagagaagcctagaggtaaatttacataattatgattctcttaaagtatccatataatataactagtttggataacttagaaaatttaacggcaaatggctggcaaaagaactataatctattttttaaaggaaactagctagagtatatgggccaatattaacaatgaaataaaatcaaaagaaaatatttgacctcagacaggaattctcaaatattttaggccaaaaacctttcattttatttcatctaaattttcttattaacctttggtacttgcttatatatgttttacttacarttgttatattcctttgagacaaaatattttacttaactttgacctttgcttctttatatctaactaaagcctgtaatccctggagtttttattttaatgattagttttccttagaacactttaagagaagaaatacaaagtgatttaatata

SEQ ID NO: 167191 - DNA, 277 bp, Homo sapiens
ttacacttacttgtaaagaayccaagttatcagagctagtacttgcaggtgagtctctctttacttcaggagcagtctctggaactcttactctaacatagtttataaagtgtcgcatgtttgacactaagttactgccaggaaaccaactgtcatgacaacgttctggtccacccactgatgcctaaaataaaaaaaaaaatgaatatcaagtcttgccacatcacgtccaaggtacaatggagatgtaacaagccccccaaaatcatccactgcc

SEQ ID NO: 167192 - DNA, 587 bp, Homo sapiens
aatggagcatttagcacattacatttccattggtgaagacagatatcatgtaattaaactataacatgaataaaagatttaatgtagataactgaaaaatatgattttaktatttttaaatatacattttcttatgaagattcagatatgaagcaaaaatattttcattgtgcatttgcataaattaaatagtcaaggagagaatacaatttattgaagagactgggacactttgtttttgagcagcttttctttaagttatcctgatgatgtagtccccactctcctagtgctttaagaaaatcatttcatcctctaatattgctacaaccagttctaaaataaacaaatcatgatgctctcatgtggtatagtagctatgtgtcactatggcttattccatcagtcatcaatgccagaggactcctgcctgtggatcccttgtcctaggtactacaaaggaacccatttgcctagggaggaataaattgaacagtaattatcaatgatttgccatagctcatgaaagatatattggtaactcttactggacatataaaaaaacaagattagcaatgagagatttt

SEQ ID NO: 167193 - DNA, 587 bp, Homo sapiens
aatggagcatttagcacattacatttccattggtgaagacagatatcatgtaattaaactataacatgaataaaagatttaatgtagataactgaaaaatatgattttattatttttaaatatacattttcttatgaagattcagatatgaagcaaaaatattttcattgtgcatttgcataaattaaatagtcaaggagagaatacaatttattraagagactgggacactttgtttttgagcagcttttctttaagttatcctgatgatgtagtccccactctcctagtgctttaagaaaatcatttcatcctctaatattgctacaaccagttctaaaataaacaaatcatgatgctctcatgtggtatagtagctatgtgtcactatggcttattccatcagtcatcaatgccagaggactcctgcctgtggatcccttgtcctaggtactacaaaggaacccatttgcctagggaggaataaattgaacagtaattatcaatgatttgccatagctcatgaaagatatattggtaactcttactggacatataaaaaaacaagattagcaatgagagatttt

SEQ ID NO: 167194 - DNA, 587 bp, Homo sapiens
aatggagcatttagcacattacatttccattggtgaagacagatatcatgtaattaaactataacatgaataaaagatttaatgtagataactgaaaaatatgattttattatttttaaatatacattttcttatgaagattcagatatgaagcaaaaatattttcattgtgcatttgcataaattaaatagtcaaggagagaatacaatttattgaagagactgggrcactttgtttttgagcagcttttctttaagttatcctgatgatgtagtccccactctcctagtgctttaagaaaatcatttcatcctctaatattgctacaaccagttctaaaataaacaaatcatgatgctctcatgtggtatagtagctatgtgtcactatggcttattccatcagtcatcaatgccagaggactcctgcctgtggatcccttgtcctaggtactacaaaggaacccatttgcctagggaggaataaattgaacagtaattatcaatgatttgccatagctcatgaaagatatattggtaactcttactggacatataaaaaaacaagattagcaatgagagatttt

SEQ ID NO: 167195 - DNA, 421 bp, Homo sapiens
tgattcctcatttgcctatcattaaaagagataatatacatgtcttcctcatttttgtacttcaggcaaggtactatctaarttgatgggtcaagtgttacaaaacagagaaaagactgaaagatactgcacccagatttatgcagaccttgctgatatgcaaattaatctcttgtaggtaaaccaaataatctggctgctaacttcttcagcactctatagatatcaggtagtttactggaagaataatatgctaaaatgtacttccagagtatgaaagaaagtctaacttactgctacagtgtaatttatgttctgagagaatatagcaaatgaaataatttttcttattaaaatcttattgaaaattccactctccagtaacaaaaacattgttttaatgcagataaatataaatgtt

SEQ ID NO: 167196 - DNA, 607 bp, Homo sapiens
aattggtatagaattttttaatatgctttttctttatcataattgccatatgatttttctttttttctacgaatggtagtgattgaattgaatgtggttataatattaagctatcaaaaggtaattattaaactctataatgacttttcagactgtaaacttcttgacagtttaagtacctaccctctggcaatgtttttggtacctaagtagtagtttttrttagctaactggtagttcaattaatatgtcatttgggggaatatatactttctttcatccaaattagtgccattaaacaactattctgtaatatgtcacagcagactactatgctgtacactttgtaaaatggaaagatatataagaatcagtcccagcctcaatgagctatagtctcatttgtgagagcataccaattcttaggtaattataatattaatacaaagcaatatttagtaatatttgagtgaggcattaactaacctgtatgctttataaagacatacatgaatatccagacttctattcccgagtagcatgggatgaaaccgccaggcttctttgagaaacattaagttatttaaaataaagtatgagagcaata

SEQ ID NO: 167197 - DNA, 497 bp, Homo sapiens
catttgaaaaataaattgtctgtgggatggacagagtactttagcgttatttcatagtgacctgtattttagtacataaaattcaggtgagatcatagagatcaagcttcctcacagataactatcccgaaaaattgaaggtttggggtatctggcttgtttacagatgtataattaaggatatatctcctgtcttaagtgtccttaagtggtgacctggcagtagacttctaattttatactatttcgtgtgatttaattaagggaaaatggttaacatttgcaaagaaaattaacttgcagttatctgggggkttttttggatttaaacatcattttgaaaacaaaaatgaaataaatcatttcatttctgaattttggaacctggaaacaggaggaggaatttttttttctagttggtggtccagttgtgtcctcaaagtacaggaaactaaagaaatactacttagtggttacgttgtggtttttaaaactag

SEQ ID NO: 167198 - DNA, 535 bp, Homo sapiens
ggccagtagtgcaagcttagcatagcctgccaggctgagtgggcagaacaagcccagtgggcccaagcaaaacttgggaaaaggcaccataggccacagaggtttccagctggaaaagtgacactccaaggacactgggttcaagtgattctcctgcctcagcctcctgagtagctgggaccagaggcgtgcatcaccaaaatttttatatttttagtagagacgggttttcaccatgttgcccaagctggtcttgagctcctggattcaagtgatccacgggcctcgacctcctaaagtgctgagattacaatcatgggccactggccaaaaacttgtatttttttaatgttttattttgtaaaaacgatcagaagcaaatatatcaaattttatgaaatgttaaagttgggcagttgagtacatgacattggttggtttttctactgattggaccgtttcatagcaaaataatttaaaatatctrcaaaacaaaatgtagaagttcttaatatataactatatacataccaca

SEQ ID NO: 167199 - DNA, 600 bp, Homo sapiens
aagaagcctacatttcatccttgtctacatagcaagttcctatattcaggaaaggtaacaaaggattaagattcaggagtcagtcagaattgagacccatgcaaggctgatagccagataataatcaagagtgtaatgtgtatcatacacagacatgcatagcagtaatgctattaaatgctacacgtatataccatctagtaatgctatattttattgcatactgtctctctgtatgcctataatgttttatccttgtcattttctgattagcagaactagaatttccattttagttctataaatgggaaatttgaggagcagaaaattaaatgagtctacccaggtaattttayagtaaatgatgcttctaagaataaaaccatcttcagatacctcatccaatctacattccatttgctgtttgattttttaatttgttattcatgccacattctgttttttgatattttgctagttttgatatgtgtcttttaaattatcttaaatgtttcttcactaaaggagcatcctctgccttatcttttctgtagagtaagggaaaagaaactaacatttcccaagtacttaatatgtgtc

SEQ ID NO: 167200 - DNA, 419 bp, Homo sapiens
ccaccaatgtgataccattgagtctgcaagaaccacagcataactgggcttggagtgcctcctaatgcagacatggctgaaatcacgacacctaagtcctttcaaatatctggaaagctttcccaagaaagacaggtacaaacatgcccaagctgcagactgcaataaatacctaaatcttcaatgcccagacactgatgaacatccacaagcatcaacacaatccagaaaacatgaccacaccaaacacattaaggaagcagggaacaatcctggagaaacagataagtaatcttttagatagagaattgaaaatagctgtttgaagaagctcaatgmaatttgatataacacagagcaggaattcagaattctatctgataaatttaacaaagagattgaaataattaaaaagaatc

SEQ ID NO: 167201 - DNA, 541 bp, Homo sapiens
aagaagagaggagatccaaataaaaataatcagaagtgaaaaaggagacattacaattaagcccacaggaaaaaacaaaacaaaacaaaaaacagatactgctatgaagaactacacactcacaaactagaaaacctagagagaatagataaatttctggaaacatacaacctcccaagattgaaccaggtataaattgaaatcctgaacataccaacaatgaatagtgaaagtgaattagtaataaaaaaatttcccaacaaaaaaaagcataggacttgatagattcacagtcaaattctaccaaacttataaaaaggaactgtaccawttctcctgaaattgttccaaaaattgaggagggaaacttccctaactcattctacaaagtcaggatcccacaatacaacctctacataccaatatttctgatgaacactggtgcaaaaatcctcaacaaaatactagtgtattgaatccaacagcacataaaaaaacaataaatcatgactaattgtttgattccagggatgaaaggatg

SEQ ID NO: 167202 - DNA, 450 bp, Homo sapiens
tctcccctttcactttcagttgaaataacataagagttttttaacagtcttaagtaattggaagttatcwaatgccataaaaaatcttatacaaaactctgaagaaaaaaattaaatttgaaaattaatttatgctacattgctttgaggttttagacccacctctgatatagtatatgaaagttaaaagcttaacagttgtccccaatcatgtacaattcaacatctatcaattatttttctctgaatttttaagatttcattcaagcagctttaaaagcttaccattttctttctttatatataacactccaatcaagccagaaactaacaaaggtgtggtgattttaaacatttttattatattttcactttgtactcactgcagtagtcagaccaggttgccataataaataccatagactgagtggcttcagcaacaggaatttg

SEQ ID NO: 167203 - DNA, 630 bp, Homo sapiens
tgtgcatgcatatgtgcatgtatgtgtacatggaagacaacacataaacatcaatcactgttaaggaattaaaagttctctcctgaaaactataatatttatattataaatagtttataaattaatatttataatttctaagtacaatttttatttttaaattgktaatacatcaaattatgacgtgctaaagaatttcagtaaacatattttgtcagatgtttttctaatttcaaaccatactagcacaaagtgcagtttgttactaccagtgatgaattaaggaagatattaagagaagggaggaaatttaaaaaggaaataaaaatttatatttctgcctggcaaaaaaagagaaaagatcacaaaaagatgctcttcgtattttccactctggttttctctctgggagtgaatcattttgccagcaacattcaactgtcaattgggatgtcttttagttgttaaagtagcatacagtgtgcctggcataatcatttagaaggtttaatattctctcacatagtttctttggaggaacataaatattactttaagcttgtcgactttcccttaatttctaatataaatatttagtattaatacttttcagtcaaaactaccctaata

SEQ ID NO: 167204 - DNA, 534 bp, Homo sapiens
cataagaacaagaaaagagaggaaacttaagagcaaagatgtttggtttcttggactccttatgtaaataacaacattcattgaatgttaagtaccaggaaccattctaactaactatgcatgtgtgggtatatacatgtatatatagttataaactgtttataattaaactgtatatatataaaaattaatatttatcactattctatgaagtagatactattaatatctccatctaacatatgagaaacagaggcttacagagttacataacttgtccagggtaatgcagctgacagtgttatttgattaaamaaaagctgaagccttccattaaaatacatgaacagtaaaagaagaaacaaattatattgagaaaataggttttgaataaaaatttgtaagaactccaattagtcaactttatgtctctggttgtaattcttagtgaatactgattttgggggtgggatatggggaaatgaccagtgggagaccttagagatctcaatatttctaggtgaatattctctc

SEQ ID NO: 167205 - DNA, 521 bp, Homo sapiens
attttcagttctatagtttccccagtgctgctctcatgatagtgaattctcacaagatctggtggtttaagtgtttggcagttctcccattgcttgctctctttcatgctgccttgtgaaggtgcctgcttctccttcgccttctgctgtgactgtaagtttcmtgaggcctccccagccatgcagaactgtgagtcaattgaacttttctttataagttacccagtctcagtcagttctttataccggtgtgaaaacagactaatacattcaataatgactaaattgcaggagcagacagcaatggaacccaattcattctaagtttactgtttcatactacctcattaaggactggtggagataccttaaagtctttgtctatatgtataaaagaagtaatgtgaacaaatgcaatttagaatgtttttcagttatttaggtcaaaagaaagaggactccaattaattgttagcaaacatttataataataaacccaattatgcagagtacttggaata

SEQ ID NO: 167206 - DNA, 348 bp, Homo sapiens
gaatattgtggaacctagccccatacctcacaagctggcgaagagggattccaatcagactccactgagagcttactctgaagcccttgaagcttagggcatagtgaattagggtgctgatagagataaaagcagaatrtgaggcagagggctagacactattttatggagagcaaaaactagaaggtataagcccaggtgacttagtgcctttggttgcagagccaggacagttgccttgtcactggggttggggccatccccagagtttgttgaagcaaagaatgtgtgagtgtttcccatgtgccatgagtgagaaggagctagtgaggggtcacctctggtgtt

SEQ ID NO: 167207 - DNA, 189 bp, Homo sapiens
aaataaacaaaatcagaatgaaattcattataatcctaccagaagtaatcattaacatttttgtgcattcgcttctaattttatgtgcatatatgtgtaygtgtgtttagatgtatatgtgcatattcacaaaaaatgaagtcatattgcacctactttacataacttaatttcctcacctatcaatat

SEQ ID NO: 167208 - DNA, 622 bp, Homo sapiens
gttggaaaaaattgacttgtagaaaatcagttgggtcatactgtactcccaaataaatttcatattaaatgctaagtattaaaaagagtaagctagaataaaatataggagaacagttttagatgatagaggaagatttttctatctgtgctgagctgggataaatggaataaagaaaaaatgtgtctagggcctctgagggaatgcccagaaactaaatgtgggttagatatggacaattttcccacccaccatgcatctttccataaatgtggacttcctacccccaacccagagcactacacctaattatgtcagtttctctgtgaatctctcacatcttcttccagtaactcatttaataaatatacatagcagaatacacaggctctgactctgatgaagaaaaacttctggctttttggggttgaactgaggatctcaaaaaggtagctcatggaggagatacccctaccttttatgagaagtttattgtttataaaatgttcataaacaatccagtatttgagcaacaggaccttaacaaaggtaaacttygaatatatggatgcaataacagggcagtccattacaaaggaatagcaatgaaaaaaggcaaaga

SEQ ID NO: 167209 - DNA, 495 bp, Homo sapiens
tatcttaaacattctcttactttagtaaaatgaaaagtataagaaagtgataaaagtcagaataaaacttaagccatgttctcagtaatattaagcatggataaaaataaaataaatgcatgccagaaatcaacttagaaaamaacaacaaaagcgctaaagaaaaaaaataaatattgaaatgtgctatttccttttcattccaactagcttacttttgcttataataatcttttggaatatatacagaattttcctggggcaaggatacattctgaatctagcaattttactttttggccctcataaatacatagcaaagaaacataaaaagatgacaaatactgagatgctggatgaccctgaattagtaacactccatacttcatttgttagtggcattcagtattgatccttagtccagatattcacaattccaaacattaaaaagagtcagtaaaacacatttatgaattttttttctgatcacaagat

SEQ ID NO: 167210 - DNA, 495 bp, Homo sapiens
tatcttaaacattctcttactttagtaaaatgaaaagtataagaaagtgataaaagtcagaataaaacttaagccatgttctcagtaatattaagcatggataaaaataaaataaatgcatgccagaaatcaacttagaaaacaacaacaaaagcgctaaagaaaaaaaataaatattgaaatgtgctatttccttttcattccaactagcttacttttgcttataataatcttttggaatatatacagaattttcctggggcaaggatacattctgaatctagcaattttactttttggccctcataaatacatagcaaagaaacataaaaagatgacaaatactgagatgctggatgaccctgaattagtaacactccatacttcatttgttagtggcattcagtattgatccttagtccagatattcacaattccaaacattaaaaagagtcagtaaaacacatttmtgaattttttttctgatcacaagat

SEQ ID NO: 167211 - DNA, 576 bp, Homo sapiens
taagatagaggtacatattatttgttccaggaatctttatttgattctttattcaacaaattccatttgaaatatactaaaattcaagtactttcctaggtgataggaatgaactaaacacatgcaaatttctgccttcacagaaaaattacattttattaaaggggatgaaaccaaataataattatctttaaaagacaatattttacaagaaactgaatgtattgatgaaaaataaagcagagaagggagaaagagcctgccaaggagtaaacaaatgctgcaacttgaagtagggtggttagggatggcctcactgataggatgacggttgagcaaaaagstgaagatgaagaaatgaggtatgtctgtctaggaagcagatttcagatatatctcacatgctgtcatgggatccttggggtgtcactttgccagccagaaacttctgtggccagtggcgccctctgcttgagtataactcatgccctctgggttcattctgcccacctggcccagctggctgtgctcagtttgcactaccagctgtagctcttctctcttcatcacccacaa

SEQ ID NO: 167212 - DNA, 576 bp, Homo sapiens
taagatagaggtacatattatttgttccaggaatctttatttgattctttattcaacaaattccatttgaaatatactaaaattcaagtactttcctaggtgataggaatgaactaaacacatgcaaatttctgccttcacagaaaaattacattttattaaaggggatgaaaccaaataataattatctttaaaagacaatattttacaagaaactgaatgtattgatgaaaaataaagcagagaagggagaaagagcctgccaaggagtaaacaaatgctgcaacttgaagtagggtggttagggatggcctcactgataggatgacggttgagcaaaaagctgaagatgaagaaatgaggtatgtctgtctaggaagcagatttcagatatatctcacatgctgtcatgggatccttggggtgtcactttgccagccagaaacttctgtggccagyggcgccctctgcttgagtataactcatgccctctgggttcattctgcccacctggcccagctggctgtgctcagtttgcactaccagctgtagctcttctctcttcatcacccacaa

SEQ ID NO: 167213 - DNA, 582 bp, Homo sapiens
gctgggatagttttaataaaaattttgggtctacctacccatatacaaactgcaaaagataaaaagctacttgtcctataactctccgcccttcctggggtcatgatgtatgcacccaacaaatcaaaggtctttcttcacccttggggataagccagacactttgttctttttctggagcaacaagctctacaggaattcaggaataagcatttcactgcaaagcatgacttcagaagcagaagraagtagccttaaagcaaagatgaggttagaagtacccttgtagtcagcatgactattaggcaccaatagaaaagaacattcacattcatgtccatctaattgccttcaaccaaggtctagttaacaccagtttttttttccataggagataccccttatgagtatacccttaaaaatctggtcttaaatgacctcctgtttgaccatgcaaatgaggtcattagcaatagctcattagaacacaccttagatttcagcccactgagaaagggcaggcaatactgagagctactagaatttccaattattatgcttgatagctgcagctcattgact

SEQ ID NO: 167214 - DNA, 426 bp, Homo sapiens
aaattgttaattatccttgctgaattacattgtgmcacagacaacagaataatgcatctttggtcttccaagtttattatctcaaagcaaatcatagggagggagtaaaaacctcatgatctggagtcaggcagacctctgtgtgacttttggctttacttattgttgtgtgactgtttttatatctctaaggtgggaataataatatttctacctgtcagataatgaaattaccacataaaggctcaacaaagtaagcctctaaaaatatcttattgttactaacagtcactaatgctgtagagacctgaaacctctaatcaaagtggccagatggtgatataggacagctctttgaaaattcataagaaaaataagtaattggatcttctcaggttttcaaaatattaaggaagagaagaattc

SEQ ID NO: 167215 - DNA, 425 bp, Homo sapiens
gaattctatcattaatgcaatcaaattgttaattatccttgctgaattacattgtgccacagacaacagaataatgcatcttkggtcttccaagtttattatctcaaagcaaatcatagggagggagtaaaaacctcatgatctggagtcaggcagacctctgtgtgacttttggctttacttattgttgtgtgactgtttttatatctctaaggtgggaataataatatttctacctgtcagataatgaaattaccacataaaggctcaacaaagtaagcctctaaaaatatcttattgttactaacagtcactaatgctgtagagacctgaaacctctaatcaaagtggccagatggtgatataggacagctctttgaaaattcataagaaaaataagtaattggatcttctcaggttttcaa

SEQ ID NO: 167216 - DNA, 406 bp, Homo sapiens
attttaagagacaaagttccattaagacccagscctgtagaaaaaattcagcttaagaatatgatcttcccacccacatcctgaagccagaaccctcaaggtataaggctttaaatagagagagaaaaggataggtacacagaagcaagtacatgaatgaagcttgagaattatttctaggaaagaattttagctgtggtggttagtatacgaaacttccttaaagcaaatattggaagtttttaaaggcattgttttgtcaaagaaacaagtagccaaaagcccatatatgtacatttaaatagattttttggaatgatgcctattctgtttttttttgtttatttatttatttattattattattttttgatggagtcctgctctgtctcctaggcttgagtgc

SEQ ID NO: 167217 - DNA, 520 bp, Homo sapiens
ctctttcgtccatcaggaagctagggtgagggacaatttctttcaatctaatgaggaattgagctgttgtagygctgagttatcacttttgttacttccagtttacctctactcttaaatatctggagggtggaattggttcctctttccagcaaggttttgggtctcagcacccaagactattcatctctttctgctttttagctctaccctgcttagtcagaaaaaatcccatggtagagtgatttatagatgacagtgagcattaagtttgtgagctcctttatatttcaatataccttgcaagcacacgcaagcactaagagttttagtgtctccttgtcagagcaaaagtctgaacttttaccaggctcacacctcttcttgactgtctcctagactatgttaacacccttagcaatgggttctgcttacctaggaaagactcacttctctctggagtttagtaaaaattatttcttagttcatctcgtgatttctcattgttagggtgggaatg

SEQ ID NO: 167218 - DNA, 520 bp, Homo sapiens
ctctttcgtccatcaggaagctagggtgagggacaatttctttcaatctaatgaggaattgagctgttgtagtgctgagttatcacttttgttacttccagtttacctctactcttaaatatctggagggtggaattggttcctctttccagcaaggttttgggtctcagcacccaagactattcatctctttctgctttttagctctaccctgcttagtcagaaaaaatcccatggtagagtgatttatagatgacagtgagcattaagtttgtgagctcctttatatttcaatataccttgcaagcacaygcaagcactaagagttttagtgtctccttgtcagagcaaaagtctgaacttttaccaggctcacacctcttcttgactgtctcctagactatgttaacacccttagcaatgggttctgcttacctaggaaagactcacttctctctggagtttagtaaaaattatttcttagttcatctcgtgatttctcattgttagggtgggaatg

SEQ ID NO: 167219 - DNA, 519 bp, Homo sapiens
ggacaggaaaataagacttgctccagtctacctgggtagtaagtggcatatctgaaactcaaagctgtgcctttcwgattgcaaaacccgcacatttaacttgtaatacttaattgcatggtcctcagtcttgccttggtgctcactgactgtctattttggagaaaaattatttaaactttgtgaatatcagttatctcatttgtaaagtgggaataataacaaggtctatccacatgctgcaatggtagtgagagccaaatttaaaagtctgtctgtagcagagtattttaattggatcagttaggtgattttgtggagatggggaacactcttccttagaagtcccctatagcctggacagattattctcctcctatgctgtgtttagggaacttaaactgctcacaaagtccagtggcatttaaaaaaatattgtcatgagatcgaggggctctgtgacaatactttgagctttgtccattaccgtgattcaaatatatgcaggtttgttgaata

SEQ ID NO: 167220 - DNA, 575 bp, Homo sapiens
gacttcaaagagatttataatcccacccaataatagtggaasactttaacaccccactgacaatattagacataacatcaagacagaaaatcaacaaatatttcaggacttgaactcaagtctggatcaagtggacctgatagatatacacagaattctctatgcaaaaatgacagaatagactttcttcttattgccacatggcacttactctaaaattgatcacctaatgggaagtaaaacactcctcagcaaatgcaaaagaactgacatcataacaaagagtctctcataccacagtgcaatcaaagtagaactaaagatgaagaaactcactcaaaaccacacaactacatggaaactgaacaatctgctcctgagtaactcttgggtacataatgacattaaggcaggaatcaagaagttttttgaaactaatgagaacaaagagacaatgtactagaatctctgggactcagctaaagcagagttaagagggtaatttatagcagtaaatgcccacatcaaaaagtttgaaagatctcaagttaacaatgtaacatcacaactaaaat

SEQ ID NO: 167221 - DNA, 431 bp, Homo sapiens
agatctgcctagaaagggtaaggtgagcaggcaaggagaaaggagacttttcatattaaacaaacatgyattcttcttaaaataatataaacatttgaaagtatacatcattcattctttcaacaaatatgttgaaattataatacggtaggaagtgttttaggtgttgggtccagttctaggtgttggatatactgaaaaacacatagcagtcaatggagatggatcagatacatccatgagatagtagattgtctatcacaggccctgtggaatgcctagcatttttttgaattgtggtagctcaagaatatacaaaatgtagtgcgcttctattccatccaagagacttattatctagctggggaagcaggatgcatttatacaaacaatgatagcctcatccaagacactatataggcgaatgtgat

SEQ ID NO: 167222 - DNA, 604 bp, Homo sapiens
aagttgggtgcaaggtaatagggccctggagtccacaagccacactttccccaagttttgcataacagaagcagagaagcagtcccttaaaagtccatgtagccttatcaatagtaatcagcatggactcataacacaagccgtattgtgcattgggctcttactatgttgcagtgtcattctaagcactgtattgacttatttatccttataacaacactaccaggtaagcgctaatatcaccatgctcattataaacaggaggaaactgacagagaactgacttgcccatggtcactccactgtattagttttctgtggttgctgtaacaaattaccacaaacttggaggcttaaaacaataaaaatttattctctcacagttctggggaacagaagtaccaaatcaccgtgttggcagggtcacactcccsccagaggcactatcgaagaatcctcctctgcctctcccagtttttggtggctcctggggttccttggcttgtgactgtgtcattcctatctctgcctccattttctcatggtctcctgctctgtctgtgtcttctctccttcttctaaggacatttatcattccatttag

SEQ ID NO: 167223 - DNA, 595 bp, Homo sapiens
gctcatcctaaatgctgtactccaaaacaccaaacctgcccttttttatgatgttttcaggtatctttgtaatagcactgttttgaatacttcctatcttctttcttttctcaagccctgtgctagcaccctttcccagtatttctggttctgccttttactctytttccttttctaggcttcctggccttctaggatgttcaccaggtcccctttctaacctccagtaatacagccatgtctttttaggtttctcccagcactgcacacctggcatcctcatgtggcagtgcagactcacctgaactctgggcttcctgctatctacaggttgaggatcaccagtaaatggtatttagtaagcatcttctccctgcatatttttaatcatttcagtattctgagaccagaatacatatttccagccaattcattcagattacataaacatatagcagtgcttagctaacttgaacttaattctagatcagctaatgaagagactagaagaatctccttatctaaaggcttcttgtaaaatcacacaggaaaatcttaataatctctaagcttgcagatggaatgttaactacat

SEQ ID NO: 167224 - DNA, 595 bp, Homo sapiens
gctcatcctaaatgctgtactccaaaacaccaaacctgcccttttttatgatgttttcaggtatctttgtaatagcactgttttgaatacttcctatcttctttcttttctcaagccctgtgctagcaccctttcccagtatttctggttctgccttttactctttttccttttctaggcttcctggccttctaggatgttcaccaggtcccctttctaacctccagtaatacagccatgtctttttaggtttctcccagcactgcacacctggcatcctcatgtggcagtgcagactcacctgaactctgggcttcctgctatctacaggttgaggatcaccagyaaatggtatttagtaagcatcttctccctgcatatttttaatcatttcagtattctgagaccagaatacatatttccagccaattcattcagattacataaacatatagcagtgcttagctaacttgaacttaattctagatcagctaatgaagagactagaagaatctccttatctaaaggcttcttgtaaaatcacacaggaaaatcttaataatctctaagcttgcagatggaatgttaactacat

SEQ ID NO: 167225 - DNA, 413 bp, Homo sapiens
aatagactatgaaaatttttcctgagttaggctctcatatctctagctttggaacacaagccattttgagatcatagcaaaacacagtgcgacccacagccaaaacagacaaaacactcagttgccagatgatccagggcttcctaagaatactagaaaaagcaggyagcaatttaagcagcatgtgccatccctcaggccccaaggtttcctggcacccttctgtcatgccccctgaggttcagttggtctcatggctctgactcagtgtggtatgtagaagagtggggcctcaggtcagcctgtgtctagtgatttcaattctgctcttggctgcaattccaactgtcaagaaagttttgcagtcagccatttgatagtggaagggttagcccatgaaactgaatttcctg

SEQ ID NO: 167226 - DNA, 413 bp, Homo sapiens
aatagactatgaaaatttttcctgagttaggctctcatatctctagctttggaacacaagccattttgagatcatagcaaaacacagtgcgacccacagccaaaacagacaaaacactcagttgccagatgatccagggcttcctaagaatactagaaaaagcaggtagcaatttaagcagcatgtgccatccctcaggccccaaggtttyctggcacccttctgtcatgccccctgaggttcagttggtctcatggctctgactcagtgtggtatgtagaagagtggggcctcaggtcagcctgtgtctagtgatttcaattctgctcttggctgcaattccaactgtcaagaaagttttgcagtcagccatttgatagtggaagggttagcccatgaaactgaatttcctg

SEQ ID NO: 167227 - DNA, 459 bp, Homo sapiens
aggggttcatttttgctattgctggttagtctctgctgaacctaatatatttcaacatttgaagactttttttaaaaagaaaatttttttctttctattttttattatgaacttaagtaacttcatggcaaaaaaatctaatcaacattaaactatttacttccctccaaagtaatttcctctctgtcaatgcacagacgtgcatttttacttagttataattagtgtgaacatactcgtttttgtttaagaaaggttttctttaccttggcattcagattcgttttcataggcgaagaaagcactgggaaggagaaggaacctttgctggcaagttgggaggattatatggggtcatactatcccagggttaaggaaaccttaaaggacccaacatccctctccatatctcttctgatgatycttttgtgctcacagactaaccagtgtggccttttc

SEQ ID NO: 167228 - DNA, 501 bp, Homo sapiens
tgaggggtgccgccctttgatttgctccatctttgctatctccctgcccccaacacatgctggtgttccatttccctttgagagtcatgggatatgaaaccccaaatgctactttaaatgttagtaattacaacagagaatgcagacaatgttattcatttctcttctgatttaacagtgggaggtccctsttgattggagaagtaatgctaacagtaacatttctgagctttgtgttttaaatcccctcctgggcattattaagcaggcctgacctcaccaggaaaactcatagtcagtacagcatttactaagtaaacgccaggcactgttttaaggactttttgttatgttaacccattttatcctcataataaggaaggtgatgccagaaaaattatccaaaactggaaacgaaggctaaaaggtgagagacatgttctttcaatatcataggagagaaaaggccactcaaggattttcttgaataatgtccttgat

SEQ ID NO: 167229 - DNA, 501 bp, Homo sapiens
tgaggggtgccgccctttgatttgctccatctttgctatctccctgcccccaacacatgctggtgttccatttccctttgagagtcatgggatatgaaaccccaaatgctactttaaatgttagtaattacaacagagaatgcagacaatgttattcatttctcttctgatttaacagtgggaggtccctcttgattggagaagtaatgctaacagtaacatttctgagctttgtgttttaaatcccctcctgggcattattaagcaggcctgacctcaccaggaaaactcatagtcagtacagcatttactaagtaaacgccaggcactgttttaaggactttttgttatgttaacccattttatcctcataataaggaaggtgatgccagaaaaattatccaaaactkgaaacgaaggctaaaaggtgagagacatgttctttcaatatcataggagagaaaaggccactcaaggattttcttgaataatgtccttgat

SEQ ID NO: 167230 - DNA, 467 bp, Homo sapiens
caaaaaaaaaaaaaaaaaaaaaaagtttaaggagtctgtgtaagaagtaaaagaaataaattgaacacacatgtgtaatcattattcatatgagcgttctctgtattacttcataacacagctgtgtacacacaaaaaaactttgcttctttctcttggagtcttattaatttctgtttaatgaaacacaaatgtttgtgygcttgattttgaggagcatggtctagttgggtgtttgttaagcactagccaggatggctatgcccacctaatacaaatgtctttaggcctttcagagcccctgacagggcatcttttgagcatgccagttgccatggtcaccagtatgcccatttgcaaaaaaattggaagccatgctcattgtgtcaaaaactacattgggggataaaaagagcatgtttgcttcaagagttggcaattggttgtttgttagcctccccgcccac

SEQ ID NO: 167231 - DNA, 577 bp, Homo sapiens
ggaagaaagaattattcactatgaaaagcaacagcactgatcactcaatacataaccctttcagtaagaactttttgccaccttttaggaagagtgactctcctctggaggggtgcatcctgtattgccctgaattccagacatgagttttatcagtgctagactctttctcatcccacgaagagggttttttatactctrtataggacgtcagcaaacttcagcccatgggtcacctgtttttgtaagttatgttttattgggaaacagtctcattcttggatgtactgtctctggctgctttcacaaaacatcagagttgagtagttacaaccaagactgtttaaccccaaaagccaaatatatttcctatctggccctttacagttagttttctggcccctgctaccagaacaatgacccagatgatcgcccatccacctcatcagtatttgcaactacttcatcttggtgccttggggttgagagtttctcttcagtcatcaccttcataaagaaaacagggctgcaaaccacattaaatacaaatcataaaccttgaaccctgagtgtggct

SEQ ID NO: 167232 - DNA, 333 bp, Homo sapiens
gctccaatcttccatactttgaacatggtattcctaggcctacagcaacagttagaacctgcctgtccaagttaaattccatgagtctccactcattcattcattcattcattcatccattcaacagatayttctttatagcccctatgtgccaatcactgcgctggaacattaacatgcagccatatcctcaaggagctcatctatggggtagattacatcctccagtctttgtttcctcctcaccagcactgtcatgttggggcaacaataaacagtatagttccacagctttattacaagctattatcagcagtgcaaatataaattcta

SEQ ID NO: 167233 - DNA, 573 bp, Homo sapiens
tgaagtccttcctgctcaccattggagccacgtgctaaccctgccatgaatggtagagatataggaacagatcgaagggagaaaaattggtgggaagtagagttaaaaagaatttattaaacctcctctgggcaaccaagtcctgagtaagagatccagaattagaagcaaattggtatttgctttcaaataatttatattacatctgaggattcagaaagatccaaacaccacacagagggagactttgagatactctaaatactgtatctccctgttgatgcttcacagcctcctcattgccccaggcacaaagcagctaggttgacaaggcccccagggtctggactcggcccaccagcctccgcttcaggatcctttccactgagctgcttctggtaccaagaacatgcccttcctccrgccgacaggactttgcccacgctgcctcctccaccttgggatacttagctcctccactgcctcctgtctccaccctccccacacacatgcaccattatgtgttttccttcaaatcttagctccatggtcatataatcagagaaggcttcc

SEQ ID NO: 167234 - DNA, 401 bp, Homo sapiens
gcacgggtatttatgatgagaaaatcatgtggcataaaagagaataattgccttcataagtgtataattttttatactataagcttctcaatgaaaaagcattctaagggaggcataattgctaattttcggtgttaaacatacctctgaagagtatttcacagtctaactctctgagtgtcatgtcttcctgtggcccggggaagagagtgggaaggaaataaaatttcattgagcatctacataggaccaggccctgtragttcttggatattggtttcttcttataatgacttgagaattacatggaattatccccattatatgagaagacagagtctcacaggagttaaatcacttctcataaaatcatctctcatagttatgtgagttcagaatgc

SEQ ID NO: 167235 - DNA, 619 bp, Homo sapiens
gtcctcagcagaatcccagggtcttctaagaagaagacgtggagatcgtgagaatagtgagtgctcacagkatgtagcggggacaacaacagtgtctcccacaaccagcattacagataaccaggagtcgaccctgatgaagctggtggctttctcagctttacagaatgctcttttctgcttcgcctggcaaaacaggaggatatctgtctcaaagttttcaaagaaaggacattcagtgatctgttgagagattcagaggttctccttttctctggtggtgctctatcagggacagataggtccctaagacttagcagcaaaagggactctccctgcagaagcatgtgcatgatgtgagtaggtgtgcccacagcccagggttcatactctggggcttcatgcccttttcctattctttgtctccaaccgcatcttataagaagtgcatgttaggaaagagtacactaaagacaggaacagttactggattaatataactttaaaggtgagcatactggggaaaagtgaacagcaacccttaccagaatgtttaggtacatttctgcctccctcttcaagctgccaggaaagtgcactgtaagttaccaaggagcaa

SEQ ID NO: 167236 - DNA, 619 bp, Homo sapiens
gtcctcagcagaatcccagggtcttctaagaagaagacgtggagatcgtgagaatagtgagtgctcacagtatgtagcggggacaacaacagtgtctcccacaaccagcattacagataaccaggagtcgaccctgatgaagctggtggctttctcagctttacagaatgctcttttctgcttcgcctggcaaaacaggaggatatctgtctcaaagttttcaaagaaaggacattcagtgatctgttgagagattcagaggttctccttttctctggtggtgctctatcagggacagataggtccctaagacttagcagcaaaagggactctccctgcagaagcatgtrcatgatgtgagtaggtgtgcccacagcccagggttcatactctggggcttcatgcccttttcctattctttgtctccaaccgcatcttataagaagtgcatgttaggaaagagtacactaaagacaggaacagttactggattaatataactttaaaggtgagcatactggggaaaagtgaacagcaacccttaccagaatgtttaggtacatttctgcctccctcttcaagctgccaggaaagtgcactgtaagttaccaaggagcaa

SEQ ID NO: 167237 - DNA, 290 bp, Homo sapiens
caattattagttgtgttttgcagatgaggaaactaaggcaaagagaatttaagtaacttgctcrgggtcacatagaaactaactggaaaaattgagatttcgacccagttagtctagcctgcgaatctttactctgagctactttttaactgattctcaatgtatagtcacataggttgtagtttattatatgtccatgtgtctgtctttccttctagataataagttttttaagggttttattcatttttccatctctagtatctaggccagagcctggcagataatag

SEQ ID NO: 167238 - DNA, 290 bp, Homo sapiens
caattattagttgtgttttgcagatgaggaaactaaggcaaagagaatttaagtaacttgctcagggtcacatagaaactaactggaaaaattgagatttcracccagttagtctagcctgcgaatctttactctgagctactttttaactgattctcaatgtatagtcacataggttgtagtttattatatgtccatgtgtctgtctttccttctagataataagttttttaagggttttattcatttttccatctctagtatctaggccagagcctggcagataatag

SEQ ID NO: 167239 - DNA, 593 bp, Homo sapiens
aagagaaagttggaggttttgtaacaatgaaaaatgttatgtattgctctttgagaaagttcattgacactagtaaggttctggggaagctggcaagcttcagctggtgagtggcatcagtgagaaaattagtcctggagttgcagcaaattatcttgaagctatagataaaactgggttcaggttacagcagccaggcttgcagagaattacattgttggagcaatgctttgtgtccctagtgtgtttttgcctggcttcttgactttgctttagttgggtatgacaagaataacccaatttgtaggatcagctttcaccttgacaactctgcactgagcaagtttatgggtgctgtttttccaacagtatgtgatcactttgtgtctctgtctcatgttttgataattctcccggtttctttcctttttttaaattrttactttgtctattttggtgatgtctgatcagtgacctttgatgttactattgtgatttttttttttttgggtggggggaggcaccacaaactgtgcccatataagatgccaaacttaattgataagtgcgtgttctgactgttccaccaactg

SEQ ID NO: 167240 - DNA, 390 bp, Homo sapiens
tcaggataaaaaaaaaccctttctttttaagaaagaamgaaagttctgtactacagcaaataaatggaagctaaaaagaaaacctggtataaagagtgtgatttaagaatttgctttctgtgcatacatttagggtagtggctcttgcatggaagagagatctctgagctgctactttaaaggatgcttggtgtcctacagaggtaacacaactcaatcatatcaggcactgatgttctgatggtgcagctgatcctgagatgcaaacaccccatgatcttctgctgtctgattccctgctatgtccctgtatgtagtctaaacagtctattcactgaacagttttttagtaacaacaaaagtaataatatgttggtaatagtttgtcaa

SEQ ID NO: 167241 - DNA, 390 bp, Homo sapiens
tcaggataaaaaaaaaccctttctttttaagaaagaacgaaagttctgtactacagcaaataaatggaagctaaaaagaaaacctggtataaagagtgtgatttaagaatttgctttctgtgcatacatttagggtagtggctcttgcatggaagagagatctctgagctgctactttaaaggatgcttggtgtcctacagaggtaacacaactcaatcatatcaggcactgatgttctgatggtgcagctgatcctgagatgcaaacaccccatgatcttctgctgtctgattccctgctatgtccctgtrtgtagtctaaacagtctattcactgaacagttttttagtaacaacaaaagtaataatatgttggtaatagtttgtcaa

SEQ ID NO: 167242 - DNA, 471 bp, Homo sapiens
gttacagcggaaatgatcattattggaaagctggagaccagctgctgtcagagagggatgggctcctgtggaagcttgcaaactgatgactacttaatccttgaacttcagcagcaacaacattagctgaaggtctgtaatgcattcacagttctcatctgacattttccccacatcattatttttctggttttacttttaaattccctataggaccattgacatgaaattctgagggggaatttggaacattaatgactgtttaaggcaaatgagtaagtgttctttccaagaggaaattgtctttataatattggcataaggctatttttaaaatttatactaatgagacgattcgaggcagataactgaatttcccaggcttgaagttggccyatgccccttggtgaattcagccttagggtgagctctgtggggccttgcaagtctggctctagatgcaagagatct

SEQ ID NO: 167243 - DNA, 471 bp, Homo sapiens
gttacagcggaaatgatcattattggaaagctggagaccagctgctgtcagagagggatgggctcctgtggaagcttgcaaactgatgactacttaatccttgaacttcagcagcaacaacattagctgaaggtctgtaatgcattcacagttctcatctgacattttccccacatcattatttttctggttttacttttaaattccctataggaccattgacatgaaattctgagggggaatttggaacattaatgactgtttaaggcaaatgagtaagtgttctttccaagaggaaattgtctttataatattggcataaggctatttttaaaatttatactaatgagacgattcgaggcagataactgaatttcccaggcttgaagttggcctatgccccttggtgaattcagccttagggtgagctcygtggggccttgcaagtctggctctagatgcaagagatct

SEQ ID NO: 167244 - DNA, 591 bp, Homo sapiens
tattttaaaacgcagttatttgactctgtccattaaagacaattgaaaaccaaaaaccaaaacaactgcaaagggaaatcttaaagtattttcaataatactgcttttggaggtagtgttgrtatatttattgttatataaaatatagtataatattgtgtgtattgaaagataaatgtatatgttaatttggagaactagaatattgaagtatgggaggaagaagatgcagatataagaccagcgagattaatttaaaatgctagagaattggaagtgggattatacatatgaatttattaggtgttttatcttagaaattcatgtattctctttctactaaaaagccctagaaacagtgaccaacccaatagcaataaacttccttagcaaatagattatggtcactagtgatcattttctagcaaaagaaaccaagctgtcttgagaaaatgattgagtttatatttgaggcaggaaataaacaagaagaatctgtaaaatcttgtcataccaagaagcagagaggctatgagatgtcattagggtcatgtcatttaaagaagccagtatgagtagctcaaagatgag

SEQ ID NO: 167245 - DNA, 591 bp, Homo sapiens
tattttaaaacgcagttatttgactctgtccattaaagacaattgaaaaccaaaaaccaaaacaactgcaaagggaaatcttaaagtattttcaataatactgcttttggaggtagtgttggtatatttattgwtatataaaatatagtataatattgtgtgtattgaaagataaatgtatatgttaatttggagaactagaatattgaagtatgggaggaagaagatgcagatataagaccagcgagattaatttaaaatgctagagaattggaagtgggattatacatatgaatttattaggtgttttatcttagaaattcatgtattctctttctactaaaaagccctagaaacagtgaccaacccaatagcaataaacttccttagcaaatagattatggtcactagtgatcattttctagcaaaagaaaccaagctgtcttgagaaaatgattgagtttatatttgaggcaggaaataaacaagaagaatctgtaaaatcttgtcataccaagaagcagagaggctatgagatgtcattagggtcatgtcatttaaagaagccagtatgagtagctcaaagatgag

SEQ ID NO: 167246 - DNA, 604 bp, Homo sapiens
ggagggacctggtgggagataattcattcatggggctgggtctttcccatgctgttcttgtgatcgtctcacgagatctgatgatgtttataaaggggagtttccctgcacgagttctcttctcttgtctgcygccatgtgagatgtgcctttcaccttccaccatgattgccaggcctccccagcactgtgagtctgttaaacctcttttgtaaattgcccagtcttagatatatctttatcagcagcgtgaaaatggactaatacaacactacactgtgccccacctacctcagggcttggcactttctgtttccttccttaacactttctccttcttcttcaccatccccaccccagttgctggttacttcctacttctacttcaggtggcagttcagaggtcacctgcccggggaaatctacagcagagctgtcagcggtgaatcccatcatcactcacctgtgccctacagaggctgcttactgggaatacctgtgactcgtcagaagagggactcaaccaataatagaaggggagttggtagataaataccccaggtccctcattcctcagtggggataactatgagatgtggttttc

SEQ ID NO: 167247 - DNA, 604 bp, Homo sapiens
ggagggacctggtgggagataattcattcatggggctgggtctttcccatgctgttcttgtgatcgtctcacgagatctgatgatgtttataaaggggagtttccctgcacgagttctcttctcttgtctgctgccatgtgagatgtgcctttcaccttccaccatgattgccaggcctccccagcactgtgagtctgttaaacctcttttrtaaattgcccagtcttagatatatctttatcagcagcgtgaaaatggactaatacaacactacactgtgccccacctacctcagggcttggcactttctgtttccttccttaacactttctccttcttcttcaccatccccaccccagttgctggttacttcctacttctacttcaggtggcagttcagaggtcacctgcccggggaaatctacagcagagctgtcagcggtgaatcccatcatcactcacctgtgccctacagaggctgcttactgggaatacctgtgactcgtcagaagagggactcaaccaataatagaaggggagttggtagataaataccccaggtccctcattcctcagtggggataactatgagatgtggttttc

SEQ ID NO: 167248 - DNA, 604 bp, Homo sapiens
ggagggacctggtgggagataattcattcatggggctgggtctttcccatgctgttcttgtgatcgtctcacgagatctgatgatgtttataaaggggagtttccctgcacgagttctcttctcttgtctgctgccatgtgagatgtgcctttcaccttccaccatgattgccaggcctccccagcactgtgagtctgttaaacctcttttgtaaattgcccagtcttagatatatctttatcagcagcgtgaaaatggactaatacaacactacactgtgccccacctacctcagggcttggcactttctgtttccttccttaacactttctccttcttcttcaccatccccaccccagttgctggttacttcctacttctactwcaggtggcagttcagaggtcacctgcccggggaaatctacagcagagctgtcagcggtgaatcccatcatcactcacctgtgccctacagaggctgcttactgggaatacctgtgactcgtcagaagagggactcaaccaataatagaaggggagttggtagataaataccccaggtccctcattcctcagtggggataactatgagatgtggttttc

SEQ ID NO: 167249 - DNA, 604 bp, Homo sapiens
ggagggacctggtgggagataattcattcatggggctgggtctttcccatgctgttcttgtgatcgtctcacgagatctgatgatgtttataaaggggagtttccctgcacgagttctcttctcttgtctgctgccatgtgagatgtgcctttcaccttccaccatgattgccaggcctccccagcactgtgagtctgttaaacctcttttgtaaattgcccagtcttagatatatctttatcagcagcgtgaaaatggactaatacaacactacactgtgccccacctacctcagggcttggcactttctgtttccttccttaacactttctccttcttcttcaccatccccaccccagttgctggttacttcctacttctacttcaggtggcagttcagaggtcacctgcccggggaaatctacagcagagctgtcagcggtgaatcccatcatcactcacctgtgccctacagaggctgcttactgggaatacctgtgactcgtcagaagagggactcaaccaataatagaaggggagttggtagataaatacmccaggtccctcattcctcagtggggataactatgagatgtggttttc

SEQ ID NO: 167250 - DNA, 360 bp, Homo sapiens
ccatatcctggcttaatgtgcttcatgatgcttgctaactgggcatgaactgagtgagttaataacaattattaactcagaatggaacttagctagggtcctgtctaagttcccagtgctgccccaagccaggcctcttggtgactttggatctagacatagtggaaagagtttgggactttgtattagtttcctacggatgctggaacaaagtatcacacaytggctggtgtaaaacaagagaaatgtgatcgctcacagttctggaggcaaaaagtctgaaatcaaagtgtcagaaaagtcatgtcctttctgaaggctctagatggcagtctgtttcatgctgttctcttagcttct

SEQ ID NO: 167251 - DNA, 454 bp, Homo sapiens
aatacgattaataattttaccgagtaaagtacattcttaaatgaaattgrtgtgttttttcctgctactatttttcagtcgacagtttgtttcaaatgccttgattggtcctaacgtgccaacagttttggtcaccattgctttgaaaccaccggtgcaaacctcaatagtgtgaaaaagacataacatatgaagatattatgaaaataattttaacatgtctcatggttgccaaagattctgcaaacatcaccttgagaacccctgccctacagaagtgtcctttggccagcctggtttcgtctttttcttcccagtcaagctcacttgcaccatgttaatcttcctagtatctctgctctcccagacctccctgagctactgcatgaagctgccagcatctcaacagcaggctacattctgggtgtgtttcttctgagcacagagtataggg

SEQ ID NO: 167252 - DNA, 484 bp, Homo sapiens
tatgtgatttatttaatttttgcaatacttttattgagtatatatttattcaaccttttttcctaaataaattgtttcagagaagtcacacattagtaaattctcaaacctaacatccggattctgggaggacagatgctttcctgcaagggtgktcttcactagaagagtatcagctcctagatgggctgtctggttcctctcctaagttttccaccataaaaatcccacagaatttaagcttcaagaagaatcactcaggaatttcccctgcatggataagaaaacaaagcctttactttcagcattcattggccgcttttctcttttgcagttgataaatataggagacgtaggtaataatctcagcatgtggggcgagggcttgtttttaagaagtcatttgtcctcaacaccttaaaccttaggcaattaatgctagaaataatatgctgatttgtatgttgtgtgtgtgtgtgtgtgt

SEQ ID NO: 167253 - DNA, 464 bp, Homo sapiens
ttgtcgaagttactcaaatcatcgtgcttcygcttatagaattacctgccaatatacaagggtttaggaaataatctatcagttggcccttccaataaataatatttatttctgcaggagagctcacctgcattagcagttggaggtttgttctttggaagacagtggagtaggtttctgtaagaagttaatagttagatcactacttcctattacgctctcagtagctgaacactgtagttgcttccagttgtatcacaggttggaaattatttacagaaacaaatgcattgcctctccaaacctaaatcagtgatgataaggaactatgaagaagggagccctgtttataagagacacaattttatctttaattgaaaaacttattcctttcaactttgtttcaaatataactaaaccaagatagtaacaatgtaggaaatgtaagacagagataggaattc

SEQ ID NO: 167254 - DNA, 450 bp, Homo sapiens
caaatcatcgtgcttccgcttatagaattacctgccaatatacaagggtttaggaaataatctatcagttggyccttccaataaataatatttatttctgcaggagagctcacctgcattagcagttggaggtttgttctttggaagacagtggagtaggtttctgtaagaagttaatagttagatcactacttcctattacgctctcagtagctgaacactgtagttgcttccagttgtatcacaggttggaaattatttacagaaacaaatgcattgcctctccaaacctaaatcagtgatgataaggaactatgaagaagggagccctgtttataagagacacaattttatctttaattgaaaaacttattcctttcaactttgtttcaaatataactaaaccaagatagtaacaatgtaggaaatgtaagacagagataggaattc

SEQ ID NO: 167255 - DNA, 464 bp, Homo sapiens
ttgtcgaagttactcaaatcatcgtgcttccgcttatagaattacctgccaatatacaagggtttaggaaataatctatcagttggcccttccaataaataatatttatttctgcaggagagctcacctgcattagcagttggaggtttgttctttggaagacagtggagtaggtttctgtaagaagttaatagwtagatcactacttcctattacgctctcagtagctgaacactgtagttgcttccagttgtatcacaggttggaaattatttacagaaacaaatgcattgcctctccaaacctaaatcagtgatgataaggaactatgaagaagggagccctgtttataagagacacaattttatctttaattgaaaaacttattcctttcaactttgtttcaaatataactaaaccaagatagtaacaatgtaggaaatgtaagacagagataggaattc

SEQ ID NO: 167256 - DNA, 561 bp, Homo sapiens
taaatgatactgtgtgacaactctggaaataagattctctccctttttctaaaatcttgttttcattgttgttgctactttttgtttgtttagtgattttcctagactaactttataaagtctgtattccttttcataagtggccactgaagtcgattttyggttatcttagtggacacatgattattcgacagagattttcttaaaagttttggattttgaaatcttccagtcattgccaaaaggcttttgtgtatgatggggcacaccttcaacactgtggcagtttatagccctgcttaatcttcatatcctgcttctgcaaaacctcaatggcatccagagataagacatggtctcttcaggtctttttctgggcatgtgcacaacccagaacatgtgcataatcttctagatccccagggatatgctggagctttttaaagctccctatggacatgccttttcctaagtattcatcttaagatttctggccagagtcttacttgctccaactaataccacagctaaagcaggtgctatgttcaacaatcactgctg

SEQ ID NO: 167257 - DNA, 561 bp, Homo sapiens
taaatgatactgtgtgacaactctggaaataagattctctccctttttctaaaatcttgttttcattgttgttgctactttttgtttgtttagtgattttcctagactaactttataaagtctgtattccttttcataagtggccactgaagtcgatttttggttatcttagtggacacatgattattcgacagagattttcttaaaagttttggattttgaaatcttccagtcattgccaaaaggcttttgtgtatgatggggcacaccttcaacactgtggcagtttatagccctgcttaatcttcatatcctgcttctgcaaaacctcaatggcatccagagrtaagacatggtctcttcaggtctttttctgggcatgtgcacaacccagaacatgtgcataatcttctagatccccagggatatgctggagctttttaaagctccctatggacatgccttttcctaagtattcatcttaagatttctggccagagtcttacttgctccaactaataccacagctaaagcaggtgctatgttcaacaatcactgctg

SEQ ID NO: 167258 - DNA, 426 bp, Homo sapiens
gaattctatttcaacctcatatccattgtggataacaggaatttttctctccttccggaaatccttgttttgtgtgtgtgcatttcaraacacatttgtgtgtgtgtatttctcttgaatcaacaaccagtgactgatctctgcagatctactgataaaggacatttattttacatttgtactttataatgtcatgtgataaaagttaagccaaaattctgggtgacaagtcgcctaaggtgtcttaagagctgagaacaagttatgttcagaatgcatggatttctagaatggatatcccaaacagctactatatacattattatggagctgctttctgtttcttgagaacttgcattttcagaaagcaatgtccctaaattaaaaatggcatttgaacctagactcctacataaatctgtagtg

SEQ ID NO: 167259 - DNA, 446 bp, Homo sapiens
ctctcaaatatttagaaaataaataacattgagaaaataaatacaaatgattgctggtagactgaatacttctggaatttgaacattttttcatgtgaccttctttaatgactttaatacgaatttgttattctcttttattgtctaagtattaatattcctcactctgaaatactctcatgaagttcctaaaattcttgcattcattactygcacttcagaaaataacatctggcctgtaaactatgaataggaaaaacatattgtcgagagcagaatgtagactttttctattttaaaattaacttgaatctgaatctgctatacgggaaagtataatactccacagactaactttctgatggaagtgaactgtgtgcttccctctagaaggactgagacaaagtcatttgccagcatccaacaaacacagaccacatgtgctg

SEQ ID NO: 167260 - DNA, 584 bp, Homo sapiens
ctctctctctttttaatggagtttcactctagttgcccaggctggagtgcagtggcgcaatctgggctcaccgcaacctccgcctcccgggtttaarcgattctcctgcctcagcctcctgagtagctgggattacaggcatgcatcaccacgcctggctaattttgtatttttagtagagagggggtttctccatgttggtcaggctggtctcgaacttctgacctcaggtgatccgcctgcctcagcctcccaaagtgctgggattacaggcatgagccactgcatctggccgttactggcattcttgagaaacccataatctctcaatatacattaccataaaaattaacaaaatagattcttcaatttttctttgtaatcattccactcatttgttaattccagcaatggccatgacaggtccaactacaaaatcagtatgacaaaggtaaacaaagtgacagctgccgtatttgtgggcattcagtcaaaaagccgttggtactcctttatttttggtttgaagttacatccttacttttcttgtttgtttgttttgtccaacatctcccaaacctctg

SEQ ID NO: 167261 - DNA, 584 bp, Homo sapiens
ctctctctctttttaatggagtttcactctagttgcccaggctggagtgcagtggcgcaatctgggctcaccgcaacctccgcctcccgggtttaagcgattctcctgyctcagcctcctgagtagctgggattacaggcatgcatcaccacgcctggctaattttgtatttttagtagagagggggtttctccatgttggtcaggctggtctcgaacttctgacctcaggtgatccgcctgcctcagcctcccaaagtgctgggattacaggcatgagccactgcatctggccgttactggcattcttgagaaacccataatctctcaatatacattaccataaaaattaacaaaatagattcttcaatttttctttgtaatcattccactcatttgttaattccagcaatggccatgacaggtccaactacaaaatcagtatgacaaaggtaaacaaagtgacagctgccgtatttgtgggcattcagtcaaaaagccgttggtactcctttatttttggtttgaagttacatccttacttttcttgtttgtttgttttgtccaacatctcccaaacctctg

SEQ ID NO: 167262 - DNA, 596 bp, Homo sapiens
caaagaacagaactcacgggataggaacttcaaatgttaaatcatctgaattwaatctagggcattaaccttctccgtttttctaatacacaatagagtaaaatctgtgggattaaatatcccaccctacaacttgtaatggagaataacatacattttttagattaaaaatttataaattaaaatattttctacgtagactttctttacatgctgcagggccattcttgcacctagaaatggaaatacacataactggggtgcaggtgaagggttgcgccagcacctcccttctccacagaggccaaaaactaacctcactttctagactcactcctcttcaagatctgcttgttctaggtggcttcatcatagagactgttacttaatcatggtgcttttctgattgcagaagagtcaagaatgactttaggagctaattctctgctatggctcctaaagtcatccataaaaactcttttccaattatgcaggtaaccagtgactgaacttaaggagttcccagtaaaatgaccaagtatctaggaggtgctggcctaaaggtcactcaaagagacactcccagctggggcact

SEQ ID NO: 167263 - DNA, 596 bp, Homo sapiens
tgtatgtacctcttctttcctggcccctcccatctctctggtcatctcatattattgcaaaatgtaaacatactatgctctacacactttcctctactacattgccccttctgtcaagacatcccatcctcgtgtttctacaccatctcgacctggagaaccattgtcaccctggggaagtcctactcatccctcaagacacaattcaaatatccccatctctctaaagccttccctggcctctagcattccttcctcttgggttcccrtagaacttttactaaaataatgatcctgttagatgtcttcctgtttctccctactaagatatgaagactaccatagaacatatttatgatttatctagtggtctgctaaagctggctaatacaagcttgtgagagatgatcattaaatatttgaggattttgtgagctggtggttacattgtggttatttgaaatcaactgcagtaggagtatttataccacaaaatttgcagacaccacatataagaacattttttttcttcaaagaggtggcttatgagcatagctggttttatccccacagtctagcagggtccctaagtgttc

SEQ ID NO: 167264 - DNA, 597 bp, Homo sapiens
gtgccaatgatgctcctagaatttgggtttgggcttctgggtggacagtggtgccatttactgagatggtgaaaagtcaggaagaaggtggccgtggcagatgagtggtcaagtcaagtttgaatttagaccaaatagaggtgccactgaaatatcaggagagaaggtaaggctaaggaatcataggctaaggaaacatctgggcattaaaagtcatagttatgggggagacagttaggcttagttatgcttaagaacagaagacaaaaaagagggcctgagactgagcttgccctgggagaggattatgttagaaaatgcaagcggagaaggtattttaaaagaaaaacagtacacgttccatccaatactggagggcagttgaaatcaggacagagaaaagatcactggatttggcaacatggaaatcaggtgatgatgatatgagtcctttcaatggggtagagagggcagaagctgacttgaatgggctaagaagggacakggagaggagagacagtagatagcagatacagacaagaattttgacacatttgcttttgaaaggaaacagagaaatgaggcagaggctagacc

SEQ ID NO: 167265 - DNA, 512 bp, Homo sapiens
aatgtgctagtatttaggaaactcattaagtcagaaagtactcactgagcccctatagcctggaaagtacagcactgatcacttaaggaaatcatcaatatcagactaactccaggtccttagggagttgcaaatatttatgagagagaaggtaatcagcctaagatcagtcttccttgaatgtagccataaaatatttattttgctcatatagattttatgctttgtttctttaaaagctaaattctgaaagttaaaacaatgctgtttctgataatgctatggttgtactttctgatatcttttatttttagatactatgaatgaaatcttaccaagtgtcatatttagttactaaacaaactatgaataaaccatcagcatttccagcatgtggatgttagcattaaagagtaaattctgattcttttaggtcaaagctgttgaattgaggccatrgtttcagaaaatggatcacgtagtctttatgtgtttcatttcaaattatgtct

SEQ ID NO: 167266 - DNA, 547 bp, Homo sapiens
tggtacaaatgtctgtgtcccccggtacttggccattttcacacagctataaagaactacctgaaactgggtaatttataaagaaaagaggttaattgactcacagtccgcatggctggggagacctcaggaaacttacaatcatggcagaaggcaaagaggaagcaagacacatcttacatggcagcaggagagagagagaaagcaaagtggtaagtgccacacacttttaagcaatcagatctcgtgagaactcactcactgtcatgagaacagcaagggggagactgcccccatgattcaatcacgcctctcccccaagacatggggattaaaattccagatgagatttgggtgtagacacagagtggaaccatattaccccctcaawttcatatactgtaatcctaactcctaggtggtggtattcgttgggagggctgtctagggggtaattaggtcatgagcacagacctgtcatgagtgggattagtgtccttataaatgaagccctggaaaagctctcttgcctcttccttctgccatg

SEQ ID NO: 167267 - DNA, 547 bp, Homo sapiens
tggtacaaatgtctgtgtcccccggtacttggccattttcacacagctataaagaactacctgaaactgggtaatttataaagaaaagaggttaattgactcacagtccgcatggctggggagacctcaggaaacttacaatcatggcagaaggcaaagaggaagcaagacacatcttacatggcagcaggagagagagagaaagcaaagtggtaagtgccacacacttttaagcaatcagatctcgtgagaactcactcactgtcatgagaacagcaagggggagactgcccccatgattcaatcacgcctctcccccaagacatggggattaaaattccagatgagatttgggtgtagacacagagtggaaccatattaccccctcaatttcatatactgtaatcctaactcctaggtggtggtattcgttgggagggctgtctagggggtaattaggtcatgagcacagacctgtcatgagtgggattagtgtccttataaawgaagccctggaaaagctctcttgcctcttccttctgccatg

SEQ ID NO: 167268 - DNA, 443 bp, Homo sapiens
cacacttaattaaattggaggattatgaaattcgagctcatttttaagaataaaaaactaattttcttaaaattatagacagtgacattcttgaaaggaagaaaaagactaatgatactatctcatatccaaatatactagaagcagcagttgaagaattgtcttcctggagcttggccaatgtatatgattcgtaagatacattaccacaccctgtttacaatccttggcctggattcaactggagactgccgattccttctgaaacagccagagacttgtggcaaccttattacaaatggcctcttttttttttcccacagaaacattttatcccctttttcccagtactatgactctgggaagagstttgtttcaagatggtggctgtttgaccattctaatgactaagctctcagaaaggagttctagaagggaatgta

SEQ ID NO: 167269 - DNA, 604 bp, Homo sapiens
ccagggttacaatcaccaccaacatgctcttgccagagcgggccttcccctcaggttccctttcccccacactcaggcagagggtttgggtctgtccaagtgggctcacaggcatggcctggattggactggcttgctttggtccaccctgggctacctttgacctcctgacaagtggccagaggagctcttagaaaatcttcttttatagcctaaatgggtgggcagaggtggaagattgtggagacttttgagcaaaaggcatgttcctaaacwgggacagaattgaacctctgtaaatgaaagaagtagaatgctttcacctcaccatattgtccccagggatactttgacctccatagtgaatattactggaggtcaaaataaaactggtagtcgtgaaagttgcacatggtaaaaattaccattgacaaaaaattggtgggagataaatacttttaaaaatatttgatatgcattatttgaccaaaagtgcttaacaagatagaaataataacaccttgggacaacttaaaaggcagaatctatagtcagcaaatcatgatgtgtaagagaagtcaagttatttatataaaacataatt

SEQ ID NO: 167270 - DNA, 423 bp, Homo sapiens
tttgatggacgactagagttctctgcaacagtaaacaacgtgtttggatttattgtgtttctccaatttttatggagtgtctgctgtattctgagcactgtgctaagagctggacagagagctaatttagcagcaccttgcgctagaagaagctctcagtatataaagggagataagacatggtatggagtgcctgctatcctaagagacagaaggataaagtgaaagtcctagaagtcccatgaattattctagaaggggaagctgyctgcagaagatggtgattgaggtccacttttagaaataaagcagatttggttggtggagggagacagcagcagaagctatggaagcatgtaatttgtgtacaagatgtattaaggaacactatgcagcaattaaatcagattttcaaaaacaatt

SEQ ID NO: 167271 - DNA, 423 bp, Homo sapiens
tttgatggacgactagagttctctgcaacagtaaacaacgtgtttggatttattgtgtttctccaatttttatggagtgtctgctgtattctgagcactgtgctaagagctggacagagagctaatttagcagcaccttgcgctagaagaagctctcagtatataaagggagataagacatggtatggagtgcctgctatcctaagagacagaaggataaagtgaaagtcctagaagtcccatgaattattctagaaggggaagctgcctgcagaagatrgtgattgaggtccacttttagaaataaagcagatttggttggtggagggagacagcagcagaagctatggaagcatgtaatttgtgtacaagatgtattaaggaacactatgcagcaattaaatcagattttcaaaaacaatt

SEQ ID NO: 167272 - DNA, 563 bp, Homo sapiens
catttgaaccacagaatggctctctctcatttttcccttacttttctctgctgtttgratcaggggtcagtcgagtctttctataaagggccagatagcaaattaggctttgcggccatctggtctccgtctaagctgctcagccctactattgcagtgcgaaagcagccatagacgatatgtaaatgaatggcatggctgtgtgtcactatcagtttctttataaaaacgggcagccatcttgaagtcatatagcttgctgactagtggtttagaagagctagaaagaaattctgggctgaggtgtttcgggtttttatgtttatttatttcacatatataaacgtgggcatggggaaatctgtgatccagggaaatgttctttttcttcctctgggtgctggttatacaggaattttaactttgctaaacttcaacaagcttacaatgatcatttgtgcatttttgtatatatatgctatattttaatttaaaaatctattttaaaacgttttttccagtttttttctttttcttttaaaaaatgtcttaatagtgttcta

SEQ ID NO: 167273 - DNA, 559 bp, Homo sapiens
atttgaaccacagaatggctctctctcatttttcccttacttttctctgctgtttgaatcaggggtcagtcgagtctttctataaagggccagatagcaaattaggctttgcggccatctggtctccgtctaagctgctcagccctactattgcagtgcgaaagcagccatagacgatatgtaaatgaatggcatggctgtgtgtcactatcagtttctttataaaaacgggcagccatcttgaagtcatatagcttgctgactagtggtttagaagagctagaaagaaattctgggctgaggtgtttcgggtttttatgtttatttatttcacatatataaacgtgggcatggggaaatctgtgatccagggaaatgttctttttcttcytctgggtgctggttatacaggaattttaactttgctaaacttcaacaagcttacaatgatcatttgtgcatttttgtatatatatgctatattttaatttaaaaatctattttaaaacgttttttccagtttttttctttttcttttaaaaaatgtcttaatagtgtt

SEQ ID NO: 167274 - DNA, 535 bp, Homo sapiens
tcatttttcccttacttttctctgctgtttgaatcaggggtcagtcgagtctttctataaagggccagatagcaaattaggctttgcggccatctggtctccgtctaagctgctcagccctactattgcagtgcgaaagcagccatagacgatatgtaaatgaatggcatggctgtgtgtcactatcagtttctttataaaaacgggcagccatcttgaagtcatatagcttgctgactagtggtttagaagagctagaaagaaattctgggctgaggtgtttcgggtttttatgtttatttatttcacatatataaacgtgggcatggggaaatctgtgatccagggaaatgttctttttcttcctctgggtgctggttatacaggaattttaactttgytaaacttcaacaagcttacaatgatcatttgtgcatttttgtatatatatgctatattttaatttaaaaatctattttaaaacgttttttccagtttttttctttttcttttaaaaaatgtcttaatagtgttc

SEQ ID NO: 167275 - DNA, 517 bp, Homo sapiens
cccaggaaggtctcgaactcctgggctcaagcaatctgcctgcctcggcctcccaaaggatgggattacatgagtgagacactacatccagcctcgaaattttctacatgtcgaaaatgacaaaacaggaaaactcaatgcacaagaaacygtaagcacaagaagcttcaggaaacgacaccaaagcacaccaattacatttctgaaaactggagatagaagaaaatctgaaaactgaccagataaaagattttcacaaataaaaagacaagaatgaccattgatctctattaaaactaacaagtaagattttgggtaagtaagatgggttagatcaggtaacagttaaagaagacataatcaccaaggaaattcatggaaactccgaagaggtttccatgagaaccatgtaagtatcccaggattaaagagaccttcagaaaaattaccaaggcttcagaagatttttgccaaaatgctataatttggttagaaaatttgtggcacaaatacccag

SEQ ID NO: 167276 - DNA, 479 bp, Homo sapiens
caggagagagcgttgccaggactgccctggaggagatgactatacgctgaaagcttatgggaccttgcaggtccatgctggcaaaagcctgggcagcaggagtgggagtgggtccaaggcggtggaccaaggagcaaaataaaggtcttgattggactgaattcattgacatgagagagcccactatggatttgggtttaaagtattggatagaccacctgctagtggtgttggtactctgggccctatgatggcttccagataatgaggtcagaatgctcgaatgtccttgccatactgctgagggagggaggaaggagtcagaatgcataaggacaggcatggtgggatrgagctatgatgtgcagtctgctcagccatccctaatcttgcctgctgggagaaagcagagctcactcacttcatcaaagagtttaaaaagtgcattggcaaaggcagaggaggcaccagcatcctca

SEQ ID NO: 167277 - DNA, 510 bp, Homo sapiens
agtctccagtcaaggatctgtactctccttggagccggggtaatgctactccattcttatgagactgcagaacagctcgyagcatctttgaaaccagatctccttccagcatctttgcctataagaacacagtagaaggttactataatatggctcattcgtttgtgaattcaaatagattttcagagctgaaacttgttactttataaattattactgcatactttctgtgcaattacaatatggggaaacaactgccacggtagagaaaagcacaaataccataagaatgcaggggaaagtcagaaggcacaagaccagcctgaagagggaatatatcagggaatgttcccagattcaggcggggaagcctgaatggagtcctgaagagcaagatggaatcacctaacaaggaggaagagggtgggctgtggggctgggagtggtatcagcccaaggaagggaacaggatgtgcgagtgcacagaggtgagagagaagcacatggtgt

SEQ ID NO: 167278 - DNA, 549 bp, Homo sapiens
tgctgacacaccatatcactctcagattaagaaccacatcgttagaggaaatctcctgcactgtcttactccagccagcagcttgctagcyctccttagccaactgctagcccccaggtgctatacttttctaattataaatataaaaatccagtcttaaggaagttgctgctgagagtgaggagtccagttttaaatgaaaaagactgtgtgaggcgatgagggagaattgggaggaagatgaagaagactatctcttgtacctatggtaggggaaatacaatttggggctaagtaaactccagaaagacccccaaaaagaatgattctaacttcctcaactggtctgagcactagggcaagtgaggtaattttatctagtaaagataaatttgtgtatccctatgtctactggtgtaaacaagaatatcctgctcagcttctctctgggtggagttggctgttgggggatttcgagtagcagtattatctgacctggcacccccgttttatgacaaatattttgtaatcccttcatttactttccta

SEQ ID NO: 167279 - DNA, 515 bp, Homo sapiens
aaacagtcaacagagtgaaaagacaagctatggaatgggagaaaatattgcaaaccatatacctgataagggcttaatattcaaaatatagagaactcaactcaatagcaagaaaacaacctaattttaaaaacgagcaaaggacctgaacagacatttctcaatagaagacatacaaatgatcaacaagtatatggaaaaatgctcaacatcacaaatcattagggaaatgcaaattaaaaccacaatgagataccacytcccacccagtagtatgtagtatggctactatcaaaacgcagaaaataacaagtgctggtaaggatgtggagaaaaggggaaccccaatacactgctgggggaaatgtaggttagtacagctattatggaaaacggtatggagatttctcaaaaacttaaaaagaactgtcagcaatcccactactaggtatatattcaaaggctatgaaatccgtatatcagttgaagaggtatctgcacgcccatgttcattg

SEQ ID NO: 167280 - DNA, 451 bp, Homo sapiens
taatacatggtaaatactgaatgaatgaatgaatgattgcagaaaacgttataaagaggagacaagaaacagctcagatatcgaactaccgtatttcctgatatgcaagaatcagaggtatacaagaaactactctcattttacaaggacattatgggaaggaaggaaggagaaccagaatagatttcatcatccatgtgtttakaattattttcaattgcatttataatgacagtttttttgtttatgctcatgcaagtatgtttatactgaaatgatacaaattcttttgcaccactgaaaaccaaattattattttatatctgtttgattctctgtaatccatttactatttgggcatcttagatgaagagtattttagggttttggttttgtttgtttgtttgtttgttttgacagagtctggctccatcatccaggctggagtgca

SEQ ID NO: 167281 - DNA, 445 bp, Homo sapiens
ttaaggggtgggacttttaaacttcaccttctggagaggggcgtatcaatgtgtattaaataaaattcttctataaggcagatttgtctatttcccccacttatttatttactcaatcatttatttatatcagcggagactcatggatatttatttatactttgagttataatccagtaccatgatgtttgtctcattgcctgaattatttcagcttttgcaaccaggaactgtttcaagttaactcctgtctctttgacagtacctcatctttttacattttttactgcttccttactttctggtactacaagatactccatctcatcttgtattttccttgcctcasatcttgaatcagccatttattcaaggatcatttaaaaaaatttttattgttgtaaaatatgtataacataaaatttataattttaaccatttttaa

SEQ ID NO: 167282 - DNA, 477 bp, Homo sapiens
aaaagcaataacagttgtgagaggctgaataacatccccctcagatacattcatgtcttcatccccagaacctgtgaatatattattgtttcatgtgggaaagggaacttagcaggtgtgattaagttaaagatcttgagatggggacattatcctggattaactgggatccaatgtgatcacagggtctttatcagaaggagggatggggaggatcacaattagaggaaaggagatgtgataatagaaagaacatrtgtgtgtgtgtgtgtgtgtgtgtgtgtgtgtgtgtgtaagtatgactaaaagagagatgaggagagagagagagagagagaaatttgaggatgccactttgatggtttgaagataggggaagaggccatgagccaaggaatacaggaacttccagaaactggaaggaaaaagcaaagaaatgaattttttcttagcgcctgcagaaggaacacagccctg

SEQ ID NO: 167283 - DNA, 593 bp, Homo sapiens
gactgctttgaagcaaaattgtttcacactgtgaaatcttttgcttaagcagacgaaagagtgggatcccaactaagagtgacttcaaaatttattcaaggattctcctttcaggtctgcctctcctcctatctttccctctttgagtagtcttatctcaatcccttagtttggtctatcttttcttctgtttcttggtatctgttaaggaataaattttgctctccaaaattcatatgctaacgttctaaccctcagtaccccagaatgtgactgtatttggagacagggtttttacagttaatgaaattaaagtgaggtcactgggatgggctcttatccagtactcaggtagtactatagggtctggaggcagagaacctaaggctttacattattctttgtaatagtctacattgacttcctagaastaaataaaatataatcatgccccagtaacaagaggacagaggtttcccccattgcaccacccccctccaccttctgcattgcagatgagaaaaggaaagtatctctgattcatcccctcttgcaaccaattgctgatgacaggcgtagttttcatttgcata

SEQ ID NO: 167284 - DNA, 434 bp, Homo sapiens
gaattcttagagacgttaacaggaggagttatgaggaacatagcgaaggagttaaaatttgaaggaaaaaaggattggggattatatgtacttgaattatggaaaaggttgaaatgcattcaagaaagcaataaagacaagtgaaccagaaactccctgctcacttatgataaaatatctagttaataccaaataaaagattcaaatagacttgttatagttctttagaaagtctctctaaaataatgcccatatcccccacactttttttctttttttaaaaaaagcactttcacaaataaagtattgcmtttaggaaggaagattggctatggggagtaagccgcttagctagaatgaaaaagatatgagaggaacataatttctgaatttggaattgttcttagacactgcaccaagcatcctgccttgca

SEQ ID NO: 167285 - DNA, 538 bp, Homo sapiens
atgattgggttcataagtaccgtatggcataaagcgtgtctatgcagttcatcattaaatccgaagagttcagtacagtccctgctgcctagtagggactcaattcacatttactgaatgaacacatgttttattcatctatattaaaccagyactttacgtggtatccagaacagaataggtgctaaattaatatccattacattgcactactgaggaatttggtggttaacacctccccgctgcacagaatcatctcaacccagtttcacctcatacctctttcctcacagtcatcttatggaggctgaggcaactctgtctcctaagactaggcttttttctgcataaaggagaacacctgttattgcctaaaagtagaattagaggtaatgaaatttagggtagcgtttggtaagtgggaggaggatcattgtaggcatgatcacaaaattgtatctgaaggccaaaaataattctcaaaagaaaaaaagctctatcttatgaaaataataacatagaaaccatctgggtttga

SEQ ID NO: 167286 - DNA, 538 bp, Homo sapiens
atgattgggttcataagtaccgtatggcataaagcgtgtctatgcagttcatcattaaatccgaagagttcagtacagtccctgctgcctagtagggactcaattcacatttactgaatgaacacatgttttattcatctatattaaaccagtactttacgtggtatccagaacagaataggtgctaaattaatatccattacattgcactactsaggaatttggtggttaacacctccccgctgcacagaatcatctcaacccagtttcacctcatacctctttcctcacagtcatcttatggaggctgaggcaactctgtctcctaagactaggcttttttctgcataaaggagaacacctgttattgcctaaaagtagaattagaggtaatgaaatttagggtagcgtttggtaagtgggaggaggatcattgtaggcatgatcacaaaattgtatctgaaggccaaaaataattctcaaaagaaaaaaagctctatcttatgaaaataataacatagaaaccatctgggtttga

SEQ ID NO: 167287 - DNA, 591 bp, Homo sapiens
ggtgctgtattagtccattcttgcacagctakacagaactacctgagactgggtaatttatagagaaaataggtaggtgggctcatggttctgcaggctgtacaggcttctgcttctggggaggcctcaggaaacttacaatcatggcagaaggcaaaggggaagcaagcatggttttacatggctgagcaggaagaagagagacagcaaagagggaagggctacatactttcaaacaaccagattttgtaagaactcactcactatcatgagaacagcaagagggaagtccgccctcatgatcccatcacctcccaccaggtcccttctctaatattggggattacaattaaacatggtatttggctggggacataaagccaaaccatatcaggtgcctagtattatcaggaattaagtcaagccttttacaaaataagttatttttttaatactcaccagaaccctgataatttacaatccattaagtgaacacccactatatctcatttagtgagataaatgagacatatttggtgccataaaggatctcattgtaggaaatatgaccccatttaaaagaaatagttg

SEQ ID NO: 167288 - DNA, 285 bp, Homo sapiens
aactctaaaatgttatccatcataaattatgaaacacaatttttcttattctytttagagctttacaattcatcttaaagaccagtgtttacactctcttctgtaggttgtacaataacctttggcgagaaaaaataaaagtctggctttctgactcataggtgtgttccctttaagagaaaaagaaaatatgtcctctttaaaactgatgatcattggtcacctcaattttattgaagttcacttctgacctctttctctacataaaactgcccaacagaattc

SEQ ID NO: 167289 - DNA, 285 bp, Homo sapiens
aactctaaaatgttatccatcataaattatgaaacacaatttttcttattctttttagagctttacaattcatcttaaagaccagtgtttacactctcttctgtaggttgtacaataacctttggcgagaaaaaataaaagtctggctttctgactcataggtgtgttccctttaasagaaaaagaaaatatgtcctctttaaaactgatgatcattggtcacctcaattttattgaagttcacttctgacctctttctctacataaaactgcccaacagaattc

SEQ ID NO: 167290 - DNA, 591 bp, Homo sapiens
tgacgccacagttgttcttatctcaattgtcttaaaattcatttaatttttttttcctttggtttcattattcaaattttaacttcagttctcaagattttatctgatggaagagatggagtccattactaaggactccattgtgctccatcatgccagagttgtaaaatagatcttttaaaggaaatttattatgatttttttctatttaagagcttcctctccagttgagcatgtaagaaaattayaccaggagaatacagtaaactctatgaggcaagctataaacatgtagcattgtgattagggctggttctccttctagagacatggtaggattgcaatttcataccatccttgaagttagagagagccacgtgactcatttagccaatgaatggtgagcagaatgacatgtcacttccagcagaagctttaagaatctgagagacattcatacgttttccatgtgctgtagccttatacccaaagcctgggtcccaagtgaccatgacaggcagagctcccagttgagccacagagatttagagaatggctgttaacacagcataatccagcccatcctgacta

SEQ ID NO: 167291 - DNA, 569 bp, Homo sapiens
aggattgcaatttcataccatccttgaagttagagagagccacgtgactcatttagccaatgaatkgtgagcagaatgacatgtcacttccagcagaagctttaagaatctgagagacattcatacgttttccatgtgctgtagccttatacccaaagcctgggtcccaagtgaccatgacaggcagagctcccagttgagccacagagatttagagaatggctgttaacacagcataatccagcccatcctgactaatctgatattaacatgtataataaagaattctatcaatgctgagggaagatgattagttaaggtcctaggttgcaagtctcaaaacctcttccaaggattgtagacaggaaattaaatgacttctagtccctagagttcccaatctcctaccatcccatcctaatatgacagaagtaattcctgagttgcttctgaaaccagagcttccctcagaacccttagcctgccagatggcttcttggagagccctcactcacttttctccttctgctattgctgctcattcattccagcttttaaaaattcatctt

SEQ ID NO: 167292 - DNA, 715 bp, Homo sapiens
aaaagcctcaataattattatgacatggcatgttaggataccaagtaaattgcatttgtaaaatgtgattttctgttggtgttcacttctgctctactgacatttggtaagtattattgactgactgactaactaatgtggtcattagtcttcataaagaaaggctctctacaaaaacggagggatgccctttttctggcatttaatacgtaagaaattgcctccgatggaaaccagagttgcctgattactatcagcacaggagaaatgtattaatgtgcctttctagtaacaggtttttagaaagtcaaatataaacaaatctgtctgtttgtgtgtgtgcatgtggtggtggggagggaagaaaaaaggagggggagagaaagagaaataagaaccaagtttattatactgtattcagggggaaaacattttcccaaggtcctaacagaagagcaaagtgccactgtcaatagcctcagtagtgttagggttgcttttatttatttatttatttacttatttatttttcctttttttttctttttttcttcttttttttttctttccttttttttttttttttttttttttttttggacagagtctcacactgtygcctgggctggagtgcattggcgcaatctcgactcactgcaacctctgcctcccaggttcaagtgattctcctgcctcagccgcccaagtagctggg

SEQ ID NO: 167293 - DNA, 715 bp, Homo sapiens
aaaagcctcaataattattatgacatggcatgttaggataccaagtaaattgcatttgtaaaatgtgattttctgttggtgttcacttctgctctactgacatttggtaagtattattgactgactgactaactaatgtggtcattagtcttcataaagaaaggctctctacaaaaacggagggatgccctttttctggcatttaatacgtaagaaattgcctccgatggaaaccagagttgcctgattactatcagcacaggagaaatgtattaatgtgcctttctagtaacaggtttttagaaagtcaaatataaacaaatctgtctgtttgtgtgtgtgcatgtggtggtggggagggaagaaaaaaggagggggagagaaagagaaataagaaccaagtttattatactgtattcagggggaaaacattttcccaaggtcctaacagaagagcaaagtgccactgtcaatagcctcagtagtgttagggttgcttttatttatttatttatttacttatttatttttcctttttttttctttttttcttcttttttttttctttccttttttttttttttttttttttttttttggacagagtctcacactgttgcckgggctggagtgcattggcgcaatctcgactcactgcaacctctgcctcccaggttcaagtgattctcctgcctcagccgcccaagtagctggg

SEQ ID NO: 167294 - DNA, 715 bp, Homo sapiens
aaaagcctcaataattattatgacatggcatgttaggataccaagtaaattgcatttgtaaaatgtgattttctgttggtgttcacttctgctctactgacatttggtaagtattattgactgactgactaactaatgtggtcattagtcttcataaagaaaggctctctacaaaaacggagggatgccctttttctggcatttaatacgtaagaaattgcctccgatggaaaccagagttgcctgattactatcagcacaggagaaatgtattaatgtgcctttctagtaacaggtttttagaaagtcaaatataaacaaatctgtctgtttgtgtgtgtgcatgtggtggtggggagggaagaaaaaaggagggggagagaaagagaaataagaaccaagtttattatactgtattcagggggaaaacattttcccaaggtcctaacagaagagcaaagtgccactgtcaatagcctcagtagtgttagggttgcttttatttatttatttatttacttatttatttttcctttttttttctttttttcttcttttttttttctttccttttttttttttttttttttttttttttggacagagtctcacactgttgcctgggctggagtgcattggcgcaatctcgaytcactgcaacctctgcctcccaggttcaagtgattctcctgcctcagccgcccaagtagctggg

SEQ ID NO: 167295 - DNA, 715 bp, Homo sapiens
aaaagcctcaataattattatgacatggcatgttaggataccaagtaaattgcatttgtaaaatgtgattttctgttggtgttcacttctgctctactgacatttggtaagtattattgactgactgactaactaatgtggtcattagtcttcataaagaaaggctctctacaaaaacggagggatgccctttttctggcatttaatacgtaagaaattgcctccgatggaaaccagagttgcctgattactatcagcacaggagaaatgtattaatgtgcctttctagtaacaggtttttagaaagtcaaatataaacaaatctgtctgtttgtgtgtgtgcatgtggtggtggggagggaagaaaaaaggagggggagagaaagagaaataagaaccaagtttattatactgtattcagggggaaaacattttcccaaggtcctaacagaagagcaaagtgccactgtcaatagcctcagtagtgttagggttgcttttatttatttatttatttacttatttatttttcctttttttttctttttttcttcttttttttttctttccttttttttttttttttttttttttttttggacagagtctcacactgttgcctgggctggagtgcattggcgcaatctcgactcactgcaacctctgcctcccargttcaagtgattctcctgcctcagccgcccaagtagctggg

SEQ ID NO: 167296 - DNA, 544 bp, Homo sapiens
acccacaatgaatgtagtccataacacatacaaatacacacacacattttcactcttcctcctgctttaccagttttacacatctctgcatcaggacccaaacttgagcactcaggatctcaaccacagttgagatctcttcttcactgtcatcccggcacatcagttacttaaaacaacccaatttcaagaactgatagaccttcatttctggacacaccaaaaacaagcaaattccagaggatcagcttcagggtggcagaatggaaggagtaaaagccaaccacggggccaggtgcagtggctcacacctgtaatcccagcactttgggmggctgaggtgagcaggtcacctgaggtcaggagttcaagaccagcctggtcaacatggtgaaaccccgtctctattaaaaacacaaaatattagccaggcatggtggcgggcgctggtagtcccagctactcgggaggctgaggcaggagaatcacttgaacccaggaggcggagattgtggtgagccaagattgcaccactgcactccag

SEQ ID NO: 167297 - DNA, 544 bp, Homo sapiens
acccacaatgaatgtagtccataacacatacaaatacacacacacattttcactcttcctcctgctttaccagttttacacatctctgcatcaggacccaaacttgagcactcaggatctcaaccacagttgagatctcttcttcactgtcatcccggcacatcagttacttaaaacaacccaatttcaagaactgatagaccttcatttctggacacaccaaaaacaagcaaattccagaggatcagcttcagggtggcagaatggaaggagtaaaagccaaccacggggccaggtgcagtggctcacacctgtaatcccagcactttgggcggctgaggtgrgcaggtcacctgaggtcaggagttcaagaccagcctggtcaacatggtgaaaccccgtctctattaaaaacacaaaatattagccaggcatggtggcgggcgctggtagtcccagctactcgggaggctgaggcaggagaatcacttgaacccaggaggcggagattgtggtgagccaagattgcaccactgcactccag

SEQ ID NO: 167298 - DNA, 452 bp, Homo sapiens
acccaaacatggagattccaggtttcttccttgccccaacaggtggctggcaacatggccrcccccacatatccccacgtgtgtagaacatcatggcgccctgcatttgcatcttaaaaggctagagtgtgagggccagctttttcgcaggctatgtgaatgacatgcctggtcaaaccaatcctctgagccctatgcaagccagcaccgcctcctccagcctcctcatataactagctgattacaccacacacacacacgccctccccccacatcccttctccccaccggggttttctctctattcaaatcccctctccctctgtctctgtactggggagctgttttcttcttccttccttctttcttgtatattaaactttttgctccttaaaaccactccaggtgtgtccgtgtcattttatccaaacgtgtgctagaccaagaaccct

SEQ ID NO: 167299 - DNA, 452 bp, Homo sapiens
acccaaacatggagattccaggtttcttccttgccccaacaggtggctggcaacatggccacccccacatatccccacgtgtgtagaacatcatggcgccctgcatttgcatcttaaaaggctagagtgtgagggccagctttttcgcaggctatgtgaatgacatgcctggtcaaaccaatcctctgagccctatgcaagccagcaccgcctcctccagcctcctcatataactagctgattacaccacacacacacacgccctccccccacatcccttctccccaccggggttttctctctattcaaatcccctctccctctgtctctgtactggggagctgttttcttcttccttccttctttcttgtatattaaacttttygctccttaaaaccactccaggtgtgtccgtgtcattttatccaaacgtgtgctagaccaagaaccct

SEQ ID NO: 167300 - DNA, 430 bp, Homo sapiens
tacacggagccaggttagtggtgcggtcagcatggtgataattgggctcatgaacccatgacctcagcttcatcaggagacccactgcaagtactggcccaacaggagggaaaggagctgagtcagatgataccactgaggggcatgagcaaatgaaaaaacaggaacccagccrtgaagctgggcctgagtgttggagatgccactatagagaccctggtcttagcaatccagacttttccccagtagaagggaaaggcaaagattatcctggccgggactgtgtaaggactttgaaggtcggccatccatctcaccctgctgtttccctccttccctgcagaacagccgttcacctgaatgttccaggcttttggttaacaacccctggtcttctatacccattcacactcaaaatcagggggaattc

SEQ ID NO: 167301 - DNA, 430 bp, Homo sapiens
tacacggagccaggttagtggtgcggtcagcatggtgataattgggctcatgaacccatgacctcagcttcatcaggagacccactgcaagtactggcccaacaggagggaaaggagctgagtcagatgataccactgaggggcatgagcaaatgaaaaaacaggaacccagccgtgaagctgggcctgagtgttggagatgccactatagagaccctggtcttagcaatccagacttttccccagtagaagggaraggcaaagattatcctggccgggactgtgtaaggactttgaaggtcggccatccatctcaccctgctgtttccctccttccctgcagaacagccgttcacctgaatgttccaggcttttggttaacaacccctggtcttctatacccattcacactcaaaatcagggggaattc

SEQ ID NO: 167302 - DNA, 432 bp, Homo sapiens
actacacggagccaggttagtggtgcggtcagcatggtgataattgggctcatgaacccatgacctcagcttcatcaggagacccactgcaagtactggcccaacaggagggaaaggagctgagtcagatgataccactgaggggcatgagcaaatgaaaaaacaggaacccagccgtgaagctgggcctgagtgttggagatgccactatagagaccctggtcttagcaatccagacttttccccagtagaagggaaaggcaaagattatcctggccgggactgtgtaaggactttgaaggtcggccatccatctcaccctgctgtttccctccttccctgcagaacagcygttcacctgaatgttccaggcttttggttaacaacccctggtcttctatacccattcacactcaaaatcagggggaattc

SEQ ID NO: 167303 - DNA, 466 bp, Homo sapiens
tgatgctgtcaattctcaatggccagaagagggcatctgcccagatcagttcaggtgtctatccctggtccgatcgcctgtgcccagggtagcrcatcaggtacacagggctgtttcttccctcctattggtagaatagcttttccaagaaggggataggctggaatggaagaaaagagtccaaagaggaaggaaccacaacagaaagagaattgctttcctttcagttgtgggagcaccagcttaatgcctcttccacatttgcccagcagaggaaatgattgggccgaatgacagaaaacctaggatagcctttttggtgcctcctgacaatcacagaagcaggctgggatcctacccaggtatggcagagcaagtgagcccacctaggtgggaatccttaccctcctaatcctgcaggttcacttcacaatcttgtgtagaccttaaaccattgtttagacag

SEQ ID NO: 167304 - DNA, 462 bp, Homo sapiens
tcaattctcaatggccagaagagggcatctgcccagatcagttcaggtgtctatccctggtccgatcgcctgtgcccagggtagcayatcaggtacacagggctgtttcttccctcctattggtagaatagcttttccaagaaggggataggctggaatggaagaaaagagtccaaagaggaaggaaccacaacagaaagagaattgctttcctttcagttgtgggagcaccagcttaatgcctcttccacatttgcccagcagaggaaatgattgggccgaatgacagaaaacctaggatagcctttttggtgcctcctgacaatcacagaagcaggctgggatcctacccaggtatggcagagcaagtgagcccacctaggtgggaatccttaccctcctaatcctgcaggttcacttcacaatcttgtgtagaccttaaaccattgtttagacagttat

SEQ ID NO: 167305 - DNA, 466 bp, Homo sapiens
tgatgctgtcaattctcaatggccagaagagggcatctgcccagatcagttcaggtgtctatccctggtccgatcgcctgtgcccagggtagcacatcaggtacacagggctgtttcttccctsctattggtagaatagcttttccaagaaggggataggctggaatggaagaaaagagtccaaagaggaaggaaccacaacagaaagagaattgctttcctttcagttgtgggagcaccagcttaatgcctcttccacatttgcccagcagaggaaatgattgggccgaatgacagaaaacctaggatagcctttttggtgcctcctgacaatcacagaagcaggctgggatcctacccaggtatggcagagcaagtgagcccacctaggtgggaatccttaccctcctaatcctgcaggttcacttcacaatcttgtgtagaccttaaaccattgtttagacag

SEQ ID NO: 167306 - DNA, 466 bp, Homo sapiens
tgatgctgtcaattctcaatggccagaagagggcatctgcccagatcagttcaggtgtctatccctggtccgatcgcctgtgcccagggtagcacatcaggtacacagggctgtttcttccctcctattggtagaayagcttttccaagaaggggataggctggaatggaagaaaagagtccaaagaggaaggaaccacaacagaaagagaattgctttcctttcagttgtgggagcaccagcttaatgcctcttccacatttgcccagcagaggaaatgattgggccgaatgacagaaaacctaggatagcctttttggtgcctcctgacaatcacagaagcaggctgggatcctacccaggtatggcagagcaagtgagcccacctaggtgggaatccttaccctcctaatcctgcaggttcacttcacaatcttgtgtagaccttaaaccattgtttagacag

SEQ ID NO: 167307 - DNA, 462 bp, Homo sapiens
tcaattctcaatggccagaagagggcatctgcccagatcagttcaggtgtctatccctggtccgatcgcctgtgcccagggtagcacatcaggtacacagggctgtttcttccctcctattggtagaatagcttttccaagaaggggataggctggaatggaagaaaagagtccaaagaggaaggaaccacaacagaaagagaattgctttcctttcagttgtgggagcaccagcttaatgcctcttccacatttgcccagcagaggaaatgwttgggccgaatgacagaaaacctaggatagcctttttggtgcctcctgacaatcacagaagcaggctgggatcctacccaggtatggcagagcaagtgagcccacctaggtgggaatccttaccctcctaatcctgcaggttcacttcacaatcttgtgtagaccttaaaccattgtttagacagttat

SEQ ID NO: 167308 - DNA, 462 bp, Homo sapiens
tcaattctcaatggccagaagagggcatctgcccagatcagttcaggtgtctatccctggtccgatcgcctgtgcccagggtagcacatcaggtacacagggctgtttcttccctcctattggtagaatagcttttccaagaaggggataggctggaatggaagaaaagagtccaaagaggaaggaaccacaacagaaagagaattgctttcctttcagttgtgggagcaccagcttaatgcctcttccacatttgcccagcagaggaaatgattgggccgaatgacagaaaacctaggrtagcctttttggtgcctcctgacaatcacagaagcaggctgggatcctacccaggtatggcagagcaagtgagcccacctaggtgggaatccttaccctcctaatcctgcaggttcacttcacaatcttgtgtagaccttaaaccattgtttagacagttat

SEQ ID NO: 167309 - DNA, 588 bp, Homo sapiens
actcaattttttatttttattgtatatggaaaaatcacaaaggatcttcgaggctttggatgatgtcatctgcctttagagatttgcttttgcttataataggtagtttgaggagarccatatcatcttaatatgatcaaggattaagtttatttacagagcaacttcagcctcttttgagggctaatctacttccagttcattcttactattaaagtgaggtcacagttaaataccagtgatgttactcttgatgagctttacagtacaacttgtgtcccccaacaccatgaaactgccaaaagtttgactcggctttttagtctttcagctgcagtttttgaattggctgatgcctcaaagggaaaatggtgctgaatgctacctttatatctctgagtttctcttttctctgggatctgagctccttgattgctcactgccttagtagctctctaatatctttaaacagatttttggggtataggttttctggtattcttagtagaaatcttggtttcaaacaagaacattgctggaagtaaaaacctcacatataaatctgaatctatttcatggaggaataaa

SEQ ID NO: 167310 - DNA, 427 bp, Homo sapiens
actattatggccattggaatatgtcttattccaaaagtgttgggaaaatggcactatactgggaggggaggggtaagaagggttgactcctggttctgtttcctcctactgttcttgcctctgtctcagtcctttcctctgtctcagcttccatggctgtaaaagattggacttggaatcaatgatctctaaggacctytcccactccaatatgttagaatttcacgatctcatcattataaattttgtgcccaggcattctagctaattggactggaaggctcacaattcttcagtgaatttgaactctgtgaagttatctagttaagtcactggaatacccaaatagattccgtggtacagtaattacttcttataaaactttttcaagttaacaagatgatcttgagaaatcatacataacttc

SEQ ID NO: 167311 - DNA, 602 bp, Homo sapiens
atcaaacctccaacctgtttgtaatttaatcttcataaggtcagagagcgtatttctttttctgcttgttttctgcctagaatgtgtggatattccagaaatatttgctgataaaaatgaattgcttccataattagggaagaaattctttacctggcgaatcttcaagttatgcaccatcatcatsgtcctgtctgtgtcccacccttccttgtaatatcttgggttattcatctttcccattcatgaactttaagcttttgtcagcaccaactcacctctgtcccctctcaagatctgagagaaatgtaaagtggactttcttttatagaaattcaatgacctataaataatggaatttcttcctaaaccatgtgtcacagaagaagtatggagtacataacaaagggtcatctatggtagaaaaggtcacttccagctgagattatcgtaaaaggatggagaaaagaactttcactggttctcaaatagtatattgaaattaagtatttgaagaggcagagaaaagaacttcctagcagatggaaaaaatatgaatagtcatcaaattaggaaaatgtttgccataaattaagaatgtc

SEQ ID NO: 167312 - DNA, 383 bp, Homo sapiens
ttccaatttggttccattctccccatcattttcaggtacaccaatcaaatgtaggtttggtcttttcacatagtcccatatttcttggaggctttgttcattcttttacattcctttttmtctaatcttgtcttcacactttattttattgagttaacattcagtctctgacatcctttcttctgcttgatcaatttagttattgatacttgtgtatgtttcatatgtttcacaaagttctcatgatgtgtttttcagctccatcaggtcatttatgttctctaaactggttattctagttagcaattcctctaaccttttttcaaggttcttagctttcttgcattgggttagaatgtgctcctttagctcagaggagtttg

SEQ ID NO: 167313 - DNA, 611 bp, Homo sapiens
attctgcatcgcaatctacatttcttgacacctctgctctaaacttcttgtaaaatcagaagatcaggcaaatacggagctcacattcctgcatgacagttatcagctaatggtgtgcaggggctgtcccctttrtataatcatttttgtttgctttgccacagtctacaccattctctactgtattactgtagtgctactttactccatgaacattatcttctgtatttgagtcagtacttgaatctgccatctcttgatatgttgcctataatataacaccacactttgttatggttcgactggcaatggtaatcatgatcatgttattagacacagaagcatccactgatgatttgagagaatgccatgtaacaggattcagtagcccatttggggaactgcccagatcatgctcaattctttaaaattgtatgcccttctcacccgcagccctgctgaagggagaggagttacctaaacagcaccaggtactacatgggactgacttcaccttggttacaggtgcatggaccagaagtcaacaccttatcccaggcaaatcaaatcaatcagaatctcttttctagtagttctgaactgggataatg

SEQ ID NO: 167314 - DNA, 492 bp, Homo sapiens
tgtatccatatgatgaaatatgatgcaaccattaaaaattatactatatcaaaatgttaatagcaactattattaataacaagaatgataaattctggatattgtagcttcttttctattctctttctttttttactgatctatttctgcattttctaaaatagtcatgtttaattgttctagcaggcaaaacaatagaagttgttaaaagtgggtaggraagaatatttgtgatcatggaaaaacaattctatattactaaaaaaggagggtataaagagtacttgcaggacaatgtcatctgaaatgtagacatgtacagaaaaaaatatttaaagggaatgtggtaaaatgttgataggtaattatatttattatatttttctttgtcttttcttatatttttcaagttttctgcactgaacatgaggttcctttttgttttttgttgttgttgttgttgttttgttttttgttttgttttacagaact

SEQ ID NO: 167315 - DNA, 391 bp, Homo sapiens
aaatataaaacaaggaaaacaggatgaggcacacattattaagaagaatctttaggttagggaatatgtgcagttaatctcttgtaagatccttggcaactggacaaaaagcctaaataataaascatgaaaattcacttacatatatacttatgcacatatttcccgtataactattttttgccctgttgacaagatgtaaggagacaacaagcagagaagcatcaggaggaatcagaagattagggaggtgatctcagctctgtccctgacatgctctatggacttaagcaagtagcaatatctctgtgtctcaggtggctcatctataaacagagagggcctgccgggcatggtggttccggcctgtaatcccagaactttgggaggc

SEQ ID NO: 167316 - DNA, 473 bp, Homo sapiens
tcagggcaccgacagcatccgctctaataattgacctttacagccctgaaaagctgtgaatttgcacttgggcaaagtaagcaaacctagggctttggtatgataggcagggcaaaagaactgtattctgtgcaatcaatgacagtcccctacttccttccccatggttctagacctctaggctgttcccagggagaacagaacagaaataaagttcatctctaactatttagaatggkgaatttacccactggccagagaagatgatgaaactatagagactccatcccaccttcctttcccattgcttccaggatatgccccaccctccccagcctggcttccaaagcatttctcagtctgattccaagatatcttttcttttttttttttttttttcgttttttgcttcccaacacaaaccacccaccactgttaggttttctctctcctcacttctacgtaggccattc

SEQ ID NO: 167317 - DNA, 473 bp, Homo sapiens
tcagggcaccgacagcatccgctctaataattgacctttacagccctgaaaagctgtgaatttgcacttgggcaaagtaagcaaacctagggctttggtatgataggcagggcaaaagaactgtattctgtgcaatcaatgacagtcccctacttccttccccatggttctagacctctaggctgttcccagggagaacagaacagaaataaagttcatctctaactatttagaatggtgaatttacccactggccagagaagatgatgaaactatagagactccatcccaccttcctttyccattgcttccaggatatgccccaccctccccagcctggcttccaaagcatttctcagtctgattccaagatatcttttcttttttttttttttttttcgttttttgcttcccaacacaaaccacccaccactgttaggttttctctctcctcacttctacgtaggccattc

SEQ ID NO: 167318 - DNA, 584 bp, Homo sapiens
cttgaacataagtgacgacagggaggtgggactggctgaatactctaccagaggcttagtgaaagggctaaggaagtscacgcgcacaggccatttccaggtggggtggtcagggaagccttcctggaggaggtggcactgagctgggaggacctagaaggggttgaggagagggagtggaagtacagccccgatagtgggaatagcctgagcacgggcactaaagcctgtgagtgtctgtcacttttgttcctatggttaaggcagggtctgggtcctcactctctccagcaagttctctgtaagagtgcatggttagtgacggctcctggagaggaggaagacgtgggctttctagagagaagaaaggagctgtgttccctcattggcctcagtctttctcttccctctcctcatacccctcagaagtgcagacattgcaaagcccatctcccttcagaactaaagccacccctctgatagctgcatccctcctagggagaaagaactccagtggctgccaagagcccctgccagatgctcctccccaccaccctggcatcttgtgcatagtagatctcggg

SEQ ID NO: 167319 - DNA, 584 bp, Homo sapiens
cttgaacataagtgacgacagggaggtgggactggctgaatactctaccagaggcttagtgaaagggctaaggaagtgcacgcgcacaggccatttccaggtggggtggtcagggaagccttcctggaggaggtggcactgagctgggaggacctagaaggggttgaggagagggagtggaagtacagccccgatagtrggaatagcctgagcacgggcactaaagcctgtgagtgtctgtcacttttgttcctatggttaaggcagggtctgggtcctcactctctccagcaagttctctgtaagagtgcatggttagtgacggctcctggagaggaggaagacgtgggctttctagagagaagaaaggagctgtgttccctcattggcctcagtctttctcttccctctcctcatacccctcagaagtgcagacattgcaaagcccatctcccttcagaactaaagccacccctctgatagctgcatccctcctagggagaaagaactccagtggctgccaagagcccctgccagatgctcctccccaccaccctggcatcttgtgcatagtagatctcggg

SEQ ID NO: 167320 - DNA, 584 bp, Homo sapiens
cttgaacataagtgacgacagggaggtgggactggctgaatactctaccagaggcttagtgaaagggctaaggaagtgcacgcgcacaggccatttccaggtggggtggtcagggaagccttcctggaggaggtggcactgagctgggaggacctagaaggggttgaggagagggagtggaagtacagccccgatagtgggaatagcctgagcacgggcactaargcctgtgagtgtctgtcacttttgttcctatggttaaggcagggtctgggtcctcactctctccagcaagttctctgtaagagtgcatggttagtgacggctcctggagaggaggaagacgtgggctttctagagagaagaaaggagctgtgttccctcattggcctcagtctttctcttccctctcctcatacccctcagaagtgcagacattgcaaagcccatctcccttcagaactaaagccacccctctgatagctgcatccctcctagggagaaagaactccagtggctgccaagagcccctgccagatgctcctccccaccaccctggcatcttgtgcatagtagatctcggg

SEQ ID NO: 167321 - DNA, 471 bp, Homo sapiens
ccaaggccagagatcatgtccagaaacccagtaggcacaaagaatgtggaacaaacaaatgaccacgttttattgtacagtggtttcaaaatgaagtcaggaggcagagttgaggctgcaaagcagctcctcacaaaaaccactctatgcatcctgcagtgggggaggtggctcttctaaatatgtgtacaacttaatttatgcacagacagaataatttagatgcagtaagacagcaaaaactcccccyagaaattacatccccgtccacttgagtcaagttcctactaattctctactctataaagggaggtaggagatgaaaaagaatgaaagaagtcagcaaacgcccctgaaggtctctctgcctatttaacacacacacattcacagagaaggtgccatttggcctgggcttgaaggatatgtaagagtttgttcaaaaaaaaagagaaaaaaacaaaaaagaaa

SEQ ID NO: 167322 - DNA, 471 bp, Homo sapiens
ccaaggccagagatcatgtccagaaacccagtaggcacaaagaatgtggaacaaacaaatgaccacgttttattgtacagtggtttcaaaatgaagtcaggaggcagagttgaggctgcaaagcagctcctcacaaaaaccactctatgcatcctgcagtgggggaggtggctcttctaaatatgtgtacaacttaatttatgcacagacagaataatttagatgcagtaagacagcaaaaactccccctagaaattacatccccgtccacttgagtcaagttcctactaattctctactctakaaagggaggtaggagatgaaaaagaatgaaagaagtcagcaaacgcccctgaaggtctctctgcctatttaacacacacacattcacagagaaggtgccatttggcctgggcttgaaggatatgtaagagtttgttcaaaaaaaaagagaaaaaaacaaaaaagaaa

SEQ ID NO: 167323 - DNA, 471 bp, Homo sapiens
ccaaggccagagatcatgtccagaaacccagtaggcacaaagaatgtggaacaaacaaatgaccacgttttattgtacagtggtttcaaaatgaagtcaggaggcagagttgaggctgcaaagcagctcctcacaaaaaccactctatgcatcctgcagtgggggaggtggctcttctaaatatgtgtacaacttaatttatgcacagacagaataatttagatgcagtaagacagcaaaaactccccctagaaattacatccccgtccacttgagtcaagttcctactaattctctactctataaagggaggtaggagatgaaaaagaatgaaagaagtcagcaaacgcccctgaaggtctctctgcctatttaacacacacacattcacagagaaggtgccatttggcctgggcttgaaggatatgtaagagtttgttcaaaaaaaaaragaaaaaaacaaaaaagaaa

SEQ ID NO: 167324 - DNA, 507 bp, Homo sapiens
aggtggtggcagcaagaccagtgagggaggaatggagggcagtgaaggatgctgggctcaaaaacctgagcagaagctggaagaatgcaccctaggtttygagcctgggtgatcggaatagtgatgagagcaggaagagaaactgttgagtccaaggaaggttttggagggatgacgatgagtttagtcttggattaaatattttgattatgtgtttaatttgaactgccaacaggaagtccagatagaaagggtcatcaggaaatagtatataagcagaactggaatttgcagaaatacccatttgagaatcagctgcatacagacgatacggaagctgtggggatgaaaaaggtcccgcacaagagaatcaggaaaaaaaaagtgagacaatgagtcaagacagacagtattaaaggaacttcccaaccatttgctcaatgtaaaaatggaaatgaggcgaggtttgttcccttagaacatgtttttcacagcaaaagagaattc

SEQ ID NO: 167325 - DNA, 507 bp, Homo sapiens
aggtggtggcagcaagaccagtgagggaggaatggagggcagtgaaggatgctgggctcaaaaacctgagcagaagctggaagaatgcaccctaggttttgagcctgggtgatcggaatagtgatgagagcaggaagagaaactgttgagtccaagraaggttttggagggatgacgatgagtttagtcttggattaaatattttgattatgtgtttaatttgaactgccaacaggaagtccagatagaaagggtcatcaggaaatagtatataagcagaactggaatttgcagaaatacccatttgagaatcagctgcatacagacgatacggaagctgtggggatgaaaaaggtcccgcacaagagaatcaggaaaaaaaaagtgagacaatgagtcaagacagacagtattaaaggaacttcccaaccatttgctcaatgtaaaaatggaaatgaggcgaggtttgttcccttagaacatgtttttcacagcaaaagagaattc

SEQ ID NO: 167326 - DNA, 543 bp, Homo sapiens
tttgaaataagaatctggccataccacacccaacgagagctcttttactaagtggaaatatcaggtagctttaggagctggcaaagataatttttagtagaaaatgaactttaaaactttcttttttctttttaagacacggtctcaggcactcacaggctggagagcagttgcgagattacagctctctgcagccttgacctccctgggctcaggcaatcctcccacctcagcctcctgagcagctgggactacaggtgtrtgccaccatgcctggctaatttttgtattttctttagagacggggtttcgccatattgcccaggctggtctcaaactcctggactcaagccatctgcccaccttggcctccctcccaaagtgttaggattacaaatgcgagccactgtgcccagccaaaactcttttttttaaagttcaactactcctgactaaaagcgttaatgcacttacctttaatgtaaagagtattttctgaagctcaaattttaactaaacatgaaaagttgttgaattttgtca

SEQ ID NO: 167327 - DNA, 608 bp, Homo sapiens
ctgtgaacagaatgtggtttgtagcattttacaatgaaataaacgttgaagtcattccaggaaatactgtaacagtcatacggggtaagcaagtagtgccaatttagtcaagtaaaaatagtgcactggagtacaatttaatatgttatggaagatattcatgaacttggaagtctggttgtgaccatgacattagaccccagagaaacctaagggacttgactcaatacttgaaaagatggaaaagagcaggattgccttcatgaataatcagcactcctattgattgcgctatctagtacattrtaagaaatactgacacaaaacaaagtagagatacttaaacagcattcaacaatgagaatggtactttacctttggagaatgacacaccactgaatggcctgaagtgagatggcactagtgggatatgtgtaaggggaaggcagcagaaaggggagaaatccatgatttaaccctccttgcctactctgcagactgctataaaactatggtaccccaagagtctagcaaaaagtggaatttaggagaaaggaagtcttcaagatccagggacattctcctcatggcagcagcagcctcagtga

SEQ ID NO: 167328 - DNA, 505 bp, Homo sapiens
agtgacctggatgatattggagaactattattctaagtgaagtaactcaggaatggaaaaccaaacattgtatgttctcacatataagagggagctaagctatgaggatgcaaaggcataagaatgatacaatgaacttaggggacttgaggggaagggtaggagggggacgagggataaaagactacaaatagggtacrgtgtatacttctcaggtgatgggtgcaccaaaatcacacaaatcatcactaaagaacttactcatgtaacaaaataccacaataacatacggaaaaatttaaacaaaaataaatgagcttcatattaaaataacctgttgtttcttccataaattgaacagaatcataaagtatataaagtgtgagaatttacatatttatccagagtttaaaagatttcccaagtcagaaaatagaactctatttcaaaagggctgaagtaatggacttcaaataaatgtttcaatgtgctcattttcggtgaa

SEQ ID NO: 167329 - DNA, 504 bp, Homo sapiens
cttttaagtcattctccgggtcttgccattcttcgttctccatccaattttttgcagctgagattcccactgacatataagctaattggtatagatctgggagccccacattatatacaattaaaactattttaaattcctgtgtaaatttcacaatatcttatctaggctttggaaagtcttttttcaatggctctcagctcagattgagacaaggaattaaaagccaggggttttcctgttctgaaaggggtttaattttaaggggtaaytgagctttgagagtttctggctagccaggagaggaggggaatgcatctgaagaagaaagagaagcagagggaaatggaggagcataggatgagggaagaggaataggaagatgaaggcggtttgtgtctcaagttgtgagttgtagggggtatctaaaggaaaaaaattttaagtgtttcacaatttttcctttgctttggccaaggaatctgttaaagaagtaattttata

SEQ ID NO: 167330 - DNA, 543 bp, Homo sapiens
gtttcacaatttttcctttgctttggccaaggaatctgttaaagaagtaattttataattttaatttcttttgtatgcttgtttatactaatcaaaaatgcagactatttgatatttactttgttttttattctgaagtgtttctcaagtgaacatttttgttcctattaaaaattctgtcattctaaattatacttgatgaaattgtgccatttagaaaggaagttcacaaatttggattttatttaagaacatgtaaaaagcaggagtgtggcccagaagattgaagcattcgatttagactgagacaaacccatkagagtgtggaaatagttggttgaaagtgtcgctgtgcacctcatgacttgggtccccatccaaaagactgggccatctccaatggaaaatttgatgaattttcagttcccatgggacagaaggtttagagaggagatctcatcaagaatcagagtctcagagacaaaacagcaacagtgaaaaaaattcttaggaggttttgaaaactgacccaaagcatagttt

SEQ ID NO: 167331 - DNA, 590 bp, Homo sapiens
tggttctagagttctaatagtaaatgctgctgttatatttaaaaagaataataacagtaaattattaaatgtcatttattgaatgcctagtatatactacttgcactagtgaatcctcacaagagccactatgagataggtatcatctccttttacaattgaggaaaataaagttaagtaactggcccaagatcactcagatctgttgccccaaatctagtgccmtttctgctacaccatgctgtaatctatgtattttagtcttgaatattgtgccaaggaccttagagctctttgaggtcaggaaccatactcgattaatccctgtctcatccaccactcctagcagggtgctgggcacacagtcagttcctagtacacgtcagtagaaatactctcttagaaccctgcacttcacttagtctgggcaggccttgcctgttcatggccacgtaccacctgaggcatctgagccttgttggggggatttcacacaggaggcatgtggagcctgtgactaactccaagaagggattttctttttaaaaagaggatgttaggaaaagtctaaagggaaatgttaggaaatt

SEQ ID NO: 167332 - DNA, 563 bp, Homo sapiens
attatgcaatactcctttttgtcctttctgattgttgacttaaagtctgttttatctgatacaagaatagctactcctgttcttttttgctttctgtttgcatgttagatctttattcatccctttactttgagcctgtggatgttattacatgtgagattggtttcttgaagacagcagacagttgggtctagtcattttatccagcttgtcactctatgccttttaagtgggrcatttagaccattcacattcagggttagtatttatatgtgagattttgatcctgtcatcatgttattagctttttgttttgtaaatttgatcgtgtaattgctttatattgtctgtgggctatgtgcttgagtgacttttgtggtagcaggtatcaaccttttgttcccatgtttagcactcccttaaggacttcttataaggctggtctggtaataaccaattcccttactgtttggttgtctgagaaggattgtatcctcctttgcttatgaagctgagtttggtgggatatgaaattgttggttggaatttcttttctttgagga

SEQ ID NO: 167333 - DNA, 525 bp, Homo sapiens
tctcaatgagtttccttgccatcaagattctgaattctgtgtctgtcatttcagtcatttcaatctgattaagaaccatttgggggttggggtggctattatattcttttggaggtaaggagacactctggctttttgaattgccagaattcttgtgctgattctttctcatctgagagggcttgtctttctttgtttgtgacgtaagatgagtatagtcagttggcttcatttctgggtgctttcagagggcaaaggctcttaacargatctttatttgtgtctagatttttgccttaggtttcacaggcgctatatacgggcgaaatatttttagtgttgtaatttggattaccatccagtagatggcgcctgagagcgatggccgatagataagcccttagccaccgggctcttttgtatttcagcgcattgtcgatagtgctctgtgatagagggtgagagaggtggtccctttaccaggtccattcctgggccttggaagagccccttctgatcggtggt

SEQ ID NO: 167334 - DNA, 265 bp, Homo sapiens
ggcaatgagctaattctccagcacgaatctgttgattcagagctatgaatcttctcctgccttacctgactctgtttcccttggccttagatggcaaacatgactacacttcctgatgtttccccaccaactctggccttccccttttttccctatctcttgtaatgagattcrtctgcacttcactttgccttcacagttcagaaggaaggaccatcaggattctttgttcacattgaagtgctctctctttccagcatcacct

SEQ ID NO: 167335 - DNA, 629 bp, Homo sapiens
ttttcaaaacttcaagacttctgactagataagtggtgataccagtgaatgtgatttaaaaaaatattttataatgaaatgcatcaacatttggaacatctttataactcataactggttttgtaatattttccaaatgaccaattcatgatgttataaaatcatgcatgggtaaaaggtctattccaagtacaagaccagtggaatttgatacattacaacatgaaaagttcatgcacatggtttaatagtccacattgtaactaacttttaagaaactatcacttgttgaattttgttatagtatatgagaacagctacaattacctgaaaaggatattcaaatacacctcttttttccagctacctctctctatgaggtcaaattttcttcayattcttaaacaaaccaaaatgacacatttctacagaatgcaaaagatatgggaatccacgtgtcttcaattaagtcagatattgaatagatttgtgagaatataaaataatgtcactcttgtaactaattgttctggttttggaaaatatactttccacaagaatatttatgttaaaatgtaatgggcttattatttttaagtaaataaatattttaaaatgtgttttaattg

SEQ ID NO: 167336 - DNA, 629 bp, Homo sapiens
ttttcaaaacttcaagacttctgactagataagtggtgataccagtgaatgtgatttaaaaaaatattttataatgaaatgcatcaacatttggaacatctttataactcataactggttttgtaatattttccaaatgaccaattcatgatgttataaaatcatgcatgggtaaaaggtctattccaagtacaagaccagtggaatttgatacattacaacatgaaaagttcatgcacatggtttaatagtccacattgtaactaacttttaagaaactatcacttgttgaattttgttatagtatatgagaacagctacaattacctgaaaaggatattcaaatacacctcttttttccagctacctctctctatgaggtcaaattttcttcacattcttaaacmaaccaaaatgacacatttctacagaatgcaaaagatatgggaatccacgtgtcttcaattaagtcagatattgaatagatttgtgagaatataaaataatgtcactcttgtaactaattgttctggttttggaaaatatactttccacaagaatatttatgttaaaatgtaatgggcttattatttttaagtaaataaatattttaaaatgtgttttaattg

SEQ ID NO: 167337 - DNA, 584 bp, Homo sapiens
tcaatatccagctttgagtttcaaattagcctaaaaacatttattcaggcaaagtcttggaaaacagattttattaagtaagttttttctctctaaattgtcaaagcttttcttaacacagcaaagcttggaggtctgacataatrtttcactagaagccttagagaggattgaggatatgatgtagggaaagtttggaggggatgagaccagggccaggacattgcctgcatcacagaaaagaggcccagtgtttatcctactaattttcaggccagggagaaggagaaactgaaagacaggcatgcaagtgtttgacttttcatatggagctgcggggagactttaccaacctagggcagctacagtggcacagaaacagtgtcttggtgtgattctgcaagacaagaccgaagtcagtgcttctagtctgccacggcctttgctttcctgcaggagatccacaagttcctatgtgctctgtgaagccacagaggactgctgaggtgactggctttctgaaataatcttggtgacagtacaaggaagtctcaaaatacggacagcttaacatggagcaatgg

SEQ ID NO: 167338 - DNA, 469 bp, Homo sapiens
cttttacttattaaaatttaacagcctcaggcagatcctccaggaggtattccagaagaaagcattggtataggaagtgagagctccaggccatggaactagactttccagggggacaagatgtggaggtgcaagaaagtgatactggtttttttttttgtttttttttttgtttttttgacacagagtcttgctctgtcacccacctggaaatgcagtggcatgatctttgctcactgcaacatctgcctccagggttcaagcaatcctcctgcctcagtytcccgagtaggaaactgatgatcttgtccccttgtaggcccaggccaacgtgtgtgtttctgtcttagtttttaacaataaacttcaaaaggtaaaaaaattaaaaagtaaaaaacagaacaatcttaaagaataaggatataaagaaaattttgtacagctgttaggctaaatattattatacaag

SEQ ID NO: 167339 - DNA, 239 bp, Homo sapiens
gtgcttttactcagggccctcataggccttggcaatggccctctttctcarttactctaacccttcctgcctagcgtatgtactccttctgtctatcctctgtttgaagtgggtcacactatccactgtggattcattacagatgtgaaagaaaatgaagtggattaaatctttattaagattgcttctccctctgaagaaaagttccccacctaaagtgtttttgtttgctggcaatc

SEQ ID NO: 167340 - DNA, 530 bp, Homo sapiens
tcctttccctcacaaactaaggtgggtacttcccaccatggactcctagagcaccctgtaataggaatcataacatcttattactgttgcttgcttaattatcagttttccccactggaccataaagtctatgaagacaagcatcacgtcagtcttgctcaccattttattctcagggacctggaaaattctaagaatgttacaaatagtcaataaatgaaggaaggaagggaagaaagaaggaaatgaaggcaaatagaatgactactataaagaagatagtaagaaatgctgtgaggtatggagaaaagagaactgttacatactgttkgtgggaatgtaaatttggacatccattatggaaaacagtatggaagttcctcaaaaagctagaaatataactactgtatgatccagtaatcccagtacagggtatgtatccacaagaaaataagtatgccaaagagatacctgcactctcatgctcactgcagtactattcacaatagtcaagttatgaaatcaacctg

SEQ ID NO: 167341 - DNA, 518 bp, Homo sapiens
ggagaattggaatatcagtatcatttaaaattaaagacgtgtaagcaggcatttctggagatgttagaaaagtaattgtctgtaaattgtttgaccttgagatttaattgcatgcacaacacacattctagcaagagccctggactgtcttcattcttttacctccaaacctctcactccacagggcccattaggctacctgtggctttatcagtaaaatattaaagattttggccttcaatttaaaaaaaaacctttgaagcatttctcagtatactaaaaatttaaagcaaacatgcttatcaatcagaataccaattttactacatatttctaaaagcatacatactatagycatgtttgaaagctaagtttaaatctcatccaccccccttcttttctgctaacaagtttgcatattttgccttattccctttttccctaatgagacagcttatgctttcaaagtccctcaagctaggcaaatctctgcaccgcttccactgttaataatgaaa

SEQ ID NO: 167342 - DNA, 484 bp, Homo sapiens
tggtcttgaactcctgggttcaagagatcctcctgctttgaccttacaaagtgctaagatcacaggcgtgagccaccacaacaagccccctgtagtgaatttttcaataccagaagttccatttggttctttcttaatatagcagctatgtcatcttcagtttctgaattgtttttctgatttcttcatgttggatttcagcttccttctgggtcccattcagtttctttgccacccatattctgaattatctgtcatttcagaatttttattctggttaggatccattgctggggaactagtgggatcatttagagatgatgaaacactctggctttttstattgccagagttcttgcactgttcattctcatctaagagagctgatacttctctctctcttttttttttttagtttgctatcatttggatggggcgtcttgatttgttattcttttttcccttgtgggtatgactgtggtgt

SEQ ID NO: 167343 - DNA, 529 bp, Homo sapiens
atagtgtggcagtaaacaagacacgtgcaagtatctttttggtagaataattccttttcccctgggtatatcccagtaatrggattgctgggttgaatactagttctatctttagttctttgagaaatcttcaaactgctttccacagcagctaaactaatttacattcccaccagcagtgtataagtgttccctcttctctgctggcttaccattttgatttgtcctatagacaaacccatctgcttctaaaggttaatggagaatcagaaaaattaaaatttcaattggcaaaacaaatgaaagtttctgtatgatacatagttatccaaatatgtgatcgttttatatgtaaaatatgaactccaacaagtgattgcttttgtttcttagatgggtagcctatgaaaatcctgacttcacaggagaacagtatatactggataaaggattttataccagttttgaggactggggaggcaaaaattgtaagatctcttctgttcaacctatatgtttggtaaggagt

SEQ ID NO: 167344 - DNA, 529 bp, Homo sapiens
atagtgtggcagtaaacaagacacgtgcaagtatctttttggtagaataattccttttcccctgggtatatcccagtaataggattgctgggttgaatactagttctatctttagttctttgagaaatcttcaaactgctttccacagcagctaaactaatttacattcccaccagcagtgtataartgttccctcttctctgctggcttaccattttgatttgtcctatagacaaacccatctgcttctaaaggttaatggagaatcagaaaaattaaaatttcaattggcaaaacaaatgaaagtttctgtatgatacatagttatccaaatatgtgatcgttttatatgtaaaatatgaactccaacaagtgattgcttttgtttcttagatgggtagcctatgaaaatcctgacttcacaggagaacagtatatactggataaaggattttataccagttttgaggactggggaggcaaaaattgtaagatctcttctgttcaacctatatgtttggtaaggagt

SEQ ID NO: 167345 - DNA, 579 bp, Homo sapiens
agagcagaagccactggttctgaaaggcagccagcatctgtttgtacatctgctttatcatcttggttaggctgaggaccaagagcttgattctcagaagagtctccattcattcctctggttgctggcagaatctcttcttccgagacggtaactttggtttctatagcagtttccttaaccagcacaccattctggggactgtttggcattactttcttttcaggttgctccatttctttggcttttttggctaaattcagctttgccctcccaacaaacgttttactagaggcaggagtattccttkggcctcgaatgtcagtgtgtcttgggctactgtttgtccgtttgttttcaaataaggagattttggtggcagtgttgcctttgtgaactggctggctaaatggattgtgctcatttcccaaactgtcaagattcttaggggttttaagatttagttccacatgtttgggcttggcagggctgtgaggaaaaagcaggaagataaagttattgacctagttttaaaaagtgaacacacaaaccaattaattataaaactatgaaaagcca

SEQ ID NO: 167346 - DNA, 553 bp, Homo sapiens
acatgcattttaagaacatcccaccttggaactcccttgtacattttgaataaagaatagaatcagctcatgtcaggccatgaggtcttatctctcatctacataaacgttgagcttcaacggatatcctatttttacattcgttaaacttaaatcttgtgttaaaaagggaattaactgaggaggctgccacaggtgtcatcttaaatcttgactgtgtaaactggcccttcactatcttaagttcagcatggaggggaaagttcagtgaccagacgtttcttccacaatgcagataccccgagcctctcagagcggacccccagcacrtgtgcggacagcaactcggccgggacttgcgcggctacttacagggtcactttagtggtcactgtcgacctgcccacgccgaaatggttcctgggcttcaagccgtcggcgtcagaagctccaggcgctccggccgctctgcccagctctctgcttcgacctccctctgcccggccgttgaagtggttggggagcgggcccctcttgtgctcgggcttgatct

SEQ ID NO: 167347 - DNA, 267 bp, Homo sapiens
atgcttagtataggcattaaaacaaatttttttttttttttttggctattagatgctttttacaaaactggttgcttgctcttcaacttggctcaactacttgactcctcctcccctcagaggggcagcctgtttatcaccagccagactgctgaatttcctaaaaatacatgaatgttcatagtggcttcattcattcayaatagctaaaaactggaaacagctcaaagtcaccggacatggcttgtgaacagataaacaaattgt

SEQ ID NO: 167348 - DNA, 569 bp, Homo sapiens
tgagggaggagaatggacagaatactgactggaacgttaattcgagcatttcatatgcgaagagcggaataacagttccgtattcttctttcagtttctccattagattagcttcattttcgaatgctccgttttgcatgcttaattttgaaactagcccgtggtttggcagaatttgactgaattcaggggtgagagtttgatccagtccaagtgtatttgaatttgagcacgcagttcaaccagtgtttacaatggaatttctgaagacttgtgtacttagaagaaatgcatgcactgcggtttgcttctggagaagcaaagttgtccaaaagccttcagttagaaggattagtactacctctccwaggagcactgtcatgcctgcttgggtgatagataaatatgggaagaatgaagtgcttcgattcactcagaacatgatgatgcctatcatacactatccaaatgaagtcattgtcaaagttcacgctgccagtgtaaatcctatagacgttaatatgagaagtaagttttcaaaagacattgttaccttttttaaaaaaatc

SEQ ID NO: 167349 - DNA, 569 bp, Homo sapiens
tgagggaggagaatggacagaatactgactggaacgttaattcgagcatttcatatgcgaagagcggaataacagttccgtattcttctttcagtttctccattagattagcttcattttcgaatgctccgttttgcatgcttaattttgaaactagcccgtggtttggcagaatttgactgaattcaggggtgagagtttgatccagtccaagtgtatttgaatttgagcacgcagttcaaccagtgtttacaatggaatttctgaagacttgtgtacttagaagaaatgcatgcactgcggtttgcttctggagaagcaaagttgtccaaaagccttcagttagaaggattagtactacctctcctaggagcactgtcatgcctgcttgggtgatagataaatatgggaagaatgaagtgcttcgattcactcagaacatgatgatgcctatyatacactatccaaatgaagtcattgtcaaagttcacgctgccagtgtaaatcctatagacgttaatatgagaagtaagttttcaaaagacattgttaccttttttaaaaaaatc

SEQ ID NO: 167350 - DNA, 373 bp, Homo sapiens
gaagggggtgattgaaatgaagatgatgtcaacttatttttttccccacaatttagctttgggctggccctgttgctgacacctcattcttctgtagcagccatagtttatctatttctgttcctttaactcccagtgagaaacaacwatccaaatacttcagtaagagttttctcctctttcctctaccgtctgagatctaactagggaatgttagataaaaggtaccaccagtctcttcaccaggaaatatcaagtaccctggggataggggtggacatttgttccggcacctccagaacgctgagtcccataacccagcttgtcagtgggcgagacaaaggcaggtgtcaggaatcaaaagtacaatgac

SEQ ID NO: 167351 - DNA, 404 bp, Homo sapiens
tatatatgtttatcagagaaatcaacaaatgcttgtaaaacaaatctctctcccacatctaaatctgaatacagataagtaactgaggccagaacccaaggatgtttaggtcataggtccaggcctccacaatccgttgaaggaagccacacaccattactctccttatcagcatttcttcaacattacttgctcaattctcgcaaacttatataactttttatacaatagatgtgtttatggaaaatgtgtataaatcaatttttctaaagaaagaatcaaattttgactgtaccggggagtttggtgttgaaacaacctttaaaacaaagtagtaattytgctaacagtgccgaaatagccttagaatttaccttgtgtttgaatacagattttatattggg

SEQ ID NO: 167352 - DNA, 483 bp, Homo sapiens
catgtatcttgttaaagaaaggagcaagagaatggggctgacaggagtgtggaaacaatacatgcctgtaaagatgaagcttggctttctggattggtacttacattgcaccacaatctaagccccacttggttttccaattttttctccyaccagttctccacattaaccccagatccagacctagaagtgcttcgtcatctgccacagtttcaatgtggcctctccaaaagtcaggctttgctaatgtggtggtattaaaaggtggggcctttaagaggtgatcaggccaggagggctcctccctcattaatgggattaaggcccaaataaaagaggctgcttttggctagcttgccctctgccttctgctatgtgataatgaagcaagaaggatctcaccagaccaaatgctggtgccttgatcttggacttcccagccttcagaactgtgagaaacaaattcctgttctttataaatta

SEQ ID NO: 167353 - DNA, 492 bp, Homo sapiens
gaagcctagccaggggagggggtgtgtgtacctcccaccaacacacacatcatgaaaactaaccattggaaagaagaccctgtctgagagtgagtttcctctctgactatccattagtagagaccaggatttctgactgtgtttggttttccctaattatttctgacattcaggcaagtaataaatttttttcccttgtgttctaggtaggagaccacacacacagagacacacacacatatgcatctatcaaargatcctcttttgtctctctctgcttttctccatggtgcttaatgcatgacccacggtgggctgtttgccttcctgaacttccgtcattgtgacctctcacacgcagtgattgtgagctcccagcgaccagagacaagagcctaagtcccagttccatcagttaccatcttgtgactttgggtgggtcactgaacctctctaagcaatattctcctcatttgagataatacagattcc

SEQ ID NO: 167354 - DNA, 527 bp, Homo sapiens
taagatcttaccagcagccaaagagttcaataaaccttaaaagctacctgtaaatgaaatgcagccatgttcttcttttaaaaggaatagagaagtcagaaaataacaataacaagtatcactgtatacagccatatcagtacaaytggatccataggactcactcactggttacttttccttctgctttttggtttgaaattacatcaaagacattaccgacttctcacaaaaatcaacatcttagaactacacattaaaggctattaattctgacactgttctgaacagtggttactgtcagcataaacagtggctacttcttattaatgtatgaaaaaaatctttcacttaacgactaaactgaatataagtttggaatggattaaaggataatccacttacgtactttacatacaaagatttttctgctagtctgacctgtaaggtcagagactgaataagccactttggaaattttgtatcacagtagccttcaaatagagatacctcatctaacagcccga

SEQ ID NO: 167355 - DNA, 492 bp, Homo sapiens
aaacaatgaatggcacaattagataaaggaggaaaagatttggatggaaggagctaaccaggatttacacaagaatgtggacactaawtccattttgaagaagagataggagggatgggtctttcacctttcagagaaatgctttacttcctccatgctttccaagccttgactctgggaatgttagtttgtgcatggaaagcgtgtggttgtgtgtcgagagtaggatggggatgatggtagagacggacagtccaaatagttatctgttagagtcacagaagaataggaaactgtggccacagcttacccaggtggagacatctcagatgaaaccagactcacagtgcccctcctggacattctgtgccagcagatgtagattaccaaagcccaccctgaattcctagtttgagtcccagtggagggtaattctagagtgaacaacccaggcttggggaaacaaagcttcagaaaaaggtgagtctgact

SEQ ID NO: 167356 - DNA, 530 bp, Homo sapiens
tatgtatacacatagtttctcttcgctagaacgtatgcttcaccagagcaaggatttttatctgttttgtacactaacttattccaagtgcctaaaataggacctgacatgaatctattctcagtagacatttgttgaatgaatataaaaagttcatgctgrgtgaaagatagaatttcactattagctctaatgcagtccaattaaacttttcccatcattttatttcgtggacataaaatcattgggacaggaagccccagaggagaaacatggaacatacaagtagctcccagaatagccagtgctcagcatccttgtatgatgcctccaaaaatttggaaccccaagattatttatccccacaatcaaataatctctggaacactttcttaccattaagtaaaatgtttagggaggaaaaactcccacctgaactaccctccccacacccattatcattctaccctgttcacaaccttcccctgaaactttcttcccaacagagcaaaatcaaataaagcataaag

SEQ ID NO: 167357 - DNA, 664 bp, Homo sapiens
cttgaggaaattaattaattcatcactgctgacaatgttcatttgaccctaacaaacacacacacacacacacacacacacacacacacacaccccttggttgggctggggaatggtttcagaatacagaaactttccatcaaacaggaaagtctacttagagccaatccttaaaaaaattgtggtgargcaacagtgcactaaacaagatggctaaatgggtcatcatttaatttttagatacttatgcattttgaagaacaaatagacttcctattccaaaatagctcaattatgttttgattgcaacatcagattttccaaggatcttggatctcaaatactgtaatcatttatacataaattgatcattactttacaaaaataaaaacttgctgtggcagtggtatagtgtgggcatatgtggagttttctgtcgtccctgagatttcacaataggcgtagctctattgtttttggaaaacatgttgttggattctggatgatttaaggcatctgcagtcttccaggtaaggaagaggagaaatatgctggtgctgtgactctgcagagccgcatcaaaacagggtcttgtatgtagcagctcacccatccctttgacctttagcagatggttttcctgtgcgtacttggcatcactggc

SEQ ID NO: 167358 - DNA, 581 bp, Homo sapiens
ttttagatacttatgcattttgaagaacaaatagacttcctattccaaaatagctcaattatgttttgattgcaacatcagattttccaaggatcttggatctcaaatactgtaatcatttatacataaattgatcattactttacaaaaataaaaacttgctgtggcagtggtatagtgtgggcatatgtggagttttctgtcgtccctgagatttcacaataggcgtagctctattgtttttggaaaacatgttgttggattctggatgatttaaggcatctgcagtcttccaggtaaggaagaggagaaatatgctggtgctgtgactctgcagagccgcatcaaracagggtcttgtatgtagcagctcacccatccctttgacctttagcagatggttttcctgtgcgtacttggcatcactggcttcctgagcaaaagcctcataaatgaaagaacattcagtccatttatccaaaactctcctaaggaatacttttttttatataaagtacactcttactgacccattcacactctcgttctgtcacacacagcacaatcctattgagtagtga

SEQ ID NO: 167359 - DNA, 404 bp, Homo sapiens
cttctaccttacccatagctagagttcctcatgaggccctctctttttattgttaggattggttttgattagttagtagcctgcttgctcatctttctaatcccactttcccttctccaatccctcatccacacagcagccagagaggcctttttaaaacaaaaaccagaccacatcatcccccmacttaaaacatttcactgattttccaatgtaaaatcaaatacaaaatccctaatatggtcttgcatcatgggatctctgatgacatctgggacctcatctcatcccaccacaccctcctcatgttccagccacactgacccacttccacttccaggaacttgcccagccttctccttcctcagcccctactctgctctcctcgcatggtcttctccctc

SEQ ID NO: 167360 - DNA, 551 bp, Homo sapiens
tgttgttcaatgtcatttgccaaatgtttcaatttttaaataatcacttacgttaaataaatagaagcatgcattcaaacagtgtgatatgaaattaatactttgttgtaattttaagaagagggataagattttccccaaaaatggaatgaaacttctgcataaaaaccaacaatatactgaaaaataaacagttgcaattactttttttcctacttagtaatacaaagataaattgttctctttggaaatcaaatattttcctaaccactgtgtttctttaattaaactgtattctttatagtgatcaaacataattagcagtaacaagtatttaatgaaaacaaactgctactcccaaacctttactacatgttttgtttaaatcccacagatgctccaaggattactgtatctccrtcacaagtacaaaagcatacaccctccccactctgcccaccccaatttgccaggagcatttaaaacaacaataaaaacaacaaaaacttctataattccaaggactttagttcacattcaaatcctgctcc

SEQ ID NO: 167361 - DNA, 447 bp, Homo sapiens
tccagcgtaggcgacaagagtgagacttcgtctcaaaaaaaggaaaaaaaaaagagaaaataatcttacttcatgagattcagcttatcagtaaactgtttccctacaataaacaccaggaatgtgatagcaaccatttaagcattttatatttaaagagtgacaaagtaatcygaacccattttttccccaaaataaaatatattgtgtttttcacttccctacatgatctctctgtttaccaaatttcagaacagtgagaggtttgaatttttctttttacagtcaaattattaatgttagaaaatgcaatatcttcaggggatagtaatggactcctgaacaaaaatgtaaaattgcctagagatgtaatgtcagttaactagaagtttttatttcccttccaaactgcaatctggcttctatatgaaacaggatcctttgtct

SEQ ID NO: 167362 - DNA, 405 bp, Homo sapiens
gaattttgtcacttttatttttttccagcttatttttcttaaatgtttaatgcctgatactggttgtttacacttgtagcttattttcaataatttcaaaattatgatttatttgggtataatacatttttattttatggtgctctgaaaacaacatcataatcaccaagtgtcctttctatcatgcaaacaagtttgaacaccaatgtaacttaagactccttggaaactataacaattaattcatccaggctgttaaaaatcagtacttcagacagttgcctaatatataaatatctaaaatgtaatcacrtactttgaaatagttaatgcagtattttgtaagttaaagagtagaaatggattacatctccggagggtttggtttattttgtatttacttac

SEQ ID NO: 167363 - DNA, 589 bp, Homo sapiens
ctctgtccagtgcaaagccccggggctgggtcagctcctccagtgaggctgaggcacccctacccctatttttcccatctcctttttttgatcttgggttcagcctggttctgagcacccaactcccttccctargctccttggctccccagataggggctaatacactcatccacactcaggtcttagaatggcaacttctaatggctcaaaaaatcctaagaggagggggcgtgagcagtgcttaccctaagggacttggcccattcgtagtgtgtacaactgactctaggcctttcactcctggagcaagtctttgctttgtctgttttgcctccaaccaatcttttctttttttaaattaaccaaatgaaaaatgtgaactcagagtgtgaaatgacttctccaagtcctaattcagaagaacagatcctggaccaggacccaggggtcctgactcccctcccagtgctcagagcatcatactgcctcttaaagtgcttgaatggtggcagtacaggcatgatggcctttggcaggaagggatccttgatattcctcaaaccaaaccttgccaagccttggtgag

SEQ ID NO: 167364 - DNA, 322 bp, Homo sapiens
aattagggggtgtcatataatctgatccatgaatcaccccgccctctagcttctgtcattactttttgtgttgaggtggttggacaaggcatgggtacctggtttaagccagaccagtcaaaacccttattctgaatttgcatgagtcaggaacccttcatgtggttgtaccttcaacatgtggccttggttgctggggcttggaattgtccatagccatgtagactagagaggcagagggtccaatttgagcagcaaggggaaaaygaagattttaccagggatgagagatgaagggagagaccaaatggcttcctgttct

SEQ ID NO: 167365 - DNA, 543 bp, Homo sapiens
gctgctggagctccagctatcatgtccacgttccagacagaaagattctaagaggaaggaaggaacaaaactcacatgacatctgagtcagcccctttcaggggttttccttgggaccccagtggatgacttggagaggttggaacagcagtttttagttaggcacatgctacctccaaagtgtagggagggtagaatggatatgaggtaggcaactaaaaatctctgctgcaggaggaataaataggaaaaattagcatcttttcctcattagattttactttttaaaaattaaaaaaattataaagattagcgaatgaagtcaatgtattaagaaaaccaagagtgttttaagccgaaatcatttagttgcaaggaacagaaagctacttggttgctttaagtaaaacagaatttattgtaatgattcatgggaatatcccaratactgagtacaggaagctggtgggcccacaaggccctggagccagaaacagggaacctggctcaaggttttgatttttctcttcccttcctcttctt

SEQ ID NO: 167366 - DNA, 543 bp, Homo sapiens
gctgctggagctccagctatcatgtccacgttccagacagaaagattctaagaggaaggaaggaacaaaactcacatgacatctgagtcagcccctttcaggggttttccttgggaccccagtggatgacttggagaggttggaacagcagtttttagttaggcacatgctacctccaaagtgtagggagggtagaatggatatgaggtaggcaactaaaaatctctgctgcaggaggaataaataggaaaaattagcatcttttcctcattagattttactttttaaaaattaaaaaaattataaagattagcgaatgaagtcaatgtattaagaaaaccaagagtgttttaagccgaaatcatttagttgcaaggaacagaaagctacttggttgctttaagtaaaacagaatttattgtaatgattcatgggaatatcccaaatactgagtacaggaagctggtgggcccacraggccctggagccagaaacagggaacctggctcaaggttttgatttttctcttcccttcctcttctt

SEQ ID NO: 167367 - DNA, 578 bp, Homo sapiens
ccttctcctcactctaaacctttgcaaaaggtagtgcagcagggccttggtaggggctgacctgctgggtccagggcagagcagcggatgtggctggtgcagkgggcacatgggccacaaaccctgatgtggggtccctgtaggcctgagagagttgacacctcatgaggccactaagatttcatgtgtctcatcttcaaccaagggcaggtatttctccctctgcctcagttttcctcttgctgtccccttccttacatcccccatcccacataagaggtgttcactgcaggagggagctctactctgagtgtcggtttggcttgagagaaggcaccaagcaacaggttcaaggggtccctggctgcatagctggcttccttttgaaattctttagcttgagaatgtcctcaataaaaccagactaggattggagcacaactcttaagtaacacttagctcatgatgaaaccagacagcatgtaacactattggttccacgtggggaatctggtttttaaatcaatttggaattccatttgggtggaaagttgggctccacctttgtgacagagggt

SEQ ID NO: 167368 - DNA, 691 bp, Homo sapiens
acttacccaattgtttctatagataacatcactactgtaaaacctaagattgatgatccaggtatttttcggactctgcattctgatggcccagctagcaccatccagaccaataaactggctcatctggtcttgcagccccacccacgaactgattcagcacaataagataagcttcctgtggtttcatcctggatgcaaccaatcagcattcgtcatttcctagttcccttgccctccaaactatccttaaaaacaccctagcctctgaacttttggggaggatgatttgaatgaaaaagaactcctgtacttccacttagccagctctgcattttttaaactctctattgcaaaaacctgctgttctcagtactttggcttttctgggcagtgggtaattacaatatttaatcatttccttaggatatgggcaattacaatatttaaccattttcttaggataagtaactagaggtaacatttctggagcaaatgtgaggmacaattttaagacctaagaaatatacagccaaatcaatcttttacattgtcttttattgatacaaaaacaaattatactgttttttctttcttattattaataagtcttttgatgtttttcctatttatagtttttttttaagcttttaatttgtgaatacttttctattgggcatgcattttagtt

SEQ ID NO: 167369 - DNA, 691 bp, Homo sapiens
acttacccaattgtttctatagataacatcactactgtaaaacctaagattgatgatccaggtatttttcggactctgcattctgatggcccagctagcaccatccagaccaataaactggctcatctggtcttgcagccccacccacgaactgattcagcacaataagataagcttcctgtggtttcatcctggatgcaaccaatcagcattcgtcatttcctagttcccttgccctccaaactatccttaaaaacaccctagcctctgaacttttggggaggatgatttgaatgaaaaagaactcctgtacttccacttagccagctctgcattttttaaactctctattgcaaaaacctgctgttctcagtactttggcttttctgggcagtgggtaattacaatatttaatcatttccttaggatatgggcaattacaatatttaaccattttcttaggataagtaactagaggtaacatttctggagcaaatgtgaggcacaattttaagacctaagaaatatacagccaaatcaatcttttacattgtcttttattgatacaaaaacaaattatactgttttttctttcttattattaataagtcttwtgatgtttttcctatttatagtttttttttaagcttttaatttgtgaatacttttctattgggcatgcattttagtt

SEQ ID NO: 167370 - DNA, 402 bp, Homo sapiens
tttagcatagtatattcattacatgtttgagaaggcctgacagtgtgtatacctgacaataccatgagcttattaaaaatcagggccaatgtcttattcatctttgttttccagtccctgtcagagtactttacacaatagcaggctttctatccatgtttgtggaaatgaattagcaattgagcattaatatattgtttggtgataaataaatatacaggttctcaactcagagaaatcactgaagacctgatgttcagagaactttrttttctaaaaatgtaagtggtgaatagccatatacaactaaagatatgttcctgtatgcttttctttttttctgtttcctctcattcttgccctcatttttttttttttttttaacatagtccatgttttgct

SEQ ID NO: 167371 - DNA, 402 bp, Homo sapiens
tttagcatagtatattcattacatgtttgagaaggcctgacagtgtgtatacctgacaataccatgagcttattaaaaatcagggccaatgtcttattcatctttgttttccagtccctgtcagagtactttacacaatagcaggctttctatccatgtttgtggaaatgaattagcaattgagcattaatatattgtttggtgataaataaatatacaggttctcaactcagagaaatcactgaagacctgatgttcagagaactttgttttctaaaaatgtaagtggygaatagccatatacaactaaagatatgttcctgtatgcttttctttttttctgtttcctctcattcttgccctcatttttttttttttttttaacatagtccatgttttgct

SEQ ID NO: 167372 - DNA, 469 bp, Homo sapiens
agagtggctcatgtccatgctgcagattgcacacaaaggactactaaayacacatttagttttagtcctctttctaatttgaaacaatgctgaagcacaaaaagaatgcccaatctacaatagtaagacccagcaaaacaaaaaccagctttagagtaaaatgccccggagggttggtttggtattcctgactgtttgatctttggtaaattggccttctccgagctgcaccttcctaagtaggaatgatgataacaatacaataaatagacattgtgaggattacacgaattaaatggcatagtgtacactgaaagcgaatccccaaacttgcccctgaacctccataaaagccgctaccatgtgaccagttgcacaaggcaaaattgttaaactcttctttgacttttctttttctgtattcacctgcagcccagcactattctgattcaaccttaaaacataatgt

SEQ ID NO: 167373 - DNA, 469 bp, Homo sapiens
agagtggctcatgtccatgctgcagattgcacacaaaggactactaaacacacatttagttttagtcctctttctaatttgaaacaatgctgaagcacaaaaagaatgcccaatctacaatagtaagacccagcaaaacaaaaaccagckttagagtaaaatgccccggagggttggtttggtattcctgactgtttgatctttggtaaattggccttctccgagctgcaccttcctaagtaggaatgatgataacaatacaataaatagacattgtgaggattacacgaattaaatggcatagtgtacactgaaagcgaatccccaaacttgcccctgaacctccataaaagccgctaccatgtgaccagttgcacaaggcaaaattgttaaactcttctttgacttttctttttctgtattcacctgcagcccagcactattctgattcaaccttaaaacataatgt

SEQ ID NO: 167374 - DNA, 469 bp, Homo sapiens
agagtggctcatgtccatgctgcagattgcacacaaaggactactaaacacacatttagttttagtcctctttctaatttgaaacaatgctgaagcacaaaaagaatgcccaatctacaatagtaagacccagcaaaacaaaaaccagctttagagtaaaatgccccggagggttggtttggtattcctgactgtttgatctttggtaaattggccttctccgagcygcaccttcctaagtaggaatgatgataacaatacaataaatagacattgtgaggattacacgaattaaatggcatagtgtacactgaaagcgaatccccaaacttgcccctgaacctccataaaagccgctaccatgtgaccagttgcacaaggcaaaattgttaaactcttctttgacttttctttttctgtattcacctgcagcccagcactattctgattcaaccttaaaacataatgt

SEQ ID NO: 167375 - DNA, 404 bp, Homo sapiens
agccctggctcttaattaatttccttttgcgaaatgtttgtttgtggggaaatgagacagctgtccagatcttgtcctgatcatcccaaaggactctgtgctkatggtggtggttgcaaactttgtggctctgtggaatattttaagaaggattgtcctgaaagtcagaattcagattttggaatggtcacagttgattgctggtcaaagggagtgagtggagactctgaagaaactggatgacttaaattacagaaatccaaaacaaagatacctaaaattgttattttttgataatgagtaagtactgttgctacttacaacctcattgttactttccaaacaggacatacttcacaaattagagctgggcacccttggagtcaagcctttattgtaggtgt

SEQ ID NO: 167376 - DNA, 579 bp, Homo sapiens
tcaataatagtatctgattttccattcccagtcaccttggtggtaagtagagttgcttaagtttatttagtgttcaataatatagtcacaaagtatactagaaatttcacatagcacaacttcctttgcatcgttttttggctytgacatcagacataagagcgtaagaaagaaaatagggtttaagttcatttctcttcatgtagctgttttaaacaaaagtgaaggattttttccaagacagtattagagaaattttatcactactgaaaaaaatctcaaattatgcaatgtaaaacatagtctctatctgctgttgtgtatatttttaaatggtgttaaaaggaaatacggaagaaataaaactgataacccagttgtttggtgacatatgcaaaaataacatatgccagggctccctacaaggcactataaaaagaaaagcatttcatgaaactaaatgtttctaaaacttagatcagctgagaaattaaatggaatcagttaagttgaatttaagtagtcatgacccctaaggattataatggctgcattttaattatattttttaaaaaacta

SEQ ID NO: 167377 - DNA, 569 bp, Homo sapiens
ttggttcttctttatttcctttggtacctgaatcaaaagtttctagtatttcagtctcagttttgtcatctgtaaaatagaatttatgtcacaaacttggtggaagaataaaataaaatatgtaaaaatattaggcrtatagtaaatgctcaataaatcataattactattattatcatttttactaatagagtatgccctgaagttcagactttgatgtactatgagaatttatggcaagatatcaaattacaggtttttggggggaaataagtaaataaatttatttgcatataaaactagaagcttaaatccaaaattaatggacagttcaaaatatataggcaggtagttaatagttttggttaggttactggtctttgcaaaatgattaggagaatttaaaaagcaaatcggttagaatgaagtgtattcgccattcaggacataggcatgggcaaggacttcatgtctaaaacaccaaaagcaatggcaacaaaagccaaaattgacaaatgggatctaattaaactaaagagcttctgcacagcaaaagaaactaccatcag

SEQ ID NO: 167378 - DNA, 512 bp, Homo sapiens
actttgaaaatatttcagaaacaagtggttatttaaatgcaagctccaatatgataatgaagaaaaggagagacattgcaagacaggagtgaaagatagagcatgcttgtgtttatcctagagctgtattgggattcctataatgattaatgatgcaataatataataagaactcagtggccatgaggcagtggcatttgcaaataaagaataagatcggaaagtaatcagyagcaactccgaacttagttaaggtttcaagttatgcaccattttttatatcatgttagttcatttcctttcatattactaccctaaatcattttgctctaaggaagaaagaacagctgagttgagtatgaagattaacgggcagtgtatctattcctgtttgcaaggatgagtacctaaagttgagaaagcagatcagaacttcttgggttttcaaattggactggaaaatttcccaagaacaggttttctgctaaacatacatcctaccctggtcaaac

SEQ ID NO: 167379 - DNA, 546 bp, Homo sapiens
ataaccctacaatggcctctaaatgttcacatgaaaggaagagtcacagttctatcattttaagtcaaaagctagaaatgaggcagggtgcagtggctcatgcctataatcccagcactttggaaggctgagacgggaggatcacatraggccaggagtttgagaccagcctggccaacatggtgtaaccctatctctattaaaaataaaaaaaatagctgggcatggtggtgcacgtctacagtcctagctactcgggaagctgaggcatgagaattgcttgaacctgggaggtggaggttgcagtgagccaagattgtgccaccgcacgccagcctggatgacagcgtgagactctctttctcaaaaaaaaaaaaaaaagctagaaatgattaagcttggcgaggaagtcatgctaaaacctgtgatagactgaaagctagatttcttgtgccaaacagccaagtagtgaatgcaaaggaaaagtttttgaagggaattaaaagtgctattccaatgaacacatggatggtaagaaagtgaaac

SEQ ID NO: 167380 - DNA, 503 bp, Homo sapiens
ctcatgaatcaaggagtcattttgactttaaatcttcctatttaagttatgcatttcataaggccacagctgccatcgatagtgattcctctaatggatctgggcaaagtaaattgaaaaccttctggaagaattcactgttctagatgcccttcagaacatctgtgactratgggaggaagtcaaaatatcaacattaacaggagtttggaagaagttgattccaaccttcgtgtatgattttagagttaagatttcactggaggcggtcactgcagatatggtgaaaatagcaagaaaactaaaactaaagagaaacccgaagatttgactgaatttttgcagtctcatgataaaactgaatagatgaagagttccctcttcagaatgaccagagaaagtggtttcttgagatggaatctactcctgataaagatgttacgaatattgttgaaatgacaaccaaggctttagaatattatgtaaacttagttgaaaaagta

SEQ ID NO: 167381 - DNA, 503 bp, Homo sapiens
ctcatgaatcaaggagtcattttgactttaaatcttcctatttaagttatgcatttcataaggccacagctgccatcgatagtgattcctctaatggatctgggcaaagtaaattgaaaaccttctggaagaattcactgttctagatgcccttcagaacatctgtgactaatgggaggaagtcaaaatatcaacattaacaggagtttggaagaagttgattccaaccttcgtgtatgattttagagttaagatttcactggaggcggtcactgcagatatggtgaaaatagcaagaraactaaaactaaagagaaacccgaagatttgactgaatttttgcagtctcatgataaaactgaatagatgaagagttccctcttcagaatgaccagagaaagtggtttcttgagatggaatctactcctgataaagatgttacgaatattgttgaaatgacaaccaaggctttagaatattatgtaaacttagttgaaaaagta

SEQ ID NO: 167382 - DNA, 503 bp, Homo sapiens
ctcatgaatcaaggagtcattttgactttaaatcttcctatttaagttatgcatttcataaggccacagctgccatcgatagtgattcctctaatggatctgggcaaagtaaattgaaaaccttctggaagaattcactgttctagatgcccttcagaacatctgtgactaatgggaggaagtcaaaatatcaacattaacaggagtttggaagaagttgattccaaccttcgtgtatgattttagagttaagatttcactggaggcggtcactgcagatatggtgaaaatagcaagaaaactaaaactaaagagaaacccgaagatttgactgaatttttgcagtctcatgataaaactgaatagatgaagagttccctcttcagaatgaccagagaaagtggtttcttgagatggaatctactcctgataaagatgttacgaatattgttgaaatgacraccaaggctttagaatattatgtaaacttagttgaaaaagta

SEQ ID NO: 167383 - DNA, 613 bp, Homo sapiens
aaacggccttggaagacagataccatattaccttctgaatcagagggcagactcatttattatctagtaaaatgtcttttccaagtcaaattcgatgcaggttaacttgttgccaaatataaatgatttgatttccttaatattggtgtttcttatttatgatgcaaacactgcatgcacagtttctacttggatcaagaraaaccaatgtgaatatgaagtgcatgctgcttgctgtactttgagttaaaaagttctttatttctgatgcaggaatctaatgtcttctgccagcattcagaaaacagtgacaggctaacttgtttgcttggaataagagtagaatttcagagtcttctcagttcatgagaccatttattttggtttgtatcaactaccaaggtaaaacaggactcacaggttaatctggatcctcacactttttaagctctgtacatctatccccttttctgatccattccctcatgccttttcagttcttgaaacacttctacctcagcctttgaaacactcttaatcactagcaaaattcattatattctcaatcccttctctgaatgttctttttactttcttgctctgactgctatct

SEQ ID NO: 167384 - DNA, 390 bp, Homo sapiens
atgacttgagcccaggaattcggagcagcagtaaggtaggatcctgccaatgcgctccaacctgggtkacaaaaggaaactctgtctcaaacaacaacagcaacaaaaataaaccaaaaaccaaaaagacacccacaggtgtactgaaatataaacaacatccagcaaactacaggtttcatgtaaagagggtctccaacttatcatggttcagcttacaatttttcagctttacaatgatacaaaagggatactcatttaggagaaactgtactctgaacttagcattttggtcatttcccaagataactatatgcaataccatactctcctgtgatgctgagcagtggcagcgagccacaactcccagacagccatgtggtcacaaag

SEQ ID NO: 167385 - DNA, 574 bp, Homo sapiens
tacataaagcaatatcatataattaaaatgaagaaaaatcagattgccattaatggttgaaaattacaacacagttaagcaataaaatcagaacacactgcttatcattgaagcctgattagaagagaaaatagtgcataacatatcattgataaaactttttttccatagatataattgtaaaaatgctggatgcctatttgtctatttccaaggggaaaaaaaaacaaaaattgtactattttaaagataacatatagtttataataggtaaacatttagtatgaaaataatactttgatgcaaaatataatgtaagatatatcaatattgttaatttaaagctaccaagatcctattatgtacattgctttatactaggtactttggaaaataaaaaagaaaggtagttggttcttactcttaacaaaaacatactctatctgtcagataacttctataaattaaacacattgtcatagttaatatgtgagatgtatttaacgctttaatcaatccttcttaaagtgtgcatggaggcccccaaasactctttcagggatccctaaggtct

SEQ ID NO: 167386 - DNA, 364 bp, Homo sapiens
tcttcttttatagaaattatgtctcatgggctgggcacggtggctcacacctgtaatcccagtactttgggggacgaggcgggcagatcatgaggtcagggatttgagaccagcctgcacaacatagtgaaaccttatctctactaaaaatacaaaaaattagccaggcatggtggcrggtgcctgtaatcccagttactcgggaggctgaggcaggagaatcgcttgaacccaggaagaagaggttgcagtgagctgagactccaccattgcactccagcctgggcaacagtgcaagactccatctcaaaaaaaagaaagaaaagaaattatatctcataatataaagatagaatattaaata

SEQ ID NO: 167387 - DNA, 411 bp, Homo sapiens
cgccttatactgcataagctggctttgtattctcggggcttgtctggtgtttaaaatacaatttgatttataagagatattcatactctaggagtgagccattttcaacaacagcattcttctccgctcagctgccaaatcaagtagccactccgtatctcttgtttcctgtctctctagatttcccaggtgagaggcagaaacaaatctgctgagtccytctgaatgcagcaaagatttatcaaacttttttcttctcctgagttacgagaaagttatgccactttgttccactagagtgtaggcccttgcaacacagcgctccccagagaaatacttgaagcataacttctctctttatccatgctctttcatacccacaatgtggatagaagaggctggagtcagtaa

SEQ ID NO: 167388 - DNA, 605 bp, Homo sapiens
  misc_feature (1)...(605): n = A,T,C or G
tttacctcatctaaataaacagcattcacagaagcaagttttcctaaaaatagatctaaacaattcacttctgcttggattttcatgcaccatgctacccttctgttattttatatcaaayttctgcatatttgtttttcagtttaccactcccttcatgcctatgaacaaccagtagaagtgaccggattccacagatcttgttaaataaaatttataagaggccatgtttcagacctcctggactagatccccacataccagactatattagaataaagtcacttgtgctagatgtttcataatcaaactgaacataaaaactggccatttgtccaaacaacaggatatttacagcaatcagtctaaaggagcccagtcaacattagctagcatggtagtcctttcttgttttgagtcatatgaggaagtaacctgatattagccaatctgctctttgcactatgncgttttcttgtccctgcttaagctacctcacaaaaactgacaattctgccacacccattggaattctttctattttgtacactggatgctgtctggtctgtgaattgccaataaaatccaattcaatgtctaaaatt

SEQ ID NO: 167389 - DNA, 618 bp, Homo sapiens
tatttttgttagagaacatactttctataatttcaatatttgcacatttaagaaagtttgttttatagcctaacataaattcttgcctaaagaatgtttcatgtgcatttcagataaatgcgtattttgttgttggytgtagtatcatagacatttattatgtcaaattggtagataatgtcatttaagtcttgtattttcttactgatcttctgtctagttattgtattcattattgaaatagatgtattgaattctccaactactactgcttctagttgtctatttctcttttcaattctgtcaagttttgcttcctaaacttggtactgtgttgattggtgaatatgtttacaattattaaatcttcatgatggattgcatttttgttattataaaatgtcctttatctttagtaaaaatttttctattaaagtctgtttttttctgatattggcacagtgactcatgcttttttttttttggagacagagtctcatctgtcacacaggctggagtgcaatagcacaatctcggctcactgcaacctccgcctcctgagctcaagcgattctcctacctcctaccaagcagctgggattacagggatgtgccacc

SEQ ID NO: 167390 - DNA, 549 bp, Homo sapiens
taaaaagaaaccaacagaaatcttagagctaaagaatacaatactcaactaaaaaaattcaatagaggatttaacagcaaactacagcaagcagaaataaaagactaagtgaacttaaagataggtcatatgatattgtacagwcagaagagcaaaaacagagaagaatgaaaaagaataaaaatagcttaaaagagttatgggacactctcaagcagaccaatatatgcatatggaaataccagcaggagaagagagataagcaccagaaagcttactaaaagaaataacagctgaaaactttgtaaatctgtgtaggagatggacattcagccttaagaatcctaaaggattccaagtaaaataaacccaaggaaatttacaccttaggttcacacaccaagacacattgtaatcaaattgtgaaaaacaaagagagaatttttaaagcagcatgagaaaagtgacttgtgatgtataagggaaccttgataataccatcatgaaatttttctgcagaaaccttgcagtccagaagggattagaatg

SEQ ID NO: 167391 - DNA, 557 bp, Homo sapiens
gggcttgctttgattttctgaattttaacaagcataaattatatttccatttgatcactatcatggacactaggtttttaaaacaagtctttgtggacatcatcattttcagaaattttgtatctgctgttgtgtaaaaccgattatgtgatctacaatctccacatgcgattcttgattgttactcaacrtgtcagaaatatttaatgaaaccttttagaaatagcaaaccacatatgtaaggagaatctgaacatgtttagcacttgtaacatctgaatgtttatggatgtaaaaaaattatcccctaggaaatacgttgcttagatagggaggttttaacttcagcaagtagactttataaacagatgggatcacagtcatttctatttcaggacaccatgtcattctgtatgtgccaccatgctacagcagtttcttcccaccagcctagtcacgtcagtcattcaccttctggtacttcagggtttcattagctcatagctgcctgaccttgtgatgggtgcaagtcgacaggtagttcataaccctttgct

SEQ ID NO: 167392 - DNA, 490 bp, Homo sapiens
ttttttttttttttgagacggagtctcgctctgtcgctcaggctggagtgcagtggcacgatctcagctcactgcaacctccacttcccgggtcacgcgattctcctgcctcagcctcytgagtagctgggactgcaggtgcacgtcgccatgcctggctaattttttttttttttttttttggtatttctagtagagacagagtttcgccatgttaggcaggctggtcttgaactcctgacctcaggtgatccgcccgcctcggcctcccaaagtgctgggattacaggtgtgagccactgggtccggtctcctacaaattttatttgatgcacgcatgtgtgtgggagtcatacaaaatataaaaactcaaagaaatgcccaatggttgcttttataccaccttgaggttacagaaagaatgagagcttgcatctgggcaaaacaggttatggtggcaagacaggttatgggagggggagaagaagag

SEQ ID NO: 167393 - DNA, 490 bp, Homo sapiens
ttttttttttttttgagacggagtctcgctctgtcgctcaggctggagtgcagtggcacgatctcagctcactgcaacctccacttcccgggtcacgcgattctcctgcctcagcctcctgagtagctgggactgcaggtgcacgtcgccatgcctggctaattttttttttttttttttttggtatttctagtagagacagagtttcgccatgttaggcaggctggtcttgaactcctgacytcaggtgatccgcccgcctcggcctcccaaagtgctgggattacaggtgtgagccactgggtccggtctcctacaaattttatttgatgcacgcatgtgtgtgggagtcatacaaaatataaaaactcaaagaaatgcccaatggttgcttttataccaccttgaggttacagaaagaatgagagcttgcatctgggcaaaacaggttatggtggcaagacaggttatgggagggggagaagaagag

SEQ ID NO: 167394 - DNA, 490 bp, Homo sapiens
ttttttttttttttgagacggagtctcgctctgtcgctcaggctggagtgcagtggcacgatctcagctcactgcaacctccacttcccgggtcacgcgattctcctgcctcagcctcctgagtagctgggactgcaggtgcacgtcgccatgcctggctaattttttttttttttttttttggtatttctagtagagacagagtttcgccatgttaggcaggctggtcttgaactcctgacctcaggtgatccgcccgcytcggcctcccaaagtgctgggattacaggtgtgagccactgggtccggtctcctacaaattttatttgatgcacgcatgtgtgtgggagtcatacaaaatataaaaactcaaagaaatgcccaatggttgcttttataccaccttgaggttacagaaagaatgagagcttgcatctgggcaaaacaggttatggtggcaagacaggttatgggagggggagaagaagag

SEQ ID NO: 167395 - DNA, 458 bp, Homo sapiens
aagatataatacaaagagcctgaaatcaaggaagctaaaaaagaaaagaggggtaactagggtagaaagttctcagaagaaggaggtgccgaagggatgtcaaatatagtaggtaagaaagctttagagggaagaaaaaactttcaggggaaaaaaaagcagaaaaayatagacgcagggaactgttgggaaaagttagagttatagaaaggaactaaccctagaaggtttctacgattttcattttatgggggtgagatcatcccttgaaggcaaaaagagagtagaggtagatgagaataccctgtttaactgtggtggggagttttgtatgttgtcagtgctatctgcaacatctatgggtgcactgtggtgtgtgcattataaatcatttttatataatgagattataaatttgatacaaagagatagccatagcttctccctcataaattata

SEQ ID NO: 167396 - DNA, 372 bp, Homo sapiens
gcagaatatgattaatgatatatccaagcagaagtccccaaggaaaacatcatctcttaattctgattatcctaatgaaatggtacagttcataattcattaatctgactgcagtgacaaaaataggatgcaagaaaaaagagtacttctatagtgtccaaagagacaaagctgagataattcattagcaatagcatatgcttaaaattcactatgttctgctgcatagtgcaaggttttctgtaaaaaagtaaaagcaagaaacacattatgttyctctttttgaagaaaatgatcaccttcaaagaagccaacagaactcttatttaaaatattcttgtttctccatgaaaaaaatttcctacacaatag

SEQ ID NO: 167397 - DNA, 548 bp, Homo sapiens
tattattggtttaattatttatatagttttatgacatatatatggttttacttattgactcactcatttcagtatattgttacagaataggtaggcagagggcaagacgccagggagaaaacagtgaacacggtcaaggagatgtctcaggggaccaaacaatccaatgagaaatacagaggagaaaacaagaaattacaataaactacaataaattctttggaaaggtatacattttcctcccttgctagttttcaagctccttgagtataaaaactatgttttattcatctttgtatcytcagcatctaagattgtgttttgtataaaataggcacttaataaatgttggctgaataaatgaatggctgtatttgtgtgggagggtttaaggtgagcgggatgggaggtgagtgtgatgtgtgtgtatatgtgctttatgtgtttgtggtctgtggtacatgtgatgtgtggtttgcgtgtggggtgtgtgtggtatgtgcgggggtgtataggtgtggagtgtgtgtgatatgtgtgtggtttgt

SEQ ID NO: 167398 - DNA, 581 bp, Homo sapiens
atacttatgcacttatgaaatacactgccagaaatactttaacaattagctgtttgttttatccaaaagagattttaactaagacatggtttgtacagttgatgcaaaagcctrtttttagtagctaagatatttcccaaactagtcgactacattacgattgaatagatgtgctgacaaagcagcaggttttacatgtagtagcatttttgtaaaccagataggaggagtttccaaactcaaagacttttaaggtgtgtacacatagcatatgcagtctgtaaggcagtggatgataagttgtttataggcttatacaagcacaacacctctctagttttatgtcctttaaaacaatatgtgggcctatcagtcaagcaaaatatattctaaggggtatattgctcaacagctgctggtttgagagcactgacattaccattttcatttagactgctagcatttttagttttaactttctgtgatgactatgtgttcaattcaattttgaatacaactatatttacaaattataatgatcaaatgatttaagagtaacacagagaatgttggttcattta

SEQ ID NO: 167399 - DNA, 298 bp, Homo sapiens
ctgctattttcattttaagagacaatttctaccttcagaaatcctcagaaaatgaaactgaacccaaagtgaagagaatagtttacacwcatagacattgtaagcaatgaattattagggtaaaacaatgcaaggttttccatggtatcaaatttcttctcagacaggaaactaaaatacaaaatctaggataatttggccatgaaacaataaataaataaataacaggcaagaatgacaatcaaggtaattctccctctaaatggaaagtaatttctccaatccaaagctcaaataa

SEQ ID NO: 167400 - DNA, 423 bp, Homo sapiens
caatttactttgcccagatccgtcacaggaagtactatctatggtagctagagcttttcaaaatgtattscttaaataataagatgtgaaagtcaaaattgtttcttggcccatggggctgaagaatgaatactgttagcaggcatgaaaacattaatctccttgtatatctttatcagagctcttgggtaaccagaatcattttttctgagcagtaggcctcaacagtgggattaaagtattcagtataccatgctttcatctaggctttgctgtttcatttatagagcagagaaagagcagagttcgcataatttgtaagggctctaaacttttttaggcattttattttatttatttattttttctattttactttaagttccgggacacatgtgcagaatgtgcaggtttgtagcatag

SEQ ID NO: 167401 - DNA, 590 bp, Homo sapiens
tttttgtttgatgactattcttattttaactaaagaatagttccagtcatgctaacctatgactcaatgaacaaygcaaatgacttaacatgacaattaagtcctataactccctaacactggaattactaaagtgttccccatcacaggaaacaaatgaaaattatcatgctaaaatcatttaagtttaaatgcactgaatatatttttgagttaaaatcgttaagattgggaagagtttaacattttaaatggaaaaacataaaaagaaacatattaattccctttaaaataatctcaacaatgatttttaaattacttcaacatgagttctatatggacttaattggttttagtaactcaatactttccagtctagaatgtcttcagggatctccaattaagtatagttgactcaatttctatttatatgaattatctatagctatgtaataatattaccaaaaaattagcagtttaaacatcccacacttattatctcacagtttccctacatcaggattccagacagggtttagcttgttttccacttcagtgtcttacaaggctgcagtcaaagtgtcagttac

SEQ ID NO: 167402 - DNA, 610 bp, Homo sapiens
ctttgggagatcagaaaggggagaaaaacctctggagaagagatggggttattagctatatagtttccccttcaaaaagcaaagaaggataggatgtgtgtgtgtgtatatacacatcaaggtgagggacaccatgagaaagtatacaaggagggaagtatggggaaattttatttttcttggaacataaaagacttcaaggagaatagtttaaaaatataaacagatgaggattgaatttaattatacacagttccaaaaggcattaccaggaattggattttaattctgtgattaacaaggagtcatgagcatttctggagcaaggaatggggtcatcaaagcactgcttgaaacagttaaggtaatcttttttaaattttttattttattaaattatttctctttgaggtactcacctagcataacrctcaccatttttatatgtaaagtttgttagtttttagtcaaatcacaagattgtgcaactatcaccattatctaattccagaataatttcagcacccaaaaaactagcaaattgttttccatagtagttgcatcatattacatcatcaccagcaatgtaagagagttaatttctccaaat

SEQ ID NO: 167403 - DNA, 634 bp, Homo sapiens
aactgcgactatgattgtattgcccattagcaaactggagatttcattagcagcacagccccttgaagatctaagacaaaattgatgtgagtgaaatgcagaaaaaatattagatagaaggtgatgaagaagagagctttagggaggtggagggaacccagttgcggcaaggaagtgtgcattagacattgaattatgcttcaattttaatcyttccacctacactccttatggtctctccatgtggctcatttttgttctgacttttaagttaagcaacttaacattgtaaattagagaaaattttgttttgtgtaggaacataaagttagatgcctgtaaagggactcagaggtcagcttttggtgattgtgtatatcaactgacaaatagacctttgagcatatttgctctctaggttgccacacctggtttctagtctcatggaaggtctttatattggattacaagaacattgtgactgcaattcacaactaagtatttcagaaacccaacaggtttgctatcatctgacaaagatatatcatcatggaacaagtagtttgtcctatatcaaagaggagatatacaagacaaataaagattaaatagtacactcttataactgtaaacc

SEQ ID NO: 167404 - DNA, 634 bp, Homo sapiens
aactgcgactatgattgtattgcccattagcaaactggagatttcattagcagcacagccccttgaagatctaagacaaaattgatgtgagtgaaatgcagaaaaaatattagatagaaggtgatgaagaagagagctttagggaggtggagggaacccagttgcggcaaggaagtgtgcattagacattgaattatgcttcaattttaatctttccacctacactccttatggtctctccatgtggctcatttttgttctgacttttaagttaagcaacttaacattgtaaattagagaaaattttgttttgygtaggaacataaagttagatgcctgtaaagggactcagaggtcagcttttggtgattgtgtatatcaactgacaaatagacctttgagcatatttgctctctaggttgccacacctggtttctagtctcatggaaggtctttatattggattacaagaacattgtgactgcaattcacaactaagtatttcagaaacccaacaggtttgctatcatctgacaaagatatatcatcatggaacaagtagtttgtcctatatcaaagaggagatatacaagacaaataaagattaaatagtacactcttataactgtaaacc

SEQ ID NO: 167405 - DNA, 421 bp, Homo sapiens
catctggttggctaaaagagaagagaccaaacaatccattgatacatatatatatatcatatatatatataataactctcacctcatatatatatatatatatatatatatatataygtcaccatatttttttagaaaaacaacaaaagacaaatttttaaaaggaagttttagccaatttatattatatatataaatatatatatacacacatatattttgtatatatatgtgtatatatatatatacacacatatatatatatggtgtgtgtgtgtgtgtgtgtgtgtttggattgttcatatgtgtcttagtctgttttccattcctataacagaatagcagtgggtaatttataaggaatttctttttgtacagttttggaggctagaaagtccaagagcacgcgtatcactatcat

SEQ ID NO: 167406 - DNA, 421 bp, Homo sapiens
catctggttggctaaaagagaagagaccaaacaatccattgatacatatatatatatcatatatatatataataactctcacctcatatatatatatatatatatatatatatatacgtcaccatatttttttagaaaaacaacaaaagacaaatttttaaaaggaagttttagccaatttatattatatatataaatatatatatacacacatatattttgtatatatatgtgtatatatatatatacacacatatatatatatggtgtgtgtgtgtgtgtgtgtgtgtttggattgttcatatgtgtcttagtctgttttccattcctataacagaatagcagtgggtaatttataaggaawttctttttgtacagttttggaggctagaaagtccaagagcacgcgtatcactatcat

SEQ ID NO: 167407 - DNA, 545 bp, Homo sapiens
gccctccttattccattaatccaagtttccaacacataaacatttggaggacacatgtaaaccatagcaatgtgtcaacaaaaatgatgacttcgaaaataaaggtttattaatgctaaaataaaatagaaataaatacctatcaactcaataacatcaattttactaatttggtaattttcttttattttttgtcattcttaaaaatcatagattctaaaatgatttgtaggttaaatttttctcatttacagtgttcacagccacaaaattatgcccarctctaaattgtgtactttttgacaaattaatttcaaaagaagttttgataaaatactttcaatgtttttatttcaaatattgtatttacacattatctttaatgtgggatattggtacattttaatgtgattgataagatgtggaggacttagaagaaatgccctaaaaataagtgccttggcttccccgggtcttaaaacaactctgggcactgccttttacaaaagtgcctccagattggtttggatatatgaaaccagtgg

SEQ ID NO: 167408 - DNA, 545 bp, Homo sapiens
gccctccttattccattaatccaagtttccaacacataaacatttggaggacacatgtaaaccatagcaatgtgtcaacaaaaatgatgacttcgaaaataaaggtttattaatgctaaaataaaatagaaataaatacctatcaactcaataacatcaattttactaatttggtaattttcttttattttttgtcattcttaaaaatcatagattctaaaatgatttgtaggttaaatttttctcatttacagtgttcacagccacaaaattatgcccaactctaaattgtgtactttttgacaaattaatttcaaaagaagttttgataaaatactttcaatgtttttatttcaaatattgtatttacacattatctttaatgtgggatattggtacattttaatgtgattgataagatktggaggacttagaagaaatgccctaaaaataagtgccttggcttccccgggtcttaaaacaactctgggcactgccttttacaaaagtgcctccagattggtttggatatatgaaaccagtgg

SEQ ID NO: 167409 - DNA, 604 bp, Homo sapiens
aagcttagaagggaagaatgttatggtggtccaggcccagggcctctctgccctgcacatcctcaggaccctggtccctgcattctagccactccagctccagccatgggtcaaaggagcccagatacagtttgagctactgcttcagaagagcaagctgtaagtctgtttggcttccacgtggtgttaggcctgggggaggagggaacagaatgcaagagttaagacttgggagcccccatctagatttcagagagcatatggaaaagcatggatgtccatgcagaagcctgctttgggggtggagtcctcacagagaacctctaytagagtagcacagatggaaaatatgggtttggagctctgacacagagttcccactggggtactgcctagtgcatctgtgagaatacggccatcaccctctagaccccagaatggtagatccactgacagcttgcaccttgcacctggtaaagccccaggcactgagcaccagcccttgagagcagccatgaagtttaaaccctggaaagctacagaggcagggctacccaaagccataggagcccacctcttacaccagtatgtcctggatgtcaga

SEQ ID NO: 167410 - DNA, 511 bp, Homo sapiens
agatacagtttgagctactgcttcagaagagcaagctgtaagtctgtttggcttccacgtggtgttaggcctgggggaggagggaacagaatgcaagagttaagacttgggagcccccatctagatttcagagagcatatggaaaagcatggatgtccatgcagaagcctgctttgggggtggagtcctcacagagaacctctattagagtagcacagatggaaaatatgggtttggagctctgacacagagttcccactggggtactgcctagtgcatctgtgagaatacggccatcaccctctagaccccagaatggtagatccactgacagcttgcaccttgcacctggtaaagccccaggcactgagcaccagcccttgagagcagccatgaagtttaaaccctggaaagctacagaggcagggctacccaaagccataggagcccacctcttacaccagtaygtcctggatgtcagacagaaagtcaaggagattattttgaagct

SEQ ID NO: 167411 - DNA, 627 bp, Homo sapiens
aaaaataagcaaggaatgatgtgtaggtctgtagcatgtaggatgaggagagccttctagatgagaacagggarggctgttccactgtcaccaatggttataaagatttactaagatgtgttgtgagatgtatattaatatacaaacttgcagttattcaccttcaaggagcctttttaaggtttctcacatccttactaaccctaacacaggttggagtaggtgtttctttgagctgtccaaataatctgaataaatattgacttagttttccattaaaccatgatgactgctttgagaacattactcctagcatcgtagctgggcatatagaatgttgactgaaataactgatgaattaatgataaagtatactgcagaaaagagaggtcgaaaaccagattcaggttttctgaattcaggtttcaataaattctaaatttattgttactgtaagaaactaattctgaacctagtatttgatacaagggaattataaacaaatatgtatatattttttaaaaatattaaaattgatctgcacattctgcacatgtatcccagaacttaaaaaaaaaaaaaggacattcttccatgtaaccacagtctcactcaggaaatgtgaca

SEQ ID NO: 167412 - DNA, 627 bp, Homo sapiens
aaaaataagcaaggaatgatgtgtaggtctgtagcatgtaggatgaggagagccttctagatgagaacagggagggctgttccactstcaccaatggttataaagatttactaagatgtgttgtgagatgtatattaatatacaaacttgcagttattcaccttcaaggagcctttttaaggtttctcacatccttactaaccctaacacaggttggagtaggtgtttctttgagctgtccaaataatctgaataaatattgacttagttttccattaaaccatgatgactgctttgagaacattactcctagcatcgtagctgggcatatagaatgttgactgaaataactgatgaattaatgataaagtatactgcagaaaagagaggtcgaaaaccagattcaggttttctgaattcaggtttcaataaattctaaatttattgttactgtaagaaactaattctgaacctagtatttgatacaagggaattataaacaaatatgtatatattttttaaaaatattaaaattgatctgcacattctgcacatgtatcccagaacttaaaaaaaaaaaaaggacattcttccatgtaaccacagtctcactcaggaaatgtgaca

SEQ ID NO: 167413 - DNA, 627 bp, Homo sapiens
aaaaataagcaaggaatgatgtgtaggtctgtagcatgtaggatgaggagagccttctagatgagaacagggagggctgttccactgtcaccaatggttataaagatttactaagatgtgttgtgagatgtatattaatatacaaacttgcagttattcaccttcaaggagcctttttaaggtttctcacatccttactaaccctaacacaggttggagtaggtgtttctttgagctgtccaaataatctgaataaatattgacttagttttccattaaaccatgatgactgctttgagaacattactcctagcatcgtagctgggcatatagaatgttgactgaaataactgatgaattaatgataaagtayactgcagaaaagagaggtcgaaaaccagattcaggttttctgaattcaggtttcaataaattctaaatttattgttactgtaagaaactaattctgaacctagtatttgatacaagggaattataaacaaatatgtatatattttttaaaaatattaaaattgatctgcacattctgcacatgtatcccagaacttaaaaaaaaaaaaaggacattcttccatgtaaccacagtctcactcaggaaatgtgaca

SEQ ID NO: 167414 - DNA, 627 bp, Homo sapiens
aaaaataagcaaggaatgatgtgtaggtctgtagcatgtaggatgaggagagccttctagatgagaacagggagggctgttccactgtcaccaatggttataaagatttactaagatgtgttgtgagatgtatattaatatacaaacttgcagttattcaccttcaaggagcctttttaaggtttctcacatccttactaaccctaacacaggttggagtaggtgtttctttgagctgtccaaataatctgaataaatattgacttagttttccattaaaccatgatgactgctttgagaacattactcctagcatcgtagctgggcatatagaatgttgactgaaataactgatgaattaatgataaagtatactgcagaaaagagaggtcgaaaaccagattcaggttttctgaattcaggtttcaataaattctaaatttattgttactgtaagaaactaattctgaacctagtatttgatacaagggaattataaacaaayatgtatatattttttaaaaatattaaaattgatctgcacattctgcacatgtatcccagaacttaaaaaaaaaaaaaggacattcttccatgtaaccacagtctcactcaggaaatgtgaca

SEQ ID NO: 167415 - DNA, 473 bp, Homo sapiens
tcagcttagttcttcagtttttctgttgttgtttttataactttcattattattattatwattattacagaattcaggattctatagtcagtcagataacatgaaaccacttaaaatgagtgttagaaatctggctggcacctccctccccctgatgtgatgtttgtatttatagattcacatgcacatcatatgcctactgatatggtttggacatttatcccctccaaatctcatgttgaaatgtaatccccagtgttggaagtggggcctggtgggaggtgtttgaagcatgggggcagatgcctcatgaagtaccctcccttcagtaacaagttcatgcaagatctggttgtttaaaaaggagccgcccctggctgggcgtgatggctcatgcctataatcccagcactttgggaggccaaggtgggtggatcgcttaagatcaggagtttgagaccagcctgagcaac

SEQ ID NO: 167416 - DNA, 633 bp, Homo sapiens
tttaggaagatttacttgtcaacaattcgccagtcctagtcttggtgaatgttttcctatttagattttactacctttcttgcactttaccttaccctcttctatataaatgtctgtgtgtgtgtgtgtgtgagtaccttaccctctactatatatatatgtgtgtgtgtctatgtgtatacacaaacacatatgtgtatgtatacacacaaacacgtatgtgtatgtatacacatatacattttgctaatacataattacatgttgctaattccaagagatatatctgtattccttaggcagatttacttgtcaaccattctccagtcctagtctaggtatgtatttcctgtttagattttattacctttctcttgctttaactaccatatgtatrtatatgtgtatatatacacattcatgtatgtatatgtgtattgtgtatgcatacacacatatgtatatgggtacatgtagatatatctgtatgtatgtatatatatacacacacacacatatgtaaatacagatagatatatctatactcacacatatatctatacgaacacacagagagagagaaggagagacagatttatttgtaggaataggtttatgtgattgtggggtttg

SEQ ID NO: 167417 - DNA, 615 bp, Homo sapiens
aggtatgaatatgagaatgtgcagttagttttcaattctttaaaataaattaatttattccaggtatgcaaatctggctcaatatttgaaaattaattatgtaattcaccatagcaaaggcctaaaaagaaaaaaaaatcacatgatcatattgattaatgcagaaaagaactgacaatttcaattcaaggtaaaacaactaggaacaaagataaattcctcaaggttattaaaaaaacagcttacataacactggtagcagactggatatttggcgctccttcaattctaaaaatatcttctctcaccactcttattcaacattgtactggaagatctattttgtccgcaagagaagaaaataaaaggtatatatattggtaacatgagaaaaamgtatttctttacagataacattattgtctatgtagaagcaatttaattgtccaacaatacaatttgcaacaacaaatattgaaattttggggtataaatctaacaaaatatgtgtggagtttatatgcagaaaactataaaacatggatgtatatcattaaagatctaaattagaaaagagatatttgaggtcatgtattagaagactcaatattgtca

SEQ ID NO: 167418 - DNA, 615 bp, Homo sapiens
aggtatgaatatgagaatgtgcagttagttttcaattctttaaaataaattaatttattccaggtatgcaaatctggctcaatatttgaaaattaattatgtaattcaccatagcaaaggcctaaaaagaaaaaaaaatcacatgatcatattgattaatgcagaaaagaactgacaatttcaattcaaggtaaaacaactaggaacaaagataaattcctcaaggttattaaaaaaacagcttacataacactggtagcagactggatatttggcgctccttcaattctaaaaatatcttctctcaccactcttattcaacattgtactggaagatctattttgtccgcaagagaagaaaataaaaggtatatatattggtaacatgagaaaaaagtatttctttacagataacattattgtctatgtagaagcaatttaattgtccaacaayacaatttgcaacaacaaatattgaaattttggggtataaatctaacaaaatatgtgtggagtttatatgcagaaaactataaaacatggatgtatatcattaaagatctaaattagaaaagagatatttgaggtcatgtattagaagactcaatattgtca

SEQ ID NO: 167419 - DNA, 611 bp, Homo sapiens
ggctacatcaattaatttttgaatatgaaacctaccttacataaatgaaataaatccaacttgtttgtggtatacaaattttctatagattttttgatatgatatattatgattgatatgttaatattggttgaacatttttgcatatatatttattagagccattgcwctatagatttcctcttttgtaatacctttatctagttttggataggataatgctggccttataagaataagtagaaagtgctatttctgcttgtgtgttttgggagttaatttggagaataggtatcatttcttatttaaatattttgtagaatttaccactgaaatttggagttgttgttttatttattggagagttataattattcattcaattgctataatacatatagatcttcctggttattgatgtttccttgtgtgagtttttatagtttgtgtccttcaagaatttttatttcatctacattacaaatatatgggcatatatttgtggaaatcattcctttcttaaccttttaaagtccacaggatcaatagtgatgtcccttctttgttttgatgtagacaatttgtttctctgtcttcttttttttgtcaaa

SEQ ID NO: 167420 - DNA, 611 bp, Homo sapiens
ggctacatcaattaatttttgaatatgaaacctaccttacataaatgaaataaatccaacttgtttgtggtatacaaattttctatagattttttgatatgatatattatgattgatatgttaatattggttgaacatttttgcatatatatttattagagccattgcactatagatttcctcttttgtaatacctttatctagttttggataggataatgctggccttataagaataagtagaaagtgctatttctgcttgtgtgttttgggagttmatttggagaataggtatcatttcttatttaaatattttgtagaatttaccactgaaatttggagttgttgttttatttattggagagttataattattcattcaattgctataatacatatagatcttcctggttattgatgtttccttgtgtgagtttttatagtttgtgtccttcaagaatttttatttcatctacattacaaatatatgggcatatatttgtggaaatcattcctttcttaaccttttaaagtccacaggatcaatagtgatgtcccttctttgttttgatgtagacaatttgtttctctgtcttcttttttttgtcaaa

SEQ ID NO: 167421 - DNA, 611 bp, Homo sapiens
ggctacatcaattaatttttgaatatgaaacctaccttacataaatgaaataaatccaacttgtttgtggtatacaaattttctatagattttttgatatgatatattatgattgatatgttaatattggttgaacatttttgcatatatatttattagagccattgcactatagatttcctcttttgtaatacctttatctagttttggataggataatgctggccttataagaataagtagaaagtgctatttctgcttgtgtgttttgggagttaatttggagaataggtatcatttcttatttaaatattttgtagaatttaccactgaaatttgragttgttgttttatttattggagagttataattattcattcaattgctataatacatatagatcttcctggttattgatgtttccttgtgtgagtttttatagtttgtgtccttcaagaatttttatttcatctacattacaaatatatgggcatatatttgtggaaatcattcctttcttaaccttttaaagtccacaggatcaatagtgatgtcccttctttgttttgatgtagacaatttgtttctctgtcttcttttttttgtcaaa

SEQ ID NO: 167422 - DNA, 621 bp, Homo sapiens
aattacttgcttttataaagttctttataattcataatatcatgggaggaaaaaaagttagttaaatgcgacccagtttgcaaaaataaggtatcgcatgtgcttttactactggcctatttttgtacacaccctcattggggatactgcttgacagatgaatctgtcactgagaaaaaagataatcatgttattaaaaagtatcctaagagaaatcagaaaacttcttgcaataatgyagatttatctgaaataagatctacaagagacacattaatattttttgagataaagtgctttatttccttatcctaaactgtacaccaatagaagtttaaagaacatgttatttattcggaaatggtattttctcaatataaatgaagtattttgaacaggaacaaaatggtgttaatggcttaaaaaaagtcaaatggtaagccagctttattattcatactctatattatgtgaactacagactataatgatttcagggaaattaaagcatttaataatcatttaattccacattttttgattttctacttccagcagatattgagattagctttttttttctgtgttatttactggcctatttcagcatattcagaaaca

SEQ ID NO: 167423 - DNA, 333 bp, Homo sapiens
gaagtttgtagcaagttgttatagcagccactggacactaatatatgttcctatttgctttttgaatytacaccgtgagctattaagcacttttgtgcttttactttcctggtctgtaacttcttctgaaatacaattctgattcttgccttttagagattttatgtggtttcgaatcaaccaagttttctttctctgtcttctaccattcttacatttttatgccttttaatgaatgtaatatgagagaggggatttagaaggagtgtaatatcattgtctattttctttttctactatttttcttctagtgtttacatagatgcacgaaca

SEQ ID NO: 167424 - DNA, 404 bp, Homo sapiens
tggtaagaactcaagacatttgttgaataaataaaatgatgtttacatttaaagtatatttctgtttccagataagatgtattttaagcagcatatttctttatgctttcactttttttttctttttctttttgagacagagttttgctcttgttggccaggctggagtgcagtgaygcaatcttggctcactgtaacctttgcctcctgggtttaagtgattctcctgcctcaaccgcccaagtggctgggattacggacatgcaccaccacacccagctaattttgtatttttagtagagaaagagttcctccctgttggtcaggctggtctcaaactcgacttcaggtgatctgccatctcagcctcccagagtgctaggattataggcatgagcctctgc

SEQ ID NO: 167425 - DNA, 612 bp, Homo sapiens
aagacatttgttgaataaataaaatgatgtttacatttaaagtatatttctgtttccagataagatgtattttaagcagcatatttctttatgctttcactttttttttctttttctttttgagacagagttttgctcttgttggccaggctggagtgcagtgacgcaatcttggctcactgtaacctttgcctcctgggtttaagtgattctcctgcctcaacckcccaagtggctgggattacggacatgcaccaccacacccagctaattttgtatttttagtagagaaagagttcctccctgttggtcaggctggtctcaaactcgacttcaggtgatctgccatctcagcctcccagagtgctaggattataggcatgagcctctgcgcctggcctatgcttccacttttacatcaaacatttattttatatattctatgttgtgggaaccatgtgaggatggatgtgtataaaacagatagaatagaacattatgctcaaaaaggtcacacttggatggtggagacatatacataagggaaaaaactacaaaatgataaaaggaactgtggtaagcagaatagatccccaacatgttcacacccat

SEQ ID NO: 167426 - DNA, 612 bp, Homo sapiens
aagacatttgttgaataaataaaatgatgtttacatttaaagtatatttctgtttccagataagatgtattttaagcagcatatttctttatgctttcactttttttttctttttctttttgagacagagttttgctcttgttggccaggctggagtgcagtgacgcaatcttggctcactgtaacctttgcctcctgggtttaagtgattctcctgcctcaaccgcccaagtrgctgggattacggacatgcaccaccacacccagctaattttgtatttttagtagagaaagagttcctccctgttggtcaggctggtctcaaactcgacttcaggtgatctgccatctcagcctcccagagtgctaggattataggcatgagcctctgcgcctggcctatgcttccacttttacatcaaacatttattttatatattctatgttgtgggaaccatgtgaggatggatgtgtataaaacagatagaatagaacattatgctcaaaaaggtcacacttggatggtggagacatatacataagggaaaaaactacaaaatgataaaaggaactgtggtaagcagaatagatccccaacatgttcacacccat

SEQ ID NO: 167427 - DNA, 573 bp, Homo sapiens
tagctcaaaagtccaaatctacagtctcatctgagacaaggctagttgcttccgcctatgagcctgtaaaatcaaaaaacaagttagttacttccaagatacaatgggggtacaggcattgggtaaatgctcctattccaaaacggagcaaatggccaaaacaaaggggatataggcctcatgtaagtctgaaatccagcagggmagtcattaaatcttaaagctccaaaatgatttcttttgactccatgttttacatccagggcacactgatgcaaggggtgggcacctaagaccttaggcagatctgcctctatggctttgcaggttacagcccccatggctgcactcatgggctggcattgagtgctggggacttttccagggacatggtacaaaccgctggtggatttactattctgggatctggaggatggtggccctgatctcaatgctccactagaccgtgccccagtggggactctgtggggctccaaccccacatttctactctgcactgccctagtagatgttctcaatgtgggctccactcctgcagcagagttttgctta

SEQ ID NO: 167428 - DNA, 420 bp, Homo sapiens
atgctaatccttcactggcaaccaaggtatccaggttctgtcatcagaactgactaggcaactgacataatccatggagaggaaggagaagcagtgtggttcagtggcccacctgaaagccacatagggcgggggagcccccaccctccagcaaagggaggtggtgaatgagcatgctacccagccgaggaaaccatgctttgtccacggaactgtgcaacccacaggtcagaagttctcactcacaaaaccataccacyggggcctagggtcccaactctagagccgcacagattctcaacagcctctcagctggaatctgcctaagcctgccaagctactgaagagaggtgcaaccagcaccacagctgggggtgcctgctctctaagccgtttgagctccttgagagagagccagca

SEQ ID NO: 167429 - DNA, 455 bp, Homo sapiens
gaattcaccgcattcttatccttaaacagggtgattgtcctataggaagaggagggacctctcatgtgagktctcagcttcccgaagcaccctcaattcttactgaagacataaaggctgataatatgatgatttgatattcgtatgaaaattaagtcaggaactaaatttgttaaacagcttagttgtaggaagaaacttgatatgtagctaagtattcattcaaggttaatatttgcagcctccatgatttaaattcagctttttcttatttccttccttcctcttgtcttctttttcttcttcccgcctcaatacagttaagacaagttactctaatttgtacacaagtgaatccagttgaggcactttagcctgtaggtcagagcacaccccttttaccagaaatatctctttctaaggtatttcttcactctgtatgagtaaattcaaaa

SEQ ID NO: 167430 - DNA, 503 bp, Homo sapiens
caggaaacaatgtgtgggcatgtggacatgagccaagggaaggaaaagcgccaaaaaagagcatgttaatgagggaattatcactgtgggcaacaaaagctcaactcttcctactgatgaggctgtgagaaacctgggtggacctgacttgaaattgtcttactgaggacagaggaaactggggtatttctctcaaccttgggccttgtggttgagggtaacctggatgcactaacctttgagtgcttcagaaacgccaagaggacrtgagcacacagaggccagatagcccccttaccagctgcctggcacaggatcaggaagtccacgtagtcaaaaaggcctccacattaggcctgtttaatgggtggcattagtatatttcccatcttaaagaacatattgacactgagagatgaagcatcttgacctgagccacacaaacgttaatctatagaatcaggcatttcaataaaagtcattccatagcccgcaggccactg

SEQ ID NO: 167431 - DNA, 613 bp, Homo sapiens
aaagaaaaacccattttctgcgggaaaaattcaagccagctgcagaaatgtgcataactaatgaggattccaacattaataaccaagacaatgggacaaatgtctccagggcatttcagagatcttcatagcagcccctcccatcacagcccctcccatcacagcccctcagaggcctaagagggaaaaatggattcctgggccaggcccagggccccactgctctctacagcctcaggacatagtaccatgggtctcagctgctccagctccagctgtagctaaaagaggccaagatacagctcaggtcattgcttcagagggtgcatgccccaagcctyggcagcttccacacagtgttgggcctgcaggtaaacagaagacatgagttaaactttggaagcctccacctagatttcagaggacatatggaaatgcctggatgcccaggcagaagtttgctgcaggggcagagccttcatggaatacctctactagggcaatgcaaagaggaaatgtggggttggagcccccacatagagtccccactgggtcactgcctagtggagctgtgacaaaagagccactgacctccataccccccagaatggta

SEQ ID NO: 167432 - DNA, 634 bp, Homo sapiens
ctggattttgaaaagttagtactaaatttaaaaaacagtaaaatatcttattaatatttttatgataattacatgttgaagggtgcatctttggatagattaaggaatatatgttattaaaatgaattttacacgttttattttattcattgtgggtactaggaaatttttaattgcatgtgtgcttgcactatgtttctgctagatcagcacatggcaagtacaggatcttgtctgctcctcagatagacagtagtgatcaggttcagttttaactccttccatggaaattctgttgtatggggcatcaaagtacagttgattcttgaacaatgtggggatttggggggatgacctcctactcagttgaaaatacaggtataacaattgactcycccaaaacctatcaattaatagcctactattgattgtaagccttactgataacatagtcaattaacatagatgatgtatattatgtatattacatactgtactcttacaataaagtgagctagaaaaaaaaggaaaacattattaacaacatcataaggaagagaaaatacctttactattcattaagtggaagtggataatcttaaaggtcttcatccctatctttaggttgaattcg

SEQ ID NO: 167433 - DNA, 552 bp, Homo sapiens
tgatgaaaacatgagtagtacatgtacatctgtaaatgtaaagcacctgtaaacataacctaaacataaaaggataaatcacaataaaagcttgaaaataactagaatggaattataatgaatatattattatcaaaagcatgagatgcagttaaagcaagttttaaggagaaatttattgtcttaattgctcttactaaaaaagaaaaaatcaataacctaatgatacaaataaagatttttttagtaagaacataaaagtaaaccttaaaatgaagaaatatagatatagtagaagtagagataacataatacacttaacagaaaaaatgaacaaaatcaaaacttagctstttgcaaaaaataatagagtcatatccagtgatatagctcaagggaagagaaagcaactaaaaatttaaaaaagtaggagttagtaatatgaaagatctgcagatagagaatgaataaataaaaagcagaaattagtaatatgaaataattgtagatagagtgagaagagactgaaaatgtaagaggaaactatgaaca

SEQ ID NO: 167434 - DNA, 552 bp, Homo sapiens
tgatgaaaacatgagtagtacatgtacatctgtaaatgtaaagcacctgtaaacataacctaaacataaaaggataaatcacaataaaagcttgaaaataactagaatggaattataatgaatatattattatcaaaagcatgagatgcagttaaagcaagttttaaggagaaatttattgtcttaattgctcttactaaaaaagaaaaaatcaataacctaatgatacaaataaagatttttttagtaagaacataaaagtaaaccttaaaatgaagaaatatagatatagtagaagtagagataacataatacacttaacagaaaaaatgaacaaaatcaaaacttagctgtttgcaaaaaataatagagtcatatccagtgatatagctcaagggaagagaaagcaactaaaaatttaaaaaagtaggagttagtaatatgaaagatctgcagatagagaatgaataaataaaaagcagaaattagtaatatgaaataattgtagatagagwgagaagagactgaaaatgtaagaggaaactatgaaca

SEQ ID NO: 167435 - DNA, 472 bp, Homo sapiens
gaattcctgataattagcgactgtttaaaaagatatattgcatccctctaacggaagagtttatagctgttaagtatcaggttttagaagactattgagtgaacaaagaaagcactcacaaaaacaggctataatataacatagcctatatgattccaattttgagaaaataaacatgttgtgtccctgtcagtagctggagttgcatgaaaatgtaatagcgattatttctgctgccattcaaaacacgcttcattttgtaatttacatttttatatttgtttttcaaattttgcccatgartatatttttctcttaaatgtcagcgagaaaaagataataaattttgaaaagagaaaataaatgttctctaaaacatgctaaatttaaaacaaactgggaaataatgtttgcgacataaagacaagattttaatatctttaatctagaaagatattttataaattaagaa

SEQ ID NO: 167436 - DNA, 491 bp, Homo sapiens
tatgctggctttagctttgaatttcaatcaatttaattcaaaatatatgaaatcaaaatgtatttccagaacatctgagagagtcaccaagtgcctagctgcttctactctgtcctggagaagctgsttcttattttgcatgtttaaagtccctgtttgaagttcatccatggggctcaagttctggcttggctttcattccatgccacattttacactcacttttcatttcacatgaaaaccaggggcaggagaacaaatggggattgtggtaaaaaggggttagaatcatgtccctggtgaacaaagccaaatcagaattttccctgtaaggttgaaatcagactccaagggatgaaatagatatttattggaagaaacatcatttattgaacacctattatatgcatcatgttaaggtcccatgttagaggaaagttaaattgcaggttttgtgcctaagcaagagccagacaagtaaccagtaatta

SEQ ID NO: 167437 - DNA, 560 bp, Homo sapiens
gccacaagctttgaaatcctacttaaattgaagcccaatgtcatcctttaggagccaagtaatcttgaacaagtctcctatcctctcggagcctccatctcctgagggacaaaaccagcatctatttgaagattcaatgaggtaacccacatgcccaacatggcgcctggcaccttgtgatggcagcagctatccgcatgaactgataggacccagatgacagagtgggtggttctgaacagagaacttctccgggagtgtggagccctggctgggttctcgttccttgcagaagggctctctcaacacttctgttgcaccgggatcctaatagtctgtgaaaactgtggtaggragagatattggggctgaggtctctgaggtttctgctctacaaacaggaatattttgccctactttgatttagaacaagtggaaaaaggagacaagaaatcaaatcgttcaaagccaacatatctcttattgttaccaggttcagggagagggcagagctcagagtgagaggcagatagacctgctaacggaactccaggaagagg

SEQ ID NO: 167438 - DNA, 331 bp, Homo sapiens
cgccagcctgttggcatcctgatttggggcttctaacttccagactgcaagatcataaatttgtgttattttaagcttctaagttcrtgctaacttgttacggcagcaatgggaaacaaatcatggagccaattaaataaacacagggagggaaagaaagatgatctaacttattgtgaggactgatacacctggggcagactacacactttgctttatgtgcttatcacttgaaccttagatgtgggtatcagaaaccctattttataggtgaggaatctaaagctttatagacattaagtcagttgcataagagaatttttacagtctg

SEQ ID NO: 167439 - DNA, 314 bp, Homo sapiens
gcacgtcagcatcacccctgccagcttcatctcctcctgggaaggttcggaacaaacagaggctttaatgccagagcccccctgcagagctgggcatctccagtggctgrcagtggcctgcatgggcatgagatttagcatgcaccaagcatgtccacctgctcctcagcattgaatccccataacagacttgtggccagttgagattgcatcactcccacgtcacagatgaaaacgcataatgacccagagaagttccacctccctcagctcggaccagccccaaaacacacaggtagtaaacagcagggaaa

SEQ ID NO: 167440 - DNA, 388 bp, Homo sapiens
aaaatgaaaatataaactattaggccaggcctggtggctcacacctgtaatcccagcactttggaaggctcaggcaggtggatcacttgagtccaggagttcgggatcagcctggccaacatggtgaaaccctgtctctactgaaaatacaaaaattccccaggtgtagtggcgcgtgcctgtaatcccagctactctggcacgagaatcacttgaacccrggagacagaggttgtagtaagccaagattgcaccactgcactccagcctaggcaacagagcaagactctgtctccaaaaaaaatttttttaatacataacttatcaaaatttgcaggatacaagaaaataagcacttagatggaaactcatagcataaaatacatat

SEQ ID NO: 167441 - DNA, 269 bp, Homo sapiens
acccattatgaattaagaagaaactcagcaaatacataaagggcacattgcaaaacagtgtatgccatatgtgttcatctgttttcacactgctataaagagctgcccgagactaggtaacttataaaggaaagaggtttaattgactcacagttctgcatggttggggaagcctcaggaaacttacaatcatgatagaaggygaagggaaagccaagcacctgctttacaaggcggcaagaaggagaatggccaagcaaagggggaag

SEQ ID NO: 167442 - DNA, 508 bp, Homo sapiens
ctaggtaacttataaaggaaagaggtttaattgactcacagttctgcatggttggggaagcctcaggaaacttacaatcatgatagaaggtgaagggaaagccaagcacctgctttacaaggcggcaagaaggagaatggccaagcaaagggggaagagccccttaaaaaccatcagatmtttgagcactcactcactctcatgagaaaagcattggggaaaccacccccataattcaattacctccacctggtctctcccttgatacacaggcattatgaggattacggggattacaattcaacatgagattttgacggggactgttgggagcaggccccccaaaatctggccgtaaactggccccaaaactggccataaacaaaatctctgcagcactgtaacatgttcataatggccctaacgcccaagctggaaggttgtgggtttacgggaatgagggcaaggaacacctggcccacccagggcggaaaaccgcttaaaggcc

SEQ ID NO: 167443 - DNA, 508 bp, Homo sapiens
ctaggtaacttataaaggaaagaggtttaattgactcacagttctgcatggttggggaagcctcaggaaacttacaatcatgatagaaggtgaagggaaagccaagcacctgctttacaaggcggcaagaaggagaatggccaagcaaagggggaagagccccttaaaaaccatcagatctttgagcrctcactcactctcatgagaaaagcattggggaaaccacccccataattcaattacctccacctggtctctcccttgatacacaggcattatgaggattacggggattacaattcaacatgagattttgacggggactgttgggagcaggccccccaaaatctggccgtaaactggccccaaaactggccataaacaaaatctctgcagcactgtaacatgttcataatggccctaacgcccaagctggaaggttgtgggtttacgggaatgagggcaaggaacacctggcccacccagggcggaaaaccgcttaaaggcc

SEQ ID NO: 167444 - DNA, 563 bp, Homo sapiens
attttatgtttgttattgatttctactttgattccatcatcatagtgcacactctgtatgctttcaattattttaaatttgttaagatattttaattgtacttgaagtgagtttttttcaaacattgcatatagtttgcccatgttcattattctgtcagtctctgtcttgtacttgatgtattaagaccatttacagtaaatgtacttactgctgttagaactaaaatctgccattctattttttgttttctttttgttctgttttcattttgttgacttttttctgccttactggascagttttagaatttcattttaatttatctatagggtttttgaatgtatctctttgtctagctttttctgtagttattccatttattgcattacatatacattaaattgccatcagagtgtgctcatgccatcattttgccagtacaaaggaagtatagaaatctcatctacgattactgtctgccctcccctgtttataatgtaattgtacttttatgatatgattgttgtatttacctattcacttatttattttgctgtttc

SEQ ID NO: 167445 - DNA, 597 bp, Homo sapiens
tttttcttctctagcccatcaagtccctaggtaaaggaccttgtaatctattcatctacagaacagtctctttcacttcaaaccttttccataaacagtgctctaaaacaaacagaaaaaagcctgctcctcatttctgtcaagcccactgaaacagtcccaggtggagaagcattagagaagagggctgcacacccagaggcaggggcaacatagaggtgctcttcaaagtcagaggggaccttgacaagagaatgacttaatgctaagtcaccacctacacttcacaccctactatttcacctgctctcggtgtttctaggggaaaagtattccaagaactgttaaaccccgtggtgtgtttctgagtaattcatccccatcatcagccttggttcacagggtggggaggcttggcttgtcctgatgcgatatttatcagtcaacacagccattacctagtggctttgttgagacctgcagaggacttagggaaacgtggaaaacactgagtgcacttttttttcctactgaagatatatatcartaaatgattaatcaaagaaaaatattctttgaaaatagctccatacacac

SEQ ID NO: 167446 - DNA, 555 bp, Homo sapiens
acaggtaaactgttaaacaaaatgctgcacatctatgctttggaatactgctcraactgttgagatatgcaataacttgagtgaattttcagggaattatgctgagtggaaaaaaacaatttgaaaaggttatatattttacaattttatttgtgcatttttgaaatgacaaaattcaaaatagatggtagattatattttgcaaggagataggtctgtgggaccaggcacaggaactaacatagaagatccctgtggtgttggaactgttcagttttctgacattgacagtggtggtgaattcacaaaactacttggatgataaagttgtatagaactgaacacacacacagacacacacacacacaagtcctactaaaatgcggcatctgagtaagattggaggattatatacaagtcaatattctggttatattatactatattataattattggtatttttgcaaaatattaccattaagaaaaattgggcagtaggatttctctgtattatttcttacaactgcatgtttgacctacaattattttaata

SEQ ID NO: 167447 - DNA, 555 bp, Homo sapiens
acaggtaaactgttaaacaaaatgctgcacatctatgctttggaatactgctcgaactgttgagatatgcaataacttgagtgaattttcagggaattatgctgagtggaaaaaaacaatttgaaaaggttatatatyttacaattttatttgtgcatttttgaaatgacaaaattcaaaatagatggtagattatattttgcaaggagataggtctgtgggaccaggcacaggaactaacatagaagatccctgtggtgttggaactgttcagttttctgacattgacagtggtggtgaattcacaaaactacttggatgataaagttgtatagaactgaacacacacacagacacacacacacacaagtcctactaaaatgcggcatctgagtaagattggaggattatatacaagtcaatattctggttatattatactatattataattattggtatttttgcaaaatattaccattaagaaaaattgggcagtaggatttctctgtattatttcttacaactgcatgtttgacctacaattattttaata

SEQ ID NO: 167448 - DNA, 555 bp, Homo sapiens
acaggtaaactgttaaacaaaatgctgcacatctatgctttggaatactgctcgaactgttgagatatgcaataacttgagtgaattttcagggaattatgctgagtggaaaaaaacaatttgaaaaggttatatattttacaattttatttgtgcatttttgaaatgacaaaattcaaaatagatggtagattatattttgcaaggagataggtctgtgggaccaggcacaggaactaacatagaagatccctgtggtgttggaactgttcagttttctgacaktgacagtggtggtgaattcacaaaactacttggatgataaagttgtatagaactgaacacacacacagacacacacacacacaagtcctactaaaatgcggcatctgagtaagattggaggattatatacaagtcaatattctggttatattatactatattataattattggtatttttgcaaaatattaccattaagaaaaattgggcagtaggatttctctgtattatttcttacaactgcatgtttgacctacaattattttaata

SEQ ID NO: 167449 - DNA, 619 bp, Homo sapiens
agttaagaagtttaaggattttacttgttacaaaatagcccacatttaactacttttccagaatgcctcaagtgggaactaataagaaggatctacacactctcaatgtctatgcttgccagaaaattgatctcagcagctaaacagtgagtcctttgatggttaggtcaggccaccagtgactcctcttcttcatggctcagacattgtagcagggagaacctgggttagggaacaacagagacaggataccgtctagttcctctcaccctgtgcactcttaacactgaactaatctcagatttctraaagagtgagttatatttaaatctttcctttgcaatccttgcaaaaaccttcatttctatacataaaaattatcatttgctttcaaaggggaaagatcagatcaacataattaagggtcttagaatgcaggtgacctcaaagtgtgtttgcttctcctgctagttggctgttcccaacaaatggcaggattttagagcactcagtgatttaaaagtgggcatatctgtttgtccagtggattttattactgtcacgtaatttaccatcaagtaataaaatcgcactattcttcattttagactgaacattt

SEQ ID NO: 167450 - DNA, 538 bp, Homo sapiens
aactaaatcatttcgtcaattgagtatgaaaaagttttggtttttgaaacttagtaaattatgactttttaaagaggcttacaaacaggaaggcattggattctatctctataaaagtaaagaagaaactgaacaaaataaatactgagagttcagatggtgtatctaaacttatgtgaagaatcttttatttgggcttctgtgtttcatcagacaaattcttattctatagaatgaattcagaaagccctcaattctgcagcatctaaatttgacaaaatattcaaaagaatcataaatttaatgagctttgttcttgtagtaacatttatccaaaaaatacactaataagggagcaaaaatgcagtgatacagtgcctgaggaagtattcgagctataattacacttttcaaaacaaaaaaaataaaaaaggatgagaagctcttccatttaggaatttgttctgaacacttgtagggtatattctaatttaaaatattatttartgaagagtcagttaaaagtatgcaggtatgc

SEQ ID NO: 167451 - DNA, 501 bp, Homo sapiens
tttgcatttggaggacataagcaaagagttaatgtttaaagataaaaaagaataaggtcggtcacttggagtaggatgctatcagaaaagagaaatagtcccaggactcagtccttggaaactctaatattaggggaacctaaaccagccaaccagcatgaatatggccaatgagataaggaaaatcaggagagggagakgtactggaaacaaagagagaagcatgtctctacaaatatgaagatggcaactggtaaaaatcactaagaggttaagatgaagacagaagagaattcatgggatttgtcaacatagaagtcatcactaactctgaaaagaacagcatcagttgattagaggggatgaaaggtagataactaataggaagtgagaacctgcagacagcatgtaaagacaattcttttgaggaattttgctatactggtgagcggagatacaggacagcagctgagggggattgtagaaagacaattgaaatgg

SEQ ID NO: 167452 - DNA, 478 bp, Homo sapiens
gaattcatttgaattaatttttaaagacaaggcatgtaaatagtagaatttttttttttttttttttttcttgagatggagtctcactctgtcgcccaggctggagtgctatggcgtgatctcggctcactgcaagctcagcctcctgggttcacgccattctcctgcctcagcctcccgagtagctgggactacaggcgtctgcaaccacgcccagctaatttttttttgtatttttagtagagacggggtttcaccgtgttggccaggatggtctygatgtcctgacctcgtgatctgcccgcctcggcctcccaaagtgttgggattacaggtgtgagccaccgtgcctggccagaacatattttaatctaatacagtgaccacaacgtacaattgttctggaaagtcaatgaaggccccccgttagagagtggcagaggggtgggatcagaaaaggtgcacccctgaggtcact

SEQ ID NO: 167453 - DNA, 478 bp, Homo sapiens
gaattcatttgaattaatttttaaagacaaggcatgtaaatagtagaatttttttttttttttttttttcttgagatggagtctcactctgtcgcccaggctggagtgctatggcgtgatctcggctcactgcaagctcagcctcctgggttcacgccattctcctgcctcagcctcccgagtagctgggactacaggcgtctgcaaccacgcccagctaatttttttttgtatttttagtagagacggggtttcaccgtgttggccaggatggtctcgatgtcctgacctcgtgatctgcccrcctcggcctcccaaagtgttgggattacaggtgtgagccaccgtgcctggccagaacatattttaatctaatacagtgaccacaacgtacaattgttctggaaagtcaatgaaggccccccgttagagagtggcagaggggtgggatcagaaaaggtgcacccctgaggtcact

SEQ ID NO: 167454 - DNA, 426 bp, Homo sapiens
attgaagaatgcatcagagtcttttctaatagcatagttgatcaagcagaaggaagaattagtgagctggaagacaggctatttgaaaatatacagtcagaggagacaaaggaaaaaataataaagaatgaggcaaaactacaagatctagacagtagcctcaaaagtgcaaatttaagagtttttggccttaaaaagaaagtagagaaagagataggtgtataaagtttattcaaacagataacagagwacttcccaaacctagagaaagattaatatccaagtacaaaaaggttgtagaacaccaagcagatttaacccaagaagactacctcaaggcatttaataaacaaactcccaaagatcaaggataaagaagggatcctaaaagcagaaagagaaaagaaacaaataatatacaaagga

SEQ ID NO: 167455 - DNA, 483 bp, Homo sapiens
aaagcaatgttagagatagcctaaaaatgttatcacaacagttcttccatcccttacaataagtttgaattttagcatcggaattagattgaaatttttgtcttgtcatgtagtagccrtgtaaccatcagcaagttattaaacctcttttagcctaagtatcctcaactctaaaaaacaacaacaacaacaacaaaggtcaattacaactacattatgtagatctgtatgatctgtgcaaagtagtaacataatatgtataggcttgcctagctccaggtcttggcaaagagtattagctcaataattgtgttttcttccctctaacactgtaataacaagctttgtttcaattttaatttaattttaaatgaagatagtgtatactatgaagcatctaaataaggttataaggtgtaccatctttttataatagcactttcttctttattctgagaatgtaagagtagctgtgaggttaga

SEQ ID NO: 167456 - DNA, 542 bp, Homo sapiens
aaaacaaaaattgtagcagcattaatccttgaaagaaaaacaccaaacagtgcatttgaattttatacagcttttcacctgagaatattcccaagtccaagtgtcttggtataattaaaacttgaacatcagggtacaatcacagtgacttgaggaggtggatagcattcaagacttcagagtagtggaaagtgagagagagaaaaaaaaactagcaatggaagtaacaatagaggatggattcaaaaatctgtgtgtaaacattgatcaaaattaggccttgaaagatcagccarattttgtagtgttctcagtcagagaggactacaagaagatgtatgagtaaaatcaaaaccaaaaccaaacaaacaaaaaataccagctggaaggttgaaagactatcacaagaaaagtagagatttgaatttgagtccagaaagataattgcctccaataagaaaataaactcatcccagaggaaggtaataaaacctacagtttttacaaagtgttatccacattattcaatataaaataaaaat

SEQ ID NO: 167457 - DNA, 398 bp, Homo sapiens
agggaaccacagaaggccccaaatagccaaagcaatgttgagctaaaagagcaaagctggaggcatcactctacttcatttaaaagtctactacaaagcaatagtaatcaaaacagcatggagrtgtcataaaaacagacatagacacaaatgaagcagaatagaaagtccagaattaagtccatgcatttatagtcaacttctttggtaatgtgctgagaacacacaatgggaaaagatcaatctcttcaataaattattctggaaaaactgactatggatatgcataaaaataaaattagactctcatctcacaccatatacaaaaatcaattgaaaataaattaaagacctaaatgtaaaatctaaaactataaaattactagaagaaaatatag

SEQ ID NO: 167458 - DNA, 584 bp, Homo sapiens
tccaagatttggtgttgatattctccctgcaagggaagacccttggcacatctgtatacaatgtgaagaaatgtggagatgtcaaaacccgggacacatgccgcccagcacttgacaagcagagtgttattagcattggtaataagactacctgggtctgtctgcagaggtccttcagcttgagatcatttacattcactgcacacagcattcaaacctggctcctaaatgagacagctttagagaagacaatggaaatcctgacagtaaagtgaaaatttcaggtagaaatctattcatcctaattaagagaccctctcagacctgcctcttggcaattaacacagttgtgtgtggtcctrttatttaaactgacaatcttaggttctacaggctcagggagccctctctccttcagacctccactgtctgtaaatagattctctctgacttggaacagcaaacactttgaacatttgcatttcactcattacttgtgctgctacaggctgagcgtgaccctgccatggaaacaaatccagctgaaaaccacctaatggcattggttatataactattaggtt

SEQ ID NO: 167459 - DNA, 604 bp, Homo sapiens
cccctacattttttgttttgcaggggatgttttgcccaatcctctgaccaaaaagattaggtttgtcttgcagtyttaggtgcctgtgctacccccagatttctgttattggagttcactctcaggcctagttcatgaaagaaaagaaaagacaaaaaaaaaaaaaaaactcccccaaaaattatactcacatgagtttcctttttcagttttgactttccctctccaacctgcctgcttttttatcctattcaggtaattactttttgtattttgtctacaggttttagttgtaatcagttagggaattaagctatagtatgcttatccatattggctggcaacagcactttttataaacataattttggatggttacattgtaattcactttatggatattttaaaatttaaaatggcttctctatttaggaacacttgagtttgttctttggttcttctaaatagcattacagagaatattattaaaataaacatttctctaaatctgattatttctttaaaagaagttcttataaaccaaatcactagatcaaaacataagaaagcatataattcactaggacaaagcatttttactgcc

SEQ ID NO: 167460 - DNA, 337 bp, Homo sapiens
gacagccatgtacaaaaccaaggagagagaggtctcagaatgaagccaaccctactgacaccttgttattaaagcttctagacttaaggatcacgacaaaataaactaccgtttaagcaccccagcctgtggtactttgttatggtagccctaccaaactataataatatactatctaaactatttcttayctgtagaagttctacttgggtctttttttttttttttacctttttccacttctcatcatgtgccactttcttctatgttaaatatgtagagcatatttataatatctgctttaatatttttctctgctaattttattatttgtgtt

SEQ ID NO: 167461 - DNA, 608 bp, Homo sapiens
tctttggttcttctaaatagcattacagagaatattattaaaataaacatttctctaaatctgattatttctttaaaagaagttcttataaaccaaatcactagatcaaaacataagaaagcatataattcactaggacaaagcatttttactgccaaggcactttgactttatcttggaagtgataacacatgtgctgtaatgacattatcagtgttgtggtttacacaaaaagctctggtggctwgaagaatgagctgaaagggaagaaggaggtggaaaaatcattcaaaagtcaattacaatgttttgagttagaaactctaagtgtacgaactaaggcattgttactagacatgaagagggggcaatggctcctttttttgaaacagaatcttgctgacagagaagataggatttcagtataagtcatggatgacctaggctttggatgactcagagaccaagagaacaggaggcaggatgaagaataaaaagagtgtacttggaattttgtgagggaagtggttttgccacaggaaatccaggtttctgtaggaatgaggagctaaatggatcttacgtagaaggctttaagaaaacaagaa

SEQ ID NO: 167462 - DNA, 502 bp, Homo sapiens
atcttatataaaaatatgcataagtggggatcttatacttttcttcttcctgtaatccaaatatcattttcctcagacacatttgcaattgaattaacagactcttcactgtagctaccattctttcaccttttccccattaaatatggtgctagctgtgggcttgtcatgtatggcctttattgtgttgaggtacacgccttctatacctaatttggtaagagtttgtaataatgaaaagatgctgaattttgtgaaatactttttctgcagctattgagatgatcatatgattcctgtccttcattctgttaacgtgatatakcacctttattgatttggctatgttaaaacactcttgcatcccaggaataaatcccacttgatcatgctgtatggtccttttaatgtgctgttgaatttggtttgctagcattttgttgaagattttctgcatctattttcaggagggttattggcttatagttttcttttttcatat

SEQ ID NO: 167463 - DNA, 588 bp, Homo sapiens
gttttttcatcttttagctcttgaatcattttactgaactccttagattctgtggattgagtttcaactctgtcccaaatcttgatgatattaattgctacccagcttctgaattctatgttaycatttcagccatttcaatctggttaagagccattagtggggagctactgtggtcatttggaggtaagaaggcactctgccttttagcattgaggcaactcattttaaatccactcaaataattttgtgatttttcttttttgtttaatttaaaatgaaacttaaaaattctttaataccaattacatttgaatgtggcaaacataatgattttttaaggtactatgtttttctagctttgagttttcctaaacattctgcaaatagaaaaatatttttcttaaagttgaattttttgtgaaaattcaaacagtagaaaacttaaagtgacatacatgtaaattaaattattcagcagaaaataataaaatgttaaaatagaaaaaaatacaccataaagcatgtcagaacttgaaaaaaaatggctattttgctacccttaaacttatagtatcatctcaaaaa

SEQ ID NO: 167464 - DNA, 224 bp, Homo sapiens
tcttatgttctttaggctccttaagactcaggtaawcagatcctgaggagaggttcattacaatcagcttgtggggctttctttagttttctggaaattgatgttaggagaccttagagggtataagccaaactatttgaatatcatattcttccaaatgagcaactcttgaggggctgagcttaggtgtattagtttcctagggttgctactacaaaataaca

SEQ ID NO: 167465 - DNA, 562 bp, Homo sapiens
agtacttttctgtgcaagcgttgtgcccagcactggaaagatgccacaatgtgttggtttggaaaaattagatgcctagagtaacccttatatgtggtccaggagcctattttctcagcctcacaaatgcctaattctcttatacctgtggattcactttcattattctcccactaataagtccccagatcaggagcaagaaaaggaggatatgatgaaaactgtgcccagatgaacttgctggtgtgctttctgtttggagagtccatgcaaggaagtaggatgatgggatcattcacctgatgatttcaggaacaacatatatctttctgatcatcttccyaaatgctgtataggaacagaacaaatatcagttacactagagctaaaggtgattgggattgattatgaggacttaggagtcactaagctgaactgagagagttgagtgttagcaacagggttgcagagattacttgaagcataaaggccagtggccacaacaaaaccaacaccagcagcagcagtgaaaccacgtcacaccgcatcttggatagaattg

SEQ ID NO: 167466 - DNA, 588 bp, Homo sapiens
tctaaaacaatttgctttgataaaacatggttaacatatatgctaactgttcgaatactttgtctttttaatttaattctctcaaaatgctatgatggagataccactattacctgtatctctgttcgacagatgagaaggctgaggcacaaaaagagttagtaatttgctagagaggccrggcttgtatggaagggaatcaggatttaaacacaggcaatttggctgcagagatgagatcttaaaccaccatattgtgacatcctgccatcttatgctcaacgaaagaagaaggaattacaagggacacacagtcagaacactaggatggtccaagttgagagatcaaaagtggggatgtacaaaaccggtttaaataacgttactggttaaaactgctaatgggtacagggatttatttggggattaatgaaaatgttcaaaaattgattgtggtgatggttgcacaactctgtgaatacattaaaaaccactgaatatgtgtgtgagtgtgtgtgtgtgtgtgcatttaatacatgtaatttgactattttgattaatctctcaaattgttactgaaaggctgtt

SEQ ID NO: 167467 - DNA, 489 bp, Homo sapiens
tatttctgctttgtgacttatataagtacctttgtaatttaaaggatttagaataytacttttttttataattctggcattcgtcaaagatttaattgatgattaatttatatacctgtattggctaaatgtttcatgttggtaacagtgggacttagagcaactgcttgcttcactaagtttttttttttttttctgaaatggactcttgctctgtcatccaggctgtagtgcagtggtgtgatgctggctcactgcagtctgtgcctcccagattcaagtgattctcctgccttaacctcctaagtagctaagcagcggggattacaggcatgtgccaccacatccagctaatttttgtaattttagaaaagacgaggtttcaccatgtaggccaagctggtcttgaactcctgacatcaagtgatctgctggacttggcatcccaaagtgctgggattacaagaatgagtcatcacatccgattca

SEQ ID NO: 167468 - DNA, 489 bp, Homo sapiens
tatttctgctttgtgacttatataagtacctttgtaatttaaaggatttagaatattacttttttttataattctggcattcgtcaaagatttaattgatgattaatttatatacctgtattggctaaatgtttcatgwtggtaacagtgggacttagagcaactgcttgcttcactaagtttttttttttttttctgaaatggactcttgctctgtcatccaggctgtagtgcagtggtgtgatgctggctcactgcagtctgtgcctcccagattcaagtgattctcctgccttaacctcctaagtagctaagcagcggggattacaggcatgtgccaccacatccagctaatttttgtaattttagaaaagacgaggtttcaccatgtaggccaagctggtcttgaactcctgacatcaagtgatctgctggacttggcatcccaaagtgctgggattacaagaatgagtcatcacatccgattca

SEQ ID NO: 167469 - DNA, 538 bp, Homo sapiens
aacttccagataacattggttagagttagctctgcttattttggttctaatttagaaggaagacagagaaaatactcattctaagtacctactttttgtcagtaactatggtagctactttatgcactttgtgtccatcagggttttccagagaaacagaaataataggatacacacacaaacacacacacacacacacacacaggtttcacatccatagattcaactaacaggctytaaaaaaattcaaaaaaaaaaattctacaaatttccaaaaggcaaaacttgaatttgtcatgtgctaaatatcacacaaaagaaataacatgtaggcatggtattcaattgaataattaatctggatgggtgtggtacgtcacgcttataatcccagtacttagggagtccaggcagaaggactgcctgagcccaggagtttgagagcagcctgggcaacagggagagactgggtctctgaaaaaaaaaaaaaaaaaaaaaatctagaggtgatttaaagtacagagaaggttgtgcatag

SEQ ID NO: 167470 - DNA, 538 bp, Homo sapiens
aacttccagataacattggttagagttagctctgcttattttggttctaatttagaaggaagacagagaaaatactcattctaagtacctactttttgtcagtaactatggtagctactttatgcactttgtgtccatcagggttttccagagaaacagaaataataggatacacacacaaacacacacacacacacacacacaggtttcacatccatagattcaactaacaggctctaaaaaaattcaaaaaaaaaaattytacaaatttccaaaaggcaaaacttgaatttgtcatgtgctaaatatcacacaaaagaaataacatgtaggcatggtattcaattgaataattaatctggatgggtgtggtacgtcacgcttataatcccagtacttagggagtccaggcagaaggactgcctgagcccaggagtttgagagcagcctgggcaacagggagagactgggtctctgaaaaaaaaaaaaaaaaaaaaaatctagaggtgatttaaagtacagagaaggttgtgcatag

SEQ ID NO: 167471 - DNA, 558 bp, Homo sapiens
gaggagccaaatgttgatagccaagacaatggggaaaaggccccagaggcagttcaaagacctccacagaagcccctcctttaatagtccagaagacctagaaggaaagaatgattttgtggaccagggccaggaccctgctgctctgtacagcctcaggacatagcaccctgcaacatggccactccagctccagttgtagctagaagaggccaaggtacagcttggaccattgcttcagaaggcataaaccataagcctttgtggcttccatgtagtctcaagcctgtaggtgcacagagtgtaagaactgaagcttgggagctgtattagtctgttctcatgctgctaatacatatctaagactgggtaatttataaagaaaaaatgttkaattaactcacagttcagcatggctggggaggcctcgggaaccttacaatcatggtggaaggagaagcaaacacatcctgcttcacagggcagcaggaaagacaagtatgagagctgagcaaatggggaatccccttataaaatcatcagaactcatgagaattc

SEQ ID NO: 167472 - DNA, 558 bp, Homo sapiens
gaggagccaaatgttgatagccaagacaatggggaaaaggccccagaggcagttcaaagacctccacagaagcccctcctttaatagtccagaagacctagaaggaaagaatgattttgtggaccagggccaggaccctgctgctctgtacagcctcaggacatagcaccctgcaacatggccactccagctccagttgtagctagaagaggccaaggtacagcttggaccattgcttcagaaggcataaaccataagcctttgtggcttccatgtagtctcaagcctgtaggtgcacagagtgtaagaactgaagcttgggagctgtattagtctgttctcatgctgctaatacatatctaagactgggtaatttataaagaaaaaatgttgaattaactcacagttcagcatggctggggaggcctcgggaaccttacaatcatggtggaaggagaagcaaacacatcctgcttcacagggcagcaggaaagacaagtatgagagctgagcraatggggaatccccttataaaatcatcagaactcatgagaattc

SEQ ID NO: 167473 - DNA, 486 bp, Homo sapiens
gcagaatcaaaaaacagtgaagaaagtcagttacacactgtattaagttcacctcaagctaaagatacatctgtaatgttcatttgcaccagacaatatctactctttttttttaattaaaatttcttgttataaacaaccaatgctattgtgtgtagctgactgacacaactactacttgagactaccattacagcagttattactgttactacttgagatcgtcattaccagactgaatgaagggatgaacatagaaaatgataacagaaaacaaaagtaactattttaaggaaaggggaactggggaagaataaaagagctccctgcttctagtgagcaaaggcaaccccactgagttaccagagccctttatatttattgagtaamaagagtagggaggagggggtaacgattggtcagctgcttgattgatcacaggttcacattattgctaacaggcttcaattatgcctaaacataaga

SEQ ID NO: 167474 - DNA, 560 bp, Homo sapiens
ggtaggtataacatgtccacaaaggctcttataagaggcaggaaaggctgaaacagaaatgaaacgrtcacaacaaaaccccacatcaacttgatgcagccatgagccaaggaacacagacagcctctagaagctgagaaagtctaagggaaaattctcagagcctccagaagaaataaaacctttgattttagcctcagatgaagctttttaaaattcagaactctataatttaagataatgaatttattaaattattttttataccactgtttagtctaggcaattatttttgggattagactttcaaaacagaggcaacaaaagaaaaatagacaaatgagattgtaaaaccaacaagcttctgcacagccaaggaaaaaatagagtgaagagaaaacctatgaaattggagcatgtattttcaaaacatatatcaggtaagggtttaatatccaaaatatacaagaaattcaaacaactcaatggtaagaaaacaattcagtttttaaaaggaactgaatagaaatttctttaatgaaaacatacaaatgaccaaa

SEQ ID NO: 167475 - DNA, 560 bp, Homo sapiens
ggtaggtataacatgtccacaaaggctcttataagaggcaggaaaggctgaaacagaaatgaaacggtcacaacaaaaccccasatcaacttgatgcagccatgagccaaggaacacagacagcctctagaagctgagaaagtctaagggaaaattctcagagcctccagaagaaataaaacctttgattttagcctcagatgaagctttttaaaattcagaactctataatttaagataatgaatttattaaattattttttataccactgtttagtctaggcaattatttttgggattagactttcaaaacagaggcaacaaaagaaaaatagacaaatgagattgtaaaaccaacaagcttctgcacagccaaggaaaaaatagagtgaagagaaaacctatgaaattggagcatgtattttcaaaacatatatcaggtaagggtttaatatccaaaatatacaagaaattcaaacaactcaatggtaagaaaacaattcagtttttaaaaggaactgaatagaaatttctttaatgaaaacatacaaatgaccaaa

SEQ ID NO: 167476 - DNA, 560 bp, Homo sapiens
ggtaggtataacatgtccacaaaggctcttataagaggcaggaaaggctgaaacagaaatgaaacggtcacaacaaaaccccacatcaacttgatgcagccatgagccaaggaacacagacagcctctagaagctgasaaagtctaagggaaaattctcagagcctccagaagaaataaaacctttgattttagcctcagatgaagctttttaaaattcagaactctataatttaagataatgaatttattaaattattttttataccactgtttagtctaggcaattatttttgggattagactttcaaaacagaggcaacaaaagaaaaatagacaaatgagattgtaaaaccaacaagcttctgcacagccaaggaaaaaatagagtgaagagaaaacctatgaaattggagcatgtattttcaaaacatatatcaggtaagggtttaatatccaaaatatacaagaaattcaaacaactcaatggtaagaaaacaattcagtttttaaaaggaactgaatagaaatttctttaatgaaaacatacaaatgaccaaa

SEQ ID NO: 167477 - DNA, 560 bp, Homo sapiens
ggtaggtataacatgtccacaaaggctcttataagaggcaggaaaggctgaaacagaaatgaaacggtcacaacaaaaccccacatcaacttgatgcagccatgagccaaggaacacagacagcctctagaagctgagaaagtctaagggaaaattctcagagcctccagaagaaataaaacctttgattttagcctcagatgaagctttttaaaattcagaactctataatttaagataatgaatttattaaattattttttataccactgtttagtctaggcaattatttttgggattagactttcaaaacagaggcaacaaaagaaaaatagacaaatgagattgtaaaaccaacaagcttctgcacagccaaggaaaaaatagagtgaagagaaaacctatgaaattggagcatgtattttcaaaacatatatcaggtaagggtttaatatccaaaatatacaagaaattcaaacaactcaatggtaagaaaamaattcagtttttaaaaggaactgaatagaaatttctttaatgaaaacatacaaatgaccaaa

SEQ ID NO: 167478 - DNA, 623 bp, Homo sapiens
tgatgactattttcctttattaattcatttaacaaatgtttgttaggaaatgtatctactcagcccttagggtacaaaggtgatcgaggcaattttacaaaattcctacttgcaaacagcttacattcctatggggagctaggcaatacagcaaatgaacagatatacaaacaaaatagtgaaagagaaatgttcacatggtagcatatagacttgctgagggatgacctcttccaaaataaaaakatgtgacggtatctacccgtggcaatagaattaccatccatttataccttgcctctctctaaaagcagggacggatgagatcagttttacaggttgttttatccccattctctgtcacgatgcctgtcccttggtacataaccacatttattaaatgtctgaataaatgaataccatttatttgttattttgctatgttgtatcatttcttttaattatgttgttaattcacaccctttgaaatgcaccctgaaattcatgtaattgtcatgtagcaaagagtttatgggaagtaagttacaaaattagggaagcccatcaaaataaaatgagaacagagcagaccctttgtaatgcatttaaatatcagtggtgga

SEQ ID NO: 167479 - DNA, 509 bp, Homo sapiens
acacacccataagaaaaatgttaaactcaaaaagcagattgacattggaaatgaatagtcaagccagaagagtgaatataaatgtgactagatatgcaacattttctttatcttcactattaatgagggaaatgcaaattaaagcaacttccayatttggcaagaaataaaaataaataaataaaaaggcacttctatgaattttgataggatcataaataagtatagttttgcaaagcaatttggcagattctatcaaaatttaaaacatgtctagtctttgtcccagcaattttcttttcagaaatgtggtctacagaaataattatagatgtgcacaaagagatgtgtgatataaagtctactacagcgactattacaacaattgagaacaacttaaagtttattaacagataaattattttattttatctgtaaaattcacaatatgggacatagtacagctgctataaataataaaatgaatctttagattaatataaagtatt

SEQ ID NO: 167480 - DNA, 321 bp, Homo sapiens
tagaaaattacgggtgtgcagtgcagataaaattttattttcattcccaggggcttctctctgtacctcctggaggaccaagttgttttcctaattccgaataatttctacatccagcatagcyatgatttctgccaaatattcaaaaaattgttaaaataatgcattttgtgaggaaagtttttcaggtataaatgtaaaagtgaaaatgatttcttcatccttttctagtgggaataattattgcatttgacctgaggaatcaaatacttctttttattcataaacaaaaatagatgaatagagatacagttatggatg

SEQ ID NO: 167481 - DNA, 520 bp, Homo sapiens
aattgtaattaatatttcaaagactagcaagaatatattatttaaaaamaaattaaagaatactatgtaataagaccaaagaaaaaaaatcaggatgtgaagtttgtgtgtgtgatagcaaaaagaaataaaagtttaccagaagtattaaaagataatttagagaatctccaggcaagcagaggagagcaacaaaagggtaggaggaaatagaaaagatgaataaggaataatctaacagtcctattattcaactaatacaaactttaaaaaaattcataaaaaatgaagtgaaagaaaaatgtttttaatgtaaatgtttcctagaaataagggcatgattttctatattataaaaaccaacacatgcacacacacaaacacccagtaatgtagatcactgacgaattttggaataaaagaagaagtggtcaatttctaaagatggccctccaataaaccatacttccaagtactttcttccttgtctaatcactatccccgctttaatttggactag

SEQ ID NO: 167482 - DNA, 468 bp, Homo sapiens
ataaaagaagaagtggtcaatttctaaagatggccctccaataaaccatacttccaagtactttcttccttgtctaatcactatccccgctttaatttggactagtcctataagaaatagaatgtggcaacagtgatgcagagaaatttgcatggttgggtcataagaagctctctagtttctgccttaggacacttcttccaccattagtttccatgcagtgaaacgtcatggcacaaggaaaggccacaatacatgtaggcactcagggacagccctatctagtacctcaactgataatagccagcatcaactgcaacccatgagaatgagccatcttggacatsccacccagtcacacttttggatgacctacatccaaccacttttttttgcattatcatgaaggaccacaggtaagttcagccaacacacatgatcatgaagaataacaataaattgttttaa

SEQ ID NO: 167483 - DNA, 403 bp, Homo sapiens
tcagaatagtagcacatttattaaaggcagctccagaacctaaaaggcaatgaggcaatggcttcaaaattttaaggcaaaacatttttatcctggaatttcatataacttaaactatcaacaaatgtgagggttaaaataaactatcaaacaaaaacctgctttaggcataaaggcttaaaatatttacttctcaaacatgactgacattaaaaargtatgtatgagatgcaggcaaagggaaacccaaccaagataataccgaagagtagtcttaacaccaaaactcgacatcagagaatcatcaattcaaattaagccaggaaatggagggtatgaaaagtaagatatataagaagagaaaagaaaagaaagaaagctctagtaggtaacctgaaacatt

SEQ ID NO: 167484 - DNA, 579 bp, Homo sapiens
gtagttgtttcaagaagcacaagttaggagcatgatgcatgaatcagcaaagtaaaaatatgctataaagtgttcatgaatgtatgatctactgcagtagggctcagactccctggagactgcctgcagaattggaggcrtgcacctcagcattgtccaactgagtaacaaggacagaaaaggtgatatattaaccttaacaccatttcccattccttagtagatgacagttgctctgagagtgttaaatcccagcttccattgggctacctttctcatgtgttcagcaagctcttgaggcaccagagtgctgaggcagagacagaaaggcacaagcagttacaaataagaagttcttggatatctacaaactccccaccccagatgcaggtgcatttagaggagggctgagtggagtctcagtcttagcaccgttggtggtggtaaaacttaagcacacagctccgttttctgattccaagtcaggttgtctgtatgcttccaatcatctacattttaactacaagacaaagaaatgtggtttccataaaagcctaagaaacacaaaaatactgaaaa

SEQ ID NO: 167485 - DNA, 572 bp, Homo sapiens
ggaggagtgcttgagggcaggagttcgagaccagcctgggcaacatgttgagtccccagctactcaaaaggctgagcttggagggttgcttgagcccaggagttggaggctgcagtgagctataatcatgccacggcattccagcctgggtaacagagtgaggctgtctcttaaaaaaaaatgccatgagtaaaagtaaggaagcatttggaagaaaatatgccctaccaagtttgtctgtatccagaaccaacaactatttggctgatatttcatgttgagatgctttgatggcattgctttactgtcttattaaattatgtcaatggaaggttttcacacatctttrtcgaggttggactggtttgccactgacagatgacttatcttcagagtaagctactcttttctagaccaatctttttccttttgctaattaagaattgactcctctggaatccttttattgaccatgaaggatggtaggaaggaagtctcaaggagaaaatgctatgtgtaatctattctaagcattatttaaagttggcaaagaaaaatgtgggacatagtgt

SEQ ID NO: 167486 - DNA, 572 bp, Homo sapiens
ggaggagtgcttgagggcaggagttcgagaccagcctgggcaacatgttgagtccccagctactcaaaaggctgagcttggagggttgcttgagcccaggagttggaggctgcagtgagctataatcatgccacggcattccagcctgggtaacagagtgaggctgtctcttaaaaaaaaatgccatgagtaaaagtaaggaagcatttggaagaaaatatgccctaccaagtttgtctgtatccagaaccaacaactatttggctgatatttcatgttgagatgctttgatggcattgctttactgtcttattaaattatgtcaatggaaggttttcacacatctttatcgaggttggactggtttgccacygacagatgacttatcttcagagtaagctactcttttctagaccaatctttttccttttgctaattaagaattgactcctctggaatccttttattgaccatgaaggatggtaggaaggaagtctcaaggagaaaatgctatgtgtaatctattctaagcattatttaaagttggcaaagaaaaatgtgggacatagtgt

SEQ ID NO: 167487 - DNA, 572 bp, Homo sapiens
ggaggagtgcttgagggcaggagttcgagaccagcctgggcaacatgttgagtccccagctactcaaaaggctgagcttggagggttgcttgagcccaggagttggaggctgcagtgagctataatcatgccacggcattccagcctgggtaacagagtgaggctgtctcttaaaaaaaaatgccatgagtaaaagtaaggaagcatttggaagaaaatatgccctaccaagtttgtctgtatccagaaccaacaactatttggctgatatttcatgttgagatgctttgatggcattgctttactgtcttattaaattatgtcaatggaaggttttcacacatctttatcgaggttggactggtttgccactgacagatgacttatcttcagagtaagctactcttttctagaccaatctttttccttttgctaattaagaattgactcctctggaatccttttattgaccatgaaggrtggtaggaaggaagtctcaaggagaaaatgctatgtgtaatctattctaagcattatttaaagttggcaaagaaaaatgtgggacatagtgt

SEQ ID NO: 167488 - DNA, 466 bp, Homo sapiens
tcaggtctgtctgtgttcttaactacagtgttcttaactactgtatagagatgacctccagagaaggtaattcttgatctgaggtttgaaaactaataaacagtagttagctgtatgaaggatgttctcacacagctagatgtactctagagggtggcaggcagcagcatgggtgaagttgcagaagcatcgagtctctaggatgttaatatttgggtctctaggctgtcaataggggaagtgggctggggtagataaggctcaaaagtaagcagatagccatattgtaaaagtcatagtgcattaaacaaggaattaaaaattccagccatagagctatagggacccaaagaattattgtaagtgtctgtgtgtgcacgcatgtgtgtatgtctgtgtgtgtrcacacatgtgtggacaggggtgatgatataaccagatttgtatgtgtgacagctgtgtggag

SEQ ID NO: 167489 - DNA, 408 bp, Homo sapiens
cttctaacaagttgtttatgcccttctcggtagaaaaatgttcccaaccagttctggatatggtgctaaacttaagtaaaatagcagtgtttaagtcaactgagtaaaaagaacagtcaagaggaaatgaaataaataatgttttcaagttgtccagatgcatcactattcattttatttctgtcatcactattatttttacttagttgatatgtgaatctgtgccatgagragctactggggattaaatctcaaaagacctaggaaggaaatgccagcactctaattgctcaatggctgtgtgaaaaattctctgaaagaaaaaggcaaggttcataaataacatgtgaatattcttctccaaaatgtggaaagtggcactagttgattggacgataagtagatgaa

SEQ ID NO: 167490 - DNA, 408 bp, Homo sapiens
cttctaacaagttgtttatgcccttctcggtagaaaaatgttcccaaccagttctggatatggtgctaaacttaagtaaaatagcagtgtttaagtcaactgagtaaaaagaacagtcaagaggaaatgaaataaataatgttttcaagttgtccagatgcatcactattcattttatttctgtcatcactattatttttacttagttgatatgtgaatctgtgccatgaggagctaytggggattaaatctcaaaagacctaggaaggaaatgccagcactctaattgctcaatggctgtgtgaaaaattctctgaaagaaaaaggcaaggttcataaataacatgtgaatattcttctccaaaatgtggaaagtggcactagttgattggacgataagtagatgaa

SEQ ID NO: 167491 - DNA, 354 bp, Homo sapiens
aaggcagcagccccagtcaggggtttatagataaagctcccatctccttgggacagagcacctgggggaaggggcrgctgtgggcagagcagacttaaatgttcctgcctgccagctctgaagagagcagcagatctcccagcacagcactcaagctctgctaaggaacagactgcctcctcaagtgggtccctgacccccatgcctcctgactgggagaaacctcccagcaggggtcgacagacatctcatacaggagagctctggctggcatctagcaggtacccctctgggacgaagcttccagaggaaggaacaggcagcaatgtttgctgttctgaagcctctgctggt

SEQ ID NO: 167492 - DNA, 587 bp, Homo sapiens
tctttgccaatctttaatataattcactttttcccaaatactttttatttatttatttttttaactttaaaatatttccctcttttttgccttctacttccattgaataattacctattatatttattctcttttgtgttccctctagattagttttcatttctaaaataattttttctttcatgctaatattttcctgagtcctgatatttattttctgaattattctagtttccatgtatttttttcacctattgtgtcattttcttgatacttctttactattttaaaaatagaagcttagggttttaatttattatttaattatgtcttttaagcatactttgtctatcaggttgttattctgctcctatgggatttaaccttcatagttttttgctgtttgwtttatatgaaagtggttttcctgtacttttagaaagaaatgtggttcagggtaactttcaaacttcacacggctccctcttctgttgctttcgtgttatgttaaaaaaaaatagcagctttctaagatttcttggatccattcccctctcccatatttatctgtgtcttctctattgtct

SEQ ID NO: 167493 - DNA, 556 bp, Homo sapiens
tgcactggctgcccatcaacctggaatgctcttcctctgtataaccacaagcttgacttgttcacctccttctagtttttgattgaatatattatcaccttgatcatcctatttaaaactgatgaccctcttgaactcctgattccctttaccacrtctcaggggttggcaaattatgacctctaaccacctgtttttgtaaataaagttttattggaacatagccaaactcatttgttgttgttgttcttgtattttacaccttgaatatgactgcttttgtccaacaatggcagagttgagagacaacgtggcccacgaagtctaaacaatttactacctggcccttttcagaaaatttgccaacactgccctgtttcattttcttctgtttcatttctaaccttctaacggtatacacatatctatatatctatatccatccaaacctatctacatatctatatcttatttttattttattctattttttgagatggaggcttgctctgttgcccaggctggagtgcagtggcacgatctcagctcactacaa

SEQ ID NO: 167494 - DNA, 623 bp, Homo sapiens
atctgcttctactcttttttgaatagtagccaaaatgtttataaaagtttggagctcttgtttggaaatgcacttcacaaaattataattatttttatcagaaataccaaatgcaaacctaacaaggggtttaagatctgattttctttaatgcttamagttggactatattttttgggtggcaacatcagctctctcagaactctagagtgtcttttattttagtttactagacttgcatctgggaaattattgctttaggtcaggatgctaacgagtatttctagaatcctgagcaagttagggcatctttcttgtgttttagaatcttccatccctaagaaacttgagcacttggggcatgcacttctttgtgagaaaacacaacgttcattggtttagaataaatgcacaatggcatccccagttttctaattatttagattagagaagctaaagaaaatacaagagaattcaatagtcattgaccttctgtcaaggctctaacatttgctagctttcagagaatcatgaaattataaccctattcaaatttcactttgaaaattaaaatgatgaggtaactttcatttgatctgtgaaactgaaagcattgaaagggt

SEQ ID NO: 167495 - DNA, 482 bp, Homo sapiens
gttacaggacaacaagctcagggctgattctacactatggggagttgtataattatttcattatatattccaatgtaataataatagaaaataagtgcacaataaatgyaatgcacttgaataaccctgaaaccatccccctcacccctcatccctggaaaaattgtcttccatgaaactggtccctgacagcagaaagtttggggaccactgggttacagaagctaggaacgctagctaacataacataagtttctaagtctctgttcattaagcattttggttgccgggaacaaagactcactcaagttgcctgaagaaaggtgggtgccctcatgcaggcggcattcgagaagacaaaacatcccagaatccaggaaggcttgggggcaatagaagagtcaaatccaacttgcaggccggaagatgattattttgcccctcagcatcaggagctccataattttccattttgtgtgcca

SEQ ID NO: 167496 - DNA, 581 bp, Homo sapiens
cttgtcctgttaaccactgtttctcacaagtaagtaatatctggatctcctcaaaaggaagatgcctctgagaacasagctatgtgtcctggatcagtttaagaaacaaatgtttcatcagaaaaaaacaagatgtggccaggtgtgagtggctcacataatcctagcactttggaagccaaggcgggaggatgatcacttgagcccaggagttcaagaccagcctagacatcatgacaaaatcctgtatcaaccaaaaaatacaaaaattagccgggcatagtggcatgtgcctgttttctcagctacttgggaggctgaggtgggagaatcggcttgagcccaaaagacagaagttgcagtgagccaagattgcactgctgcacttcagcctgaatgacagaatgagaccctatctcaaaaaaaaaaaaagaaaagaaaaagaaaaagtggctgggcacagtggctcatgactgtaatcccagcactttgggaggggtgggaggatcacttgaggtcaggagttcaagaccagcctggtcaacctggcaaaaccccatctctacttaaaaaaaaaattt

SEQ ID NO: 167497 - DNA, 581 bp, Homo sapiens
cttgtcctgttaaccactgtttctcacaagtaagtaatatctggatctcctcaaaaggaagatgcctctgagaacacagctatgtgtcctggatcagtttaagaaacaaatgtttcatcagaaaaaaacaagatgtggccaggtgtgagtggctcacataatcctagcactttggaagccaaggcgggaggatgatcacttgagcccaggagttcaagaccagcctagacatcatgacaaaaycctgtatcaaccaaaaaatacaaaaattagccgggcatagtggcatgtgcctgttttctcagctacttgggaggctgaggtgggagaatcggcttgagcccaaaagacagaagttgcagtgagccaagattgcactgctgcacttcagcctgaatgacagaatgagaccctatctcaaaaaaaaaaaaagaaaagaaaaagaaaaagtggctgggcacagtggctcatgactgtaatcccagcactttgggaggggtgggaggatcacttgaggtcaggagttcaagaccagcctggtcaacctggcaaaaccccatctctacttaaaaaaaaaattt

SEQ ID NO: 167498 - DNA, 560 bp, Homo sapiens
atttatcaggttgaattactccccaccttccagggaagtctcaggttgaggtctttggaaatagtcatgccactgtttcctctttgagtttatggttaayggcacagagagaagtcttttcttccctgggtagttctgagtaagaaaacaatagtcaaacttgaatgtaatcactgaggcaacaagagaaagaaaagtaatgtttagttaacagaactgcagaccggaagagacaggattcatggatctgccaaggtgaggaatacagcctgaaatgcaaatagaagcagattggagaacaggaaagaaacttctggagaaagcaggcaaagggacctgttccaatggaagcacactttatgtctcccagaatagtagttccccatcctggcttcctgtcagaattacctgcagttcgtttcaaaaaaaacacatttccagaacttgctcaattcctgctgaatcaaaatatgactttttatgcagctggcctgtcacctacacatgatgaactttttcctgtccagaggaaaatatccatgatgatggcaaaagtcctt

SEQ ID NO: 167499 - DNA, 430 bp, Homo sapiens
cagcaaagccagaggccggacacaccacggcctcctggatctgcgctgcctgcgcaataagcctggggaggtgccagctccggcaggcattgggcaccsgggagtcccgccgctgtggccgcgcagggcaccggatccctccaggatcccaggctcccgacgtccagcagaagtgctctggagtgaggcttcattggtcccaggtgagcgtttcgttgccagctcgttgcgcgaggtctgaatgcacagtggaaacaacttagggtgggtatgggaaaagaagaaacatatttcagaagcactcgccaatataaatttttaaaaataaagatcttaatacagtaatttgactagagctagcagactgaatgagtatggacaccagaaatatgctttcggctgggggatgtagctcagtggtagagcgcgc

SEQ ID NO: 167500 - DNA, 585 bp, Homo sapiens
aaatttgcttgtgcatagttgccttgcctatgaatgggaggaggtagaagtggtggatgcactcagggacttacatgaaataggatgtgaggagttgttctttgttaaaagtcactgtctataatgggagccctacaaggacatctaagaattcatctgagccagataagttgcagcagtcaggtacaaacaaaggtcagcaaactttgagaagtggcaaatttagtttttgtttgctagcagtaagtacattttgttgtgtagcaattacatctgtcagttctaggcaaaattttcccaagtacctattactcttgggagttttagacccaaatattcatctgtgctgttttctgagtagatgttccgtcaagatctcaaattttcttagttgcaagctgagcttctcttcttccttaaacctgcttctctttctagatcttaatattgaaatcttggggtcattttccagctgcccraactaaaaccacttattgtgttcagtctcttcctgctgcctcctgtaatcggttgtcaggtcttgtcatgctgtctaattgagtgctgtccttagacagttgtgca

SEQ ID NO: 167501 - DNA, 477 bp, Homo sapiens
cccctgtggtgttcagatgctcggaagcactgtaaactgtgaattttctagcttttaatgtttrcctaagacccttaacatttttctaatattgttgatcctaggacattttcttgagtttggtccccttttccctctctgtacatatactttttgcatttatatatgaaagcctgacagctgaattggttcagaaatgtaacactggaaagaagaaaaaaacacagggatagcctttgggacatcccatagtattcagtataaatatcaaagtatcctgaaaaaaataaaacaacaacaaattcttcttgctaagagtttagatatctaatactagatagaaaagataatacaacgggggtggggggctcactgaggtataaaatctaagctgtcctctgcatcacaaaatttttaggactttttgaacatgtataattatctgtgttcagctatttccttataaatggacaccct

SEQ ID NO: 167502 - DNA, 450 bp, Homo sapiens
acacacacacacctatccgttaccacacagtgacagaattatgggatttgtwggtgtcttacgtttgtttcttctcaactgccttcagctactcaaaaataacctaagaattctagtttgaatttcaaagatgtttctaaacttgtgtttttgctgcattatgttatcctaaaaatacttccaacttttcttgatttttttccctgtgtaattgttttcatgtgtttctattttcttacatctgaaaagtaacactttgaaaaccacatgtggttgctgtgttccagaagggccactcagtaggaagcaccctggagtcatggagtcatgggactttgtgatttctcctctcctttatttcactgattttaagctgaactttgtagtgtgtcctcatcaaaaaaactggataaggagaaagatgctggggatgttcaacatgtttgtatc

SEQ ID NO: 167503 - DNA, 603 bp, Homo sapiens
ggaaattacaagtgttactcaaatgaacacaagaatgaaaagaaaggctgggcacagtggctcacaccagtaatcccagcattttgggaggccgaggcgggagaacacttgaggtygggagttcgagaccagcctagacaacatggtgaaactccatatttttagtagagacagtgaaaccctgtctctactgaaaatataaaaattagccaggcatggtgatgcacacctgtagtccaagctactcgggaggctgtggcaggagaatcacttgaacctgggaggcagaggttgcagtgagccaacattgtgccactgcactccggcctgagtcacagagcaagactctgtcaaaaaaagaaaaaaaagaaagaaagaaagccaaacagccttattgctgatatagagaaaggtttagtggtctggatggaagttcaaactagacacaacactcccataagccaaagcctaatccagaggaagaatccaactctctttaatgctataaaggttaaaaaaggtgaggaagctgcagaagaaaaatttgaagctagcagaggttgatttgtgacgtgtaaggaaagaggccatttccataacata

SEQ ID NO: 167504 - DNA, 622 bp, Homo sapiens
ctaaatgacctgctgtgggtcacagtgggaagcagtgtgctgcttgcttccttctaagatgcagtgtgctgcttgcttccttctaggatgcagaacaggcctcaccaggtaccactttacatttctaaaagatgagggaatagtaacttaaattcttggaacaaaaaaactgtgccagagaggagagagagtgagggagagagagagagagagggagggagagagattaattcatatcagaagggctccagggagatatagagaatgcagaagaaatcactgatacatgtagatgttctattcttccagmcactgttctccaccatcactcagaagcctcattttctttcttttttttttttttttttgcagttgcaagatttaatagggtgaagacagagctcccatacaaagggaggggactcaaagagggtagccattgccagcttgaatgcctgggtttatatccccatcattgtccctcccactatgctctcaggcaatagattattggctatttctttacctcctgtttttgtctaattagcattttagtgagctctctttactacctgattggtcagatgtgagctaagttgcaagccccatgtttaaaggtgga

SEQ ID NO: 167505 - DNA, 622 bp, Homo sapiens
ctaaatgacctgctgtgggtcacagtgggaagcagtgtgctgcttgcttccttctaagatgcagtgtgctgcttgcttccttctaggatgcagaacaggcctcaccaggtaccactttacatttctaaaagatgagggaatagtaacttaaattcttggaacaaaaaaactgtgccagagaggagagagagtgagggagagagagagagagagggagggagagagattaattcatatcagaagggctccagggagatatagagaatgcagaagaaatcactgatacatgtagatgttctattcttccagacactgttctccaccatcactcagaagcctcattttctttcttttttttttttttttttgcagttgcaagatttaatagggwgaagacagagctcccatacaaagggaggggactcaaagagggtagccattgccagcttgaatgcctgggtttatatccccatcattgtccctcccactatgctctcaggcaatagattattggctatttctttacctcctgtttttgtctaattagcattttagtgagctctctttactacctgattggtcagatgtgagctaagttgcaagccccatgtttaaaggtgga

SEQ ID NO: 167506 - DNA, 552 bp, Homo sapiens
gtaaatgggacttctggtccttctttaaataactcctttctaggtgacggtctcacttgtagggtctcctcgccttgagtctstcgtccttactgctgccagttggatttttctaacatgtacagttgaccatgccattcattctctggattaaaaaagcatcaattgtcttcatcttagcaatttctgcagcaattcctccattagttgttgagtaaaatctaaacctcctggtgtggtttattccctctgttctacctggcctgctttcccagtttcttctactttggtggatgtgcctcagtgcccgcatggtgcactccttgcaggtctcctactgtgcctccccaaggccactggaagaacccaaactgccatcggtaaggcaaagaccaaaataaatatccttctgaaaactcttttacaccatcccaataaaactgaaaaataatcttcaggcatctgcaaaatgttttatgcaccagaactctctgctaatttttacctttcaaaaagctgttgcatgccatgttctactcacagcaatcactc

SEQ ID NO: 167507 - DNA, 246 bp, Homo sapiens
ctacttaatgctatcccacagttcaataatgctctctttattttttttcartctttctctctttgtcacattttgaatagttttgattgctgtgtcttcaagttcactaatcttttcttctgcagtatttaatctgattttagtcctatccattattatcttatcttagacattgtatttttcatctgttgaagtttgtttggatcttttttatgtctttagtgtcatcatataacgtgttcaatc

SEQ ID NO: 167508 - DNA, 498 bp, Homo sapiens
gaattcactcagtgtcacaagaacagcatggggaaaaccacccccatgatccaatcacctcccactaggtctctcccttgacacatggggattacaattcaagattagatttggttggggacacaaagccaaaccacagtattaggctacttaatgctatcccacagttcaataatgctctctttattttttttcagtctttctctctttgtcacattttgaatagttttgattgctgtgtcttcaagttcactaatcttttcttctgcagtatttaatctgattttagtcctatccattattatyttatcttagacattgtatttttcatctgttgaagtttgtttggatcttttttatgtctttagtgtcatcatataacgtgttcaatcttttctctacttttttttcacttattgaattgaaaaatccattttctatcttcttaaacatgtggaatatagttacgataactattttaatgtgcctatttacaca

SEQ ID NO: 167509 - DNA, 498 bp, Homo sapiens
gaattcactcagtgtcacaagaacagcatggggaaaaccacccccatgatccaatcacctcccactaggtctctcccttgacacatggggattacaattcaagattagatttggttggggacacaaagccaaaccacagtattaggctacttaatgctatcccacagttcaataatgctctctttattttttttcagtctttctctctttgtcacattttgaatagttttgattgctgtgtcttcaagttcactaatcttttcttctgcagtatttaatctgattttagtcctatccattattatcttatcttagacattgtatttttcatctgttgaagtttgtttggatcttttttatgtctttagtgtcatcatataacktgttcaatcttttctctacttttttttcacttattgaattgaaaaatccattttctatcttcttaaacatgtggaatatagttacgataactattttaatgtgcctatttacaca

SEQ ID NO: 167510 - DNA, 518 bp, Homo sapiens
agaaaccccgtctctactaaaaatgcaaaattagccaggcgtgatggcgcatgcctataatcccagctgctcaggaggctgaggaaggagaatcacttgaatctgggaggcggaggttgcggtgagccgagattgtgccattgcactccatcctgggcaacaagagtgaaactccatctcaataaaataaaataaaatgaaataaaataaactgaggcccaacgtggtggctcacacctgtattagtacattttgggaggctgaggtgggcggatcacttgaggccagaaattctgagaccagcctggacaacataatgaatcctcacctctattaaaaatacaaaaaattagccggatgtggtggcacacgcctgtaatcccagctactgggrtggctgagacaggagaatcgcttgaacctaggaggcggaggttgcagtgagccgagatcacgcactgtacaccagccggggtgacagagacccctgtctcaaaaaagtaaataaataataagaa

SEQ ID NO: 167511 - DNA, 587 bp, Homo sapiens
gggtctatttgtcagttttgtagaggatactggagtttctctccctattcaattctctcaaaggaaatctagctgaggcacagtggctcttttcttgctgcctgcagctgcaacratagagtaagtcccccatacagcctcttgctgccatatttccccctcccaataaacaatgcttttgaagaatagggcaaagaacatacaatattgcttatatttaaaacaccataatggccccacactcacaggaaatgtaagtcttatccttattatatcagagactgaacataagggctgtttcctgacaatctctacatcagttccgccatctcttctgtctccaccatcaccattaagtctcagtttagtgacgtaacatttgggcaaaagaaaacaccatttcctgtcattgcaatgtcctgtccctctctgaaagcagatggaacagttactcctttgagaagactccatttgcccaacacattctgtcctcttcctcaacctcatatatttctatttatcagtgaccagtaaacttaggacaaaaggaaatttcatgaataggacccttgaagtgtctaataata

SEQ ID NO: 167512 - DNA, 595 bp, Homo sapiens
ataagggctgtttcctgacaatctctacatcagttccgccatctcttctgtctccaccatcaccattaagtctcagtttagtgacgtaacatttgggcaaaagaaaacaccatttcctgtcattgcaatgtcctgtccctctctgaaagcagatggaacagttactcctttgagaagactccatttgcccaacacattctgtcctcttcctcaacctcatatatttctatttatcagtgaccagtaaacttaggacaaaaggaaatttcatgaataggacccttgaagtgtctaataatatggtcctcaaaatacattttctactgtacatatggtcttgttctttaaatatgtgaagcacaaaaatatctcttaatcagtaactctcgtctatttaatttatataaatatataaaactaattaattagcttattatttacaacataatgagagttgttaagattctgtatggacacaaacacaaaattgatctttttggaattgatatttaaagtttaycattttgatactcaaagtattttaggtataattatttgagagccataacgataaaaaataactggaagttgttac

SEQ ID NO: 167513 - DNA, 466 bp, Homo sapiens
gtttttttaatattggtgtttctagaactgttaagaagggtattctagaaagtcaactataatttgcacacaccatcttacactggtataattatttacagaaggcatttaggcgtttgactcatgtctatgacttaatatgattcagttgccgtatttttaatrcaaatttaggaatgatttttcctaagtaattattgcttctaataaatgcataaaaaacccactgatgaatttgctaggattaatggttataaacaggtttatatctcaacacattattatttaaaaatatgacattaaaaaatgaacagaatggccaggtgtggtggctcacgcctgtaatcccagcactttgggaggccaaggtgggcagatcacctgaggtcaggagttcgagatcagcctggccaacatggtgaaaccccgtctctacaaaaatacaaaacttagctgggcatgatgg

SEQ ID NO: 167514 - DNA, 466 bp, Homo sapiens
gtttttttaatattggtgtttctagaactgttaagaagggtattctagaaagtcaactataatttgcacacaccatcttacactggtataattatttacagaaggcatttaggcgtttgactcatgtctatgacttaatatgattcagttgccgtatttttaatacaaatttaggaatgatttttcctaagtaattattgcttctaataaatgcataaaaaacccactgatgaatttgctaggattaatggttataaacaggtttatatctcaacacattattatttaaaaatatgacattaaaaartgaacagaatggccaggtgtggtggctcacgcctgtaatcccagcactttgggaggccaaggtgggcagatcacctgaggtcaggagttcgagatcagcctggccaacatggtgaaaccccgtctctacaaaaatacaaaacttagctgggcatgatgg

SEQ ID NO: 167515 - DNA, 466 bp, Homo sapiens
gtttttttaatattggtgtttctagaactgttaagaagggtattctagaaagtcaactataatttgcacacaccatcttacactggtataattatttacagaaggcatttaggcgtttgactcatgtctatgacttaatatgattcagttgccgtatttttaatacaaatttaggaatgatttttcctaagtaattattgcttctaataaatgcataaaaaacccactgatgaatttgctaggattaatggttataaacaggtttatatctcaacacattattatttaaaaatatgacattaaaaaatgaacagaatggccaggtgtggtggctcacrcctgtaatcccagcactttgggaggccaaggtgggcagatcacctgaggtcaggagttcgagatcagcctggccaacatggtgaaaccccgtctctacaaaaatacaaaacttagctgggcatgatgg

SEQ ID NO: 167516 - DNA, 500 bp, Homo sapiens
tgtttaaatgctttaatatttatgaaaggaatggatattttcaatacataactggtaattatttataggagtggctgaayttgttcctctaatttaaggacaataggcctctattttattcatctacataagtggtcatgatagaggcatcttgaagatttgtgaaggtattcttagctattacagtaatagagatgagatgctactggcattagtgaataggggctagggatgttatacttcctgtaaatcagggaactatattctgtccaacattatttttaaatatcctgccatattaaacccactacaaatatatatcaataatatctaattttaaaataagttttatcaagttcaattttaataagaattccaagactagacagaaagcttgtcatgaagaagaaagcttaatttttgagaagacattttcttaaaattattgaataatgtattaacttgtaccatactgtttattctactgtattatggcattg

SEQ ID NO: 167517 - DNA, 583 bp, Homo sapiens
acagttaaggactttaggacagtaaagaactttagtgagtaaaggacctgagggtagttagggtataaatattttttggagatttctgaagacattggggctgtagaaagcaaatgggagaagaataccacttaggtaggcaaaaatgaaaagggatttaaaaaaacrgtaatatcacctgctcagaaataaaattaacttttaacaaaattaataaagccttggattcaggaatcttcatgttcacaggtcctttcccaggccctaggatgggccctagcaatgagctcatgtattgtttttataaaatttgccctccattttgcactcccactttccttcacacttctccctgagagtaggcatcattgaagtgattttggcaatttggggatcttgctaaaggaaaagttattaaagaatgtatttagttcacatttaatagggtgtgtttatgtgttctgtagtcacatcgatgaatagatgaggtattgctagcgtgtctggtgttggaattgcttctaaaagtattctgactacccctgtgctgactcatctggcattcatcaacattttgatacaa

SEQ ID NO: 167518 - DNA, 574 bp, Homo sapiens
agttttgcctatttttatacttaaataggagatatgttaatttattaagaacaactttttttaaaagcagtattaaaagatcgaacctagtgtttttaaactgctctatatcatcrttctttaacaagttcctcagcccatatttttccttttgcctgtacacaggcctctcatctgtctggcttaaggtcccttttactttgtactctgtcttatctcaatgacttccttatcatttaccttagaacaagcccactgatgacccagcatcttaactctgatttgtgtctttcctatttcacttgccagttgcaagctctgtgctcctatatttcccaagtgtccagctgaatctccccagtcagtaaaagttatcccactaacaaggttaaaaatgacttttcttctgatttgattttatatctactgaactatttattatttttccagcactgagtcaaggcaatattgttttcgtacccctttaacctaatttgagtgacagaaactttaacgatatgtagagagttttgctaatgtctaactaaacataaatcacttattccacatctga

SEQ ID NO: 167519 - DNA, 574 bp, Homo sapiens
agttttgcctatttttatacttaaataggagatatgttaatttattaagaacaactttttttaaaagcagtattaaaagatcgaacctagtgtttttaaactgctctatatcatcgttctttaacaagttcctcagcccatatttttccttttgcctgtacacaggcctctcatctgtctggcttaaggtcccttttactttgtactctgtcttatctcaatgacttccttatcatttaccttagaacaagcccactgatgacccagcatcttaactctgatttgtgtctttcctatttcacttgccagttgcaagctctgtgctcctatatttcccaagtgtccagctgaatctccccagtcagtaaaagttatcccactaacaaggttaaaaatgacttttcttctgatttgattttatatctactgaactatttattatttttccagcactgrgtcaaggcaatattgttttcgtacccctttaacctaatttgagtgacagaaactttaacgatatgtagagagttttgctaatgtctaactaaacataaatcacttattccacatctga

SEQ ID NO: 167520 - DNA, 433 bp, Homo sapiens
cttaggcacgtttttcacctggtggctattttcttttgcttactttcatctctgactagatccctaagagtagagaataccaccgaaatattacaaattctccacattacytaggaacccttcataacagaactgtaaaatatattaaatatcttgatctcccaggcaatttgccattggtaaaaaacataaaaattaattaactggtccaaataatacagcttcattaaaaagtactaattaatatgttggaaggacacaacaacctctaaaattattgagtattatgatgacagatgacgcagttaaaacgggacaaatagcatgtttgtaaatattggcatataagtttatcattttccctttattcaaaagaggatgttaagagtaattcaaaggccatatatatttttaagacaaatatatttccatg

SEQ ID NO: 167521 - DNA, 570 bp, Homo sapiens
atataagtttatcattttccctttattcaaaagaggatgttaagagtaattcaaaggccatatatatttttaagacaaatatatttccatgtcagcttcatgcccattgtgttgacttcaattatggttataacatctgttttctttatctagatacaattgaatctagaagatcatttctgtattttaaaaattctgatataatagttttatctttgcattgtagactttggacataattactggaattgttgctgaatgccaaagtttcagcctaggtccagttgctcgctgcacagaaagccaatcactgagatgatgagtattgccaagcaagaaaggctttattgtgggtaacatcagyttaactgtcaaacctgtccctttcctaaatgactaaagttaggggtttacatagcagagcagggaattaggaaagattaaagaagaggagtttgtcaacaggcagcaggtgcatctcattgtccagatacagtgatccagaaagtttaagttcctccatactagctgggaggcctgatggtaggtttactgataaaggaactcata

SEQ ID NO: 167522 - DNA, 579 bp, Homo sapiens
gaaccactgttctaattcatgatccttaaaattccattaatattcatgccctagaatttcttaacttctttcacttgtagatgaaaacaaaagatacttactttgcttcagatctcaaggatttgaagaatataaatatatagtcttatatcaagaatggcctaggcaaagattattttaaatcagatgttagcaatgtattgttgtatcatattttcttgactatcctatttctctcaacctttgagagacaaagaaatagagagagacagacagacagacagagatcatttcrtcccaccatttccaaacacccatgtatatatatcctaaatatatccatagcttctggtttcatataagatttgaatcaaatttttttcccactcagaataaccacatcaacaaaagcaaatgtttatttctcactctgaatatttcattgctgaactttcaacagcttatatgttacaaaatcgccccacgtctaacctcaaatattatttttacaagctactattgaattgaaaaagcgctttaaacacagtgagactttcttactcacagagaaacaaaaat

SEQ ID NO: 167523 - DNA, 395 bp, Homo sapiens
atttggcaggcaggggcttgggaagaggggagtgctgattggtcaggttggagatggaatcatagtggatcaaagtgaggttttcttgccgtcttctgttcctgggtaggatggcaaaaatggttgagacagattactggtctgggtggtgtcaactgatccatccagtgcagggtctgcaaaatatctcaagcactgatcctaggttttacaatactgatgttttccccaggagcaatttggggagttttagactcttggaaccayaagttgcatgacccctaaaccataatttctaaacttgtagctaatttgttagtcctgcaaaagcagactggatcccaggcaagaaggaggtctttttgggggaaaggctatcatcaattttattttag

SEQ ID NO: 167524 - DNA, 547 bp, Homo sapiens
acccattctgatactttattatagcaacctatatgaactaggaagctatcatttacacttttcttttttattcattggagccaagttattatggagttaagttcacactcaaaagtaagggaattaagctccattttttgaaggaagtttcaaaaaatagggacatatttttaaaccatttatgcctgaggttgcaattttttgaattttgaaatcagaccttagcgatgaccttgagcagcaagatataaatcactcccacgtgcttagagttccaataatggaaccatatacgagtataatggtgagcagggcagacaaagctctgcccttatggagatcgtattctacttcaggaagatttaaaaaaatcartgcataaaatctataagcaagacaatttcagattgttttaaatcttatgaagcaatgaacagatgtctgttggagatctaggaggtaaggatactagacagactggtaaggtagatttctctgtaaaggttagctaggactaagaacctaatacatgcagagggagagaagc

SEQ ID NO: 167525 - DNA, 541 bp, Homo sapiens
ctttgctcgcaatgaaggaagtggtgcagggcagaatttcaatggaagattttagccaatacttagtggctgggatacaaaattgctgactattgaagtgttatcttctctctttctctcaagcttacatgtgcctaattattattttcttcgtcacatccccttgtttttctttccattatgtttcctgtgccatccaccctccgctcaagtagatgtagcatggccaaagcagatatgattgcacacgtcagcctttttactttatcatgtctcactaaaatatcccaaagcgatagcattttcagattcctgccactcaaggagttrttgagatggaacattgtaaatcagctgtaaccaaattatgtataccttaggaatgcacaaaggtacacaatgcatttgtgtcctgttgcaatcttttttgtgcggatttcctttagctgtttgcttatttaaattctttattctttctcctcccttatatggttttccattttaaatatttactaattccttagatttttcccttgttact

SEQ ID NO: 167526 - DNA, 581 bp, Homo sapiens
ttgttcatgatgtatatggagaccatggccccagtatacctgtttcttccagcaatgctcagtataatatgaaactactaaaataggaaattcaaagggccattcttaatcatatttcatawtttaaaatccctcaattatttctctctcaaatgtatgagaacatataatcaacttcagatttctaccatgtagcctttccttatattcttaaaatatcggattttcacagccatcaagttaatgttctttttgtctcatttttccctcttctttctccttcacatatcatttgactctttcttatttttattctcttttttctcttgtatgttgacaaacatttattgagtttctacattttgcctagcactgacttaagcctatgaataaaaaagagacatatacaactctttcttttttcaaaatgttcacagtctaagtcttcaaacagattataagtcataataaatacacggttttcataataacggtttaggaatatgtacactctgccatgatgttcaagacagattggctatttcttaggaatgataaaaagtgatgtttgagctgacttg

SEQ ID NO: 167527 - DNA, 599 bp, Homo sapiens
tactcttgttcatgatgtatatggagaccatggccccagtatacctgtttcttccagcaatgctcagtataatatgaaactactaaaataggaaattcaaagggccattcttaatcatatttcataatttaaaatccctcaattatttctctctcaaatgtatgagaacatataatcaacttcagatttctaccatgtagcctttccttatattcttaaaatatcggattttcacagccatcaagttaatgttctttttgtctcatttttccctcttctttctccttcacatatcatttgactctttcttatttttattctcttttttctcttgtatgttgacaaacatttaytgagtttctacattttgcctagcactgacttaagcctatgaataaaaaagagacatatacaactctttcttttttcaaaatgttcacagtctaagtcttcaaacagattataagtcataataaatacacggttttcataataacggtttaggaatatgtacactctgccatgatgttcaagacagattggctatttcttaggaatgataaaaagtgatgtttgagctgacttggaaagttaacagt

SEQ ID NO: 167528 - DNA, 515 bp, Homo sapiens
atggtaaaagtttctataatccaactgtgagctgggcagcagtttatttaaattgcagactgcatctgtagagcatcctctagaacatctgtcttatggtcttagtagataagtccacagcacagatgtcactcctattaactctcatagagaagaagctgaacaattaggtggggagaagtggtaaaaattagggtatgatcagttacaatttcagaaaatttcctaatatatcataaatttcactgttaaatgaatttaaacttttgcaagtggargtgtggtttataagtgcctatttctcttgctagatacattatattaataggagtgtgtatggggatatgtatgtaaaatttttgagagagagttaaaaattgttgcaaatatgaaaataagtagctatcaataaatcaaaaaatatcaagtaaagaattctaataggtctatggcaagaaaaatgtatacaattaagaacaaaataacagaaaaaaacataatacaatagcatgcca

SEQ ID NO: 167529 - DNA, 613 bp, Homo sapiens
acacataagtaaagtggagactaatgttaataaccaagacagtggggaaaatgcctcggagacctttgcagtagcccctcccatcacaggcctggaggcctaggagggaaacatgatttcatggrccagacccaggagggtcctgctgctctttgcagcctcgggatatagtgcgctgggtcccagccactccaacttcagccgtgaccaaaaggaggcaatgtacagctctggctgttgctttagagggtgcaaaccccaagccttgtcagcttccacgtggtgttgggcctgcaggagcacagggatggaaagttgaggtatgggaacttccacctagatttcagaggatatatgaaaatgcctggatgtccaggcagaagtctgctgctagggcagagtcctcatggagaacctctacaagggcaatgtagaggggaaatttggggttggagtccccacgtggaatccccactgcctagtggagctgtgagaagagggcaattatcttgcagacactagagtgctagatccaccagtagcttgcactgttcacctggaaaagatgcaggcactcaatgccagcctgagaaatcagctgcagggggtgtac

SEQ ID NO: 167530 - DNA, 613 bp, Homo sapiens
acacataagtaaagtggagactaatgttaataaccaagacagtggggaaaatgcctcggagacctttgcagtagcccctcccatcacaggcctggaggcctaggagggaaacatgatttcatggaccagacccaggagggtcctgctgctctttgcagcctcgggatatagtgcgctgggtcccagccactccaacttcagcygtgaccaaaaggaggcaatgtacagctctggctgttgctttagagggtgcaaaccccaagccttgtcagcttccacgtggtgttgggcctgcaggagcacagggatggaaagttgaggtatgggaacttccacctagatttcagaggatatatgaaaatgcctggatgtccaggcagaagtctgctgctagggcagagtcctcatggagaacctctacaagggcaatgtagaggggaaatttggggttggagtccccacgtggaatccccactgcctagtggagctgtgagaagagggcaattatcttgcagacactagagtgctagatccaccagtagcttgcactgttcacctggaaaagatgcaggcactcaatgccagcctgagaaatcagctgcagggggtgtac

SEQ ID NO: 167531 - DNA, 613 bp, Homo sapiens
acacataagtaaagtggagactaatgttaataaccaagacagtggggaaaatgcctcggagacctttgcagtagcccctcccatcacaggcctggaggcctaggagggaaacatgatttcatggaccagacccaggagggtcctgctgctctttgcagcctcgggatatagtgcgctgggtcccagccactccaacttcagccgtgaccaaaaggaggcaatgtacagctctggctgttgctttagagggtgcmaaccccaagccttgtcagcttccacgtggtgttgggcctgcaggagcacagggatggaaagttgaggtatgggaacttccacctagatttcagaggatatatgaaaatgcctggatgtccaggcagaagtctgctgctagggcagagtcctcatggagaacctctacaagggcaatgtagaggggaaatttggggttggagtccccacgtggaatccccactgcctagtggagctgtgagaagagggcaattatcttgcagacactagagtgctagatccaccagtagcttgcactgttcacctggaaaagatgcaggcactcaatgccagcctgagaaatcagctgcagggggtgtac

SEQ ID NO: 167532 - DNA, 543 bp, Homo sapiens
atctgatggtttaaatgtgtgtggcaatttcccctttactttctctctctcctgccaccatggtaagttttgcctggttgcctttcaccttccactatgattgtaagtttcctgggacccccccagtcatgtttyctgttaggcctacataactgtgaataaattgagcctctttatcaaatatatagtttgcaaatatatatgtatatatgcctagactcttgtgaatacaatactcttgtgaacacaaccaatatatttctggtatggttcttgtttacaggtaccaagacagacctgatcataaaaccaataacaaagaatgtcagaagtcttttacatggaagaagaaaaaaatgcgagcaagaaggcctaagaaaggagaggtttcaatagacggtacactcggttgttcccttagaccacctttgttagtcttcgcctcaaagaaaaacatttccactgaaaaccacataatctggtttaacagattaaatatataaactatgatgtgctgggagaacttcagctttttttcctagc

SEQ ID NO: 167533 - DNA, 543 bp, Homo sapiens
atctgatggtttaaatgtgtgtggcaatttcccctttactttctctctctcctgccaccatggtaagttttgcctggttgcctttcaccttccactatgattgtaagtttcctgggacccccccagtcatgttttctgttaggcctacataactgtgaataaattgagcctctttatcaaatatatagtttgcaaatatatatgtatatatgcctagactcttgtraatacaatactcttgtgaacacaaccaatatatttctggtatggttcttgtttacaggtaccaagacagacctgatcataaaaccaataacaaagaatgtcagaagtcttttacatggaagaagaaaaaaatgcgagcaagaaggcctaagaaaggagaggtttcaatagacggtacactcggttgttcccttagaccacctttgttagtcttcgcctcaaagaaaaacatttccactgaaaaccacataatctggtttaacagattaaatatataaactatgatgtgctgggagaacttcagctttttttcctagc

SEQ ID NO: 167534 - DNA, 543 bp, Homo sapiens
atctgatggtttaaatgtgtgtggcaatttcccctttactttctctctctcctgccaccatggtaagttttgcctggttgcctttcaccttccactatgattgtaagtttcctgggacccccccagtcatgttttctgttaggcctacataactgtgaataaattgagcctctttatcaaatatatagtttgcaaatatatatgtatatatgcctagactcttgtgaatacaatactcttgtraacacaaccaatatatttctggtatggttcttgtttacaggtaccaagacagacctgatcataaaaccaataacaaagaatgtcagaagtcttttacatggaagaagaaaaaaatgcgagcaagaaggcctaagaaaggagaggtttcaatagacggtacactcggttgttcccttagaccacctttgttagtcttcgcctcaaagaaaaacatttccactgaaaaccacataatctggtttaacagattaaatatataaactatgatgtgctgggagaacttcagctttttttcctagc

SEQ ID NO: 167535 - DNA, 453 bp, Homo sapiens
tttattctggggcccacatgagattaactgattctaaaccatttgagattccatcttatgcaggaattaatttttttctctcctcctaaaaatgatacattatcgttcttccctaaataagtgattgacactataagcacaattcctcaaatcaaaaaattaggagtctctattttgactaattagttattaaatatgtcaatttaatattatccatgtttaatgcttaaatatacttgtatctatcttctttttcctctctggccatcatcccattttttcagctattattagcctctcatctggacctctgtcaaatacacatatgatttgactctacctatggctttttttcttcttacaccaatcttcagtgctgrcacacaggatacaggatgtttttagatatgttctctctctctggagtactgttcctttccttgtttactttgt

SEQ ID NO: 167536 - DNA, 354 bp, Homo sapiens
taaataagtgattgacactataagcacaattcctcaaatcaaaaaattaggagtctctattttgactaattagttattaaatatgtcaatttaatattatccatgtttaatgcttaaatatacttgtatctatcttctttttcctctctggccatcatcccattttttcagctattattagcctctcatctggacctctgtcaaatacacatatgatttgactctacctatggctttttttcttcttacaccaatcttcagtgctgacacacaggatacaggawgtttttagatatgttctctctctctggagtactgttcctttccttgtttactttgttacctctttttcct

SEQ ID NO: 167537 - DNA, 366 bp, Homo sapiens
tgaaagttaataaaattctgtggctactagtttacattcacatgtatatacactcgagatacaacaacaaaaaaaggcaacaaaaataatggggagaggaacaacataaactgttttgagtaatcatactattatgacttgctgccttctcttataaattaaaacagrgtttgtgatagaatctgcttttggtttgttatgttgagtgatacacagtgtgtcaaaacaaagttacacaaaaagttcctgtgaagtaccagctcatcactaacaaaaagctaacagcaggatgctgaaatgcaaggaacattgctgtagtcacggaaagttctaagctacttatctggttcagctccttactaattt

SEQ ID NO: 167538 - DNA, 597 bp, Homo sapiens
tgaacctcagaggtctgcatagggtcccacttttgtatttagttaactgatgatcagcacatgcatgtaaggaaaccattggaggctgaagaaagagccattaaaaagattagaagtaacaatatccattgctcacagaggaccttgaaaattacctatctcaccagccatatgtttcaatgatcaattttctagtggtaaagtattcaaaaaggactttcctcagaaatagagaataattggtcatagactggtcctgcttaacaaatctcaaaagtaagacctgaaagatatacctattttcaagtaatttaactgcttctcagaacaaaacctatatgtgtatatgtatagaaatgcagtattttgagcacccgactagataaaatcaggaagcaggaagcaggaaaatatgacttatctgggaagttttctcttygttattttgtcccacatattctagctgacagtattctcaaacacccagttacatctccttaactcagtctaactactagactcagtctgcattgtatcctggaagatagcataaggatcacctcatctatctcctttttctcagatgtcactgtcctg

SEQ ID NO: 167539 - DNA, 456 bp, Homo sapiens
aataatttaaccatcataaaacacttgtaattaaaaaatatattttaaatgtagcaaaatgaaattttaaagtaagtattttacttatgaacacacactaaataagtgagttgagggaggaatcattttgccaataaatctcacacttttttgatttcattattgtgcatatcttacacgttggggaattattttaaacatctattagtaactattataatttctgaatatttggctatgatgagaaattaattctctaacttgtttcaactttaaatcatagggatctaaggaaagtgaaaagtgcttcagtgtagatgatttcttcaggagcaccactttgaatcaaacctgaatataccttttaagttcaaaayatattaatactaaattttactttgtacaataaatttaatggaaatttcacttgtttgcacatctaaggtattactactt

SEQ ID NO: 167540 - DNA, 603 bp, Homo sapiens
aggcactgaattactttatagtttagtgttttatgcttctgaaaatgtctttatcccttgttcttgaacacagtttttttgaatatagatttmtatgttgacagttttttcaagagcatataaaaagatattgctccttaatatactgactcctctttttcctgttgagagttacagaatatttccagagaaattcctctgatataattttttttttctccagctattggttcctattcacagtatgttgtttccctacaggttttctgggttttaatgtgagctactcattttcccttgaacttcaattgtcggaattctttaaggcctgaatgaacttgaacttcttgagagaaaatgtgcatttatttctgccaattttctaactacattataatcagaaaatattttaaattacacatgtattttgatgttttcaaagaatatatacaggttgtataaattaacagtgacaacaagagaaaaaaactctgaaaaccaatttgtgagtactcagttaaagaaaatctccatgctatgttattctaatgtcacggcaatcatttttgctctttatttctctgtagcaaagtttttcttgtt

SEQ ID NO: 167541 - DNA, 562 bp, Homo sapiens
taatttttatccttgtaaaattaaaatatcaaaataatatagcatttcctattgagaaaatgtgagtaaaaagataaacagttttaatgaagagaaagaataactatcaactaaaaagaaaaaaaaaatcaatccagaattccatacccagtaaaaatacgaaagaatctatcaaaaacagaccagaaaaaaaaaagttacatcaattagatctatgaatttactaaaaggaatgaagggcacaagaattgtaactgagtaaatatacatttttatttttatctactttcttgaaggatagttgattgttctaacaaaattartgaaatatggtgaggttttataacatgcgaaattaaaatatgtaataataagagcacaagtatctaaaagaaaggaatgagattatgttcttttaaggttattctctgactatacaggaagaggtataatatcactcttaggtagaatgaaattagttaaagatatacttaaaagaaaaaaacaaagcaatcattagaatgaaaaaaagattaatagctgatctaaaagcacagaaaac

SEQ ID NO: 167542 - DNA, 523 bp, Homo sapiens
  misc_feature (1)...(523): n = A,T,C or G
aatattatgaataacacaaagcatttttatcagtgagttagggagagtattaaacataagatgcaatttattttaggcaaaacatattttggtaaataaaagtttataaaaaagtttaataaaaagtttgtaaagttaaacatcactcctaatacatccattaattgcaacagraaaaatatcggaaatttatcattttgagactgaagtctctgaattttcttttgacctttgggggcactcagacttagaaaaattcagatgtattctataagatttaattgaattttggactagaatttaaaatattaactaaaatgtatgcgtatttttgtatttataattgttcacttacattaggttattccttggatacaaataaatttttaccctccaaaattatgagccaatttatttttagtgtttttgcttaaaatctagatgttttaaataaatgttttcaatgatcaacatgccaatggctcaccattaagtatacatacacacatatatgnnnnnnnnn

SEQ ID NO: 167543 - DNA, 622 bp, Homo sapiens
ttagaactgtagaatattaaaatatacattttatgtatatatgtaaaatatcaaaattagtgtgatttatggtttaagttttacacaaataatattaattaaaacttgcaatagttcatttaattcaacaaactgacacacactgggcacacagtatatgcaattttgtaggcgctttgctgaatgagttcacattttatgagagagaacaagttttttggcttacaatttttttaatgttaatgtcaaagttttataaaaggactacgtgctgtagttttcaataattttggacaaaatgttatccttacttcactcttttggtcaatatttgaaagataaaaatcctgtggaaatttgtccacttataagcctctttaggtaaatgcaaaatttattggacaaatcaacactcatgtacatcaagataatattgtttctctagtaactgtaattatattcaattgagaaaataaaggtagtttaaggtacctttccttcagggaagaaggaactgttacaaagactaaatcctagggtacagaagtttgaacaaactgttgagtctgraaaagttgggcacaacttaaaaatagacttggtatgtgatgtaaaggttaaa

SEQ ID NO: 167544 - DNA, 537 bp, Homo sapiens
tagagattcacaaaagaagaaaggagtaaaagaaacctgaaaccattttcagttacaaattctggatataaattgagtgagtctcaggtgacaagtgctgtgaaaacacaaaacctaatatgacacataatctctgtgctcaatttaaaattcagagaaataaaaacaaaccacataaaaagcaagtgattaatatgagagtgcaattatgttaaatgtaaatattgtgctagtgactctaagcaaaggtcagcaaacaaaacaggtttctagctttcactcttcttgaaaagcagagaattacytgaagactctatttggggttatgatgtatgaaagatgagagcagaattctgaaaaattgggaagtagaaaaccacaaagaattatttcaagagaatacaaaatagaatcacagggccaattattaatcacaggaggtagccagaaaggggcacaaaaacaattatcataagctgactggcttgaaacaccagagtactgcaaacatccaagaagagctcccaacttcaagta

SEQ ID NO: 167545 - DNA, 537 bp, Homo sapiens
tagagattcacaaaagaagaaaggagtaaaagaaacctgaaaccattttcagttacaaattctggatataaattgagtgagtctcaggtgacaagtgctgtgaaaacacaaaacctaatatgacacataatctctgtgctcaatttaaaattcagagaaataaaaacaaaccacataaaaagcaagtgattaatatgagagtgcaattatgttaaatgtaaatattgtgctagtgactctaagcaaaggtcagcaaacaaaacaggtttctagctttcactcttcttgaaaagcagagaattacctgaagactctatttggggttatgatgtatgaaagatgagagcagaattytgaaaaattgggaagtagaaaaccacaaagaattatttcaagagaatacaaaatagaatcacagggccaattattaatcacaggaggtagccagaaaggggcacaaaaacaattatcataagctgactggcttgaaacaccagagtactgcaaacatccaagaagagctcccaacttcaagta

SEQ ID NO: 167546 - DNA, 528 bp, Homo sapiens
tcctgctaatcccaatggtcttgaggactgacctaaaaatctattctaacactacagttacttatagatttttatggtcttgatatgtaactgtatgtttaactttgttccatctaattatttctgagttttgtctcttattcccctgaacccatactcatatttcttcaaagtcccataatacattttagtactcatgagacaaatgaacacattttttcaacacagattttcttgtcaaattaactgatataaataagcatacaaaaactagtaaactgttgtgtaaattgaaataaaaatttccagaataytcactcaaagtatgccctagagaaacccaaaaacatcactcagagaaaacagttaaagtccttccaagtaaaatggatactatcattcatcctaggcagtattgtaaaaataacattttattggatatgttgaaaggtgacatgcagtagtgttttaaaagaaagctgtcaactttttctattggtttgaaagttgtattttaaggaaagaaaa

SEQ ID NO: 167547 - DNA, 572 bp, Homo sapiens
acccatagccttctcctttcataccacttggacatctttctaaatcaatatcacaaaaagaataccccattcttatgcttagttttccattatacagatagtgccttattattggtggacacttagattatttctaggttttagtcaccagacacaacgctgcagtgaacactgtatttttgcccaaatatgtgaatataatggtagggtaaagagagaacacaactcactctagctttggtttcttgcaggstttccttgagttggtctctctccagtttgagtgtctcctctactcttcttagattatctctttctttcattacagatttcatttcttcaaggttttcatgaagtttctgagccaaatttaaattctctatttctaatttactcagagttaagctttggtcttttatttgtttctttagttgctccatttcagacacttttttctgtgtctcattgacatctttttttaacgtaataagttgatgttcatttgccttaagttcttgaatcttaagataatcataaaataatatgttaggtggctttttagggacagataa

SEQ ID NO: 167548 - DNA, 572 bp, Homo sapiens
acccatagccttctcctttcataccacttggacatctttctaaatcaatatcacaaaaagaataccccattcttatgcttagttttccattatacagatagtgccttattattggtggacacttagattatttctaggttttagtcaccagacacaacgctgcagtgaacactgtatttttgcccaaatatgtgaatataatggtagggtaaagagagaacacaactcactctagctttggtttcttgcaggctttccttgagttggtctctctccagtttgagtgtctcctctactcttcttagattatctctttctttcattacagatttcatttcttcaaggttttcatgaagtttctgagccaaatttaaattctctatttctaatttactcagagttaagctttggtcttttatttgtttctttagttgctccatttcagacacttttttctgtgtctcattgacatctttttttaaygtaataagttgatgttcatttgccttaagttcttgaatcttaagataatcataaaataatatgttaggtggctttttagggacagataa

SEQ ID NO: 167549 - DNA, 507 bp, Homo sapiens
tgctaaaaggagctctaaaccttgaaacaaatccttgaaatacaccaaaatagaatctccttaaaacataaatctcacaggacctgtataagaacmacataatgaaaaaaaaaaccaaggtattcaggaaacaaatagcacaatgaatagaatactacttcacatctcaatactaatgttgaatgtaaagtgcttaaatgctgtatttaaaagatactgaatggcaaaatggataagaattcaccaaccaaaattctgctgccttcaggagactcacctaacacataaggacgcacataaagtaaagaggtggaaaaagatattccatgcaactggaatggtgaacacgagtagctattcttatatcaaataaaacaaaatgttaagcaacagcagtttaagaagacaaagaggacatcatataatgataaaagcactagttcaacagaaacatatcacaattctaaatatatatgcacctaactctggagctcccagatttataaa

SEQ ID NO: 167550 - DNA, 462 bp, Homo sapiens
ttagaaagtttcatgattcaattcaaaagaagaaaaccacattaatggcatccatgagtttttcacttattttagaatcaaaatatattgtggttatgacttaatacttaaaatgatactgaaacatattagcattgaaattttctcagagtaaaccagtgttattgcctgtgaataatgttgtgatttcaggtataagaagaatatgatatgacacagaccatctgagcctaacctttcttgactcatccttgccaaaaaaaaaaaaaaaaaaaaaaagtcrggaaaacacagaagctgcttttaaaaatctttttagtcacaatttaccctcccgctaagctcatcttttaaaataatagtttctacatcttatttttgtttttatgtcatctcagcattttgtattgcatagctttgtctacctgcttttgacaaaaaaacaattgagagggatcgtta

SEQ ID NO: 167551 - DNA, 494 bp, Homo sapiens
ggcgccttgccttttagttgtacttcttgtttacactttcgttttgattccctgacacttctgcataattacattaatgcctttgtttcatatagaactaaacgtcttgccatctcaatgccaaaaacttgaaattcttcgtctagagaatgtttgtcaaaatgagattggaccctggtaatactttgttgcctgtgcattttgctgtgcctcttagatttaaaaatatttttttcttgaaaagagcagtatacaaatatcaggttaatggaaattcacatcactggggaccatcaggatcaataaagaaggagagtgacaaaaacaaaggccttgggaatcacagtttaccttggtaataattgcagagtgttgatagaatgatcatgatgaactgaaacaatcattgacataaaagtgaaaactatcaatcaaatgttagcrcgttagcaagttttttatcgagttcctatgttgtcagtgttctcataggt

SEQ ID NO: 167552 - DNA, 517 bp, Homo sapiens
acttatctactaagaacttaaaatgaaataatatttagaattagaatacttaaatgtttaaacttccattttcttaggtttactagctttatcttaccattggtgaaatctgcattcataatagtgatctcttgtactgtcatcatgaaggatgctgccaatatttccactgacatcttttctgtgactgttttgacatcatcctagatattactttcccatcatcttgacatcatagcatagcctccccagactggtggtgatattgctttgcattgttttaacatcacaatctggtctgtgtagatttgtattgacctcatttggccatcaatttgacattgtaatttagtctccatggaaacatgaaaccattttgtcattataatttgtcattataatrtggtgtccatgggcttatcaaaattgttttcatatagcaatttgacattacaacacaatctctataggctcccccttggaatgttatgatgatggtaaattgcattcaaatgag

SEQ ID NO: 167553 - DNA, 623 bp, Homo sapiens
gcttgtaaatggccatgtggagagaccctgacaccacatggagaagaaaaaaacccagatgagctcagccttcccatagtctttgccaaaacacaaagtatatgagggcagccctttttgaccctcaggctagtcttagttaagaactgaataccactgattgatccatgttgatgcctcatgaaatagaatactctcccagtccaatcctatctaaatctctaatgcccagactgtgagcataataagatgactgattttttttaagccaatamattttgtgttagtttcttatgcagcaacaggtaactgggaaactacctttcagactgtatgaaaacatttattatacaaaatacagtttccatgcatttacaaataacttattctttaaatagttcattatttattcaataacaaattataagttgttagcttctttttctgtgttctcttaagttttttttacagtcttccatcatagttcttttttttttttggaatacattttaactgttactttatgtgtcttgcttctttctttagactacatgtgggtctaagatcatgtgtatttctttagtaaaataacatgaggttaagcaaatacacttttgctcaga

SEQ ID NO: 167554 - DNA, 594 bp, Homo sapiens
ccaacataacttttctatggatcatgatctaaggatggcttttgacatttttaaatggttgaagaaaatcaaaagaagaatcatattttgtgacacataaaaattagatgacaatcaaatttcagagcccattaataaagttttattgaaatacagagtgagatcagatattgggaacagtttgagcacttatcctagtcaatgattaaatgttggagagataatattttggttatattgagttaaataaaatagattatgaaaattaattacacatttttattttaatacagttattaaataatttaatatgacatatgtgtctcatattatatttctattagacgaggctgccttgaagattggtctcactaatgatgtaccagagaggcrtaaataagacctttatgtctctattaataagataaactgatcaataccacagaataattttcagatcctgcaagagattggagttaacttataccaacagtaacagagaacatgacaacatgataaatgatggtatcaggaatatagggcctatccaattcaaagcccctactgcccctaattctccaatttctttttcct

SEQ ID NO: 167555 - DNA, 401 bp, Homo sapiens
ctaatgccaactggtaattcattcagaaatctggcctcttggactactcctctgtagttgtcattgttattctttttaagtcattcctagaagaacaagatcctccagtgtagattagcataggagtaaatctattgaaacacgatggtcataagaaatactttaaggactttttgaatcacawcccaacatgtggtatgtaggaagggttaccagaccacaaatgttgtgggatgctcatgctgatgcgaagcatttacatcaagagaaaagatggcaagtgaaagctactgtacaaatgatcatgttagtatacactagagggactttgtctttacccaacattgagaaaacatctttgaatcatattttcccagaaaatattatttcaggtacaacta

SEQ ID NO: 167556 - DNA, 226 bp, Homo sapiens
tttgagtatgactgacatgatctggcttggatttaaacaagattcttttcatgatatggggcaaatagaatgaaagaaagcwagagtagaagaagggatgccaggtaagtggctactgaaatagtgcatgggagagaggatagtgacccagaccagggtggaagcaaagctaaaaggacttgaggaatgattgaatgagacaaagagaagtgtcatgggagacatc

SEQ ID NO: 167557 - DNA, 485 bp, Homo sapiens
agttagggagaaaaagcctagaaactcatagggtctttcttatttctacccataaaatattctcttaaacctgaaatcagaatcactattttaattaagtagtagcagtagattgtgtgcactaaagatctataatattgtgtgtatcttggttgattagtagtagataaaagcagctcagatttcattttatttttttcaattcacaaatagtatagagaattttgcaacctgtcttctttttccatcagcgaagtgcaactcttgcctattctcttttccaataccctcttatatggcataaagatattcagcttttgaatagtatyagacacttttaaatagcaagattcttaatttttttttttttttttgcttcacaaattcacccctccctttatgttttgaaatgccttaaaagtgcctgattcccagagtacaatatggtatgtcttgctcccatcctcaggcaggatatcgttggt

SEQ ID NO: 167558 - DNA, 485 bp, Homo sapiens
agttagggagaaaaagcctagaaactcatagggtctttcttatttctacccataaaatattctcttaaacctgaaatcagaatcactattttaattaagtagtagcagtagattgtgtgcactaaagatctataatattgtgtgtatcttggttgattagtagtagataaaagcagctcagatttcattttatttttttcaattcacaaatagtatagagaattttgcaacctgtcttctttttccatcagcgaagtgcaactcttgcctattctcttttccaataccctcttatatggcataaagatattcagcttttgaatagtattagacacttttaaatagcaagattcttaatttttttttttttttttgcttcacaaattcacccctccctttatgttttgaaatgccttaaaagtgcctgattcccagastacaatatggtatgtcttgctcccatcctcaggcaggatatcgttggt

SEQ ID NO: 167559 - DNA, 427 bp, Homo sapiens
attatattgttaaactttttatattgtgtaaaattgaatgcaaaatcttctttattgtggtcctcatttgtaatatactcaatgaaggatgttcagcatctcacatgctggtttgccttctgcttattcttctggaaagtggatctattgtcctttgctcatattctcattggttttgcttgtcttttatgactgatatgcaatatttctttatattctcactaattctttcttagatatataactctatgtgtttktgtgtgtgtgtgtgtgtgtgtgtgtgtgtgtgtgtatcttctcaggactgttcaaagatggtattttcacattcttcatggtgtgttttaaatgatagaagatccttagtattaagatactctagtattttgtgtgtgtgtgtttaggattttttcagatttatttttaa

SEQ ID NO: 167560 - DNA, 517 bp, Homo sapiens
agatggcgagctctggaactgactggatgggagatgaaactagagaggaaagcaggggacaaattaccacacgtcttgtgagttgtcctcatctgttgggccacagtaaaaaaatacctttagactgggctatttataaacaacagaaatttattgctcacagttggaagactagaaagttcaaggtaaaggtgccagtggatttggtgtctggtgagggcttgttctctgcttcatggatcgcaccttctagctgtgtcctsccatggtagaagggacaaggcagttcccttcagcctcttttataagggcactattctcattcacaagggactaaatcacttccccaaaggctccaccttaatactaccacattaggtattaggttccaacctgtaaattttggtggaacacaaatgctcaagccacagcaataatgttaattactttgtcctctgtcctgagattactggaacctattgaaattattttggggagatagtggaggagcagcatc

SEQ ID NO: 167561 - DNA, 485 bp, Homo sapiens
gaagtaagtgcagggtcagttgaaagcatcatttaactaactctcttcgttatgccatcactaatattgcatcatgccgtcttttcccacagtgaggtttrttttcgtttttgtttcccagagttgaaaatttaattagctatcttttctttctgtccaattaaggtaaatgataaaataaggtaaatcaaagaaaatacttaaatttaaggttctccaaagtcatccgaaaagcgtaacaatggcaagcatttattttctgactttatgactttggttaatttttttctctttctcctcttcctttctctctctctttctctttctctctctctctctcatgcacacacacacacacacacacacacacacacacactcacacatccccctcaatgggccatttgtctgttgactgtgaagtgatgcctgcctttgtgatttgactctgaaagtttttatccccagcaataagagatgactgct

SEQ ID NO: 167562 - DNA, 552 bp, Homo sapiens
tgtcccgtactgccatgattgtaagtttcctgaggcttcyctagccatgtggaactgtgagtcaattacccagtctttcctttctaaattacccagtctcaggtagttatttatagcaatgtgataacagattaatacaataaatcactggggaaaatgatagaatagcagaataaactctgaacagattataaatttaaggataagaaatgaaaccataaaaataaaaagaaaaattgtggaaatattttttaatcttagttttgggaagatctttctggttgtaattcaaaatttgtgaagtcataaaaaatatttgtctaattgaaccaaaaaaaaaattaaaagtgttctatatagcacttttggtcttctagtacattgtctttcatttcaggcctaaacaaatgattcaatttaattgcagtaataataatggaacatttacaaccaagttaatgcatgaataggcaataccaattacatcagaactaccagttggttgacagtttaaccactgattgtaaaatcaaagatgtaaaaagcttttga

SEQ ID NO: 167563 - DNA, 557 bp, Homo sapiens
ccaaatttctttcatagaagtacagtgtatttaattattaaaacctgtcaatacctcaaaagaaaagtttccttgactcagaaaaatgaaacaaaggatcagccacattttaagcaaaaagtcaaaaggattacttcagtcttctactagttcagtctatgcagttaattcctgttgtgcttgatattcatgaatatttcggctctccatgattacagaaagttttccctctattctgctgtcacaatctccaaagttatcagaaatctgcattcaagaatacctgttagagctttatagctgattataaaaccactttctaaagagggccaaaacaagacaataattgtccatggatgacaaaaagttttagggcagctatagccaaagacacaatagacaaggaaatttcttacctctgtaatacacaataatttaacatatattatsttacacaacaattataattattgctgataatatatactaagtcatatcagaattataggagtttctcataattttggaacacataccaataacatatttatacaaat

SEQ ID NO: 167564 - DNA, 414 bp, Homo sapiens
gatttgttccacaatctccctatactcaacattgtcacttgcacatctgttagaaatcctcaacttagcacaccccacattaaattctcctcctgccccagatacacatctctaccccaccctggtctccttctatgagaaagatggcaactgcatctattctaagatgctcaggccaaaaatcggtagccatatttgactcttctcgctctcttaacctacacctaatttattactgtattcttttggatcacatttggtcagaagtagactctgaccatctctcttcacttctgccatcctagtccaagccrgcatcatctctcatctggataaacggtcgagctttctaccagggtatccttcttccacttcatcttcatattgtctattctcctcacagccaccagagag

SEQ ID NO: 167565 - DNA, 291 bp, Homo sapiens
cttcttatcctatataaaatatatccaaagtcctttctatagcctaaaagcctgaagkgatttgactcccattgtctacctggcttcatgctcattcttcccaactcggtttgaacaacatgctattctccaagcaggacttgctctcattcttcccatggctcagaatgttccttcctgagatctttgcgtagctcactccctccattccctcacttcattcaggtttctgctcaattattacttctgcagagctttttagacattatctaaaacagcaactcccttcac

SEQ ID NO: 167566 - DNA, 291 bp, Homo sapiens
cttcttatcctatataaaatatatccaaagtcctttctatagcctaaaagcctgaagggatttgactcccattgtctacctggcttcatgctcattcttcccaactcggtttgaacaacatgctattctccaagcaggacttgctctcattcttcccatggctcagaatgttccttcctgagayctttgcgtagctcactccctccattccctcacttcattcaggtttctgctcaattattacttctgcagagctttttagacattatctaaaacagcaactcccttcac

SEQ ID NO: 167567 - DNA, 291 bp, Homo sapiens
cttcttatcctatataaaatatatccaaagtcctttctatagcctaaaagcctgaagggatttgactcccattgtctacctggcttcatgctcattcttcccaactcggtttgaacaacatgctattctccaagcaggacttgctctcattcttcccatggctcagaatgttccttcctgagatctttgcgtagctcactccctccattccctcacttcattcrggtttctgctcaattattacttctgcagagctttttagacattatctaaaacagcaactcccttcac

SEQ ID NO: 167568 - DNA, 575 bp, Homo sapiens
cctgtgtgcctctgagcattggcggcagctgctgtcctcacccrtgaaagcctaaaacaatctctccatgacaacctaatagttcattcaactgataacaccaaagacatgctagctcacagcagtgtactaagactcatctctgccccatgcctcccccaactgtatactctattcatagaagctccccacatcaccatgctaaccagctcctgtctaaacccagccatgctcttacctgaagctacaaccacccaagaccctacacacttctatgtaaacactgttcaaacctttcttataccttttccaaacctgacagaccaaccccttccagatgcctcctttacttggattgtagatggcagctccttcctacatcaaggatgagggcatgctggctatgctataatgtcacccccccacacattattgaagccaatctgctccccctaggcaccacctcccaaaaagctgaactcatcaccctcacttaagctctcactcaagcagccagacaacagatcaacatatattcaaattctcattgtgttccacctagtgcactcacactt

SEQ ID NO: 167569 - DNA, 575 bp, Homo sapiens
cctgtgtgcctctgagcattggcggcagctgctgtcctcacccgtgaaagcctaaaacaatctctccatgacaacctaatagttcattcaactgwtaacaccaaagacatgctagctcacagcagtgtactaagactcatctctgccccatgcctcccccaactgtatactctattcatagaagctccccacatcaccatgctaaccagctcctgtctaaacccagccatgctcttacctgaagctacaaccacccaagaccctacacacttctatgtaaacactgttcaaacctttcttataccttttccaaacctgacagaccaaccccttccagatgcctcctttacttggattgtagatggcagctccttcctacatcaaggatgagggcatgctggctatgctataatgtcacccccccacacattattgaagccaatctgctccccctaggcaccacctcccaaaaagctgaactcatcaccctcacttaagctctcactcaagcagccagacaacagatcaacatatattcaaattctcattgtgttccacctagtgcactcacactt

SEQ ID NO: 167570 - DNA, 575 bp, Homo sapiens
cctgtgtgcctctgagcattggcggcagctgctgtcctcacccgtgaaagcctaaaacaatctctccatgacaacctaatagttcattcaactgataacaccaaagacatgctagctcacagcagtgtactaagactcatctctgccccatgsctcccccaactgtatactctattcatagaagctccccacatcaccatgctaaccagctcctgtctaaacccagccatgctcttacctgaagctacaaccacccaagaccctacacacttctatgtaaacactgttcaaacctttcttataccttttccaaacctgacagaccaaccccttccagatgcctcctttacttggattgtagatggcagctccttcctacatcaaggatgagggcatgctggctatgctataatgtcacccccccacacattattgaagccaatctgctccccctaggcaccacctcccaaaaagctgaactcatcaccctcacttaagctctcactcaagcagccagacaacagatcaacatatattcaaattctcattgtgttccacctagtgcactcacactt

SEQ ID NO: 167571 - DNA, 575 bp, Homo sapiens
cctgtgtgcctctgagcattggcggcagctgctgtcctcacccgtgaaagcctaaaacaatctctccatgacaacctaatagttcattcaactgataacaccaaagacatgctagctcacagcagtgtactaagactcatctctgccccatgcctcccccaactgtatactctattcatagaagctccccacatcaccatgctaaccagctcctgtctaaacccagccatgctcttacctgaagctacaaccacccaagaccctacacacttctatgtaaacactgttcaaacctttcttataccttttccaaacctgacagaccaaccccttccagatgcctcctttacttggattgtagatggcagctccttcctacatcaaggatgagggcatgctggctatgctataatgtcacccccccacacattattgaagccaatctgctccccctaggcaccacctcccaaaaagctgaactcatcaccctcacttaagctctcactcaagcagccagacaacagatcaacatatattcaaattctcattrtgttccacctagtgcactcacactt

SEQ ID NO: 167572 - DNA, 605 bp, Homo sapiens
tgccttttgccactgtcaacagcaggagatgacccagttttataaatgaaggagtgtttattccactttacaccaaatgtttttgccacttgcctttcaagcttccagattagttattaaaaagtttcttcaaattattctctggtcttgtttagctattaggcaaagggtcctgtagcttagtgaaggtctgagagtgggcacctggcccagatctggctgattggactaaagagaactctgttggaggcttctggaagagatgttttctaatagaaagagaggkttgtctacaaagaaacggtttccttctgtcctggatgcctctttgctcctgctttctatggtgttgtgatgaacatgactgtattagtccattctcatattgctatatagaactgcccggaactgggtaatttataaaggaaagaggtttaattgactcacagttaggcatagcttggaagccctcaggaaacttacaaccatggcagaaggtgaatgggaagcaagacatctttttcacaaggtggcaggaaggaaaagtgccaagtgaaagggggagagccccttataaaaccatcagatctcttgagaactcactc

SEQ ID NO: 167573 - DNA, 605 bp, Homo sapiens
tgccttttgccactgtcaacagcaggagatgacccagttttataaatgaaggagtgtttattccactttacaccaaatgtttttgccacttgcctttcaagcttccagattagttattaaaaagtttcttcaaattattctctggtcttgtttagctattaggcaaagggtcctgtagcttagtgaaggtctgagagtgggcacctggcccagatctggctgattggactaaagagaactctgttggaggcttctggaagagatgttttctaatagaaagagaggtttgtctacaaagaaacggtttccttctgtcctggatgcctctttgctcctgctttctatggtgttgtgatgaacatgactgtattagtccattctcatattgctatatagaactgcccggaactgggtaatttataaaggaaagaggtttaattgactcacagttaggcatagcttggaagccctcaggaaacttacaaccatggcagaaggtgaatgggaagcaagacatctttttcacaaggtggcaggaaggaaaagtgccaagtgaargggggagagccccttataaaaccatcagatctcttgagaactcactc

SEQ ID NO: 167574 - DNA, 591 bp, Homo sapiens
ccaatttcttataataaatatctgtctctctctctccattttttgtaatgaacatgtgttatttagtaatcagaaaaattattttaatgactcaatttttcagtgtatccatattatttcagatgtaaaacattgtatttatgtattctttaaatatatatatatatatatatayacacacacacacacacacatacacatatatatatgcatatattctattcattctggtttcttggagaaccttgactaatacagttgtggtgagtgagggggaaaatacatatgaagaattactatttttcaatgctattcatttataacccacagtattcatacccccacacacatgaaaatctgctttcattaattttgtatttatatatcatttaatctttggggtacaaatttgaaataagttttcatacaacttcacttctactgttttttaatctgataatttaagacagaggcattccctctatggtaggaattaaaagattcctttactaaatacttcagagtatagagtatatgtgctcaacatggctttttctttacttaaaactacattccaactgaccctaccaa

SEQ ID NO: 167575 - DNA, 610 bp, Homo sapiens
gtgcttacattttcaaactgagccaagccaattgaggagtgtgtgatgctataactgactttcaacaagttatctaacttcttcgttactgaaatgcctcatctctataatattaatgaaaccatgtaatttaaatattgtctgatatcaaaacaccatataacctttatgttaaatttgattcaaactgctataaatagttgtgcactttgatacatatgcctgtgtgggttataatataagtgagccaggaaggaaattgtaagaaaaagaaaagggagaagctatataaatmcctgcagaatgaactttgaaggaaaaatttctgttctttttatttatgaagaggccttcggtctgaggcatttgttttataacaaactatgtaaactaattcaatggtaactacacagtcctaagttgtgtacaacaccagagctgtgtgaagtaaagtattaaaatagtgtatagctagagagagttagtgttcaaaggtgtgctattgctattttttaataaaagaagaataagtaaaaacttagaaaaataacttgtgagttcttattcaggcaaaacttcctctataaacaattccagtttttctacagcc

SEQ ID NO: 167576 - DNA, 451 bp, Homo sapiens
acagaaatgacgtccagtggagctcttttagaatcaatgtatattccacctttatcatttgattgcatttttacataaatgtctatgaattaactctagacttcaatagctacctttcctacctgcctcctccaagcttaatcccagaaaggagtttgtagccttaatgacctgtctacacctgtttttacagagtgaagcctgcagcatggcagaacagtagcagtgttttgtgcttgtcagatagaaaacccagcatcccagagagatgaaaggactcgtgtctatggacttccccctatgaagtgtggcctacagctggactcttttcatgccggatatttagccctgttatatgactgctctgtcacacatacacacacacacacacacaygagagagagaaggagagaaaaaaaaatctcactggtagcatatgatgacctggtcc

SEQ ID NO: 167577 - DNA, 632 bp, Homo sapiens
aaatcctgcactttcttcaaaacctctaaacctttcctggcatcgtctttatcagatagcacatctctatgagacttagaaaatactgttttgccttgctatttttcttgytgtatgtaagtaaatccaaacatacctaacaaattgaagagccatctattttttgagccctagtcgcataatgttttttttttaatatatgtgtgtgcatatgtttttgacacatttcaaatagtatattaactacagcatgccctggacaaagaaaaacacttgagtataaatttacttatacttcatttatttctatttctcttattttaaaatttcaaatgaaaaactcccttttctattaaaagcagttctatagtttcacaatattcaggtaggtaggtcattacaccactttctctttatcgtaagagactcagttaggagtttaggtttgggccctgccacttcctagctatgtgaccttgagcaagttcattttccctatacatcccaattttcctctcagtaaagctcaggtaataatagctcctctctcatatggattttataaagattcaataaattaatgcatgtgaagtccttaaaagagtttttggcacatggaagacctcagtttc

SEQ ID NO: 167578 - DNA, 608 bp, Homo sapiens
ttgtgaagttctttcttcaggacataagtgggcaaatttttaagcagtgagttcaagtattgaatgaaaaaatagcaacacaaagtagagacaaaacattactttgatgaagaggtcaggaaagaagaaaaaaagtgtgaatccaacaaaaaagtaaagatttcctagaatcaacartaagtgtcatagacactactgtagttaggggataaataagggctacaataattgggtaaattacagatgaagaacacaaccaaaacattaaaaactattgcaaatattcatataaatattgacaaaggtggagtggagttaggaggttagttaagtcttcctactttctcatcctgaggacaaaaatcattatttaaatcaagtgattgaggcataagtatatcctcagatatttcattcaaaatgaaaataagatgatgtggcttaaagtggggagagggaaggcaggtgaggtgtgaggaaatatagtaattttgcaattacgcttagtggaaaaacagatttttctaaataaatggagaattaagtatacaatataattatatatgtgtatattttatcattaggaaaactaaaaatagatgtaacaa

SEQ ID NO: 167579 - DNA, 608 bp, Homo sapiens
ttgtgaagttctttcttcaggacataagtgggcaaatttttaagcagtgagttcaagtattgaatgaaaaaatagcaacacaaagtagagacaaaacattactttgatgaagaggtcaggaaagaagaaaaaaagtgtgaatccaacaaaaaagtaaagatttcctagaatcaacaataagtgtcatagacactactgtagttaggggataaataagggctacaataattgggtaaattayagatgaagaacacaaccaaaacattaaaaactattgcaaatattcatataaatattgacaaaggtggagtggagttaggaggttagttaagtcttcctactttctcatcctgaggacaaaaatcattatttaaatcaagtgattgaggcataagtatatcctcagatatttcattcaaaatgaaaataagatgatgtggcttaaagtggggagagggaaggcaggtgaggtgtgaggaaatatagtaattttgcaattacgcttagtggaaaaacagatttttctaaataaatggagaattaagtatacaatataattatatatgtgtatattttatcattaggaaaactaaaaatagatgtaacaa

SEQ ID NO: 167580 - DNA, 594 bp, Homo sapiens
ggtaactaaactatgttccatgggccacatctggtctcctgcctgttactgtaaataaagttttattagaaagcagctgatttatatatttttatgactactacyggggtttagtaaaatagaccccaaaatgtggtactttggcaggctgaacactttgaattaaaagaaattataaaaccttagaagctgcctcagaaccaagactctctcatcttctcttgcttcttttctccctaagcacaaggaaagactctctggaattttcttaactgaccgagggcacttcttttcaaaataaatgcaattgtcttaagactacctctctaggaatctcatcaaataatcgggaaagattaaccaccagagataagaagggactcaaagtcatcaccctgaccagatatacttttcatctaatcttccgagggcagctttgagagattacctgagagactttatataataaggaaaccatcgtccatggtgcagttatatctctcaccttctcaaatcttgctggtcccattcagtttcctaagagaatcacttacaagatcatgtctgcctcttcagtttattcaatttccctaa

SEQ ID NO: 167581 - DNA, 411 bp, Homo sapiens
agctgccttcccaccttaatccattatgacttacattgttttaaagtttagataccagttatttttagaagcaaaatacacatacttttttgttgagaagataatgtattgtcattatcatgctatcatagtttagtattttaaacctctgtgtttaaattattttcacttcagtgtcaaaatatgggaaaagtttattctgattagggtcttctatttaactttgtagtatgaagaaggccttgaatgarttacttacttcttcccacgctctacaaaaataaaaccccacaaggaattacttgatcaattttgaattctataaacaacattcctatgtacacattttaaatacaagagcataaaaatgataatgtgttcattaagaatgtatttatttttggcttaagt

SEQ ID NO: 167582 - DNA, 287 bp, Homo sapiens
ctctcagattacttatcataaccttcccggtcatcatggctactagattgcaattttctgggaataagaaacttctacattttaatgtctaaaatattttatacatttaaaagtaactgaaatatacaggtaataaggtgttaaacatccacacccctaccacatttgtcaattttagtgctgaggtgtttaataacataaattcaatactacagakaaatgaagttctttattttcaacttttcccaggttcattctctggcttttcttcttccctagaaacaaac

SEQ ID NO: 167583 - DNA, 512 bp, Homo sapiens
tgtcttccctcattccctaaaaaatcactgttattctgttctttttcaaggtgcactgatttcatattgttcaaacacacatgttttacagtcactttgtacagttaacacaattatcacagtgatcctgaggtgacatacatcctcagcttacaaagataacaggattaagagattaaagtaaagacaggcataaaaaattataaaagtattatttgggaactgatacatgtccatgaaatctttacaatttatgttcctctgccgtsgctccagctggtccctctgttcggggtccctgacttcccggaagatatgtttctttagtatgtagtttattgagagttaacatgaagagatcttgaattttattgaaggccttttctgcatctattgagatactcatgtggttttgtctttaattcagtttatgtgatgaatcacatttattgatttgcgaatgttgaaccaactttgaataccaaggaagaagccaatttgatcgtggtgga

SEQ ID NO: 167584 - DNA, 540 bp, Homo sapiens
tttttaatttatttttaataatacttatgtatactctgttattaatatgctattataaatattattattttatctggtcagtatttatttatgtttatcacacatttaccttttggtttctttttattctttcctgagtctttaaccttccataatatttatgatttgtttcagatgaaaaatgtctttattataatatttctttcagtgcaatgtctgcagtataatattttgtttttgagtttttgaacagaacatttctttctttcactttcttttttaaaatttatttttattagtatagcatttttttctggtaatgttttctttcaccactaggaatgtgtcataccactgtctttggcttccatttttcacatagaagtgacttgtaagttactctttgtagactatctctttttttctggttagtttkactacattttctttgttgttgtttttctgtacttttattatcatatttctaagtgtgaatttcttgaacctggaggttaagttgaatttctcgaatatgcttac

SEQ ID NO: 167585 - DNA, 458 bp, Homo sapiens
tgagtgtctaatacattttggcatattcttagaggattgtgaatgagaatggtcaaggaagccctcaaattaaaggtacaacttgaactggaaacttgtaacaggtgcrggaaatcaattttaagagaaaaaataatattccaagaaaaggaagaaagaacattccaaaaaagggacctaagcaaaaatgccatggtaggtaacagaaggtaaatgcctcttaatgcactaattcacttggcagtattagagggatcagacaggcaatgcaagagtgtcaccatagtagctttaatttacaaagtatgagagagcctaacattaaaacaatctacatatattcctatttctaaattaattgaatagataagaaacattctttatttaaaatagtgaaatatttaatttcctttggaatgtgctttgtattgaaattcaaatagaatttgtttgatgtg

SEQ ID NO: 167586 - DNA, 499 bp, Homo sapiens
  misc_feature (1)...(499): n = A,T,C or G
gaatgtgctgtaggtccactcctgaccctgtttgcctgggtatcaccagcagaggctgcagaacagcaaagattgctgcctgatctttcctctggaagcttcgtcccagaggggcacctgccagatgccagccagagctctcctgtatgagatgtctgtcggcccctactgggagatgtctcccagtcaggatacacgggggtcagggacccacttgagcaagcagtctgaactttagcagagctcatacgctgtgctgggaggtccactgctctcttcagagctgtcaggcagggatgtttaagtctgctgaagctgtgcccacagcggcccctttacccaggtgctctgccccagggagatggaggttttatctataagttcctgactggggctgctgctnttttttcagagatgmcctacccatagaagagaaatctggcagtctggccacagcagctttgctgacctgcagtgggatccgaccagttggaacttc

SEQ ID NO: 167587 - DNA, 613 bp, Homo sapiens
taaacgctccctgcctccaggggaaccctagcatcctggtattccttggtcttgttctccacctctgtggaatcccatagaggagaagaacccaggagaagtatcaccttgaagttagggagccttgtctggggtactagggtggcctaaactgcaaaccaccctccaggacatgcactgtaaaggggaagaacaaaaatcatagtttggaacactggaattgggattttgcaggcacagcctaatcaggcagctacttagtccacctccacctccaccaagctctgcatctctgtcaacctccaggcagctacttagtccacctccacctccaccaagctctgtcaacttgagctgcagtaccatgtttcccttggattagagtgcagtgtttagtgaccacattgctctagtcagaaggggttgtcactccattagcaggccatcttgatgycatttcttcagttgttttgtgagttggctccaccaccattcaacagctccattggcctgaggatgacaaagtgtatggaaagtccattgtattttaggagaatgcacacattgttgtgttatttgggtagtaaccattccttggtcagagtgaagttcc

SEQ ID NO: 167588 - DNA, 458 bp, Homo sapiens
ttttctgccatcaatgagttcagagtttctctggtaaaataataataataataataataataataataataataataataatcatctagaattgcattttgctaaacttataacctgaaagtaggttaggtagataaaatgaggcggaggcagctgcttggacaaatagagtaaaggaggggaagtgggttccaatcactctgcatgcaaacttttaaattccaactgttcacctaatttctgtcactccctaggggttctgcaaggtgtttatgctcactactaaaccaaagatcctctctgggtacaataaattatatcccaatccattatattcagwcaattatctcccctccatctgctttctctccctcaaaaacattgaagtctctttcccacatatgtatcaactctctttctctttgtacttgtgtttgcaaactttgttttgtttctgt

SEQ ID NO: 167589 - DNA, 574 bp, Homo sapiens
tggggcccaatgggaggtgttttcgtcatgggggtggatcccttatgaatgggttggtgccatcctaatggtaatgaatgagttctcactctcttagttcttgcgagagctatttattaaaaacagtgtgtcacctcccttctctccttcttggctttcttttttgctatgtggtctrtgcatgcactggcttcatgagtggaagcagcctgacaccctcaccagaaacagatgctggcactatgcttcttgcacagccttcagaatcatgagccaaataaacctcttttccttataaattacccagcctcaggcattcctttgcagcaacacaaaggagctaagacactctctttcaggactattgccaatgatctggctttttcctagaaatgtagcaaagtaaaatcaattccaagtccccagtttattgattttttccttgtgctacatatatactttcctgttacacatcctccagattggccaggatttagtgaaggggacagaaatgtaatatatctgttcaaaaaaaagctttccattttagattcaatgccatttgagaataata

SEQ ID NO: 167590 - DNA, 574 bp, Homo sapiens
tggggcccaatgggaggtgttttcgtcatgggggtggatcccttatgaatgggttggtgccatcctaatggtaatgaatgagttctcactctcttagttcttgcgagagctatttattaaaaacagtgtgtcacctcccttctctccttcttggctttcttttttgctatgtggtctgtgcatgcactggcttcatgagtggaagcagcctgacaccctcaccagaaacagatgctggcactatgcttcttgcacagccttcagaatcatgagccaaataaacctcttttccttataaattacccagcctcaggcattcctttgcagcaacacaaaggagctaagacactctctttcaggactattgccaatgatytggctttttcctagaaatgtagcaaagtaaaatcaattccaagtccccagtttattgattttttccttgtgctacatatatactttcctgttacacatcctccagattggccaggatttagtgaaggggacagaaatgtaatatatctgttcaaaaaaaagctttccattttagattcaatgccatttgagaataata

SEQ ID NO: 167591 - DNA, 543 bp, Homo sapiens
agatttattataaagtttatacataaaaaacatgatattaatgcaaagttagaaaaacagattcttggaacagaatagagacctcctaaaataataaggatgctcaaaaatttgatttgtgagagtctgcatattgaagatcagtggctaagggataagatactctataattaacctcaagaaactcaattatcagtatagaacacaatcaattccatataaaaacctaaatgagaaagataacttcataaaaataattttcatatagttaagaatttttttaaataaggcttwaaaaatcataaaagcttgatgaaactgtagtaaattttaattttcaatgaaacgaaaagacaacataagttttaaagagcaaactacaactttgttgaagatgtttgccatacttaagatgtaaaatttattccaaaaacatttaacatttagttcttgaaagaagcctggacctgtggatggaatcaatgctgaagagccatagaaaaagggaaaaggagttgaagttggagggtgcaagggtgcccc

SEQ ID NO: 167592 - DNA, 555 bp, Homo sapiens
cttcaatttgtagagaaagaagatgattagtttgtatattgggcatttaagatttccctttctaaaagggagtagaatgatgatgatggtgatgatgataaatgccaatatttattatggtaatgttctcagttctttacaggtattgatctactgaatccccacrgcgtctttgtcagttgggtactgttattgttaagctgttagactgcaaccagtgctgttattggttaggaaactgagaccacagtcacatagctagaaattggtagagtcataatttgaatccacgtttgcaatctctgctacacttctatttctcacggtagacataatgtagtatttaatgtttccatagtgtaattttgtagctatagtgtgaaaaaaaatatttttctaactctaactttagtttaaactttattttttatttatttagaaactaatttaattttactcgagtcatttcacacaaaaattacacatgatcatggaataatcttgaagagttgtatgagattcagcttctagctacttatgatttgaatcaatgtc

SEQ ID NO: 167593 - DNA, 414 bp, Homo sapiens
ggctggattagaacttgcttgagatatacaaagcattctcatggactcaatcaagtgtcaaaacaacccagagarttagaagttaccatctccagttcataagcaaagggagagatagaaatgctaaaggtctcttctggagacacacagtattgcatagtattttccttttttcttttttttttttttagacagcatctcactgtgtcacccaggctggagtgcagtggcatgatcttggctcactgcaacttccatctcccgggttcaagtgattctcctgtttcagccatccaagtagctgggactacaggtgcacaccatcacgcccagctaatttctgtatttttagtagagaaagggttttgccatgttggccatggctggtcttgaactcctgacctcaggggatcc

SEQ ID NO: 167594 - DNA, 506 bp, Homo sapiens
tgccttgtttacatgtattgcagttgatactttggctctgcccatgagtctttaagtggctggtgatgtatgctgcactcaggagcttcccacagatgttacatgataccttgtcttcgtggcgcaccatgtgtgtccgcagtctgtctttggcggcaaaggcagcagtgcacgtttggcatttgaagggtctttctgttgaatggacatgttttacatgacagcttaaggggtcaggtcttgagaagcctttcccacaaacactgcaagtatagggtttggtgatkcctccttcatgagacctcacacggtaagtcatccggtccttcctcttgaagcgctgattacaaataggacactcgaagggcttctcatctgaatgggagagcttgtgccgactgagatggtacacatctcggaaggccttcccacacatttcacaagcctggttcttcttgacaggcttgctgggtttcttgacagattgagtcaccggcagagctgtg

SEQ ID NO: 167595 - DNA, 502 bp, Homo sapiens
tcctttcttttctcagaaaactttggtattctgggtattttgtagttctatttaaatattagaattgttttcttctatttctgtgaagaatgtctttgggcttgcattgaatctgtagattgctttgagcagtataaacattttaacaatattgattcttyctatccataaacataaagtatctttccattttttttggtgtcctcttcaatttcttgcatccatgttttacagttttcattgtagagatctttcacttttttggttaagttcattcctagttattttgttttgtttgtagcaattgtaaatgagattaagttcttgatttctatttcagattgttcactgatggcatatagaaatgctactgattttttgtacgctgattttgtatccagcaactttactggatttgttgatctgttccaatagtttttcagtggaattttcagttttctccaaataaaagatcatatcatctgccaactatgttatttga

SEQ ID NO: 167596 - DNA, 517 bp, Homo sapiens
ttaatcaaaatttgaaaatgtatataaagaacactagacaacytacataatgggagaaaatatttgcaaattatatatataatatataattatatatttgcaaattaaatatataataaagatttagtattcagaatatataaagaaattttacaacaacaaaaagacaaaacaatccagcttaaaaatgggcaaagcacttatatagacatttctccaaagaagttatacaaatagccaataaacacaaaataagatgttcacattattagtcattaggaaaatacaaatcaaaaccacagtaagataccactttatgaccggtaggatggatacaaattttttttaagcagaaaataacaagtgttggtaaggacatggagaaattggaatcctcatgcaatgctggtagaaatgtaaaatggtgcagccaccatggaaaacaatcagacagttcctcaaaaagttaaacatggagttaccatcattcccactcctagaagagaactgaaaacat

SEQ ID NO: 167597 - DNA, 561 bp, Homo sapiens
aattagttaaaatatgtggaacacttaggacatgcctagaatgtagtaaacactccatcaatgttagtaattctttctactgtttgttacagaaagttctgagtgttaaagggtattttatgtctagagacaaagtacaaaatttgagagagctttaacaktagtactagagtagcagttctgagatttgtagtcttaagatgtttacacatttagaaattatggaggacccaaagaaccttcgtttttgtggattattttcatttatatttaccttattcaatactgagcaattaaaaatatttatcagtttgtttaaaaataacattaataaccctctgtcttgttaatacaaatgatatgttatgaaaaatgattcttccacaaaataaaaataatttagtgagaagagtgacattgctttacatttgtccacatttctttaatgtctggcttaactgaaggcagctggattttcatatttgctttgcattcaatttgttgtgatcactttgggaggtcgaggcaggaggatggcttaaggccaggaattcgagacca

SEQ ID NO: 167598 - DNA, 575 bp, Homo sapiens
tgatacagatgagcagcagtgggatattggtacctagaaaatatgccattttggcaaaagcatttaacattattgggatgatgtcttgggcatcaggaagccaagcacttaaaatatatctttctgataaaatcccaggatgtttgagatgacagaaaatgcggcaggtctttaggcctctctgagccatctctaatccaagggtatccattctaaatacttgggtattttgaagcatgcccccatgaggtactggaagaacctaagatcatgttttgggcttctactaggcttggtggcctgacatgttggtagatgtcacaactagaccagttgccttgtgtggctgtgaatttccacsaggcattgttacgcatatgcattagtgatggcctggttgggattgtcttactttcctaggattggggtgggctagatgactacagagttttctaggaaaagtatttctctaggtgtggcaacctcagctctctcccatttgagggctcttgtaatgtttctccctatcaattttgcttggagcaaagataagggagaatttaaatcaaagatct

SEQ ID NO: 167599 - DNA, 575 bp, Homo sapiens
tgatacagatgagcagcagtgggatattggtacctagaaaatatgccattttggcaaaagcatttaacattattgggatgatgtcttgggcatcaggaagccaagcacttaaaatatatctttctgataaaatcccaggatgtttgagatgacagaaaatgcggcaggtctttaggcctctctgagccatctctaatccaagggtatccattctaaatacttgggtattttgaagcatgcccccatgaggtactggaagaacctaagatcatgttttgggcttctactaggcttggtggcctgacatgttggtagatgtcacaactagaccagttgccttgtgtggctgtgaatttccaccaggcattgttaygcatatgcattagtgatggcctggttgggattgtcttactttcctaggattggggtgggctagatgactacagagttttctaggaaaagtatttctctaggtgtggcaacctcagctctctcccatttgagggctcttgtaatgtttctccctatcaattttgcttggagcaaagataagggagaatttaaatcaaagatct

SEQ ID NO: 167600 - DNA, 575 bp, Homo sapiens
tgatacagatgagcagcagtgggatattggtacctagaaaatatgccattttggcaaaagcatttaacattattgggatgatgtcttgggcatcaggaagccaagcacttaaaatatatctttctgataaaatcccaggatgtttgagatgacagaaaatgcggcaggtctttaggcctctctgagccatctctaatccaagggtatccattctaaatacttgggtattttgaagcatgcccccatgaggtactggaagaacctaagatcatgttttgggcttctactaggcttggtggcctgacatgttggtagatgtcacaactagaccagttgccttgtgtggctgtgaatttccaccaggcattgttacgcatatgcattagtgatggcctggttgggattgtcttrctttcctaggattggggtgggctagatgactacagagttttctaggaaaagtatttctctaggtgtggcaacctcagctctctcccatttgagggctcttgtaatgtttctccctatcaattttgcttggagcaaagataagggagaatttaaatcaaagatct

SEQ ID NO: 167601 - DNA, 575 bp, Homo sapiens
tgatacagatgagcagcagtgggatattggtacctagaaaatatgccattttggcaaaagcatttaacattattgggatgatgtcttgggcatcaggaagccaagcacttaaaatatatctttctgataaaatcccaggatgtttgagatgacagaaaatgcggcaggtctttaggcctctctgagccatctctaatccaagggtatccattctaaatacttgggtattttgaagcatgcccccatgaggtactggaagaacctaagatcatgttttgggcttctactaggcttggtggcctgacatgttggtagatgtcacaactagaccagttgccttgtgtggctgtgaatttccaccaggcattgttacgcatatgcattagtgatggcctggttgggattgtcttactttcctaggattggggtgggctagatgactacasagttttctaggaaaagtatttctctaggtgtggcaacctcagctctctcccatttgagggctcttgtaatgtttctccctatcaattttgcttggagcaaagataagggagaatttaaatcaaagatct

SEQ ID NO: 167602 - DNA, 559 bp, Homo sapiens
gtttgtcgtgagctataaagccaaaaaaagctacagtgtccttgcagaaaatgtgtgctttgcttcttacactatgggtgtggggtgamccacagttgcactggcttaatcatgcctgcacctggcaatcaatcactcttctggaaactgcatcccattaggcatcagcacaaaaagcactcttgccaagtagaaacagggcagaaaatgcaattctggtctctgacagtgattgaacatagactatgccaaatctctgcctgatgtccctaaatacaaaacatgcagggaaaagctgatgaatgagtggctcatacttccttcagatcaaagctgccatgctcttttcattatacagtttatccatagcaagtagataggacacatagctaatgctctatgttccccagaagaggtataatgtgataagagaggtatactccaaggacacagttaaataataaagaactgggacctgaatacgcccatccatgtactagaattttctaagagtagaaacagcctgcaaatttaatgctctccttctccacttaatccc

SEQ ID NO: 167603 - DNA, 601 bp, Homo sapiens
gcttaacttactgtgttgagaggttgctcaaggtgaccataaattcctctgagatgtgtaatttccaaatgaggttaggaagtccctgaatggtttgctattcataagtactgttccatcctaactgtaaattcagacccacttcctagtgagagtcagtatcatgaataaaggacagaagaaaaatgctgaatagggtcagggactcagaaggttgaaaggggttaggaaaataagattgaataacaccctcaggtagagaaaaagggaaaaagcaggaagttctcaggtacaaggacctcagmaatatcactgtgagaacttttacagttctggatcctctttctggactctcgtcattgcccttttcattctccttaaaaaatacttaaatgaagaagaagggcctacatgcttagttgtagggatagaagagaaaagggaaaaagcaaattactgaacagtgcttaaaaggatatcattttagttaatccatatatgcaacatttgcttgtgtgtgcataacccagctctgcaagaacacctcaagaactagaaatgtggtgacttcagggaggaaaactgaggccgaaagacagag

SEQ ID NO: 167604 - DNA, 489 bp, Homo sapiens
gttttctaagtaattcagattttattatctaatacatcaattgttattttaactattttcgatggaaacttgtgaaatgtattctaagcttccctcttcttaaatggaatataaaattaaacataatttaattttttcttagggactcaygggcatgaattatgaaaatcaaatattatcctaggccagaaaacagccttgaaatgtataaggatatttgctttacattacatggcttctgtccagtttttatgttgcatcttcccttacatcactttgtcctttcctgtgaactacctccttttggttgggttcagtgatgcctccttctagtatctcctcccatgcttcctccttttatcctctgaagcataactgtttggaaaccacatcatcaaatctgtttgaactatcaaggtaaaagtaaacaggttttgagagagggatcaattggttattttatgtgcatggtctttagtgcatgagttt

SEQ ID NO: 167605 - DNA, 548 bp, Homo sapiens
aaaggcagtcctttgccacctcctcagtgcagagctctgtggcagcagcctgggctattggtgcaggtgtctgcagggcaagttcatggcagcatcaaagccctgccaaaggggaaaagtgatgaaaacagctgtagactgaacaactaacctcctacattcatccatcacatcctctccacagcccaagtgatggggaccatctcttttctatcttgccttatcctaaaggttttaagatgaaaccttgaccagagaagttttctggctactctaagccaacagcccacaggaatcagtcgtgattccacggtgcatagggctctccaccaagagcctaagccatcattgggcttttcccaatacacatcacaaaacggaacasaggaaacattaccaggtagggtaagtagaggagaggagagaaaaagaagttcaaaagccgaaatgactagagcaatacaactaccaaatgaacaagcaaactgcacaacatgtaccatctggcagaagtatttgaacaggtggaccaagaatttaaaataagc

SEQ ID NO: 167606 - DNA, 581 bp, Homo sapiens
gtgtggactagggttacagcagcccggtttgaagcctctggtcgtgggaatggcttcttgggagagctccacgtgtcaggaaattagttatcmgatgtagaggtaataataggacatgcctggcaatgtttgagggcactgagaaggcaatgagacagaaggggggttttttttttttttttttttttttttgcttgtctctgccaagccaaaaatgtaggccatcatgaacagtctggtttatagagaaactaggggtcagggggtgaaaaggagacattctgtttgggggcttagttttcatttttgcattttttgtggggctacagatttgccattggaggtgcaggttcaggccagttggtctgtaaaagtcccttcctggataactttctataattattgtctttggcttaaagcacaggctgttaccagatggaaggtcttgactgtgagttgtgcaggttcttggtgtgttgaacccaacacacaaacaaagcaacaaaagaatgaaacaacaaaagacaaagcaacaaaagaactaagcaacgaaaacacagatttattgaagtgaaagtacg

SEQ ID NO: 167607 - DNA, 511 bp, Homo sapiens
tgaattcttcattactcccacaaaaacaggaagtacacatgagagaaaaatctttcccatgtaatgagagtggcaaagcctttaattgtagctcactcttaaggaaacaccagataccccatttaggagacaaacaatataaatgtratgtatgtggcaagctctttaatcacaagcaataccttgcatgccatcgtagatgtcacactggagagaaaccttacaagtgtaaagagtgtggaaagtccttcagttacaagtcatcccttacatgccatcatagacttcatactggagtaaaaccttacaagtgtaatgagtgtggcaaggtctttcgtcaaaattcagcccttgtaattcataaggcaattcatactggagagaaaccttacaagtgtaatgaatgtggcaaggcttttaatcaacaatcacacctttcacgccatcaaagacttcatactggagtgaaaccttacaaatgtaagatttgtgagaaggcttttgcgtgtca

SEQ ID NO: 167608 - DNA, 568 bp, Homo sapiens
cacagggccttgagggaaacacacaataaatagctcccagctcaagattttaaaaaatgacataaggaaagaaaactgaaaaacagactaactgcttaaactacattttgatgtttatttaaaaggtcactgacatctttaccaagtacacactgmaacaatcaaacttaagtagtaggtaccacagccttccaataaataacaaagactagaaagcatgcagacctcgatctgaactggatgcaactaatttcaaacagcaactcttttgaaattgttgtaggaaaaaaatctcacgaattttggggtcaaccggaaaataactggaaaatatacaagtacagaaacgaatgatgtgagctgattacaggatgctgcaaaggcatctttcagaagtcattatgtgttaagaaataaaactattaaaactaagatatatctcaaactcaatctgcaaaaaagaaaaaataaatagagaactgaagaggaaccagaaggaaaaaaaagggaagtctatgacacaacgagaacaaaagcatttttgatgtctgtttttttcatttgtttg

SEQ ID NO: 167609 - DNA, 568 bp, Homo sapiens
cacagggccttgagggaaacacacaataaatagctcccagctcaagattttaaaaaatgacataaggaaagaaaactgaaaaacagactaactgcttaaactacattttgatgtttatttaaaaggtcactgacatctttaccaagtacacactgaaacaatcaaacttaagtagtaggtaccacagccttccaataaataacaaagactagaaagcatgcagacctcgatctgaactggatgcaactaatttcaaacagcaactcttttgaaattgttgtaggaaaaaaatctcacgaattttggggtcaaccggaaaayaactggaaaatatacaagtacagaaacgaatgatgtgagctgattacaggatgctgcaaaggcatctttcagaagtcattatgtgttaagaaataaaactattaaaactaagatatatctcaaactcaatctgcaaaaaagaaaaaataaatagagaactgaagaggaaccagaaggaaaaaaaagggaagtctatgacacaacgagaacaaaagcatttttgatgtctgtttttttcatttgtttg

SEQ ID NO: 167610 - DNA, 544 bp, Homo sapiens
aaaatcatagcttatatgaaaatatgasataattttaattacactttttataatgtcaattacaattacatttttgtttataatccttcttcattatatagcaaagtacatcattagcagttctaataatggcaattagtccactttgctctttaaattaatacattctttcattgttggggtttagttataatttgtcaaaaaggtgaaataactatttccagtttgccctggaaatgttgctttgtagaaagtaaacatttttcagttctgccaaagtatgttccactatattatcagagtctaaaccaccaacttcaatactgaaacccaagttgagattattaatttaaaccatagttcttgttgtttttccttatattttggatggacagagtcacataaatgtttattcttcccatgaaagaggatactaaaaacttgtacaggatgggaatattggccctttttaaagaattcccttcacacttccacaaaataaaagaacaaaagaaaagtctaataaacaaggaatttacaacaa

SEQ ID NO: 167611 - DNA, 608 bp, Homo sapiens
aaatacaaaagagaacaggaaatctccttaaaaaaaattacagcattgtcttgcatagactgtaaccactccctgaactaccaactcagtgagcgctatgaaaccatcttacaaggaaataccctattctctgcaacycagaaagcatcttgatcatcagttatcctctagctgagttccttatctgacccaagtcttctttctgcaaaccttttgttcaggcattttctttctactactacttactaaaattgagaaggtcaaagtgcaagtggtaattgctcttggcactttagaaaatggttttctttccatacctatgattttctttaaagccttcttctgctgagtctctatcagttgttctttgtactgtagatcaacacattcgggacccctctacctcctaagtccctttctggtattggggagtttaaaattcagtgaagtagcccaatgtaaatatgttttccatgctatggttctggtaaaaagggagaagaaaatgagtagaaaacaagatgctttttctgcatttatgatgtcatcacaaagtagttgagaattggaggtgggtttatgtagcagagacaagacaattgggggag

SEQ ID NO: 167612 - DNA, 594 bp, Homo sapiens
tcagtatgttttttaaaataatattttatggaaataaaaataacaatggcattaatgtaattatacatgttaaggagaaaatgagatatctgtatttaaaaaaaaggttttttttccttaaatgtgcaaaacagcacagggcagtttagggctcttcatagctatcttcatgtacacatttatttggcttacgagcactcttcttcctyagcttttcccatcccctatcaccaccctctaatttgttactctttttaatattttccagaatatagaatgacaaagacttgcttttagtctttgaaaacactagtggcaataaaaagatgggaataaactttcccactctgggcaattccactcaggaaatattttaagacttcatagaaattaagtacttttttctttcttttttttttaaacctagtccaaacctactaaaaattcacaatttctgctgcctaatgcgtttattcatggcctctatatattctcctctataacctcttccttcatgtcttcattttaataatattgcttatgtgaaaattgctggataaattattcaattttttctattatccagtatatctg

SEQ ID NO: 167613 - DNA, 497 bp, Homo sapiens
tacaaccacaagatacaagagttggaaagacctcccagatgatcttccggtatgtcaactgcggtgataatgctatagtcttttccttttttttttttttaatgataaggggaagcagataataaatttrgggaaagctggaaaaataaaagttatcttagtctcactccaaactaaactgaagctccaaaaaagccattcaacttgcctcgatccagagcaagcttaatatctaggctccctttattgctcttcattttatttttaaacttctcttgacccaggtggggaagagttgctacttattgaggcgatcaccaaatcatcatcagccttctttctggtcatcttatctatcttttaaggaatataaagcctactctttacgtgatagagaagctttccttcagtttagcagtgagtagtgaagagtaggtgaatattaatagggctaaaaatattttaaatgtatagaaagaaaagaaagtcagagtaaa

SEQ ID NO: 167614 - DNA, 549 bp, Homo sapiens
agagttttacctgtaggaaaaataaaacaaagaaacttactggccatcatagagtctgaacttaaataactagcactggttacatatcatttcatctctggaaatgattctaggctcagagattcttgttacttttaactctttaagtttgcatagtcttcgaacctataaaatatttcctaacatttcaaccttttagatcactgaagaaaatttctagccatctatttgctckactaaagagatctttgacctataccttatctcacactagtccatgggtcactcttgctaactcaccgtcatggtgaatagtcagcttatttcaagttcctttaaccaatgattaacgtatatacatctcccttgctaccccacttatctaacacaaatgggcatcccaaataatctgatagcatgaaatagatgattatgccacaggcagaataaaaaaggaagagagatgggagagacagagagacaatttagttaaccaggatattttgataaggttgcatcatacacttttttgtgtatatagataatgaa

SEQ ID NO: 167615 - DNA, 391 bp, Homo sapiens
tggggaatttataaaggaaagaggtttaattgactcacagttttacatgtctggggaggcctcagggaacttacaatcgtggcaaaaggcatatctttacagagtggcaggagagagaaagagaaccaagccaaggcggaagccccttataaaaaccatcagatattgtgagatcttactcactagcaggagaccagcatgagggaaactgcccccgtgattcgattacctcccacgggggtccctcccaccacacctggraattatgggaactacaattcaagatgagatttggggcggggggaccaggaaaactatatcaagatttttgttttctttatatgaatgttgaagtttgaatgaatgtcaaactccaatattgtacgtaggg

SEQ ID NO: 167616 - DNA, 553 bp, Homo sapiens
aaaagaaattttaaaatgattctctcaagaaacatgctaaagaacaccactttgtaagaacaaccttaaatagactctgttatcaagctaaaatagtcatcactccctaatatatcactccataattgtcctggtctgtgaatttcttctaaggtttaaagatacatccaatggtccccaaattttattgcagcttatcccaggtatacatttttattttgaaggataatttgttgtgattggagttgataatcctgctgaaatctctatttgtaggggcttagaatccattccttagtgttatgtcttattttagacatttttgaatcatcttttggtcttccacatttagtaaattacaagctttcaaggatagggaatatgacatttattttaatatctcccaagactgtgaaaattactgtcatatttaaaaattcaaactctcaggtaaataatgacacattgtcagaacccyttgctgtgattttttgaaacatggcttagttccatgattgagattgaatttaaaggaggaaaaaaggtcacagaa

SEQ ID NO: 167617 - DNA, 481 bp, Homo sapiens
ggtctgagattgaacaccacatgttaacagaatttgagatgttggttctatccataggtggcaggaatttggcactgagatcacctgcaggatgtggcaaacttcacactgctacattctcacaataggggttggagaaaatgtgccctagctcaggcagatagcaaagatgctstttaaaaaaatctttgaattttacaggtatatactaattatatatatgggatacatgagatattttgatacaggcatacaatgtgtaataatcacatcaggataaatggggtttccatcacctcaagcattcatcatttccttgtgttaatgaacattccaactgtactcccccagtaattctaaaatgtacaataaactattgctgaatgcagtcactctgttgttctgtcaaatctagatcttattcattgtatctgactatatttttctacccattattcatccccattctccatcccctact

SEQ ID NO: 167618 - DNA, 425 bp, Homo sapiens
ttctggtggaaaagtctaaggaataacacccatgaactttaagaaaggaagagtcacacaggtcctctctctcttgctttccactcactgtttaacatctggatacctccagacttcttgccagcctcctgttggcaccccaacctctctaggacctataagtaatacatttcttctgtttcatgtactttggttttactgcctcacgtgtctcacttgacatgcacaaacttgaacctgaccttctttccaggccagctctctatcttagaaagtggctgtcttggtaggaataaatgggccaagggtyataggagagccccacaagcatctggtggtataaacaagattcctgtgaaaggaatatttggccatgggttggattcttccacattagggaaccttccaggattaggaagtatcgc

SEQ ID NO: 167619 - DNA, 425 bp, Homo sapiens
ttctggtggaaaagtctaaggaataacacccatgaactttaagaaaggaagagtcacacaggtcctctctctcttgctttccactcactgtttaacatctggatacctccagacttcttgccagcctcctgttggcaccccaacctctctaggacctataagtaatacatttcttctgtttcatgtactttggttttactgcctcacgtgtctcacttgacatgcacaaacttgaacctgaccttctttccaggccagctctctatcttagaaagtggctgtcttggtaggaataaatgggccaagggttakaggagagccccacaagcatctggtggtataaacaagattcctgtgaaaggaatatttggccatgggttggattcttccacattagggaaccttccaggattaggaagtatcgc

SEQ ID NO: 167620 - DNA, 343 bp, Homo sapiens
tacaatttgtaggcttattttatcgtgttctttgaaattcacacatttaaagttgtttgcttgttgcttctaaacttgatcaccatattctctgagtataatatcctctggcttcacttatcctgcaggatataatatactttaaaaatatttattctgccttttaatgtttctcaggagaagtgtgaagccaccttgagttttattctttcattatctcattttcttctgcaagaatgactgaagagatgttcatttttctcaaagttcaataaatgaaccagaaacctaygtggcctatactcagatctgctgagtctacttgattttaatactattagaa

SEQ ID NO: 167621 - DNA, 530 bp, Homo sapiens
aaatgaaaacttcttatctagtatcacctattttaaattcagaaaaaattgattcaagcatctgaaaggtgtatggcatatgactttaatttccaatgctggtacagctgtttgctatttttatagttgtatggttattacaattgctagtttgaattagtgaattcaaatgcttactgacaaatttattgcagtgaatactggaaagcctagtacaaaagagatgttaaagatwctagtaggttcaaaacagagttacagttttaaaaagtctgtgagctcatacataacgtgaaaaaaaaggaaggatttaagtctgctttaaaaagttaaaatgttaaatattcatatatctgaaagtttttttcttaaaaaattaacggtagaaaaaccacaggaagaaaggaataaaaaggtagattcggttttgattaaaaatatttctgataatcatacctaataagtcggcttcatcgttaatgtactgatttcttctttactaaaacatttctagtagaaattgatgacca

SEQ ID NO: 167622 - DNA, 419 bp, Homo sapiens
tatatgtgtgtatatatatgtgtgtgtgcatatatatagtgtttttctttgttaaatggtttataatagtgcarttttcaattttggtgtgaagtattaagtaactgatgttaagacagaaatctaagaaagttattttaaacagtaatattttggcaatgcaaagctatctagtaatattgctcagacaatacaaagctagttctattcatatttgtcctgctgatctggaagataaaactgatccctccctgcaagggctgcactagctggaatgagacattgtgtttgtagaacctatgatcttctttacagagaaaagcaattcataaagttagaaaagggcatcatgtaaaatccaactcacattttgtagaaatagcatgaggattgctgagagtgctaagaaagaataaata

SEQ ID NO: 167623 - DNA, 602 bp, Homo sapiens
tgctttgatcttattttaggttcagcaataaattttggttgaggtcctgatcactccagttaatttagtgaactacaagatataaaattattttaagtaaaatctcctcacattttcaccgtggtaggggtcagggagagttcttacatgaaatatttaagaaacatctgactataacccaaccagcatgtggagaaattacattatttcttagactattttaacatcaaagctctgaagtraaggatagtcattaaaagccgaattactgaaagcatatctggttagtgcacttaaacacatttcggcagactaaaataatttaaaatctgaagtgaagtgtgatccagaatcacatatgtcaattactatgttgtctgtggtattaaaaatgcatgcagctggaagcttcaattatatgagatttctgacttagagatgctttgacttttactttttgaaaaagtcaccttttcagaaatccaagggaaaacatttgtaaaatgcatagtgccttttccaattacctcttattgaaagacagaacaacactagagagttataaaagtgaactgaaaatatgattttgtatgaaatttgat

SEQ ID NO: 167624 - DNA, 592 bp, Homo sapiens
ttttgtttttttcagaatattatttagttggaatcataaaatatgccatttcacattggtttctttcactttataatatgcatttaaggtttyttcatgtctgttcatggattgacagcttaaatttcttttttgtactgaataatattccattgtctgctgttgtatctagtttctttatccattcacctactaaagggcatcttggttgctttcaagttttggcaattatgaataaagcagcttcttgaccaactggacctaagagacatctacagaatactccacccgacaaccatggaataaacattcttctcactcacacgcagaacgtattctaagattgactacatgcttggccataaagcaactttcaataagttcaaaaaactcaaaatcataccaagagtatgttcagactacagtgcaataaaaataaaatcaaagccaatgaaaactgaacaacttgcttctaaataactcatgggtaaacaatgaaattaaggcaacaatcaaaaacattatttgaaactaatgaaaatagagacaaaatttaccaaaatctttgtgatgcagttaaagcaatgttaaa

SEQ ID NO: 167625 - DNA, 592 bp, Homo sapiens
ttttgtttttttcagaatattatttagttggaatcataaaatatgccatttcacattggtttctttcactttataatatgcatttaaggtttcttcatgtctgttcatggattgacagcttaaatttcttttttgtactgaataatattccatygtctgctgttgtatctagtttctttatccattcacctactaaagggcatcttggttgctttcaagttttggcaattatgaataaagcagcttcttgaccaactggacctaagagacatctacagaatactccacccgacaaccatggaataaacattcttctcactcacacgcagaacgtattctaagattgactacatgcttggccataaagcaactttcaataagttcaaaaaactcaaaatcataccaagagtatgttcagactacagtgcaataaaaataaaatcaaagccaatgaaaactgaacaacttgcttctaaataactcatgggtaaacaatgaaattaaggcaacaatcaaaaacattatttgaaactaatgaaaatagagacaaaatttaccaaaatctttgtgatgcagttaaagcaatgttaaa

SEQ ID NO: 167626 - DNA, 340 bp, Homo sapiens
gacattgcagtttagaggggaaacatggactttcaactaacggtgataattcaatggaatgtcctaaagtaatgcctacttgatattgtgcacaaaattctattctaaatgcattaaagtttttcttgccttttaaatttgaaatcaaacaaatgacaaaacttagaggagcattcttgtgatgttagagtaggcaaagatrtcttgaagaggacccaaaagcattaatccttcaacaatatattgatgaattacattatattaaaattaagaatttctatttttcaaaaggcagctttaagagaatgaaaaaggaacctgcaaatagacaatctgaata

SEQ ID NO: 167627 - DNA, 576 bp, Homo sapiens
acaaataaataaataaagtgtaatcaattatttctaacacttgctattaaaacatcctttgtccttgatttcaaacagctcattcttattatttttgttactttcattctatttctatttttccttgtacatctggttttactttcaggtcaatgtgtctgagcaataattttcttttccccaaatcaatatcacccccagactatccttttctctctccctcctcaccctttctctcttcctcttgtcacacaaaaatcaacctatcactctttcagaggatacatctgtctggttgccatatatactcaaaggcatattgtatttgatcaatatagtgtttttaattagtttattygttttcactggtagatgtttcataggttcatcaacttatattatttcctcagtttattagttttaatttctagaggaagatatttgctatgacaggagttggtagcattgtttcaatatctatgtaatagtcttgcccaatcaataagagctctttcaagaataattcctggcagacctgtttcaggaacaagaatgtgttactatttatggtaacta

SEQ ID NO: 167628 - DNA, 539 bp, Homo sapiens
actatagaataagctccctgagagtaggaagcagggtccacatatatggtgatgatatatatcatcaccacatatgctgatttaagcatatatgtgcttaaatatatatatactgcatatatatatatatatatatatatatatatatatgcttaaatcaacatgtccctttcatgtctgcaaaatgatagcttatgaaaatatattcactgttatggtgtaaaactgtccctaatgccatttcccctttatttatttgggtttgtacattttgaagtactggtagaaraaaagaattgtacaattttcttaaagtttatattatgggaataataatggaagttccaacttttcttattgctagaagacagccatagtttttacttttcaacaccaattcctcaggtaggtgactgtacataatttataaaaatgtcttcaataaatgactactattggaacaatcactggaacatggtgatctatttgctgttccaagaatacaagagaatcaaatgttagattttttttctttcatg

SEQ ID NO: 167629 - DNA, 549 bp, Homo sapiens
tgagttctcactttgcaatattataatgctgtataaaattcttgtgtataccctgtttacacacatgtgcatccatttctcatgtctgcagagaaaaattataggatcattagatatacagatccatgtttagaaggcaatgactattaggtctacttaagtcaaatttttaaatcgtgttatttacagatctgtattcttatgattttttttctttttgttactgagagaaatgagaaaattctcccaccatgacttcagacctatctatttctcatctaatttttcccaatttctggctgttccgatttcttgccctcttcctaatttttcttgtgagttttgattaaagatctctgaagaagaacatgtstgtggatgtaaacttcccatgggtttacagtctcaggctttcccggcctttaacagcatattcaaaaatttaactatttttacctgtttaccaggcacctctgctttcctcccaagctctgccacagttggacaaataattatctcctgtctttctttggaggtgctctttcctaa

SEQ ID NO: 167630 - DNA, 549 bp, Homo sapiens
tgagttctcactttgcaatattataatgctgtataaaattcttgtgtataccctgtttacacacatgtgcatccatttctcatgtctgcagagaaaaattataggatcattagatatacagatccatgtttagaaggcaatgactattaggtctacttaagtcaaatttttaaatcgtgttatttacagatctgtattcttatgattttttttctttttgttactgagagaaatgagaaaattctcccaccatgacttcagacctatctatttctcatctaatttttcccaatttctggctgttccgatttcttgccctcttcctaatttttcttgtgagttttgattaaagatctctgaagaagaacatgtctgtggatgtaaacttcccatgggtttacagtctcaggctttccyggcctttaacagcatattcaaaaatttaactatttttacctgtttaccaggcacctctgctttcctcccaagctctgccacagttggacaaataattatctcctgtctttctttggaggtgctctttcctaa

SEQ ID NO: 167631 - DNA, 423 bp, Homo sapiens
attcctacatttaagaatgtatttctgaatgagaatatccacatgagttggatgaatacagtgattagccatcagtgctagttsaaatgactaggataaatagtggatgggataaaggacattatctctgtgtgtatgggcattgtcatgtcatatatattccatatataataaattccattattaatatataattattatgtaaaacactgtgatttagatttttataaatgttaaaatgataaaaaagaaacatgtgcttaggaacaaaatcccaagagccatcttgttcctactgactgattactacgtttaaattcagattatcctcaactaattataactcaagactattctgcaaagaaatattagggtgaaataatgatattgcacctgtatatcaacactatttcaaatatgcct

SEQ ID NO: 167632 - DNA, 289 bp, Homo sapiens
agaattccttaggccaggtatggtggctgatgcctgtaagcccagcactttgaggagttgtggaggacggattgcttaaggcaaggatgccaagctgtacaacatagccagaccctgtctctgcagaaaataaaaattaaaattaaaaaaaaattagccaggcatttggtgcatacctgtactcccagctactcaggaaactgaggtgagagaatcatttgaacccattgartcatggttgtgccactgcctgggtggagtccttttagaattacaggtctttctgtag

SEQ ID NO: 167633 - DNA, 330 bp, Homo sapiens
ctatgagtgtggggtcagaggacagaagtatatgtgtttcaaacatatgggtattttttaattaggaaaatttcaaatgtatacagaaaaattaagattattatcaacataatcaagtttgtttcatctataacttccctcctcttgcccagatcrtttttgaaccagtcccaaacgtcagattattttctctgtaaacatattagtatgtatccctaaaatataactctttgaaaacaagaccacaataccctcaagagatatttttacagtattagagattaaactttatataacttctatatccaatttatgttatgtaattactaa

SEQ ID NO: 167634 - DNA, 521 bp, Homo sapiens
aggccctcaacaaataggacaatacttgcccacttggggagggccatctgctttactcagtactgatcaaatgttgatctcttctggaaacatcctcacagacatgctcaggaaaaatgtttaactcaattatctacgcatcctgcgatccagtcaagttgatagataaaatttactattgcaggaatgtctaacaacatacagcgacttsaaatcaagagtttttgcctccaaaatcatttatttatctcaaggcagtacaggcctaaaaggagctaggttaaaaatgcaacctagtttctttggaagatgagttttcttttcttttttaaaacatttcttattttaatttctttggtatatagtagttgtatatatttattgggtacaggagatgttttgatacagacacgcaatgtgtaattaccacatcatgtaaggtggggtttccatcctggagagcgagttttctaatcattccacccttttcctcaacattctgcctttgctccgccttaatt

SEQ ID NO: 167635 - DNA, 575 bp, Homo sapiens
agttgtaaatagagcctaaacatgtgactgaattgctgcaatcttatgagcaacttgaatagataaggtgttgcttcttatgaaagagcaaataaagtagtttcgtgagatggaacctactcctggtaatgatgctgtgaacattgctgaagtgaaaaaaaaaattagcaagtaacttagttgataaaacagcagcagggtttgagaggatcaactccaattttgaaagttcttctgtgagtcaaatgctatcaaacagtatcacatgctacagagaaatcttttgtgaaagagtcaatcattgcagtacacttcatttttttttatcattttaataaattgttgtagccaccccaaccttcagcaaccactatcctaccctgatcagtcaggaaccatcaacattgaagcaagatcctccactagcagaaagattaagactctcttaaggctcagataattgttagcatgttttagaaataaartatttttaaataaagcatatgcattgtctttttagacataatgctactacacacttaatagactacagtatagtataaacataaatttta

SEQ ID NO: 167636 - DNA, 597 bp, Homo sapiens
ttctccacaactattcactttttcatcagacttagcataaaatatatgcagttttctgcttctttggaacttcatttttgaaggcccctgtgtcacattaaacttacattaaataaatttgtatgcttttctactgttaatctgtttattattatagggttttcagccacaaaccttgtaatgggtgaggaaaagatgtattttctctaaggcaagtcttagactgagaggagatctctggagtgcatatattaaacatgagacttgtatctagaatatgtaaataactcctacaaatctrtaaggaaaaaatagctccataaaaacgtgggcaaaatgtttgagcatttcacaaaagtggctatccaaaagccatagcatgtagaaaggtgttcaacatcatcagttactagggagatgacatagcacaacaagttacccctacacagacatcagagtggctaaaattataaagactgaaaatacaagactgttaacaagaatgttgagcaactgcagctgacatatgtagcctgtgggagttggtacaaccagtttggaaaactggcagtgtctatcagttaaaacatgagtagt

SEQ ID NO: 167637 - DNA, 603 bp, Homo sapiens
ggactgggttggttgagagcagagaaggtgttggtcaaatgatacaaaatttcaatgagataggaggaataagcttaagagttctattgtacaaccttgtgactatagtttcaaaatattgtaattttgtaaaaagctaagatagtggaaataaagttctcactaaaaaaaatmataattatgtgagataatgaatattgctactaagtagatttagtcattccacagtgtacatatacctcaaaataataagttgtgcatggtaaatatgtaaaatttatgtcaatttaaaaatatataaagattctaaaattctcaaacatttccaacaggaaatatatttctgtcaagaaaccaagggtggaagctggagtcatctcacttaccatcatttctggaggcccagtgggggattttgtgctttttgtctccacaactcttgactctgtcagttcaaaaatcctgatctccaaaaggaaactactttcatcaataattacacgactcagctaccatgtggacacaaaagacatcttagatgaaaaaaagtcatctatgtataagaaacagaatcactccctagttagcagtaataaaccccga

SEQ ID NO: 167638 - DNA, 603 bp, Homo sapiens
ggactgggttggttgagagcagagaaggtgttggtcaaatgatacaaaatttcaatgagataggaggaataagcttaagagttctattgtacaaccttgtgactatagtttcaaaatattgtaattttgtaaaaagctaagatagtggaaataaagttctcactaaaaaaaataataattatgtgagataatgaatattgctactaagtagatttagtcattccacagtgtacatatacctcaaaataatawgttgtgcatggtaaatatgtaaaatttatgtcaatttaaaaatatataaagattctaaaattctcaaacatttccaacaggaaatatatttctgtcaagaaaccaagggtggaagctggagtcatctcacttaccatcatttctggaggcccagtgggggattttgtgctttttgtctccacaactcttgactctgtcagttcaaaaatcctgatctccaaaaggaaactactttcatcaataattacacgactcagctaccatgtggacacaaaagacatcttagatgaaaaaaagtcatctatgtataagaaacagaatcactccctagttagcagtaataaaccccga

SEQ ID NO: 167639 - DNA, 603 bp, Homo sapiens
ggactgggttggttgagagcagagaaggtgttggtcaaatgatacaaaatttcaatgagataggaggaataagcttaagagttctattgtacaaccttgtgactatagtttcaaaatattgtaattttgtaaaaagctaagatagtggaaataaagttctcactaaaaaaaataataattatgtgagataatgaatattgctactaagtagatttagtcattccacagtgtacatatacctcaaaataataagttgtgcatggtaaatatgtaaaatttatgtcaatttaaaaatatataaagattctaaaattctcaaacatttccaacaggaaatatatttctgtcaagaaaccaagggtggaagctggagtcatctcacttaccatcatttctggaggcccagtgggggattttgtgctttttgtctccacaactcttgactctgtcagttcaaaaatcctgatctccaaaaggaaactactttcatcaataattacacgactcagctaccatstggacacaaaagacatcttagatgaaaaaaagtcatctatgtataagaaacagaatcactccctagttagcagtaataaaccccga

SEQ ID NO: 167640 - DNA, 583 bp, Homo sapiens
ttattaataagatgggataacaaaaagtgtctttgatacaaatctagtgttagcttagaagcagtttcataatatcccagaattttaaaattcaaatgaactttttgagaatatttgtcattgataattttctcagtttttgtcattgaagattttgggcagtgtgagggtaactattgctcaaattcatgtacaaaataaacctagaatttagttcttcaaacacctagccctgttctctctcgattattcctattttgttcacaaaagcctacacatattgcatctggaccattatcttgtgaccacacacacacaygtgcgcacacacacacacatatcttggtgacaaaaacaagctttttacaaaaacagtgatgctatttcctactaattatcattatcttctgctacataaaacttgtctctaatctgcagagtgattttttaaagttttctttttttctcaattattggtgttttgttctcttattatcttgggaaaaattggtataagatcagcaatattgtgtttacttttatacttataaatatcaccaattattcaccaattctagctgac

SEQ ID NO: 167641 - DNA, 420 bp, Homo sapiens
ggttctcataatctggtgaaatcatttaagtggaatttacatagacattctgtagttgctctttcttaagaaatttgaaataggtacttttggacttcaaaacctttagccaaatagttaaaggtgtgataaaaacaattttacattttttctatgtcatctgtatatggtgctttatttataacactgatatcaaattgcccattcattgcttattgttctataccaggaatagcatacacctagattaaatgctaccacttcctctccaacctaaaactctacttcagcatccttttcaaaatcagctagaccactgaccctgcgaagccaccctggctgtcctcccargtcctgatgggtgggaaactgccctgaggaggctgggaggggagggcatgatgctgaacttctgtgcag

SEQ ID NO: 167642 - DNA, 562 bp, Homo sapiens
gagaagcagggactaaatatggagtattgtcatagcctggcttacattgtttccagtggattttcttccaaaatgaaagttgtcacttgtagagttttagagaatgctagaagcaacactccgcargctatctacactctctgaccttattgtgccttaaatatgtgttgggctaaatcagtgcctgttatttgagtatctgttgcattaggaacaattgaggaagtttattctttttaccatagatcaccacaactgcttgtagaactttacaatgtaatttctattctttttcagaacaatgaagaaaggggtaaacaaactgaagggaatttgccattctcagtgaacagtcagggatgatgattctgaaattttagtggacctcctgtaagcacttgttttatgtttagatggtataagtagtgacacaaatattagatggtataacagtatagatggccaagcatttgtactctgcagtgtagtaacagattttgatttcatggttactattgctgttatttaaaatgtcttaacttttacaagagccttgggaaaa

SEQ ID NO: 167643 - DNA, 498 bp, Homo sapiens
gatgcagaaattttggctgtgagattttacactgtgacaactgagaagcagggactaaatatggagtattgtcatagcctggcttacattgtttccagtggattttcttccaaaatgaaagttgtcacttgtagagttttagagaatgctagaagcaacactccgcaagctatctacactytctgaccttattgtgccttaaatatgtgttgggctaaatcagtgcctgttatttgagtatctgttgcattaggaacaattgaggaagtttattctttttaccatagatcaccacaactgcttgtagaactttacaatgtaatttctattctttttcagaacaatgaagaaaggggtaaacaaactgaagggaatttgccattctcagtgaacagtcagggatgatgattctgaaattttagtggacctcctgtaagcacttgttttatgtttagatggtataagtagtgacacaaatattagatggtataacagtat

SEQ ID NO: 167644 - DNA, 498 bp, Homo sapiens
gatgcagaaattttggctgtgagattttacactgtgacaactgagaagcagggactaaatatggagtattgtcatagcctggcttacattgtttccagtggattttcttccaaaatgaaagttgtcacttgtagagttttagagaatgctagaagcaacactccgcaagctatctacactctctgaccttattgtgccttaaatatgtgttgggctaaatcagtgcctgttatttgagtatctgttgcrttaggaacaattgaggaagtttattctttttaccatagatcaccacaactgcttgtagaactttacaatgtaatttctattctttttcagaacaatgaagaaaggggtaaacaaactgaagggaatttgccattctcagtgaacagtcagggatgatgattctgaaattttagtggacctcctgtaagcacttgttttatgtttagatggtataagtagtgacacaaatattagatggtataacagtat

SEQ ID NO: 167645 - DNA, 562 bp, Homo sapiens
gagaagcagggactaaatatggagtattgtcatagcctggcttacattgtttccagtggattttcttccaaaatgaaagttgtcacttgtagagttttagagaatgctagaagcaacactccgcaagctatctacactctctgaccttattgtgccttaaatatgtgttgggctaaatcagtgcctgttatttgagtatctgttgcattaggaacaattgaggaagtttattctttttaccatagatcaccacaactgcttgtagaactttacaatgtaatttctattctttttcagaacaatgaagaaaggggtaaacaaactgaagggaatttgccattctcagtgaacagtcagggatgatgattctgaaattttagtggacctcctgtaagcacttgttttatgtttagatggtataagtagtgacacaaatattagatggtataacagtatagatggccaagcatttgtrctctgcagtgtagtaacagattttgatttcatggttactattgctgttatttaaaatgtcttaacttttacaagagccttgggaaaa

SEQ ID NO: 167646 - DNA, 573 bp, Homo sapiens
aagtgctttgttgtttatctagaaataatatggaaaattttattattatttttggtgaagaaaatcaatttgcataggttatttcaatctaaattaaatgtgaattttattttttaaaaagtcaactctttaggcaggcarcaataaacatttagagatggcatttgagttgacacttgtgcactatattaacataatatttggacaaaaagaaacgtaaggaaacattatttataatatgtgcttattattttacagtggtctgtgggggaaacaggaatccaccaaacacaaatttgaaatgactgtatgacaggagaacaaagatagcagtacttaccaagacatgcaaatgtatttttatcagatcttccgtagcctcagggttcactttgctgtatatgataaatcaaagattctcagatctgaaggccacctcctctgccctcaacctggtacataagtctcctctcgctcactcttagaagtgaatattcaggttctgcactgggatctgcacaaccttgggaagttgcagcttcctaaagcagcccactttcatttggggacaac

SEQ ID NO: 167647 - DNA, 618 bp, Homo sapiens
attctagaatctgctccgggaggttggggggaagcagatgaataataaagttctgcaacagaagtttttagaaatttcagaggtattaattagaaccttgactctagtcttttcaaagtctgagaaatggcaatgagggacagcctagtgaagaaattaaaacattttaccccccaaatatatttctttgatatattttgaaatggctgcttcttggccagtaggtagaaatggcctcacaaagctgtcttaagtggggaaaatttgcatctctagagaatctccattaatccagccatgcccccttccctttctgttccttttcccagatccagcagaaattgagagtctgaaacctttaaaagtctgaaaagaaatatttatcatatgttctctctgaggaagttttcatctacatagcaaggccacctttgctagcaatccttttctctcgcttcaaataacttgttttaccagcatctaagcccccattctttctataacctaaaaatgrtatatacatttctgtaactcattgggaagttgggtcttcgttctaaagctcctgtgtatgcaccttaaataaatttgtatacctcttctcctattactcaatct

SEQ ID NO: 167648 - DNA, 502 bp, Homo sapiens
ttaacaatatctattcttgctatccctgagcatggaatgttttttcattggtttgtgtcatctctgatttatttgagcagtgttttgtaattcttattgtagagatctttcacctccctggttagctgtattcctaggtattttattttattttatttttatttttggcaattgtggattgggattgtgttcctgattgggctcttggattggctgttgttgmtgtatagaaatgatagtgatttttatacattgattttgtatcatgaaactttgctcaaattgtttatcagctggatgaggttttgggtcgagactatggggctttctagatatagaatcaagtcatttttccctttatttctcttgactgattgccctgaccaggacttccaatgccatgttgaataagagcggtgagagcaggcatccttgtcttgtgccatgtttggcatgttctaagcagacatatttcttagaaaataagtattgaatatgagga

SEQ ID NO: 167649 - DNA, 446 bp, Homo sapiens
atataatagatcatgtgctgaacactttttaaatttgatcattaaatataagaacattgagattcagggagaggcactgatctgcttaagatcatacagaacagctgtctgtatttgactggagtttgtccacctccaaaatcttcattcatgcagtgacttcagaccgcatttgttgtaaagaataagtctgcctctttctattgagcctgtgtagctcaagagcatttgcagtttactgagcagactcattattctctgacttgatttttctctcttttttttttttttccttgagacagagtttcgctcttgttgcccaggccggagtgcaatggtgtgatctcggctcaccgcaacctcctcctcccaggttcaagcgattcttctgcctcagcctcccaattagctgggattacacrcatgcaccaccatgccctgttaat

SEQ ID NO: 167650 - DNA, 597 bp, Homo sapiens
cgaaactccatctcaccaaaaaaaaaaaaaaaagtacaggaataaaagtggcattttactaggcacttactattcataaagcagaaatatgtgaataatacatctgtgagctttgtsagtttgtttacactctgacatgaagtgggtgtcgttgagaaagtgagcttgtatgtattttttctatcatgatcacagagtggcatttttgtatgttattgatctctgaggttgtttttgttctataggagaacaccatgatctagcttgagtgtcaaaccagctcccagagaaagctatcggaaaatgcctttttttttcttgctcagtttttgattgccttccagttttaaccattcttgcttaggtctaaaagtaagctacttttgtatatgttgtctctctctctttcacacacacacacacgtgttgtgtgtgtgtgtgtgtatatatatatgcatctatatatgtctatataatgtgtgtgtgtctatgcatatgcatgtacctacatgtgtgtgtatatacagatagatagacacacacatacattctaatttcaggcagtaacatacagatatatagatacagaaatagata

SEQ ID NO: 167651 - DNA, 597 bp, Homo sapiens
cgaaactccatctcaccaaaaaaaaaaaaaaaagtacaggaataaaagtggcattttactaggcacttactattcataaagcagaaatatgtgaataatacatctgtgagctttgtcagtttgtttacactctgacatgaagtgggtgtcgttgagaaagtgagcttgtaygtattttttctatcatgatcacagagtggcatttttgtatgttattgatctctgaggttgtttttgttctataggagaacaccatgatctagcttgagtgtcaaaccagctcccagagaaagctatcggaaaatgcctttttttttcttgctcagtttttgattgccttccagttttaaccattcttgcttaggtctaaaagtaagctacttttgtatatgttgtctctctctctttcacacacacacacacgtgttgtgtgtgtgtgtgtgtatatatatatgcatctatatatgtctatataatgtgtgtgtgtctatgcatatgcatgtacctacatgtgtgtgtatatacagatagatagacacacacatacattctaatttcaggcagtaacatacagatatatagatacagaaatagata

SEQ ID NO: 167652 - DNA, 597 bp, Homo sapiens
cgaaactccatctcaccaaaaaaaaaaaaaaaagtacaggaataaaagtggcattttactaggcacttactattcataaagcagaaatatgtgaataatacatctgtgagctttgtcagtttgtttacactctgacatgaagtgggtgtcgttgagaaagtgagcttgtatgtattttttctatcatgatcacagagtggcatttttgtatgttattgatctctgaggttgtttttgttctataggagaacaccrtgatctagcttgagtgtcaaaccagctcccagagaaagctatcggaaaatgcctttttttttcttgctcagtttttgattgccttccagttttaaccattcttgcttaggtctaaaagtaagctacttttgtatatgttgtctctctctctttcacacacacacacacgtgttgtgtgtgtgtgtgtgtatatatatatgcatctatatatgtctatataatgtgtgtgtgtctatgcatatgcatgtacctacatgtgtgtgtatatacagatagatagacacacacatacattctaatttcaggcagtaacatacagatatatagatacagaaatagata

SEQ ID NO: 167653 - DNA, 592 bp, Homo sapiens
gaattcatgttatgcatcaaataattttctgtgtatgattctgtgggcagcataagaggatcagtgaatagctctactttgatgaytgaacatacaccttacaccctggaaattgcaatggacaacttgattggaatggtgttgaactgtaatgagtctcactaaataaaatgtcttccctgggaataaaaagattactcatgaagagcaagagctctagtgactttacactgttccatgaaatactcagagagccgaatacaattggaaatagtgaataaaaagaattaaagaagctactgataacaagtctttttctcctttagaatttgcataccttagcttagtggggagggcagaattttgcctctgtcaaagagaaaaacaggtatgctggaattagcatgttcagctctgaatagtcttgctgtcaccatggcatgaatgtgttccccaaatgagcttcttcacatctgtttaaatctagtctatccatcaagaaccagtgcttgttcccaatccactctgtagacttagtcaaccacaaacaataaaggctatgaaacttaatagattaagccatattaaacta

SEQ ID NO: 167654 - DNA, 592 bp, Homo sapiens
gaattcatgttatgcatcaaataattttctgtgtatgattctgtgggcagcataagaggatcagtgaatagctctactttgatgactgaacatacaccttacaccctggaaattgcaatggacaacttgattggaatggtgttgaactgtaatgagtctcactaaataaaatgtcttccctgggaataaaaagattactcatgaagagcaagagctctagtgactttacactgttccatgaaatactcagagagccgaatacaattggaaatagtgaataaaaagaattaaagaagctactgataacaagtctttttctcctttagaatttgcataccttagcttagtggggagggcagaattttgcctctgtcaaagagaaaaacaggtatgctggaattagcatgttcagctctgaatagtcttgctgtcaccatggcatgaatgtgttccccaaatgagcttcttcacatctgtttaaatctagtctatccatcaagaaccagtgcttgttcccaatccactctgtagacttagtcaamcacaaacaataaaggctatgaaacttaatagattaagccatattaaacta

SEQ ID NO: 167655 - DNA, 514 bp, Homo sapiens
tgttttcacatataaactcaatagttattcaggacagataatttatcacatactatttcacaggacaggtaatttttcatgcacttatttgcgtttcttacatggaaaagaatttgtgtatatagttaggtcaaaacaacacagttccccatacctagcatcaacatgaaacctgtgagattagctatgctatgcaaactgtgaaacacaagtcagagttctgtttattttatgaawttgtgaaccccataatatctggcgtaaataaaactgaaaacaagatataatttttatctaatgttaaggtccccaataattattccagattatgtcattccaatgataatgcctctgcctatgatgtacaggtgtctgtgtccatgtggctggggatgtttatattgcaagggagtaacctcatggctttccgcagataggatctttctggctggcagctgttcaaagaaaatttataattttaatctttagtcttttctacatttcagaattattg

SEQ ID NO: 167656 - DNA, 405 bp, Homo sapiens
ttgaaagttaaaaactccagaagtactcagccatgggtggggagaaaatgtgaaatttatctccaggttctcatagtaaatatcagagtaaaatcccctcctccttctggcagggagagggaaaaaggaaccattttgaaatatgccagagtaatcagttcataacaaggcctgccctcaagaaactagttaacaagaacttaaccttctgggatattatcagaacctaactgactgggagaagaaaaacacctgactccagctagctccagccttccatgtgcgagaaaagaaatgccaaactctagcccactctagtcttccagtcaaacctaaggcrggagaaagctactgagaaacaattgtgaacttcacatcccagagtatgtgtagcctcactaaaag

SEQ ID NO: 167657 - DNA, 570 bp, Homo sapiens
aagagaagacaagctgcagactgggaaaacatttttaaaaacatatttgataaaaagctgttacccaatatttgaaaaaaataaaaagcccttcaaaatcaacaataaaactaacaacctgattttaaaatgggccaaagaacttaacagacatttcacaaaagaagatatatagatggcaaataagcatgagaaaagatgctacacatatatcatcagaaaaaatataaattaaagcaatatgatccagtatgcacctattagaatggtcaaaatacagaacactgacaacaccaaatgcagtgaaaakgtggagcaataggaactctcatcttagaaatgcacagtggtacagccaccacattagttttcttacaaaactaaatatattcttttcacgtgatcaagtatcatagtcctcggtacttaccagaagaagctgaaaacttatgtccacacaaaaacctgcacagaaatgtttataaaagttttgttcaaactgccaaaatttggaagcaaccaagatgttcttaagtaggtgaataaataaataaattgtattatgcccag

SEQ ID NO: 167658 - DNA, 570 bp, Homo sapiens
aagagaagacaagctgcagactgggaaaacatttttaaaaacatatttgataaaaagctgttacccaatatttgaaaaaaataaaaagcccttcaaaatcaacaataaaactaacaacctgattttaaaatgggccaaagaacttaacagacatttcacaaaagaagatatatagatggcaaataagcatgagaaaagatgctacacatatatcatcagaaaaaatataaattaaagcaatatgatccagtatgcacctattagaatggtcaaaatacagaacactgacaacaccaaatgcagtgaaaatgtggagcaataggaactctcatcttagaaatgcacagtggtacagccaccacattagttttcttacaaaactaaatatattcttttcacgtgatcaagyatcatagtcctcggtacttaccagaagaagctgaaaacttatgtccacacaaaaacctgcacagaaatgtttataaaagttttgttcaaactgccaaaatttggaagcaaccaagatgttcttaagtaggtgaataaataaataaattgtattatgcccag

SEQ ID NO: 167659 - DNA, 489 bp, Homo sapiens
taactgttatcattatctgctttcttttctcctttgtatacctctcatctgtgccaataatattaagataatattgcacctcatgttttgtcttatcctatatgagcaacattgctttataataaacaaccctgaatgaaaatgtacaggttttgaattatagatcttgcatttataagggagaaggctgggaaacttatttagcctcatstttattttcttatttatttatttatttaatagactatttttagggcagttttggatttacagaataattgaacaaatacagtaagattttctgtttttgcctgtctctctaaatttaggggcagtttaccttgtgacctcaatcctctaattgatctaagaagaactgttgtctttcaatttgttcagattttttatttttgtgagaatgagagtggtgacatccaagctccttatattttgcaggaaactggaaatctctcatttgtgttaacctgt

SEQ ID NO: 167660 - DNA, 609 bp, Homo sapiens
atgtggtcaccttcccagctaggcttagggattttcttagtcagcctaggaaatccagctagtcctatctctcagttgtatgtgatgcatgtaaaagctgaagatatcatgatgaaaataaaataaatggaaaggccaggcagggtggctcaygcctgtaattccagcaccttgggaggctgaggcgggaggatcacctgaggtcaggagttcaaggccagcttggaaaaaacatggggaaatcccatctctaataaaaataccaaaattagtcgggcatggtgatgcatgcctgtattcccagataatcaggaggctgaggcaggagactggctggaatccgggaggcagaggttgcagtgagctgagatcacaccactgcactccagcctgggtgacagagggaaactctgtctcaaacaagaaaaaaaaaaagctgaagacatatataaagaaaaaaatttaaatgcagtttgtagcttacttgaatatccgttaactcattgtaaaaccagtggcaataaaccatggaaaagaaaattttgttgttagactgtatttcaacttcacagtggtataattaagttattgatctgttttgcaaaacag

SEQ ID NO: 167661 - DNA, 609 bp, Homo sapiens
atgtggtcaccttcccagctaggcttagggattttcttagtcagcctaggaaatccagctagtcctatctctcagttgtatgtgatgcatgtaaaagctgaagatatcatgatgaaaataaaataaatggaaaggccaggcagggtggctcacgcctgtaattccagcaccttgggaggctgaggcgggaggatcacctgaggtcaggagttcaaggccagcttggaaaaaacatggggaaatcccatctctamtaaaaataccaaaattagtcgggcatggtgatgcatgcctgtattcccagataatcaggaggctgaggcaggagactggctggaatccgggaggcagaggttgcagtgagctgagatcacaccactgcactccagcctgggtgacagagggaaactctgtctcaaacaagaaaaaaaaaaagctgaagacatatataaagaaaaaaatttaaatgcagtttgtagcttacttgaatatccgttaactcattgtaaaaccagtggcaataaaccatggaaaagaaaattttgttgttagactgtatttcaacttcacagtggtataattaagttattgatctgttttgcaaaacag

SEQ ID NO: 167662 - DNA, 609 bp, Homo sapiens
atgtggtcaccttcccagctaggcttagggattttcttagtcagcctaggaaatccagctagtcctatctctcagttgtatgtgatgcatgtaaaagctgaagatatcatgatgaaaataaaataaatggaaaggccaggcagggtggctcacgcctgtaattccagcaccttgggaggctgaggcgggaggatcacctgaggtcaggagttcaaggccagcttggaaaaaacatggggaaatcccatctctaataaaaataccaaaattagtcgggcatggtgatgcatgcctgtattcccasataatcaggaggctgaggcaggagactggctggaatccgggaggcagaggttgcagtgagctgagatcacaccactgcactccagcctgggtgacagagggaaactctgtctcaaacaagaaaaaaaaaaagctgaagacatatataaagaaaaaaatttaaatgcagtttgtagcttacttgaatatccgttaactcattgtaaaaccagtggcaataaaccatggaaaagaaaattttgttgttagactgtatttcaacttcacagtggtataattaagttattgatctgttttgcaaaacag

SEQ ID NO: 167663 - DNA, 609 bp, Homo sapiens
atgtggtcaccttcccagctaggcttagggattttcttagtcagcctaggaaatccagctagtcctatctctcagttgtatgtgatgcatgtaaaagctgaagatatcatgatgaaaataaaataaatggaaaggccaggcagggtggctcacgcctgtaattccagcaccttgggaggctgaggcgggaggatcacctgaggtcaggagttcaaggccagcttggaaaaaacatggggaaatcccatctctaataaaaataccaaaattagtcgggcatggtgatgcatgcctgtattcccagataatcaggaggctgaggcaggagactggctggaatccgggaggcagaggttgcagtgagctgagatcacaccactgcactccagcctgggtgacagagggaaactctgtctcaaacaagaaaaaaaaaaagctgaagacatatataaagaaaaaaatttaaatgcagtttgtagcttacttgaatatccgttaactcattgtaaaaccagtggcaataaaccatggaaaagaaaattttgttgttagactgtatttcaacttcacagyggtataattaagttattgatctgttttgcaaaacag

SEQ ID NO: 167664 - DNA, 435 bp, Homo sapiens
ttgaacaaactgaaaagggacttgagaaacagctttttttgttttagagttttcttaataattagaggtaaagtaactattttggattacgatctggggartaactttggggcatagtgattataatttctttaaatcagggtgtttaagacgctattataaaagctcatggcataaaaataggtaaagtagaagttaaaatattgcactctcagagacatcaatcatgagaaaacttatgccaaataaagtgatacattgctgaatttgtatgtcatatgaggaatttcaagaggaaacatttgcatattctgaattgctggagtgtagtttcagtgtttaggatatagtgtttagtgcctattaactggagttggctgcatctaaaaaattatttcacttgtgacattttaaagtgattttcatgtttttttt

SEQ ID NO: 167665 - DNA, 435 bp, Homo sapiens
ttgaacaaactgaaaagggacttgagaaacagctttttttgttttagagttttcttaataattagaggtaaagtaactattttggattacgatctggggaataactttggggcatagtgattataatttctttaaatcagggtgtttaagacgctattataaaagctcatggcataaaaataggtaaagtagaagttaaaatattgcactctcagagacatcaatcatgagaaaacttatgccaaataaagtgatacattgctgaatttgtatgtcatatgaggaatttcaagaggaaacatttgcatattctgaattgctrgagtgtagtttcagtgtttaggatatagtgtttagtgcctattaactggagttggctgcatctaaaaaattatttcacttgtgacattttaaagtgattttcatgtttttttt

SEQ ID NO: 167666 - DNA, 557 bp, Homo sapiens
acaaggctaaatgcacagactgcatcttcactgggctgctctgaaatcaggctctgttgatcctgtttggcagatttggaaacttttatttcacttcgctcaagtttaaataggctctgagaaattaattcggataaaacaattcaacccagtgaacagtgtccgatttgtaaaccatgatatgaatttattgacaaaaactgtacagctagtataactagtcctagttatatgccttggacaatcccttcttattgggtatgtagatttatttgagagactccctgaatgatggaaaggctactagctgagtttggaatcagagtatgggcctttgtatgctcttaacggagatccagaatttaggtttgctaggwtataaactccacgaaggcagggatttactgacgtatcttaagagactagaacatagtaagcattcactaagtatctgttgaatgagtgagtgaatctgaattaagatttaactgccctgagagtaagtgttggttctggtcattagaatcagttgcctcgttcctggacagagttcctgg

SEQ ID NO: 167667 - DNA, 555 bp, Homo sapiens
ttcacattgtttcgcaatggtcaccaccatctatcccagaactatttcatcatcccacattgaaactctgtacccattaaacaataaatccctccttcctcactttttcctagcctctggcaaccaccattgagtttctgtatctatgactttgattatgctggatactttatgtaagtgaaatcatacaatatttaccctgtgtgtctggtttatttcacttagcatgatgttttcaaggtttgtttacattgtagcatgtgtcaaaattttattcattgtttaaggctgaataatattccattctatgtatataccatttgtttactcattcatccatccatggatatttgggttgtttccaactttgggctgctgtgaagaatgttgccataaatactcaagtacaagtatctgtccaagtctctgatttcaattcttttgactatatatccayagaaagaaatgctagattatattgtaattctgtttaatttttgaggaatcaccatgctgctttttacagaagctgtgccattttacattctaatggga

SEQ ID NO: 167668 - DNA, 555 bp, Homo sapiens
ttcacattgtttcgcaatggtcaccaccatctatcccagaactatttcatcatcccacattgaaactctgtacccattaaacaataaatccctccttcctcactttttcctagcctctggcaaccaccattgagtttctgtatctatgactttgattatgctggatactttatgtaagtgaaatcatacaatatttaccctgtgtgtctggtttatttcacttagcatgatgttttcaaggtttgtttacattgtagcatgtgtcaaaattttattcattgtttaaggctgaataatattccattctatgtatataccatttgtttactcattcatccatccatggatatttgggttgtttccaactttgggctgctgtgaagaatgttgccataaatactcaagtacaagtatctgtccaagtctctgatttcaattcttttgactatatatccacrgaaagaaatgctagattatattgtaattctgtttaatttttgaggaatcaccatgctgctttttacagaagctgtgccattttacattctaatggga

SEQ ID NO: 167669 - DNA, 634 bp, Homo sapiens
aatgcatatcatggaccagaggtggccaattctgcactgcttataattgaaacatttatacgaaagataaataaacttctatttccataaagccactgccatttcaggttttatgttcctcacaactgaacctaatgctaactgatagatattataaatatctggttatggcaactgtattagtttgctagggctgccataagcaaaacactacagaccagttgtcttaaacagaaatttgttttctcacagttatagaggctggaagttcaagatcaaggagtcagcaggtttgttttcttcctaagcctctctccttggccttggtcatcttcycagtgtatcctcacatggtcttttctctatgcctatgcatccctggtgtctctttgtgtgcccaaatgttttctacttctaaggatgccagtcagattggattagggcccactttaacagcttcattttaatttaatcacctcttgaaagcccaatctccaaatatgttcacattctgaggtactgaatgttaggatttcaccatgtgaattttgagaggacacaattcagcccataacagtaactgacttgtgtgcaagatgatgatttctgtgaaggcaggagttgcattttctgc

SEQ ID NO: 167670 - DNA, 554 bp, Homo sapiens
ttacagggaaatttttagaaatgattatcagtgaacacttgaagatgaattttgaaactatagaatcatttattttattttgaataaaagttaaaaataataacttcggcttgccgaaatgcttggaaatgtcttctattcctgtcaacatatttatgaagtgcatttctctcctctaaatgttactaaaacaaaacataggagagttatatgtacattacttcttgggagtagcattgtcatcaatccagcctagattatgtaaattcattagctagaagcaggctcatttgtcacattgaaaactttaaatcgtgatatacacagtgtcttttagaatgttcatataggcatctagtatgaggaatcaccatttcactcacrtgatcgttaattgcctatacttacactttcaatgactaatttagggttttggcaagtaaataatttttttcctatgatgtttgttctcattatatttattaaaatgtaattttgggtctgtttaatctaataaaagtgtaggcttttatttcatcttaccccaaccaaac

SEQ ID NO: 167671 - DNA, 548 bp, Homo sapiens
ggattagggcctgccctaatgagctcatttaatcttaattacccctttaatgacttccaaatactgtcacattcttaagtactggaggttaggacttcaatatatgaattttagggggaacacaattcagcccataacactgtccttgggttccttaagacaagtctgtactgttacgtaacctgtataaagctaagccaccatgtaattcagtctcaactcagtgctgcatacaaagatatgcaaaaacaaaatagaaaaaaagaattgaaaactattaacatatttactgaaatatcttggaaaatgctrcgaagaggttccaaagttgacacattacaaaagttctttaaaattgtcctcatccactcatctcttcaaaaccctagtcatcataacatagtagctaatcccgatctttactctaagtcatatctaaccctcccttctctcgttcctgatctattatttccttattccataattaactttttgtattttccaataaaaattataaagccgggcttggatcttcttatttccaccca

SEQ ID NO: 167672 - DNA, 538 bp, Homo sapiens
gtatctgtgtagagtataatagtacagaataaactttccatcatctcatttaattcttgattctatgtggtagatatttcataaatggacaagctgagctttacgaaagrttaagagaagaaggaataatggtgggggggaaggtagtaaagaaaaaagtgaggaaaggttgccaaaagatttctatttaaacgttttgtctagaagcagtgaggttcctctttgttggctacttcactggcactctctccattgcaccaaacatttggataagtggaacatcaatatgcttgggattttgtaaaagaaacatctagcaaatgaatttttaaatgctctggatatgctggtgttctgaagatacgtcaataaagcaaaaatttcacagaaaaagcaaaactttttcttagaacccagtggctgaagggcaacatcagtacagattatacctgtgatatcaaatgtattattatgagtgcaagttatgtgttcagcaatgaaaaattgaggcaagtgacaagtttgtgagtagattcat

SEQ ID NO: 167673 - DNA, 538 bp, Homo sapiens
gtatctgtgtagagtataatagtacagaataaactttccatcatctcatttaattcttgattctatgtggtagatatttcataaatggacaagctgagctttacgaaagattaagagaagaaggaataatggtgggggggaaggtagtaaagaaaaaagtgaggaaaggttgccaaaagatttctatttaaacgttttgtctagaagcagtgaggttcctctttgttggctacttcactggcactctctccattgcaccaaacatttggataagtggaacatcaatatgcttgggattttgtaaaagaaacatctagcaaatgaatttttaaatgctctggatatgctggtgttctgaagatacgtcaataaagcaaaaatttcayagaaaaagcaaaactttttcttagaacccagtggctgaagggcaacatcagtacagattatacctgtgatatcaaatgtattattatgagtgcaagttatgtgttcagcaatgaaaaattgaggcaagtgacaagtttgtgagtagattcat

SEQ ID NO: 167674 - DNA, 569 bp, Homo sapiens
agacaattaaacttgtaaaacatcaactgcaaatctaattgaatatattatatatgaagatgcacatgaatgaaaagtattatgctcaaatagtgaatagtatgacaaagttttatgaaactgtatatttgtagaaatatctgtatagtttgcaatatacaatcaaatatactatgttctgcgtgttttgaagcaatggctaacagcagactttaaaaatttattctgatcacttgtgtctttgttttgcacccttccttttttaaaaaattaattcaatagcttttagggaacaggtggtttttggttacrtggagttctttcgtggtgatttctgagattttggtgatgccatcaaccaagcagtggacactgtgcccaaggtataggcttttgtcccttaccccactcccatccttgtccctgagtccccaaagtccattgtatcattcttatgcctttgcatcctcatagtttagttctcacttataagtgagaacataagatatttggctttccattcctgagttacttcacttagaataattgtctccaactccatccaagta

SEQ ID NO: 167675 - DNA, 457 bp, Homo sapiens
tgcagctgtcacatccttgccctccccgcccagcttaatttaaacaagtaataatattccttttctattaacatatccacaattattctgtcctctggcttgcagaaaaagaaagattctaataattgctatggagactttgagtttaaaacggcacctggctaagcatcacttaagatacctctcccagttcctactaaaaygctaatagaaaaacaaactaatgggagctcacaaaaatttggaaaactaagacagactgaagaatgactgctggaactaaagtgaaatgacatcatgttatgtatgttgctataaactactttttccactcaatactatgttgtggagtagatatatttctatgtcaacaaataaaatccacatcaacattataattaataaatagggctgggtaaaccataactgtgtcagccattgaccttctgttggttgt

SEQ ID NO: 167676 - DNA, 573 bp, Homo sapiens
attattgaaaatttgagaagttctgatttacaaataattgtccctcaatttaaaataaacatttttaaagattttgtcaaaataaatagtttaacaaaattcaacctgttttcatatagaaaagtgattccacataattggaaggatctagtttggatttatttatttgcagatgggtgtgtgtattagtctattctcacactgctatacagacctaagactgggtaatttataaagaaaagaggttgaattggcttacagttttatggtctgtacaggcttctgcttctagggggacctcatgaaacttacaattatggcagaatgtgaaggggacgcaaggacatctttacattgccagcataagagagcgggtgaaaagggaggttcwataaacttttaaacaatcagatttcgtgaaaactgtatcaccagaaaagcaagggggaagtctgccccatgattcaatcacctcccaccaggtccttcccaaacagtatccaaagtcttaattcattccagcattaactcaaaagttcaagtccaaagtctcatctgagacaaggcaagtct

SEQ ID NO: 167677 - DNA, 455 bp, Homo sapiens
cataagtaaagaggagcccaatgttaatagttaagacaatggggaaagtgcttccaaggcatttcagagacctttttggcagcccgtcccatcacaggtctggaaacctagggkggaaaagtggttttgtgggccagaccaagagcccaactggggcactgcctattggagctgtgagaaaaaggccaccatcctccagaccccagaggtaggtccatcaacagcttgcaccatgcacctggaaaagctgcaggcactcagcaccagcccttgagagcaaccagggcagctgagtcctgcggagccacagagacagagctgcccaaggccttgcaagcccactcactgcatcaatgtggcctgaatgtgagacatggagtcaaaggagattattttggagctttatgatttaatgtctgcctgccctgctgtatccctgttgttttggctgaatt

SEQ ID NO: 167678 - DNA, 579 bp, Homo sapiens
agtggaaaaaaaaacaagaaaaaattaaaacccgtaagaaaaacctggaagctgtattggtctcccattgccttcaaatctcaaattttgtgatacaggtgatctgctggagaagctgtccaatttcatcataggcttargtaattaggcttatttagaggcttgttgaaatcttatataaaatcctcagtgaccaaattatacagtacatatcaatgcactatatcttcgtggtttaatttcgttgttgttgttgttgttttctgaatgtcttaggactacaaaactacgaaaaggacttgcaatagatacagtgttgataaggaggctgatttcttaggagaaagaaaatcagttacagctgttatcatttatatcaccattccctacaaagatcacactggaatagctgtttgccaactttgccaatcttagtaaaaatgttgtaataaaagtgaaagccaacaggggtaaaagataatctcacaagtgtcttaaaatgttcttattggagtggagaaagacagcactcttgttactcttaaatttcttccttacgttttctgagcattcctctat

SEQ ID NO: 167679 - DNA, 579 bp, Homo sapiens
agtggaaaaaaaaacaagaaaaaattaaaacccgtaagaaaaacctggaagctgtattggtctcccattgccttcaaatctcaaattttgtgatacaggtgatctgctggagaagctgtccaatttcatcataggcttaggtaattaggcttatttagaggcttgttgaaatcttatataaaatcctcagtgaccaaattatacagtacatatcaatgcactatatcttcgtggtttaatttcgttgttgttgttgttgttttctgaatgtcttaggactacaaaactacgaaaaggacttgcaatagatacagtgttgataaggaggctgatttcttargagaaagaaaatcagttacagctgttatcatttatatcaccattccctacaaagatcacactggaatagctgtttgccaactttgccaatcttagtaaaaatgttgtaataaaagtgaaagccaacaggggtaaaagataatctcacaagtgtcttaaaatgttcttattggagtggagaaagacagcactcttgttactcttaaatttcttccttacgttttctgagcattcctctat

SEQ ID NO: 167680 - DNA, 559 bp, Homo sapiens
tttaattccactgtgatcagagaacacattttatatgacaccaatcatttgaaatagcttgatgatttctctatggcctagtatatagtcaaatttactaaatgctctatckctacctgaaatgatacatattgttttatggtctgcatgtttgtgtttccccaaaaattcatatgtttaaatcctaatccccaaggtgatggtgttaggaagtggagactttgggggatgatatgtcataatggtggagccctctggaatgagtcccaaaggaactcattcatctcttccaccatgtggggacaggcaagaaagcactatctatgaatcagaaagcaggccctaccttggtatagactaagacattgtgttatattggttcaatgttccaaaaatatatctatgtggaccaaggttttaattgaattcataattcctaaccattactgaatttgttctgcttttcctagttattgagatgtatattaaattccccctctctgattgcaagtgtttctatttcttttatttctgtcagtttcttcttcctttataaatt

SEQ ID NO: 167681 - DNA, 564 bp, Homo sapiens
tatattaaaaagaaatagaatcagtatgcaaagagacagctgcactcacatgtttattgcagcattgcttacaatagccaagatatggagtacatctaagtgtccatcaatggatgaatgaggaacatgtgttatatataccacwttcagccttaaaaagaatgaaatcttgtcatttgtgacaacatggatgatcctaggaagacattatgttaagtgaaataagccagggatagtaagacaaataccacaggatatcactcatatgtagaatgtaagaaagttaatctcaaagaggtggagagtagaatggtagttaccaaaggccgggatgattgaggggagtgtagacatattggtcaatgaatacaaagtagcaaacagaaacaataggttcaagagatcaattgtacatcttggggaccattattagtaatatattgtattcttgaaaagtgctaagagagggtatgtaaagagtactcactacaaaagcaacagctatgtgagataatacatagggtaaaaagacagatttagtcatttcacaatgtgtatataatg

SEQ ID NO: 167682 - DNA, 642 bp, Homo sapiens
agttgaaacatacttaagaggaactccaaattttctagggaataggaaccaaagaatttaaatattatactttatataataatctaatcgggccgggcatggtggctcaygcctgtaatcccagcactttgggaggccaaggcgggtggatcacttgaagtcaggagtttgagactagccttgccaacgtggagaaatcctgtctctactaaaaatacagaaattaaccggacgtggtgacgggcatctgtaatcccagctacttgggaggctgaggcagagaattgcttgaacccgggaggcagacgttgcactgagtggagatcttgccactgcattccagcctgggcaacagagcaagactccgcctcaaaaaaaaatataatcgaaactacagatattaaataaagattgtaatactatttgttggtgcatagaagggagaattgaaggtaaaatgggaactgttgtgggcaggataatggctctccccaaagatatccatgtcataatctcctagttctagtgtcctaatttctgaaacctgtgaatacattatcttacatgactaaaaagaactctcgagatgtgattaagaaccttgagatgggtggattatcctgaataccataagtgggatca

SEQ ID NO: 167683 - DNA, 542 bp, Homo sapiens
tgggtggattatcctgaataccataagtgggatcaatctaattacataggttcttaaaatcagagatttttttcccaattgtgagcaaagtaagatgtgaccatggaagagaactctgagagaggcaattttgctggtttgaagatgaaggaaagagtttacaagtcaaggaatagcagtagcctccggaagctgggaaaggcaagaaagtctggtacaatcctmgagcctccagaaagaatttcagccttattgacaccttaatttagtgagtcctgtttctgatttctacagaatttaaagtaataaattggtggctttaagtcactaacttgtggtttgtttcaacagctatagaaaacgaagacaaaaatattgcaaaaatacctaatgtactataggagaatcaggcaaattttaatttataaaggtaatattcaagcttcacctttagaagaaagtgaaaattagctagatgtataaagaattactgtctgaggtagagagaacaacataagtgaaggccaatagatgaggctttc

SEQ ID NO: 167684 - DNA, 571 bp, Homo sapiens
gaacaaatacattgcctaagcaattttttagttttagcggtaagacattaaaagtggttctttgggtttgaattatgttcctttataatattttttgwctatgtgattcatacagtcacacacacacacacaaacagataatcagagtttactttaaaacttcaagcaagttatggtttagggattatttgaagaagatttgcttataaattgcaattaattatgaatgatattttgcaaaagtaccttgttaagagatttttaaatggccattcaatggtaaaataacaagttaaattaaacataatttgttgcatcacattatcttagttatgatttttgtaatttataatctctgtgtaacacgttttgcacaaatatttcaattaaaatctcatttttaaaattttaaaatttattttacatattgcttgtaataaattagtttgaaaaattaaacacatttgtacatatatttaaataaatatatgattctgtgcatttcattttgaaaatttccaaatcaatactataaatataaatattaatttttctcaatttataatatgta

SEQ ID NO: 167685 - DNA, 571 bp, Homo sapiens
gaacaaatacattgcctaagcaattttttagttttagcggtaagacattaaaagtggttctttgggtttgaattatgttcctttataatattttttgactatgtgattcatacagtcacacacacacacacaaacagataatcagagtttactttaaaacttcaagcaagttatggtttagggattatttgaagaagatttgcttataaattgcaattaattatgaatgataytttgcaaaagtaccttgttaagagatttttaaatggccattcaatggtaaaataacaagttaaattaaacataatttgttgcatcacattatcttagttatgatttttgtaatttataatctctgtgtaacacgttttgcacaaatatttcaattaaaatctcatttttaaaattttaaaatttattttacatattgcttgtaataaattagtttgaaaaattaaacacatttgtacatatatttaaataaatatatgattctgtgcatttcattttgaaaatttccaaatcaatactataaatataaatattaatttttctcaatttataatatgta

SEQ ID NO: 167686 - DNA, 446 bp, Homo sapiens
atacttaaaaactagtttaagatatactgttgtcctgcctaacactggcaataactatatatttcatttcatatttactctgtcaaaagacattcccttcatgatattcagaatgatctctttaaaccttaatacattctaaggcttatatggtttctcatagatttcagataaaatcccaatcccttaatgtggcccagaattccctgtattctattattcctttatccatctattcttatttattagcagtgatgcatygagaaaaaaattgcaggaagtgaaggatggaattgggaaataaataaggaacttattacaacaatcattgtgatagagaatgttcacttggatcaagctgctaataatagaatgaaaagctgtcacattttattgtgttttgaaagaagtgacaacaagatattctggttgattgaaataaggag

SEQ ID NO: 167687 - DNA, 446 bp, Homo sapiens
atacttaaaaactagtttaagatatactgttgtcctgcctaacactggcaataactatatatttcatttcatatttactctgtcaaaagacattcccttcatgatattcagaatgatctctttaaaccttaatacattctaaggcttatatggtttctcatagatttcagataaaatcccaatcccttaatgtggcccagaattccctgtattctattattcctttatccatctattcttatttattagcagtgatgcatcgagaaaaaaattgcaggaagtgaaggatggaattgggaaataaataaggaacttattacaayaatcattgtgatagagaatgttcacttggatcaagctgctaataatagaatgaaaagctgtcacattttattgtgttttgaaagaagtgacaacaagatattctggttgattgaaataaggag

SEQ ID NO: 167688 - DNA, 563 bp, Homo sapiens
ttattaatgaaaaaagcaatggtcatgtcttcatattatttgcatcagtttcctttattccaattcarttcccagtgaggttactcaaaggggcctatgaaagaaggctctataggcagtagggtttattacaggaaaggaacaatgtacctggggaacacactgcttttaccatgagcagaaccaagcctgctttctgtccaggcaagacataaatttattccttaagattgcttattgcaaatgcagctctgaaaaatatccaagataatgaacagccagggccttgcatttttggaagagttcacaacttgcatggaatctcggcccattgtggattgcttctggacccttagcagctgttgttagcctttcaggtatagcaccaactcacactaggaaaaatcaaagatagcctgaaagaagtgtggatgataaagactcagtttgaataaacatcattaccactgagaggaacaaaagtgattgtacactcaagctaattcactatataaaaggaggtcacaggtataacatcatattcaaagagatgtcatttgaat

SEQ ID NO: 167689 - DNA, 554 bp, Homo sapiens
aaacgcctagctaagaagtaataaaaagtgatagggtctggacagtattgtttgagtgcctacttccaatcatctgtgaagtcacatttattcctcaacttttcttataggttagatataagctgaagtattatacacacattctcacacagraacatatatgtgtctatgcctatggattgaactagtttgaattgtgagggctttttaaaaaagcatgaaatacaaagaaacctaagtaaatgagccaattgtattttaatgacttacaattatattgctggtcctttcttaaagggagaggtatacacttgaagatatattcttcatttgaattaactttttcatatgctctttccaacgtcataatctctgaattaatagattatcaaagtattctggcttacttatatgaaaaatctataatcatcctttcacatgtttaatgtcagtaatttatttgtggttgttttgtaaattttcccaaataggctaagatttaaatatacaaaatgaggggaggattaagcaatgaataagagacagcagatgta

SEQ ID NO: 167690 - DNA, 514 bp, Homo sapiens
aacatttcctttgattcagcaaattgaaaacactctttctgtagaatctgcgctgggacttttgggagcccatgaaggcctatagtgaaacagtgacatcctattataaaaactagaaataagctacctgagagaatgttttgcgatgtctggattcatctcagaaattcaaatttttcttttgattcagcaggtttaaaacactctttctgtagaatctgtgcaaaatattttggagcccattgaatcmtatagtgaaaacagatattccatgataaaaacaagaaagaagctatctgtgaaatcactttgtgatgtgtggattcatctcacagagttgaacctttcttttgattcagcaggttgcaaagactctttctgtagaatctgcacacaaatatttgggagcctattgaggcctatagtgaaaaaccaatatcccatgataaaaatgagaaagaagttatctgtgacaatgctttgcaatatgtggattcacttcacaaacttaaac

SEQ ID NO: 167691 - DNA, 610 bp, Homo sapiens
aataagctacctgagagaatgttttgcgatgtctggattcatctcagaaattcaaatttttcttttgattcagcaggtttaaaacactctttctgtagaatctgtgcaaaatattttggagcccattgaatcctatagtgaaaacagatattccatgataaaaacaagaaagaagctatctgtgaaatcactttgtgatgtgtggattcatctcacagagttgaacctttcttttgattcagcaggttgcaaagactctttctgtagaatctgcacacaaatatttgggagcctattgaggcctatagtgaaaaaccaatatcccatgataaaaatgagaaagaagttatctgtgacaatgctttgcaatatgtggattcacttcacaaacttaaacctttcttttgattcctcattttggtaacaatctttctgtagaatctgtgtagaaacattttagagcccattgaggcctatactgaaacacagatatcccatgattaaaaagtagaaagaagctatctgtgaaaattmtttgcaatatgtggattcatgtcatagaattaatcatttcttttgattcagggggttcaaaacactctttttgtat

SEQ ID NO: 167692 - DNA, 542 bp, Homo sapiens
atcccttcttcattgcaatacagtctcaattatggcataaattgactatatgtaacagtcagtttgttaactcttttattgctatatgtctgttcttgagtcaatcccatgttctttatgttacttgagacaaaaaggctattatatattgatataaatcttaattcatcaaaagattaccaattataaacataattacaccaaacaaaagaggctcaagatatatggaagcaaacatttatsaaattaaagaaaaaatagacactttaaaattgtagttggaaacttcaatatccacgttaaaatgatagttggagacttcaataccccattttcaataatagatggaacaacatcttgaatctattgttcaaaatgtctattttgatagatattctgattcatatatatggtttgtatatttttattcatatatgtattttatgcatgtattcatgtgtatatatattcatgtattaatacatatacattatattcatatatttttttattcatgagaatatatatacatatatagaaat

SEQ ID NO: 167693 - DNA, 542 bp, Homo sapiens
atcccttcttcattgcaatacagtctcaattatggcataaattgactatatgtaacagtcagtttgttaactcttttattgctatatgtctgttcttgagtcaatcccatgttctttatgttacttgagacaaaaaggctattatatattgatataaatcttaattcatcaaaagattaccaattataaacataattacaccaaacaaaagaggctcaagatatatggaagcaaacatttatcaaattaaagaaaaaatagacactttaaaattgtagttggaaacttcaatatccacgttaaaatgatagttggagacttcaataccccattttcaataatagatggaacaacatcttgaatctattgttcaaaatgtctattttgatagatattctgattcatatatatggtttgtatatttttattcatatatgtattttatgcatgtattcatgtgtatatatattcatgtattartacatatacattatattcatatatttttttattcatgagaatatatatacatatatagaaat

SEQ ID NO: 167694 - DNA, 468 bp, Homo sapiens
agtcccagataatttatccagatgtaaatcgttctatatatttccattttctatgtatcaaatactatcgtgctctcctgcataaactttgtattttattaaattgatctaataaatattctccactctctgcatattttctgtctacaggccttcatctacaggtcttctgtctacaggctttcattytaaattattagaatagttttatgttcttctttaatattcaatgtccatcttatgtctgacctctctatgaactcagcccatctcaacagtccatcactaaagtttaaccttcagaagaatttattatctctcaaaggtataccattgggccatgtatatcttgcctccttatgacttatagttttggtatattcagtgatgaaaataatattcatttgatgatagtgcttacaatggtgttgataaagatgatgaagatgattgtgatgacaacagaaa

SEQ ID NO: 167695 - DNA, 468 bp, Homo sapiens
agtcccagataatttatccagatgtaaatcgttctatatatttccattttctatgtatcaaatactatcgtgctctcctgcataaactttgtattttattaaattgatctaataaatattctccactctctgcatattttctgtctacaggccttcatctacaggtcttctgtctacaggctttcattctaaattattagaatagttttatgttcttctttaatattcaatgtccatcttatgtctgacctctctatgaactcagcccatctcaacagtccatcactaaagtttaaccttcagaagaatttattwtctctcaaaggtataccattgggccatgtatatcttgcctccttatgacttatagttttggtatattcagtgatgaaaataatattcatttgatgatagtgcttacaatggtgttgataaagatgatgaagatgattgtgatgacaacagaaa

SEQ ID NO: 167696 - DNA, 669 bp, Homo sapiens
ttttatttaagctcctgtgagattcgctcaaagatttgagaagtgaatttagttcctactgatagaaaacaaagtgaaatctactaaccatgattcacaaaggctagaaaagagtttttagaaggcattataaaaagttttctgttttcaagttatctcacttttatccttctctaagtctcatacacctgtttgacttttcctaaaaagttttcagtcttacaactttaaaattagttaaggataaataaaggggaaaaaaacgacttgatacacttaaattaaggaaaatgtcaatgggatataggaggagatattaaaaaaaagacaaggaaatmaatttttaaaacaattttcaaatatataatcagaactgatattttagaacctaattctctgaaaattttagttttatatcatttttggtagaatttatatttaagtaatatacaggtttatcactgctgtgttagaacaatgcatattccaacttttgttcactaactttttaaatgtttccatcaacagtatttgtaagtgtctttaggataattgcttatttgctagcttctgacatcactaaattagaaaaaaatttgtccacttataatctatgtttctggtaattgccaagttttaagccacatgtgtttaataggaaaaatcaga

SEQ ID NO: 167697 - DNA, 468 bp, Homo sapiens
cttaccaattacactagtattacactaaatattacattatgaaaagaaaattactatgaaagaagtcattttggattacaatagtatttcgtacagcttcctaacaaaagcagtcattacctgtatattaaatgttgtcataggccatgstgtaaatcaagggtcaagttttagttaaatctgaaatctcagtgccttgtggggcacagccatatgaccttttttactacgtggttgtattgagtagatttcatcatgagccttgtatttaaatcatactctctctcaggtaaatccttatttaggtttaatgggcttccatttgcagccaactacgaaacattttgttaccatagaatgtttatttcatagttacaaattggacatataatttatatccacaaatgttgaatttcccagtgcaatatcatttgggctgtagtcatctacaatttaaatatggcagaa

SEQ ID NO: 167698 - DNA, 603 bp, Homo sapiens
actcctgtaattaatggccttggaaaaaattaaaaactcatctttctgagaataaattgatatataagattactttttaggggaggtttaccaaaartcctttactatttaattactgggacattagggtatttattttacatggaattactataactaccctattctagtactaaaactgacataaaatgtttgatcagagctatgaaacattataaataattaacagaacatattaacttatttttggtttttaactgcttacactgatgtcaacactatccaaagtcatcacataatcagtgttctgtgaaataaagtcaaatgcatcattaagtgtgttgatcagcaattcttagtgtgaactgagagcagttttacaggagaaagaccagctgctttctcagagagagagagacagagagtgaaagagagagacaaagagagattgagagtgaaagagagagagagaacaaagcaggtctacttattgaacatatggcaatcccaggaggatcctaaaaacataaattaatatgtaaataccctagtgcttataaatattctaataaaatgagcttttgcatagtacatatataatgt

SEQ ID NO: 167699 - DNA, 241 bp, Homo sapiens
aatgtcctgcagaacaaatattctatgcaaaaatgtttagtayaatgggggacagagatgcactcacattaatttacagcacaaagcctgtatctcttaaaaaagaattatgatttatttttgaagcaatgaaaagattctatacaaaaataactggtgctacccaaaccttaccactacaggaatgaaacatgacgtgtctagaatgagaaaaagtaaggataatttatgtaaagttcta

SEQ ID NO: 167700 - DNA, 556 bp, Homo sapiens
ccaggtgttctgcactggagggcagctgttgatcttcctcggctgccagcccaggctcatctcgggggtgggggggtttgtggtgggacggccctcgtcctgcctggctccaacgctcagcctcaggggcatacggtgctagctcttggtgctgggcgcctgagaccctgtgtccctcgtcccctcagcctgcggcyccccgctccctgctatgtcttgctggtggagggaaggggtgcgggagcaggtccttctgctggagagtttttggggactcggtgtgaatgcaggagagctggtgagcacactttccctaggggacagctaggaggctcacgagtcgggggggcagggtgggaaaacactttcccccctttttttctttccttctccactgtccagcaggcctgttgtccctgcaggcccgggggagccaccttctagaagttgcataaccttggcctgtttcactcaatatcacgagcacatattttatgctcatttacattttaaatgggtacattttaagtcccatcctttttgaaaatatgaaatg

SEQ ID NO: 167701 - DNA, 532 bp, Homo sapiens
tctgtagcccaggctggaatgcagtggtgtgaactcagctcaccgcagcctcaacctcctgggctcaaatgatcctcccacctcagccacctgagaagctgggactacagtcatgcaccaccacgtccagctaatttttgaaattcttttgtagagacagggtctccttatgttgcccagactgctggactcaacaactctcctgcctcagcttcccaaagtattgggatgacaggcgtgagccactgtgcctggatatctgagggtgtccaggcagtttgctcrtagcggccacatccacagggtgtcggtgacatcatgctacttacatacagcggaaaaattgatcatggaatctgggcacactgaaaccatccataaaaatggatgatctttattttgatttcaggtagtgacatggtttggctgtgtccccacccaaatctcgtcttgagttgtagctcccataatccccacgtgccatgggaggggcccggtgggaggtcactgaatcatgggggtggttatcctt

SEQ ID NO: 167702 - DNA, 371 bp, Homo sapiens
gaccaagatgttctatcctaagtgctgttccatcctctacctgttggcctcagccccaagagaaacaaaccaccggctccttacactttgtccaaacttctcttcctaagaaaccacagtcacaattaaagcaagactttcamcattgaaatttagaccggcacatctacgaattctgtctcagaaaatcagccctgaattgccaatttgtgcctttttcaccaccttccatctatacaacaaggctgtaccttctctaacaaacatcattagaagaataatcacacacacacacacacacacacacacacacacgcatacaccaagtgggagcccaactggggagtccctgcttgtggcaaattgccagt

SEQ ID NO: 167703 - DNA, 573 bp, Homo sapiens
ttgcaaaatctgtcatctatgttatttcaatatgaataaaacgtttaaaatattataaacattcagaaagcatagtgatcatttttttctttttacctacgctttcacttatttcttttctttcacagaaagctacgaaataatattgattatgtgaatgaaatggtaatcacagtgttgcctgtcttttgtggaatctaattaaacctgctggcttccaaggtagtaaaggaaataaaaaaagtttactccaaaatacacttcattgatatatgtcaagatgactagtcagaagtgctggaaacacaagaatagcagaaaagctgttttttgtggaggagatttgyatctgtggagaaagtgtgcatttaggcagccggctttctttgatggactcccttgttgggatttaagaaagaggaactgagagactgacatctttaaaggtctgaaagagacatttaccatctattctctccaagggctgctatctgggaggtttcatctgcataacaagaccacttttgctggccaggcctcctcttctctcctcttataagctgtgttgccagg

SEQ ID NO: 167704 - DNA, 585 bp, Homo sapiens
tattcatctgacacagacatttttcatcaaacaaccattgttgtctcttctggagggtaagtagtgttctttaagataatttaccggccaagttaagtaaaatgctttctttaagataaattactgggtcccaaactaaataaacccaaagatattaaagtatgctggaagacaatgttacctggtggtttataagaccttcttgcaaagctggatctrtagacagggagatgttttgcttaacttctaagatgttgggttactgagctctgtccacattctttttgtgcaaaattgcttaaattcataacgaaattatgactccatgccatgtggcctgaagatgagtcgtgttcagattatatgcattacatttcagcagttttctggtgatggcgtgatgtgttttattctctatacccactacttctgattcccagaccttgtagaagatgtgtgcattaccacaatgaacttcaacttggttttgacaaaaaaactccttactttcatgactcatcctaccctttgagatcagatggcttagctaagctcatctgtcttttgcttaaaataagttttatc

SEQ ID NO: 167705 - DNA, 617 bp, Homo sapiens
atccttcatatctttaagactgtcatgtattagtccatgcatggtggctcacgcctgtaatcccagcactgtgggaggccgagatgggagaayagcttgagtccaggagtttgaggccagcctgggcaacatagggaaactccgtctttgttaaaaaaaaaaaaaaaggataaattctttaaaaatggcatgtatctataaaactctcccaaagatgtattggtgcatctattcccaaatttggcagtgtatagtaatgctttagaaaagatagtgtttcaatcatcaaaagtgagcttaaaaattagtttggttgaaattgtctcagactcagtactcactggataaactgacttattacatactgccttgttatcagcagtattaaaattactatgcaatgatattggattacatggataagatataataataaataaaaattttccaaaatggtgctgaaatagactggatttaagaatacttacacaattacttaagagatattctgaaggttctgttttgttttactctgaatctaaagacaacacaattttgtatcctttaacaaatatctccctatctcccctgtcttctcttcctctagtaaccatcat

SEQ ID NO: 167706 - DNA, 463 bp, Homo sapiens
attgtcatatactacatattactggccaatggaaattgaaccaaaaaattcatttaygagaaggggaaattcttgcttaatgtgacagttatgctactaaatgccaaaattgcatatcaaaggtaattttgaaatgtcccattagtgctagtttcttcacttgtgaaacagtgtagctttgtttacagatataggccagtaggcagtagaggacttaagttcataaaactaagagcaataattgatattaaaattagtccaatttatgccattaattatttcatagaaaactaaattaactgagaactgaaatatttcactctgtcatccagccaaaaaggagtgaatgtaatacctattgttagtttcgtttgatgcagtttcatcacattgcctacaaaaccaaattcagtgacttaaatcatttaaatcacagtaaactacagtggactatattcaaatc

SEQ ID NO: 167707 - DNA, 463 bp, Homo sapiens
attgtcatatactacatattactggccaatggaaattgaaccaaaaaattcatttatgagaaggggaaattcttgcttaatgtgacmgttatgctactaaatgccaaaattgcatatcaaaggtaattttgaaatgtcccattagtgctagtttcttcacttgtgaaacagtgtagctttgtttacagatataggccagtaggcagtagaggacttaagttcataaaactaagagcaataattgatattaaaattagtccaatttatgccattaattatttcatagaaaactaaattaactgagaactgaaatatttcactctgtcatccagccaaaaaggagtgaatgtaatacctattgttagtttcgtttgatgcagtttcatcacattgcctacaaaaccaaattcagtgacttaaatcatttaaatcacagtaaactacagtggactatattcaaatc

SEQ ID NO: 167708 - DNA, 604 bp, Homo sapiens
taacgtggagggtgagcaatttgagttcacacttttttatatttaaaaatgcactttacatagaaacacattgtcttttggaatacggtgtggttaaacaagcaaactacaatccccaaatctcagctttcggtctcagtttttatggatctttctggaaagaaacttgccaagtctgtagtttttctcttccattatctacagtatatttcatttaccactctttagatgccctctacattttagagtaactcactagaacagtgattctcaaatgttagcgtggataagaacattatggaaagctttttaatacgcggatttctacaaaaccttctgatgcagaaggtccaggttgggtccatayattttattttatttttgttttattttgttgtaaactgataatttgtaattatataaatgaatgagatatgaagtattgttcaatgtagaataattaaatcaaaccagttaatatatcctaacatttttgtggtgagaacatttacagtttactcttttatcaattttgaagtgtaaaatactccatcattaactatattcaccacaatttgtaatattaatagaactcaaagagggg

SEQ ID NO: 167709 - DNA, 550 bp, Homo sapiens
acttttagtaaataaagctcaacagcagacttcacttatttttatgatgttggtagtaatattttctccttcatcctgtttgcctgtttccatatctttccccagatcatacccacttttagcattattaccaaaataatatawttgaacacaaatcttttctaacaagtagagaaggcccatccaggcccatcctcccatctttccatccttctctatctgctcccagactccccatttcaaacttctattgttcattgtcaaatgctttaataaactttccatgtgctagttttcaatttactttcaattctgtaaccaacccattccaaattccacaatagagaaagaaatatctgggtactttctatttcccaatttaacctctatgccagcaagattaggacaggtccagaggtgggcttttcagtgggaatgaccttctaaacaccaatgagtgagttacaaatggagactttcctgtaaaaacttttaaaacattgctgtattaccactggcaaattaatctcaatatcatgtaatatttaac

SEQ ID NO: 167710 - DNA, 364 bp, Homo sapiens
tgtaaaaacttttaaaacattgctgtattaccactggcaaattaatctcaatrtcatgtaatatttaacatatttttcacgaaacaggatttgggaaataggaaatacctgcattctcattaacaatatagtactttttgtttaactttgaagttcaggggtgcatgtgcaggtttgttacacaggtaaacttgtgttatgggggttttttatacagattatttcatcacccaggtattaagcttagtacacattagttgtttttcctaatcctctccctcctcccaccctccaccctccaataggccccaatgtctgttgttccactctatgtgtccatgtgttctcattatgtagctcccac

SEQ ID NO: 167711 - DNA, 618 bp, Homo sapiens
cacataatatagcatctggagctaatgataattgcttcctaaacttttcacatgctttaaaaagagrtacatcatggccgggcacggtggctcatgcctgtaatcccagcactttgagaggccaaggtgggcagatcacctgaggtcgggagtttgagaccagcctgaccaacatggagaaaccccgtctttactgaaaatacaaaatcagccgggcatggtggcacatgcctgtattcccagctactcgggaggctgaggcaggagaatcacttgaacctgggaggcagaggttgcagtgagccaagatcacaccattgcactatcatcttttctaggcctgctaatatgcttgttctacctctgatataaatgtacaaatagattcagaaatgcatagctccaagctacccttctttcagcttcttctatcaagttctctttgtcttctctgtcgtaacctgaacatgagaaattgtggtcaatgattatatagcatatcaactatttaggcaaaccgcaggaaaagttctacactttgttctctagctacatacaagtcagtcaaatttaccaaatctttggaaagtctgaagacccagagtatactacatagta

SEQ ID NO: 167712 - DNA, 517 bp, Homo sapiens
tcctcggttctctctcaattatagttcattttgcagccttaagtctgtggttgttaaatgctttcctgctgccaatctgaaatggaggtggacaatccagtaaactaattcccaaattactccaaatgtgaatcaaattagaataaaacatttttggaaactgaaagaggaaaagtgaagggttatactgaaatatatagttttcatttttatggaactctatttttctaattcctactgggggtagatgtgttgaaattctaaaagaaagtgtgttcttatgacacattgttgacataattttccaagccaaaatgcaactttggaagatgtcaaaatcatacagcctcttaaaaaactcccagtctccatcttttatgacaacatgcaactggttttaagtattacttackgttggttataatgttacaaactttgagaagttaaatatttagaatttaagttcactaaagtgcaataaccataccctttcaaaagaaaagtaggaaaagcagat

SEQ ID NO: 167713 - DNA, 517 bp, Homo sapiens
tcctcggttctctctcaattatagttcattttgcagccttaagtctgtggttgttaaatgctttcctgctgccaatctgaaatggaggtggacaatccagtaaactaattcccaaattactccaaatgtgaatcaaattagaataaaacatttttggaaactgaaagaggaaaagtgaagggttatactgaaatatatagttttcatttttatggaactctatttttctaattcctactgggggtagatgtgttgaaattctaaaagaaagtgtgttcttatgacacattgttgacataattttccaagccaaaatgcaactttggaagatgtcaaaatcatacagcctcttaaaaaactcccagtctccatcttttatgacaacatgcaactggttttaagtattacttactgttggttataatgttacaaactttkagaagttaaatatttagaatttaagttcactaaagtgcaataaccataccctttcaaaagaaaagtaggaaaagcagat

SEQ ID NO: 167714 - DNA, 595 bp, Homo sapiens
tattgggtttgggcactaaacacttgactcccatttcagaatgaattagtttgttaaatgcaggtatttaaatagaatagaaactctaacaatgaatttcttcagtaagtwcttttatcttattgtataaaatattttatagtgttatccttttctttcactaatatgtgtatatatgtatgcatttcaacttctattttaagtcaaatattttttatttttattgtatttataaatttgtcacacttttaaatcactattaacaacatatttttataagtacaattataggtaatcttgcataaatgatattctattataaatgttcaaaataaaaaaattgaaaagttcgttgctgactatatgctagctgcatatgagatatgtggatttaatcatatactgaaattaatatttaacaatttatctagaacacattttgaaatatttaaaatattcattgtaggtggttgtttctccaacgacattcccacttttccatttaaatgccaaatgtgtgttctgatattgcattttcagtgtatacattttacattaataagtatctaactaataaattgcttcattattcatt

SEQ ID NO: 167715 - DNA, 246 bp, Homo sapiens
tgagaatagatttaatgagtataaatatccaatagagtcccactgtgctgtaaataaaataataattttaatatatcataatattctattagcatgagagaccttaaaatatgaataaagatakgctaaaattaaattattataatttgataccatgacaaaagaaagcatctgacttagaaacttttttagaaggttttgtgtgtataatttcatggagggaactaaaacaaatcaggttatcat

SEQ ID NO: 167716 - DNA, 529 bp, Homo sapiens
ctactggagctgctaaagcctagcttgaaagcatcaaaaactctgaatgtaattaagttagctggaattgtaaatgtcctaaccacccaccagtatcaagagtaaattatttgtagaagattcaattagcactacrgtgtttcatataaatgactgactctcaatgaaaactaaattatatactctgagataaaacaaatgaatgaaagccaagagaaaaaagagtcaatagaaacagctttacaggatgtcaagataatggaatacagggaaaaaacaaaatggaaatcaactaaacttaattaagaagataaataagaaaattgaaaagcttgttagggaacttaaaaccacaacaaagaacaaaactgaaattttagatgtgaaaattatagtaagtaaattatacttggaactcaatgaaagttttattagtggctaaaacaaaactggagagagtgtttataaactggaagataaatcaaaagaaaatatctggaatgaagtcctaacagaaagagaacaaaaa

SEQ ID NO: 167717 - DNA, 568 bp, Homo sapiens
agagtcaatagaaacagctttacaggatgtcaagataatggaatacagggaaaaaacaaaatggaaatcaactaaacttaattaagaagataaataagaaaattgaaaagcttgttagggaacttaaaaccacaacaaagaacaaaactgaaattttagatgtgaaaattatagtaagtaaattatacttggaactcaatgaaagttttattagtggctaaaacaaaactggagagagtgtttataaactggaagataaatcaaaagaaaatatctggaatgaagtcytaacagaaagagaacaaaaaaatgaaagagatagatgtaaatatagatatgaatagatacagagaaagagaaaaggaaaagagagagagagagagagagacatacctagacaggaggaaggatagaagcaatactttaaaagataattacaggtattgggaattttcaaaaaattgaccaaaaaacatcaagtcgcagattcaaaaagcttcacaaacacgaaatccaaaaagctagaacagcatgtgagcatacacacgcacacacacacacacacaca

SEQ ID NO: 167718 - DNA, 559 bp, Homo sapiens
caaagcaacttgaaaatctgattttaatcgtgctgaaagagatctgggtgtacagccataaatgctttatatatcaactattggatggattccatattagttgtaaatttggtagttaatgatgaagaagctaaactcataaagactaacatcaacatctagaactagaccttgtaaaaaataaagtaggaagttgcacaatcacatagttgttaatatacctgtcatactaaacatgtgtaactacgaaaaagacttacagctggactccctttttataaaattcctgaagcaattaccaccaagctcagtttgatttctcttttagatagaaaaatttattctacacaaactattgaaagcaaatacagtattgagatgctattacatcaatattatgggcctagatgacttttgtttagtatcttaatagctcagtcatttgttattcattcagccacacacgggacaccagggtgttatgaaggacaatactcttggggcattttgagttcaatttktgtttctctacttatgcagaacatgtgttggcatcagc

SEQ ID NO: 167719 - DNA, 476 bp, Homo sapiens
catatgaatataatttttgtatagtgatttaagcgcatctacaggaattaaagaaaaagtggatgttcagaaagattctatttctctaccaaaataattatggctgagatccacagggacctccatgttcctaaattcgatgaacattttttactttacttcaactctcagccagatttggcactgttgaccactttatctttagaaaattattttccctaggcttgatttacaatacagttttattttcctgtttggctatttataagtttctgttacagactttttctcccatattgcccttcactgtataattattccaagcttggtcttaggccttattctcacattttataatatcttcccatgcaatcttatccatgtctayagtttaattgattaactaatcccaaataaatcccaaatgtttgtttcaatcccaggctttatcttttagtctcaggcccataaactca

SEQ ID NO: 167720 - DNA, 548 bp, Homo sapiens
atggtttcattgaagaaatctaccaaatgttaaataactgattctacaccatctcttccagaatatagaagaggaggaaacacttcccagataattttatgaagctaatattactctgatacaaaacaagcccaaaatgaaaactatagatcaatatctcaatactataggcataaaaactttaacagaatattagcaaatagaattcaacaatgtatataaagaataatgtgccatgatcaagtggggtttattccagggatgtttatgccagggattctagactggtttattatttaaaaaaagaaaaaaaaaagaaaaataagcagagtaatctaccgtattaaaagatgaatgwagaatattcacttaattatatcaattaatgtagaaagagcatttgatacaataccaacactcattcttggtaaaactctcagaaaaacaggaataatgagggacttacttaacctgataaagaaaatctaccaaaaataccctacaactaacattctacttaatggtgaaagattgaattcctccccacc

SEQ ID NO: 167721 - DNA, 544 bp, Homo sapiens
tgtagtgtacctacccttcttgtgataatgtcagatgataaaatgcttgcataatgaaacgaagtcaggtaaatgrcatagagtttggctactattgaccttaaatacaagcactgtgatatcaggacagtcaatctaataaccaagagggccactatgtgactaaggggccagtagcataggcagtgtagctatgctagacaaagggatgattcaaaacctggatggggacaagacaaggcaagattctgtcatgctactaagatggcttacaatttaaaatttataaattgcttttttctggaatttgccatttaatattttcagaccattgttgaccacggataatcgaaaccatggatatgggggactcctctatgctcagaaaccatggataagggggactcctgtatgctcagttcatcatctttatccaacctcctctcctattttaccaccttagaatttctgtatcagccttgaagggtaatcaggctaagtgtaagtacttacaaaactaaatgtttttagagcacagatgact

SEQ ID NO: 167722 - DNA, 605 bp, Homo sapiens
gtcaaacattttgtggatatttaaaaaccaccaaaatactaaatgaaaaagaaggaggactaggaggaggaaaaggagaagaaggaacaagaagaaagggagaaaagsagaaaaaaggaaaggaagaagggaaggaagactaaagtaaccccctccagataactgtgatctacctgtttagaatgtgagtctactacattttattaattcactattttatattcttataaattcaaatcttaaaatgaatgtattgctagaaatacatgtgtttccattgttattactaacactttaagtaactattttaatttcagtaaaatgatttaagtggacgcttcataccaacatcctgtttttacataaattctttcatatgcatctccagataaaacgggaaatctgagtgcagcccattctgttgcaattttcttcattttatgcctaattcctatggctagtaggtaaccccttccatttctctgcactcaattttcttttctgcagcctttggaataaacagattttcagttttcattcagttctgatattttgaagtctgcaggaaattttacacttctatgagcctaaagtgtccagatttc

SEQ ID NO: 167723 - DNA, 605 bp, Homo sapiens
gtcaaacattttgtggatatttaaaaaccaccaaaatactaaatgaaaaagaaggaggactaggaggaggaaaaggagaagaaggaacaagaagaaagggagaaaagcrgaaaaaaggaaaggaagaagggaaggaagactaaagtaaccccctccagataactgtgatctacctgtttagaatgtgagtctactacattttattaattcactattttatattcttataaattcaaatcttaaaatgaatgtattgctagaaatacatgtgtttccattgttattactaacactttaagtaactattttaatttcagtaaaatgatttaagtggacgcttcataccaacatcctgtttttacataaattctttcatatgcatctccagataaaacgggaaatctgagtgcagcccattctgttgcaattttcttcattttatgcctaattcctatggctagtaggtaaccccttccatttctctgcactcaattttcttttctgcagcctttggaataaacagattttcagttttcattcagttctgatattttgaagtctgcaggaaattttacacttctatgagcctaaagtgtccagatttc

SEQ ID NO: 167724 - DNA, 583 bp, Homo sapiens
atttgtttatatgttcttctttttcaatgggttgtgaacaacttcaggttgaggtttatgtctcattcactttttattcccagtacttgatgaaatgcctaacatctactaggcattctgaaatgttcattaaactaaataatgacctgaggatatcttgacaagaagataattttttataaacgacagaaaacagaagcacagctaccttcagcaggtcctgactggggctgcacagggctcagccaactctggtggcctcaatgtcattttaaaggataaaatgagcttgaagctttgagtttccttctccctttcaccactgtgaatgattcaaacgtatgtatgcactcaccaccacctcccaaaaaaaccctaatttggccccatctgttggtgagcataaggagatatggttagattttgaagcaaagggaagaagaagcagaatagtgattgaatagggatttgacattcttagggattgttatcctgtccttccattaacaggactctttaggcaaggtgaaggaggaaaatgacattattacaattaccttkaaacaaataagccctagatgca

SEQ ID NO: 167725 - DNA, 555 bp, Homo sapiens
ttttcctaggaggaatgatgcattctctaaatataaaacattatagattcttatgtcatagccattacttttatgtatcgctaagttagatttagatatatctgctctgtagacatgcagagataaataaatgtgattccatgtcaaatacctgcccagaatggcttcatccaaattattccaagaaaaattgttagtttacaatttaccttattatttttacactattgtttctaccaggccaattctattcagtgttttatawaattttatacaagagtttggtgcacacatcccacagcacttgggaatagtcctttagtgtggtctttgaaattaaatcgcacatggaatctcaacttagtcacttcatacatctgagaccttggtcaagttatttcacttctaagatgttttggttttcacattcaacaatggaaactatcatgacctacattataggatggttcagatactttataatgtattgcatataaaatcttatttatagaggttttcctgcagttaaggagccagaagatctgggttcagacc

SEQ ID NO: 167726 - DNA, 484 bp, Homo sapiens
attgcatttccacacttaaaaagaaacacaatatcacatctttgagaacatggagaaatgagcactctcttatattgctgaagtgaatttccacaaactctttgtaaaktatctggtgatattcattacaatgtaaaacagatataacctttgatacagaaataagagttttaggactccatcttattgaaatgcaagtataagtttccaagccatagtataaagaaaagttataggatccttatttgcaaagttgaaaaactgaaaagaatctgaataacatcaataaatgaataattaaataaatgttggtacttttttgctatgaaatagtatattgatacttgaaataatgttttagagttacagttactgacttggaaggatagccatggcgtagtactaagaaagaaaatcaagtttcaaagtagcctgtaagatatgatgctgttttgtggaaagaaacagccctcctgtgtctcta

SEQ ID NO: 167727 - DNA, 484 bp, Homo sapiens
attgcatttccacacttaaaaagaaacacaatatcacatctttgagaacatggagaaatgagcactctcttatattgctgaagtgaatttccacaaactctttgtaaattatctggtgatattcattacaatgtaaaacagatataacctttgatacagaaataagagttttaggactccatyttattgaaatgcaagtataagtttccaagccatagtataaagaaaagttataggatccttatttgcaaagttgaaaaactgaaaagaatctgaataacatcaataaatgaataattaaataaatgttggtacttttttgctatgaaatagtatattgatacttgaaataatgttttagagttacagttactgacttggaaggatagccatggcgtagtactaagaaagaaaatcaagtttcaaagtagcctgtaagatatgatgctgttttgtggaaagaaacagccctcctgtgtctcta

SEQ ID NO: 167728 - DNA, 440 bp, Homo sapiens
ctccccatttctaggattccaaaaagcccagacaccgttatgagaatcaaaggaatagatgattctgtgtccctttctccttataaaacatagctttatatgattaccagtttaatattaacttctccaaattattcagattgatgccataagcctgcagctacttcattcttttttagcaatctttctatgtggttgtattgattataaacactcctataaaggcacgcttctctcaataatcatttgatctttstctatgaacacaaactctatgattataggtttccagtagacaatatattgatttgtctaaacagcacctgctttgatgcgaaatgcaagtttccatctggttggctttcatggaagcagcgatttttgtaaaatatgaccccaccatgtttgtcacagaggtaagcagaagacctcagttaaga

SEQ ID NO: 167729 - DNA, 505 bp, Homo sapiens
agtttccgtgaacctctttttaatctctcttttcttcctctctttacatttcacttcttccatgctgatgtttcaaggcaatcatagatgtactttctatgactttagattagtttactttttcttgaatttcatgtaaatgagaaatatgctatgaattcttctttttttgttgttttttgagacagggccttgctctgttgtccaggctgaaattcagtggcataataatagattactatagtctctaactcctgggctcaagagatcctcycacctcagcctcccaagtagctcagactacaggcacacatcaccatgttctgctaacttttatttttgtaaagatgggctctcactatgtttcctaggctcatctcgaactcctggactcaagtgatcctcccatctcggcctcccaaagtgctggggttacagcatgagccactgtgtccagcctgaaatcttctctagttgacttctttcacttagtaggtaatttatc

SEQ ID NO: 167730 - DNA, 505 bp, Homo sapiens
agtttccgtgaacctctttttaatctctcttttcttcctctctttacatttcacttcttccatgctgatgtttcaaggcaatcatagatgtactttctatgactttagattagtttactttttcttgaatttcatgtaaatgagaaatatgctatgaattcttctttttttgttgttttttgagacagggccttgctctgttgtccaggctgaaattcagtggcataataatagattactatagtctctaactcctgggctcaagagatcctcccacctcagcctcccaagtagctcagactacaggcacacatcaccatgttctgctaayttttatttttgtaaagatgggctctcactatgtttcctaggctcatctcgaactcctggactcaagtgatcctcccatctcggcctcccaaagtgctggggttacagcatgagccactgtgtccagcctgaaatcttctctagttgacttctttcacttagtaggtaatttatc

SEQ ID NO: 167731 - DNA, 505 bp, Homo sapiens
agtttccgtgaacctctttttaatctctcttttcttcctctctttacatttcacttcttccatgctgatgtttcaaggcaatcatagatgtactttctatgactttagattagtttactttttcttgaatttcatgtaaatgagaaatatgctatgaattcttctttttttgttgttttttgagacagggccttgctctgttgtccaggctgaaattcagtggcataataatagattactatagtctctaactcctgggctcaagagatcctcccacctcagcctcccaagtagctcagactacaggcacacatcaccatgttctgctaacttttatttttgtaaagatgggctctcactatgtttcctaggctcrtctcgaactcctggactcaagtgatcctcccatctcggcctcccaaagtgctggggttacagcatgagccactgtgtccagcctgaaatcttctctagttgacttctttcacttagtaggtaatttatc

SEQ ID NO: 167732 - DNA, 505 bp, Homo sapiens
agtttccgtgaacctctttttaatctctcttttcttcctctctttacatttcacttcttccatgctgatgtttcaaggcaatcatagatgtactttctatgactttagattagtttactttttcttgaatttcatgtaaatgagaaatatgctatgaattcttctttttttgttgttttttgagacagggccttgctctgttgtccaggctgaaattcagtggcataataatagattactatagtctctaactcctgggctcaagagatcctcccacctcagcctcccaagtagctcagactacaggcacacatcaccatgttctgctaacttttatttttgtaaagatgggctctcactatgtttcctaggctcatctcgaactcctggactcaagtgatcctcccatctcggcctcccaaagtgctggggttacagcatgagccackgtgtccagcctgaaatcttctctagttgacttctttcacttagtaggtaatttatc

SEQ ID NO: 167733 - DNA, 481 bp, Homo sapiens
ataaatagaattatactgtgtgtaactttttgggttggcatttttcactcagcgtaactctccagagattcacctaggttgttgcatatcaatagtttcttcatttttattgtagaataacattcgatgatatggatgtatcacagttgttttaaccattcagscatagagggatgcttggattgtttccaaatttgggctgttatgaataaaaatgttataacatattcatgtacaagtttttgtgtaagataaatttccatctttccaggataaatgctcaggagcacattgctagattgtattatagttgcaggtttagttatttaagaatcaagaagccttgctttttttaaatggaaaggaaaaagaaaggttttcagagttagatggtaattactgcagtaatattgatggaacagtactttctcaaatgtttgcactattttatagacaggactcaatttaagtttaatttttg

SEQ ID NO: 167734 - DNA, 517 bp, Homo sapiens
tttcttatttctagaatgctgtataaatagaattatactgtgtgtaactttttgggttggcatttttcactcagcgtaactctccagagattcacctaggttgttgcatatcaatagtttcttcatttttattgtagaataacattcgatgatatggatgtatcacagttgttttaaccattcagccatagagggatgcttggattgtttccaaatttgggctgttatgaataaaaatgttataacatattcatgtacaagtttttgtgtaagwtaaatttccatctttccaggataaatgctcaggagcacattgctagattgtattatagttgcaggtttagttatttaagaatcaagaagccttgctttttttaaatggaaaggaaaaagaaaggttttcagagttagatggtaattactgcagtaatattgatggaacagtactttctcaaatgtttgcactattttatagacaggactcaatttaagtttaatttttgataacatttccacc

SEQ ID NO: 167735 - DNA, 364 bp, Homo sapiens
ggaggtgacatatataatagtctggacagcgtgtgtctgaagcaggtggatctgggtttgaaattctrtttgacagattatatgctgtctgtcattagacaagttgcttaacctctctggacctcgtttttcttaactataaatggagactgatatctatcttataagggtgctgtgaagatttaatgatttagcacatatgaagtgatttccacagtgtctgacatgtagcagatactcactgtatgttaatattatcattcgcctgttctttttcacagctgaagtcacttatggttagaatcctcccctgggctatgcaggagagcctctggcaattctggtaaaactagctcttcatatt

SEQ ID NO: 167736 - DNA, 501 bp, Homo sapiens
actaagttgcttactacaatgactgaaataatttatattgccaccggcagtatataatcattcccttttttccacagcctcaccagcatgttattttttgactttttaataatagccactctgactgttgtgaaatactctctcatcatggttttgatttgtatttctctaattattagtgatgttgaatatttttctatatgcttgctggccacgtgtacatcttcttttgaaaagtgtctgttcacgttctttgcccaatatttagtgggtcatttggtttttgcttgtaagtttgtttaaattccttatagagtctggatattcgacctttgttagatccacagtttgcaaacagtttctcccattctgtagatcattttttttttyaccctgttgatagtttcttttgctttgcagaagcttttcagttttatttggtccatttgtcaatttctgtttctgttgcaattgcttttggagtctctgttatgaaatctt

SEQ ID NO: 167737 - DNA, 463 bp, Homo sapiens
tccaagtaattttaaactgtcctgtgcacacaggcatatgtatatatgtgggattacatgtgcagctattctgttacattatttcagtttgaacacataatttcatagaagaaaagcaagccgagatagaccatcataatctagggtatctactgcttcctctatgcagtgttttggtcttgggaaatgcttgtatacgtaagttcttttttaagtttatttaaaatgaggggattgtggccaggggtggtgactcatgtctgtaatcccagcactttgggaggctgaggcaggcgaataacctgaggtcaggagtttgagaccagcctggccaacayggtaaaaccccatctctactaaaaatacaaaaattagccaggcatgatggtgggcacctgtaatcccagctactggggaggcagaggcaggagaatggcttcaatccgggaggcggtggttgcag

SEQ ID NO: 167738 - DNA, 561 bp, Homo sapiens
tctgagtgagtctccctaatgaggcaacacagcatgaaaacgctgcaagcacatggcacaggacaggacgagagcccttgccaaccaaatgcaataccccagaaggctgcccacagctcccggaagcagggtatgcatgccagctcaacaaggtggccccactactcyagacaacaaaagaacaacagcagatacactaccctggagcaaatacacatgataaatgaaaacttggtctcaggagggagcagagataaaagcttacaattcactgccccaagagcctctgaaatcactactgttttggctttggcttaaagacagttttcataatgacaggtgactgccatctgtaagaccctgccagaccgcatatgcctaataatgctctctcattttatccagtgttttacagctcacatagggatactgtgtgtccaagctcatttgattctcttaacaaccctattaaacaggtggtagaggtacccactgccctggctgcattttttttttcagagagatgctgtcaagtattattatatcttacatctatttatt

SEQ ID NO: 167739 - DNA, 591 bp, Homo sapiens
actcaaaggcaaggaatgactcagagggaagaatcatctggaggcatgttcatcagcatggctagagggtgatgttggctgtcagctaggacctgagcaggtctgtaggctggattgcctccatgtgccccctctgtgtgacctggcttcctccacagmagggcagcctcaggagagtggggcttctcacatgcagtccagagtttcagggatccatgtagaagttgcatcattttttgtgatctatccttgaaagttgcacagcatcattttattaccaaaatgccagaggtttggtctaagtcctgctgttcactccacagaaagccaatcactgagacaacaagtattgccagggaagaaggctttaatcaggtgctgctgttgaggatatgggagatcagtctcaaattcacttccctaactgactacaattaggggtttctaaagcagggaagaaatgtaaccatgtgcggggaaacaggaattagggagaggtagggaagaggagttcaccaacagaaagctggtgcttatttaagcagtcatgatgggtgaggactctggcatcccattgtctagatgccatga

SEQ ID NO: 167740 - DNA, 547 bp, Homo sapiens
gaatgactcagagggaagaatcatctggaggcatgttcatcagcatggctagagggtgatgttggctgtcagctaggacctgagcaggtctgtaggctggattgcctccatgtgccccctctgtgtgacctggcttcctccacagcagggcagcctcaggagagtggggcttytcacatgcagtccagagtttcagggatccatgtagaagttgcatcattttttgtgatctatccttgaaagttgcacagcatcattttattaccaaaatgccagaggtttggtctaagtcctgctgttcactccacagaaagccaatcactgagacaacaagtattgccagggaagaaggctttaatcaggtgctgctgttgaggatatgggagatcagtctcaaattcacttccctaactgactacaattaggggtttctaaagcagggaagaaatgtaaccatgtgcggggaaacaggaattagggagaggtagggaagaggagttcaccaacagaaagctggtgcttatttaagcagtcatgatgggtgagg

SEQ ID NO: 167741 - DNA, 535 bp, Homo sapiens
gggaagaatcatctggaggcatgttcatcagcatggctagagggtgatgttggctgtcagctaggacctgagcaggtctgtaggctggattgcctccatgtgccccctctgtgtgacctggcttcctccacagcagggcagcctcaggagagtggggcttctcacatgcagtccagagtttcagggatccmtgtagaagttgcatcattttttgtgatctatccttgaaagttgcacagcatcattttattaccaaaatgccagaggtttggtctaagtcctgctgttcactccacagaaagccaatcactgagacaacaagtattgccagggaagaaggctttaatcaggtgctgctgttgaggatatgggagatcagtctcaaattcacttccctaactgactacaattaggggtttctaaagcagggaagaaatgtaaccatgtgcggggaaacaggaattagggagaggtagggaagaggagttcaccaacagaaagctggtgcttatttaagcagtcatgatgggtgagg

SEQ ID NO: 167742 - DNA, 547 bp, Homo sapiens
gaatgactcagagggaagaatcatctggaggcatgttcatcagcatggctagagggtgatgttggctgtcagctaggacctgagcaggtctgtaggctggattgcctccatgtgccccctctgtgtgacctggcttcctccacagcagggcagcctcaggagagtggggcttctcacatgcagtccagagtttcagggatccatgtagaagttgcatcattttttgtgatctatccttgaaagttgcacagcatcattttattaccaaaatgccagaggtttggtctaagtcctgctgttcactccacagaaagccaatcactgagacaacaagtattgccagggaagaaggctttaatcaggtgctgctgttgaggatatgggagatcagtctcaaattcacttccctaactgactacmattaggggtttctaaagcagggaagaaatgtaaccatgtgcggggaaacaggaattagggagaggtagggaagaggagttcaccaacagaaagctggtgcttatttaagcagtcatgatgggtgagg

SEQ ID NO: 167743 - DNA, 548 bp, Homo sapiens
gaatgactcagagggaagaatcatctggaggcatgttcatcagcatggctagagggtgatgttggctgtcagctaggacctgagcaggtctgtaggctggattgcctccatgtgccccctctgtgtgacctggcttcctccacagcagggcagcctcaggagagtggggcttctcacatgcagtccagagtttcagggatccatgtagaagttgcatcattttttgtgatctatccttgaaagttgcacagcatcattttattaccaaaatgccagaggtttggtctaagtcctgctgttcactccacagaaagccaatcactgagacaacaagtattgccagggaagaaggctttaatcaggtgctgctgttgaggatatgggagatcagtctcaaattcacttccctaactgactacaattaggggtttctaaagcagggaagaaatgtaaccatgtgyggggaaacaggaattagggagaggtagggaagaggagttcaccaacagaaagctggtgcttatttaagcagtcatgatgggtgagga

SEQ ID NO: 167744 - DNA, 577 bp, Homo sapiens
tcacttccctaactgactacaattaggggtttctaaagcagggaagaaatgtaaccatgtgcggggaaacaggaattagggagaggtagggaagaggagttcaccaacagaaagctggtgcttatttaagcagtcatgatgggtgaggactctggcatcccattgtctagatgccatgatctggtaagtttcacttccttgatactatctgggaagmctgatggttggttttctgagaaaggaaaaagataaactgtgtaactttctcaagtttcaagactgagagagtcaatttctatgtttattcaaaaaaaccataaacatcagttttgtgggataactgggctggtttcaacttcagccacattctgtgggttgcagcaagtcacaagaccacctacctataagaagaggtaaaatagacatcacctcttgatggaggagtcaaggttttagaaaagcactagagattacaggtgttgttgcaactataattgaaaaatataagattccatatggtgaaagatagggtttgccaaaaattttacaaaaaaataagtgaatacaccagaataag

SEQ ID NO: 167745 - DNA, 577 bp, Homo sapiens
tcacttccctaactgactacaattaggggtttctaaagcagggaagaaatgtaaccatgtgcggggaaacaggaattagggagaggtagggaagaggagttcaccaacagaaagctggtgcttatttaagcagtcatgatgggtgaggactctggcatcccattgtctagatgccatgatctggtaagtttcacttccttgatactatctgggaagactgatggttggtttyctgagaaaggaaaaagataaactgtgtaactttctcaagtttcaagactgagagagtcaatttctatgtttattcaaaaaaaccataaacatcagttttgtgggataactgggctggtttcaacttcagccacattctgtgggttgcagcaagtcacaagaccacctacctataagaagaggtaaaatagacatcacctcttgatggaggagtcaaggttttagaaaagcactagagattacaggtgttgttgcaactataattgaaaaatataagattccatatggtgaaagatagggtttgccaaaaattttacaaaaaaataagtgaatacaccagaataag

SEQ ID NO: 167746 - DNA, 577 bp, Homo sapiens
tcacttccctaactgactacaattaggggtttctaaagcagggaagaaatgtaaccatgtgcggggaaacaggaattagggagaggtagggaagaggagttcaccaacagaaagctggtgcttatttaagcagtcatgatgggtgaggactctggcatcccattgtctagatgccatgatctggtaagtttcacttccttgatactatctgggaagactgatggttggttttctgagaaaggaaaaakataaactgtgtaactttctcaagtttcaagactgagagagtcaatttctatgtttattcaaaaaaaccataaacatcagttttgtgggataactgggctggtttcaacttcagccacattctgtgggttgcagcaagtcacaagaccacctacctataagaagaggtaaaatagacatcacctcttgatggaggagtcaaggttttagaaaagcactagagattacaggtgttgttgcaactataattgaaaaatataagattccatatggtgaaagatagggtttgccaaaaattttacaaaaaaataagtgaatacaccagaataag

SEQ ID NO: 167747 - DNA, 606 bp, Homo sapiens
ttggagggttgtggtaattccttactttctaataaaatgaaattttaacttttaactatattgtcatgccaaatgtaaacacatagatagctatagttccataggagaatctttattcaaatgccaagtagacttcattaataagatctaagaggcaacatatatgtttcacctctctgaggaaattcatcattagaaaagagaagaaaatgcctttcagtattgagagtattggattgttctaggtttggattggtttgagtttggggttttttttgtttktttttactttttctccagcttctttccattgttctactcatgtggatgtaaaatctctccattaatcaattatctaattgaccataggccatcaactgatcatttctctgtgtcactggataatcttagggaatttccttcaaagacccaaagttatcaaatgagatttttttaaattacactattgttctaagagctcttctagatttaatcttacctttatttaaaaaaagtttaggagttgaatattaacaatttagattttttctcaaacaaatatttttcttaaatctttggtgctattttgtttattttttgttgcat

SEQ ID NO: 167748 - DNA, 606 bp, Homo sapiens
ttggagggttgtggtaattccttactttctaataaaatgaaattttaacttttaactatattgtcatgccaaatgtaaacacatagatagctatagttccataggagaatctttattcaaatgccaagtagacttcattaataagatctaagaggcaacatatatgtttcacctctctgaggaaattcatcattagaaaagagaagaaaatgcctttcagtattgagagtattggattgttctaggtttggattggtttgagtttggggttttttttgtttttttttacttttyctccagcttctttccattgttctactcatgtggatgtaaaatctctccattaatcaattatctaattgaccataggccatcaactgatcatttctctgtgtcactggataatcttagggaatttccttcaaagacccaaagttatcaaatgagatttttttaaattacactattgttctaagagctcttctagatttaatcttacctttatttaaaaaaagtttaggagttgaatattaacaatttagattttttctcaaacaaatatttttcttaaatctttggtgctattttgtttattttttgttgcat

SEQ ID NO: 167749 - DNA, 606 bp, Homo sapiens
ttggagggttgtggtaattccttactttctaataaaatgaaattttaacttttaactatattgtcatgccaaatgtaaacacatagatagctatagttccataggagaatctttattcaaatgccaagtagacttcattaataagatctaagaggcaacatatatgtttcacctctctgaggaaattcatcattagaaaagagaagaaaatgcctttcagtattgagagtattggattgttctaggtttggattggtttgagtttggggttttttttgtttttttttactttttctccagcttctttccattgttctactcatgtggatgtaaaatctctccattaatmaattatctaattgaccataggccatcaactgatcatttctctgtgtcactggataatcttagggaatttccttcaaagacccaaagttatcaaatgagatttttttaaattacactattgttctaagagctcttctagatttaatcttacctttatttaaaaaaagtttaggagttgaatattaacaatttagattttttctcaaacaaatatttttcttaaatctttggtgctattttgtttattttttgttgcat

SEQ ID NO: 167750 - DNA, 393 bp, Homo sapiens
aggaagtaccaagaggcccactgcttgaaactgatgctagtcaagtgattagaaayagagtttctaggacagtacattcactaaaggctgattcacctgccccaggagggtgccacccacaatatcctcaatattttcacctccctctgagtcatagtctgatgaggttaggacagattaggctaggaatcaagaagactaaagttctagtcccaaacctgtagttacaaataataacatcatagactgtcattccttcccatcacttcctttcccccaagtttcagccttcacatttggaaaaaggaagcaattagtctagagtagcagtgaactccagcctctttgggtccgtggttacaggaagaaatctttgtagccatatgtgatttc

SEQ ID NO: 167751 - DNA, 603 bp, Homo sapiens
ccacactgccctagcagaggttctccatgagggctctgtttctgcagcacactgctgcctgacatccaggcatttccatacatcctctgaaatctaggcagaggtgcccacacctcaattcctgacttctgtgcacctgcagacccaacaccatgtggaagccaccaaggcttggagatttcacctttgaagcaatgtcctgagctgtacattggaccctttggccatggctgggatgcagggcatcaagtctagagactgtacaaagcagcaaggtcctgggtctggcccacaaaaccattttttccttctargcctcctggcttgtgatgggaggggttgctgtgaaaacctctggcttgccctggagacattttcctcattgtcttgctgattaacatttctctccttgttacttatgaaaatttctacagccagcttgaatttctcctcagaaaatgggtttttcttttctatttcatgatcaagcagcaagttctccaaacttttatgctctgctttccttttaaatgtaagttccaatggcaaaccgtatctttgtgaatacatataactgaagggttttaatagcacccaagtcac

SEQ ID NO: 167752 - DNA, 397 bp, Homo sapiens
cagccataaaaaggatgagttcatgtccttttcagggacatggatgaagctggaaaccatcattctcagcaaactatcacaaggacagaaaatcaaacatgacatgttctcactcataggtgggagttgaacaatgaggacacatggttacaggacagggaacgccacacaccggggcctgttggggggtgggggggctaggggagagatagcattaggagaaatacytaatgtaaatgatgagttgatgggtgcagcaaaccaacatggcacatgtatacctatataacaaacctgaatgttgtgcacatgtaccctagaacttaaagtgtcataaaataaagatataaaatattaaaaaagaaagaaaaatgatgtagctagaaatatgaataat

SEQ ID NO: 167753 - DNA, 397 bp, Homo sapiens
cagccataaaaaggatgagttcatgtccttttcagggacatggatgaagctggaaaccatcattctcagcaaactatcacaaggacagaaaatcaaacatgacatgttctcactcataggtgggagttgaacaatgaggacacatggttacaggacagggaacgccacacaccggggcctgttggggggtgggggggctaggggagagatagcattaggagaaatacctaatgtaaatgatgagttgatgggtgcagcaaaccaacatggcacatgtatacctatataacaaacytgaatgttgtgcacatgtaccctagaacttaaagtgtcataaaataaagatataaaatattaaaaaagaaagaaaaatgatgtagctagaaatatgaataat

SEQ ID NO: 167754 - DNA, 397 bp, Homo sapiens
cagccataaaaaggatgagttcatgtccttttcagggacatggatgaagctggaaaccatcattctcagcaaactatcacaaggacagaaaatcaaacatgacatgttctcactcataggtgggagttgaacaatgaggacacatggttacaggacagggaacgccacacaccggggcctgttggggggtgggggggctaggggagagatagcattaggagaaatacctaatgtaaatgatgagttgatgggtgcagcaaaccaacatggcacatgtatacctatataacaaacctgaatgttgtgcacatgtaccytagaacttaaagtgtcataaaataaagatataaaatattaaaaaagaaagaaaaatgatgtagctagaaatatgaataat

SEQ ID NO: 167755 - DNA, 519 bp, Homo sapiens
ccatggtatgttttaccattctcctgttgatggacacctgggctcttttcaaatgtgggctattatgaataaagctgctatgaacattcttgcaaaattctttctgcagaaatcctggaccrgagagtaagtagttttataagaaataatcataaattgtcccaaagtggctgtatccagtggtgtgttggtaaatgcttatcaacagactccccccaaaagaagaagaccaagaaggaggaggaggaggcaatgatggcaatgattatcaccaccaccaataccagatgctaaattgccaattccatcatgtaactcccaccatggccaatttcaagcttccaatgtggagtcattggagggctgagatgggaagagatgtaagtaattttatcttgagagccaggtggattctgcacaccactgcttgtactattttatattcccattggcagtatgtgagcattccagttgccctatattcttgtcaacacttggttctgtcagttcttttcattt

SEQ ID NO: 167756 - DNA, 613 bp, Homo sapiens
catatagaaatgctacggatttttgtacattgattttgtatcctgtaattttactaattttttttttttacctggtataatagtttttggtggaatctttagtttttttcaaaatataatatttttcatctgcaaagaaggatartttgacctcttccttttcaatttaaatgcactttatttctttttcttgtctgactgctttagccagggctttcacagctgtgtggaataacagtgatgcaagtgaggatccttgtcttgttccagatcttagaggaagggctttcagtttttccccattcagtatgatactagttagagggtctgtaatatatgacttttattgtgttaaagtacgttccttctatactcagttttttgagggttttttatcaggaagcggtgttgaattttatcaaatgctttttcagcatcaattgaaatgaatgtttttgtcctttattctgtcaatatgatatatcacattgatttgcatatgttgaaccatctttgcatccttgggataaatcccacttgatcatagtgaataatctttctaatgtgttactgaattctgttggctagtgttttgtcgaggattttttgcatc

SEQ ID NO: 167757 - DNA, 484 bp, Homo sapiens
gtggcagactccttcgtgccccccagtaagacaaccacttttcggacctcttatcaccatagattaattttgcctgcttttgaactttaaataaatagaatcataccataattacttttttgcttctgacttcttttgtccaacattatgcctgtgagagtctctatggtcttgcatgtagcaatggttgtttttctttccagggctgttcagtattcttttgccagarcataccacaattattaatccattcaactgttggtatactttttagttgcttctcatgaggctattgtaaataacactacgatgattattcttgtacttttcttttggtggccacaagcacactttcacttgggcatttgtacaggagtggaatttctgggtcatctggcatagatatttatgtttagctttagtagagcctttctaatttttttccaaaatggtgtatcacttcttttcatagcctgtaagagat

SEQ ID NO: 167758 - DNA, 474 bp, Homo sapiens
accgtggcagactccttcgtgccccccagtaagacaaccacttttcggacctcttatcaccatagattaattttgcctgcttttgaactttaaataaatagaatcataccataattacttttttgcttctgacttcttttgtccaacattatgcctgtgagagtctctatggtcttgcatgtagcaatggttgtttttctttccagggctgttcagtattcttttgccagagcataccacaattattaatccrttcaactgttggtatactttttagttgcttctcatgaggctattgtaaataacactacgatgattattcttgtacttttcttttggtggccacaagcacactttcacttgggcatttgtacaggagtggaatttctgggtcatctggcatagatatttatgtttagctttagtagagcctttctaatttttttccaaaatggtgtatcacttcttttcata

SEQ ID NO: 167759 - DNA, 474 bp, Homo sapiens
accgtggcagactccttcgtgccccccagtaagacaaccacttttcggacctcttatcaccatagattaattttgcctgcttttgaactttaaataaatagaatcataccataattacttttttgcttctgacttcttttgtccaacattatgcctgtgagagtctctatggtcttgcatgtagcaatggttgtttttctttccagggctgttcagtattcttttgccagagcataccacaattattaatccattcaactgttggtatactttttagttgcttctcatgaggctattgtaaataacactacgatgattattcttgtacttttyttttggtggccacaagcacactttcacttgggcatttgtacaggagtggaatttctgggtcatctggcatagatatttatgtttagctttagtagagcctttctaatttttttccaaaatggtgtatcacttcttttcata

SEQ ID NO: 167760 - DNA, 552 bp, Homo sapiens
tataacataatcacatgaggatacaaagcaatctctagatgaatgattgctgaatgaataagtgaatgcacaatttttatctgaygattgtgtaatttaggttaatttgaagactgtagggcacacaaataggagggtacaaaatacaaagtgcaaaacactggtgaaacagcacgcagactgttttgaacccctgctgctactgcagctgcaagggttggttaggaatttgttcgtgtgataaacaaaaggactatgtacatacagttttgggacttccaagtaataagggtatcgtttgcactttcagtctgaagatttgtcctccaataatgaggcaatgggaaaaacccctgttgctgccatacaatgttatacaaaatgtgcattggaaaagaagagcagcccctgtaaaattgggtgaatgtgtggaaatgctcacagctgtgttaataaagtatttaaaagtctgaccttgaagcatttgccaaaaatttacatgctaaagaactgtaaacccactagagcctcctttgcacgctgtcaacactc

SEQ ID NO: 167761 - DNA, 588 bp, Homo sapiens
gtggtagtttactgctttttattgcaattacatagcattccagttatattagtgattaaataggcctttatggtgtagcctataaaattatctctatggggaaagtaaactctagtctttaacacctaacttatgaaagaaatttttagaagtcctccagattgtaaataggagacccactccatagcatggaatgtgcaacacagatgatctttattaagcccactctccattctgccaagacccaagagctcatttaatgtcaaatgaagaaggcatttctttataattgaattggcttttaatcccctatagaaattgagggcttttcctttaagtcatgttgactgtcatgactttgagttgtatacaaaggccatattcacggatgtttgtggaatttaatatggtatagaagcccagccaaatttctaaaaaatataaataaacacacactttgtatgcttatttytttttttaattggagaggttaaagaactattgtagatctgcttttgggctagtgtgaataatttgccaacatttaccctgtttcaattctcctagcccaagttaccactgtccttg

SEQ ID NO: 167762 - DNA, 534 bp, Homo sapiens
gcgaatgtgttcaacactgtagcaggtagccacagtattatgaagagaaagaaagcaaggtaagggctagaaaatggtggggggttctctgatacacagccgaaggaggtcwctccaggggtctgatatgtgagcatgggcctgggtaaagtcagtgagaaagccatgtaaacatctggtgaagtgtgttgcagagtgtcatttataatgtgtatgcaataatttgggttttattttgaaatcagagttactcatatcgaaggtgtctattgagcatgtactgggtgcttggtgggtgggattggggtagataacagggaaatatgaaacatgaccttggccaccttgtttacaatcttgatgagaaaaaatatgcatgtaaaaatatagaatagtaaaacattatggaattatttgacactaaattatgtgacacagattcttggttttgagggacccctttgggtctttccccttttaaaagtaaaagtctaattttgttagattcaaaccttcttaaggacaaggcagtag

SEQ ID NO: 167763 - DNA, 472 bp, Homo sapiens
cagagatggcccctggaggttgagtttttccatctgtgagtctgtgaataatcactgaaccatracggcaggttcacatcaagaacgaaacagccttggaaacaatggcacaaacctctcctctatgacccagagccatgacacttttccaagctcttgtagggtgaccggagtcatcagcataagaggtctaccagaaaggtcccctcattcaatctgacctttccacacaccagaccaagaaactctctcatcctcttctccaaacttctatcatgtcatcctccctcccagtccctctgaataagagatactgcagaggaaatgagtaacaaaatgaacagagcacttcatcaagatcaagcacatggctcagtcctacaaggtgtcctataccttgtgacaggacacaaacaaaaagcaaatgaaaatgacctttggcttattacacttgcaatgcagcacaaagcac

SEQ ID NO: 167764 - DNA, 472 bp, Homo sapiens
cagagatggcccctggaggttgagtttttccatctgtgagtctgtgaataatcactgaaccataacggcaggttcacatcaagaacgaaacagccttggaaacaatggcacaaacctctcctctatgacccagagccatgacacttttccaagctcttgtagggtgaccggagtcatcagcataagaggtctaccagaaaggtcccctcattcaatctgacctttccacacaccagaccaagaaacyctctcatcctcttctccaaacttctatcatgtcatcctccctcccagtccctctgaataagagatactgcagaggaaatgagtaacaaaatgaacagagcacttcatcaagatcaagcacatggctcagtcctacaaggtgtcctataccttgtgacaggacacaaacaaaaagcaaatgaaaatgacctttggcttattacacttgcaatgcagcacaaagcac

SEQ ID NO: 167765 - DNA, 627 bp, Homo sapiens
tatattatgcttcttacatgttggtgcattcagttttctaaaattgtgagcaatattgatcttcggttctcttcatgtgtaatttctctgtctggttttggtatagtaatgctgacttcatagaatgatgtgaaatatttgcttaccttctyttttctagaataatttgtgtagaattggtatagtttcttcctaaaacatttgctgaaatttaccattgaagccatctgcccctgaaattcaatttgtgggaaggattctaactacaaaatctgtttattaaatacagtgatatttaggttgtctatgtcttctttaattacttttgatattgtctttcaaggaattttcccattgtcaactaagttgtcaaatttattggcatacagttgtatttaatatgcatttatgccattttacaattcatcaaatttacagtgatgtctactctctcattcctaactttcataatttatacccttactcttttcttcttgataactttggctagagatttatcaattttatatatcttctcaaaaaattggttttacttgcaatgactttttttctattcattttctgtcttatactttatttattttcattttgatttttgttattttc

SEQ ID NO: 167766 - DNA, 382 bp, Homo sapiens
agttttccttctggcccagcatctgtctgtaaatgtcacgcaggagctargacctggaatgggtgcctcacacttctgcccattcctactgtagctgagctgctatccaagttgaaagacaaaatcctctttactctcccttatccttttctcaagcagagggaaggagtctcttttacagctgcaagctgtgttgcatggggttaaggcgggggtggcacaaacactcccttagctgccctggctggtgtctcactaggtcgcatgccccccgggttcactggccccaagcccagcacagccccgggtctatctagtagttgtggcccttatggcatagactgcttttctagtttatttaggttcacagagtgctttatcc

SEQ ID NO: 167767 - DNA, 595 bp, Homo sapiens
attttctgcttcgatgacctgtttaatattgttagtggagtgatgaagttttccattattattttgtagaagtctgtgtctctttgtaggtctctaaggacttcccttatgaatctgggtgctcctgtgttgggtgcatatatatttgggatagttaggtcttcctgttgaattgaaccctcctttaccattatataatatcattctttgtcttttttayctttctggttaaaattctgctttgtctgaaattagaattgcaacccctgcttttttctgttttccatttgcttggtagattttcctccatccctttattttaagcctgtgggtatcatgatgtgtaagatgggtctcttgaagacagcataccattaggtcttatttttttcttcagtctgccactctgtactttttacgtggggcatttagcctatttatattcaaggttattattaacatgtgtggatttgatcctactattgtgctgttagttggttactatgttggcttgtttgtgtggttgctttagagtgtcactggtctgtatgtttaaacatgttttatgttagctggcagcagtctttcctttcca

SEQ ID NO: 167768 - DNA, 405 bp, Homo sapiens
tttcaacgggataattcccattatatttacaaatgtatattattaatttcatctttttttttttttktgagaaagagtttcgctcttcttacccaggctggagtgcaatggcatgatttcggctcactgcaacctccacctcccgggttcaagcgattctcctgcctcagcctcctgagtagctaggattacaggtatgtgccaccacacccgtctaattttgtacttttagtagagacggggtttctctatgttggtcaggctggtctcaaactcccaaactcaggtgatccgcccaccttggcctcccaaagtgctgggattacagatgtgagccactgcgccaggcctaatctcatcttaaaattatatcttgcctcacagccactacctaatttctttgtt

SEQ ID NO: 167769 - DNA, 414 bp, Homo sapiens
tagaaaaatcttacctaagataggtagtcacaagcaaacagctaatacagttactctaacagttaaggcagccccaggctacacccaaaaatgcacaatgtctccataacaggctctgacagccccacaggtgacagtctgagtgtcagacatctgcaggttgattctacttttggtcatatgtttctggyataatgaaggaccagaaggacagtaacagtctggcaactgtgttataagaggactggttggagaatcagcgatggttacattggaaggcagaggccttgaggaagacaagaacactggcactagatgtgagaaggtttgccatgtggaagaacaggcactttccatgtgactccagaggacagtgctggtatcagagagtggattgtacacagccatagaatt

SEQ ID NO: 167770 - DNA, 553 bp, Homo sapiens
caacctttgtgtttcaacatccaagggaatggtagaaagcaagtgttaatgagaagagctataaagtctctttggacaacaaagaattagacccaatttttatcaatatttccactacacacacacattcttctcaaaaatccttgctgttcaattgtgacctaggggaatgaatatttcacaagaggtttgatcccatcctgcaggctggttagttttactctcagatgtctccaaagaatcatgtaacaacaggctcctcaacccattattattttttttggtctttgatctttctgtttttgtaaggatagcctttgtccttkgctcatcattttcccacagggacccaaactccaaaaggcagagcaggcacaggaaacagaagcagaagtggtcccatttggtccaaaaactagaaaaacactcagtctttaaaattagatcctttccttgacctcctatctttctccttaatctgtttcccttataagaggacaatcccagtagaaacatgtcctgccttctttttgcagccttatccagtttcccc

SEQ ID NO: 167771 - DNA, 589 bp, Homo sapiens
aagcttctcacctgcttggccagagttcttttattgaggctgaaaactagcagatacaataatccatggtcccaggaaaaggcagatatggcaagtatcaggactttatagatcattagtcacttagcgagatattccctgcaaacctctaagtcagtctcccttacacatttctaagcagcactcyagagcttcggatcagaatgacatccctggcgacagacatgtcttataggctctagattatgtcaagatatctgtagcccacccaacagttgctgcaggaattactagctacctccctccacaagaacaaattacaaacactctagagacttaatttttttttctgtcatgcttactgaaaggaaagcaacatcttgctcaatatcaatagttccgtgaaaaatatctctctttgaagtcattttgaaagtacagaagataagtttgtgtgtatggcagacctaattatttccttttgcactgtgattgttgaagcatctcattttcggaatagatatgtctctaaacagttgtctctaaagtgagtttgccaatcctatatatgaaatattatttttcccat

SEQ ID NO: 167772 - DNA, 549 bp, Homo sapiens
aaatctgcattttaaacaactattgcatttgattctgctacagcaggactgcactttgatgaaatttggtttaagtatttatttgctcaatggcaaaggttttcaaagaaaactgtctattcaaccatgcctacatcaattaataaccattacagatttttgttttaaaaatgccaaaaatagtattcaagttcttgcttgagaattctaaaatttttattggtcacagagtgcagattaaagattgaagggttgaggctcagactatgaccagatcaactgggaccagatcatcccaaccatgtttgcgatggtagggatgataacgttctaagtctgggacatgcaggcagtgggaattgagaggtctacttccttaggctatgatctgctcccactgaggtctagctctgtaactgactagcacacgwttacctgcataattccactcacattgtgctgctggatagagaattgtgatcatcctgttagtggggaactccagcagggctagagcctaaatatatctatcttgtgctatccaatata

SEQ ID NO: 167773 - DNA, 522 bp, Homo sapiens
ggttccaaaccaccttactaactcctctaactcaaattctctgtgcttaaatgttctcacctgataaattgctaattctagtccctccctcaagagttctggggtgaattaaataagataaaatgaagtgtttggcacagtaccataaatacagttagctttgaataacaataattgttattatacttggctatatggcaatacataaaaaggaaaaggaataaatgattgtccctaccttcaggaatgttatcctctcactgaggttttgacatatgcacacgaaaaattaaatayactgaaaatcagaatatgattcaatgagtcttgtaaaagattagacttccagggacaggaagttgctgtggaatgcagtggcctaatatgactttaagggagagaaaggatttgagctggagcataaatgaaatgtagtattcagatattgagaaaggtgtggttcattccaaacatgagcagtgaagggaaacagttttggggataggactttgggggacactt

SEQ ID NO: 167774 - DNA, 483 bp, Homo sapiens
cagagcaaattcattgtgcactttactttatttgggtaactgaaggagatttgaccttccatttagaataactctgttccactgcattttatgattactgagaatatttgtttaaagaataacatwttttcccattcaaaagtaattcatacctgttagagacaattttaaaaagataaaacaatgtattatgtacaataataaatatatttggcacagtctgtcttccctaaaaggtttttagttattacaaatcacatttgttgttatagagtctaacaatacagaaaaagagttgatatcacttaaatctcactaccttgatttagacactgttagcatttggctatgtttttgtgctttgctttatgtacacacacacagacagatactaatttatttgaatgtaatcatgtcatatatgttcttttttttttaccatgaacagtcctgtaattttttaactgttgtttacttgtgatt

SEQ ID NO: 167775 - DNA, 544 bp, Homo sapiens
ttctctttttactacatatacaagtattgtcaaatggtatagtttagtttcaaaaactgttatactaatggatttttactacatgaactctgacttttttgactcaacattatatttgtgagattcatccatgttgtttagctgcaaagcagkcattttaattactttctgttatttcatcatataactaccatttatttatccattcttctactgatgaacatttggtttgtttccattattttggtaatataaacaatgcaactatgtgtattcttatataatcttgtgatttttctttagggtatatatccaggaatgaaattgctggtttacagtttatatatcttcatcattactaaaaatgtcaaattgttttctaaagttgtaccaatttatactctcacaaagagcatataaagagttttcattggtctacaatcttgctaagattggcattgtcagtaacagtatctcatttttattttaaggtgcacttctctgattactcatgaggttgagtatattttcatatgtttattgc

SEQ ID NO: 167776 - DNA, 517 bp, Homo sapiens
ctggcactgctggctaatagaaaaagtccgaatgaagtccaagatgtagtgattccaggtctccaaaggtcctgcttgcattgcccaaagggagcttgtactcaggtggcaatttgtttttattgctacagttactttttatcagtgctgctgttattctatttccttcaggatttttctctatcattggtctctctcacgtttatattcctcccctctatcagtccccttctcttgttatgggcatactcaagtctcctcattctaaaaaagcaatcaaccactagcaacaagaaatrtttcttgactctgattctccttcccacggttgctccactcttacaccctcttctgcctcttgacagagtggctgcctcacttaatatctacaaatcattatttttcatttacttttgaatcaattgccgcctggttttctcttcctccactcactgaaactaattgaactatttccagcaagtttcatgatgctgatacccaatagccttcttgctgg

SEQ ID NO: 167777 - DNA, 616 bp, Homo sapiens
ttcagagagtaaaaatgtttaattttgatgaagtccattggactgtttttttggttttgtacatgttgtatgaggaatggattggagtttttgttttgctttgtttttggatgctaatgttccatttttccaaaaccatttgtggaaaaaaactctattttatccactgggttgcctttacacacttgtcaatcaattgtccacctaagtaacccacaaaaaactattagagttcataaacaacatctaattrtaattgtggatttatctctttcttcttgcagttccatctatttctgattcagatattttgaagatctgttattggaggtcttaatgtttaagaatgttatatcctcctgatgaatttaccctctttttcattatgaaatgcctctctttatccctgttacattgtttactctgatgttaatgtagctactccagccttctttttattcacattagtacactatatctttttgtatcctttactttgaacttatttgtatcttctaacgaagcatataattaggtcagttttatttaatctgagaagctctgcctttagttggtatgttcagaccttttacattcaatgtgattattacaatct

SEQ ID NO: 167778 - DNA, 488 bp, Homo sapiens
ttcaacattaaagaaaagagttgggaattatttgttaagggccagttttctctcaacaacattcctgatgtataaatgcaattgtttacctaattcaaacaatacttgtccgttacatctgcatgataaaatccatggcatgagtgagcttcrtgaaaggacagcagcagcagcccagagatgcagtgggatcacaggtttcattcattaaaattacaaaccttcaaacgtctgtgagtgggtccaaagggaatgtttctacttattctgaccagaaagttttaattgggtctgttttctcatcttctcattttgaccagagatctttaattggatctgtttttaacttcaaatgtagagtagagtcacatcttacctaagaggataaaatcttaagttagcaggcaagccaataattagattataatcaaaattgcctggagaaattccttaagtcatccacaaagtacaatataaatggctttgta

SEQ ID NO: 167779 - DNA, 617 bp, Homo sapiens
ttactacctgacttgccaagttattcaattctgtctcaggctcatgaatccaacctaaagttgatacacaggaagcaaccagaggacagtttgagagctcagaatcagagaacctgcgagtagctgagagtctgtttccattcccaaagagttgtgggtagaagggtacagcttgcctcatatggcccagaaagcaggaccaggatggaggatggagtaagatgggaagatatgaaaggcagagaagtggacccaatccattttttgatgattagacatatacaaaaaaatgggaatggattgatcagggtgtattgttggccagatttagcaaaaaacaaaacaaaacaaaaaaacaggacactcagttaaatttgaatttcagataaacaataaatcatcccatactatatttgggacatatttatactamaacattattcattgtttatctgaaattcaaatttaactgggcatcttgtattttatctggacaccctcccaggacaatgagtttttgtcactgaaggtgtccaagccgagtctgggacacaggtggaaggctgttgcatggggatgagttgagatctcaaatagcagcttgggttgaagagccc

SEQ ID NO: 167780 - DNA, 566 bp, Homo sapiens
aacttgaacgtatacatgtacacatgaatcacctgtgtattttgttaaaatgcagattctgattcagtaggtctgatgctaygtccatgtaaccacactttgagtagcaaagtagggtatggattttggagtcagtgtgcaaatcgactaactgggcaagtcactaaaccaccatcagtttctgcatttaaaaaataaagataataatagtccctgccccatagggttgtagtgaggactaaagaggcaatggataaacagttccaggcccatgataagaaaagtctggagaatttattccctggatgcaattctctgccattctccagctgccccctagccctgatcactggctgcacgtggctgcagggactatatgggcctggcagtggcacacatggggttaattaatgctcctgctcttgtccagagacaaatgttttgtattgaagagttgctgctgggaaggaaaaggaggggggaaagaaagccccttttctattattctgaggtgcattttaatttgcacaagcaacgttgtgtctgtgatggatgacacagaggga

SEQ ID NO: 167781 - DNA, 512 bp, Homo sapiens
actttgagtagcaaagtagggtatggattttggagtcagtgtgcaaatcgactaactgggcaagtcactaaaccaccatcagtttctgcatttaaaaaataaagataataatagtccctgccccatagggttgtagtgaggactaaagaggcaatggataaacagttccagrcccatgataagaaaagtctggagaatttattccctggatgcaattctctgccattctccagctgccccctagccctgatcactggctgcacgtggctgcagggactatatgggcctggcagtggcacacatggggttaattaatgctcctgctcttgtccagagacaaatgttttgtattgaagagttgctgctgggaaggaaaaggaggggggaaagaaagccccttttctattattctgaggtgcattttaatttgcacaagcaacgttgtgtctgtgatggatgacacagagggaaaaattacagcccaggaagcccagcaaaggagaaaaaaaata

SEQ ID NO: 167782 - DNA, 604 bp, Homo sapiens
caggggttttagttgctgctctacagggtccctgctccaagctccaagtttttgaaacttttaacttcttcccttattctcccagctggagggatgatagccgctttctgcagctgcctcttccctagtacctcagtattgccttcttgacttttcaattacctagttaacatttctttatatatagtttatggttctttatattaaattcttgcttttaatatacttatgttgtctcagtctcttggctggactttgtttcccccagttttgaactgtttctttgtctgcccccgtattccactcatccttaaagatctagctcaaaatgaaaawttttctgcccactgcaacacacataactctcttctgtgaattcctgtagactttagggtctctactactcaagcttcaacatgatcatatattgcaggggttggcaaaccatgacccctgggctaaattcaaccttctgtttttgtaactaaagttttattggaacccagccaagcccattcacttatggctgcttgcatgctgcaacagcagagttgagacatcaccagagagactacatggcccatgatgtcttttcaccatgtgg

SEQ ID NO: 167783 - DNA, 314 bp, Homo sapiens
  misc_feature (1)...(314): n = A,T,C or G
nnnnnnnnnnnnnnnnagctaaagcacccacttctaagaaccaaagcaaaactggcaacaataagctggtgcccacgatctgctatacatgcaggtgygtggtatggccaggtcagcaaataagctaattgttttctcttctttaaagggacaagttgtttttcttttctttaaaaaaagttaagagctatttcaagcatacttaaaactgtagaggatattgtagcaaacatccacctatctaccacacagctgtgtcacagtttaatatttcccaaaatacgctgcagagctggaaaaaagaaagcaagaaa

SEQ ID NO: 167784 - DNA, 553 bp, Homo sapiens
ctcctggattcattgatcttttgaatggcttttttgtgtctcagtctccttcagttcagccctaattttgattattttgtgtcttcggctagttttgggatttctttgcacttgattctctagttcttttagtttttatattaagttgttaacttgagatctttctaactttttgatgtgaacatttcagtgctataagtttcctgcttaacactgccttagctgcatcccaaagattctgatatgttgtatctttgttgtcattactttctaagtacttcttcatttctgccttaatttcattatttacccaaaagtcattcagcagcaggttatccaatttccatgtaattgtatggttttgagtgamtttcttagtcttgatttctaatttgattgtgctgtggtctgagagattgtttgttatgatttcagttcttttgcatttgatgaggagaattttacttctgattgtgtgatctattttagaatatatgccatgtggtgatgagaagaatgtgtattctgtttttttgggtggagagttctatag

SEQ ID NO: 167785 - DNA, 414 bp, Homo sapiens
aaatttacattacaatgggaaaaggtattttagacacaccaacaaataaaatggcgtctgatgttaaggaaaagatgtctttggttgatgatgggaatagtgaaaagcagaccagctcctgaagtactgagggaagggtgttttgggccgaggagcagctgctgcaaagatcctaagagagggaaagccttggcaaattcaaaggacaaataaagactgctgaggctggaacaagatggggaatagagtagaacaaaataaatttggggagagaggaacagaccaggttatatagggtcttttaggctatggttaaggagtttgtgcttcattctcactgttgtcagaagttaatggcacattttaagcaggagagctgagtgttatyatcattgtttaaaaaacaaacggtgg

SEQ ID NO: 167786 - DNA, 429 bp, Homo sapiens
gcttaacaactgtgccacgtgcattggcctgagctccactttcactctgagtcttgaatgaggtcagcaaaaataactgagttagayttttcattcacaacttgcctcctgatggcacatggtaggagcttttctctcccagcttctatcacccactgcctcccactccaccaccaccaattttgatagagtaaaagtctccacactgtagctggtagaactccacctgataaaatggagacccattttctaaatgcttagaaagtgctttcaatgtcattatattagtcagcttgggctgccataagaaaatactacagaattggcgacttcaacaacagagatttattttttcacagctctgaaggccagaagtccaagatcaaggggccagcagtggtggtttccagtgagggctcttttcctggt

SEQ ID NO: 167787 - DNA, 534 bp, Homo sapiens
tgcttaacaactgtgccacgtgcattggcctgagctccactttcactctgagtcttgaatgaggtcagcaaaaataactgagttagacttttcattcacaacttgcctcctgatggcacatggtaggagcttttctctcccagcttctatcacccactgcctcccactccaccaccaccaattttgatagagtaaaagtctccacactgtagctggtagaactccacctgataaaatggagacccattttctaaatgcttagaaagtgctttcaatgtcattatattagtcagcttgggctgccataagaaaatactacagaattggcgacttcaacaacagagatttattttttcacagctctgaaggccagaagtccaagatcaaggggccagcagyggtggtttccagtgagggctcttttcctggtttgcagtcaccttcttgctgggtcctcctctgcccatgcacacacacagagggggatcttggttgtctcctttttataaagacactagtcctattggattaagg

SEQ ID NO: 167788 - DNA, 563 bp, Homo sapiens
cattccaacttcagaatttgggaccatccagggcttaccaaagtgttctatttcaggagaatggaccctgccatcctcacccccaacctaagttgatataagagccaaactggggaaagagaaaggtagtctttttagagagaagagtayttatcaaaagctcttatctcccttcccctcccataagagaggtgagtgggatgcccacttgctgtgagctgaccgaagccaatctgatcccatccctcttagattcttttggaagctgctgaagaagttagagttggtgagtgttcgctgttcttctttaaccttgctccaattttaatgaaagcaggcctcagaccaaattctcccacacatacagacatttactaaatgaatattcattagcagagcaggctcaaaacagctcataagcccactctgcaagcctgatgccatcccagctcactgtcccgtagagtagtgatgctcatccctggctgcacgctggaatcgtcaggggagctttaaaaagacaccgataccggtcccactttgagagattcccacgtcacctg

SEQ ID NO: 167789 - DNA, 563 bp, Homo sapiens
cattccaacttcagaatttgggaccatccagggcttaccaaagtgttctatttcaggagaatggaccctgccatcctcacccccaacctaagttgatataagagccaaactggggaaagagaaaggtagtctttttagagagaagagtacttatcaaaagctcttatctcccttcccctcccataagagaggtgagtgggatgcccacttgctgtgagctgaccgaagccaatctgatcccatccctcttagattcttttggaagctgctgaagaagttagagttggtgagtgttcgctgttcttctttaaccttgctccaattttaatgaaagcaggcctcagaccaaattctcccacacatacagacatttactaaatgaatattcattagcagagcaggctcaaaacagctcataagcccactctgcaagcctgatgccatcccagctcactgtcccgtagagtagtgatgctcatccctggctgcacgctggaatcrtcaggggagctttaaaaagacaccgataccggtcccactttgagagattcccacgtcacctg

SEQ ID NO: 167790 - DNA, 625 bp, Homo sapiens
accatgatgtgaattactggttatagcatcacaaaataacttaggcctgaaagaaaccttaaagataatgtaatttaattttttaaaccaaaatgcctagtgcatagaaggtactcagaaaaggcccgctgagtgaataacttgccttttttttaaattaggaaacaacagtgactaaaataattattgagtccacaggcataataattagaaaaaagaagaaaaaggcaaaaaaatagggaggcaaaaaatatgagaaaataaatggtgaccctcctttygacataaaaatatcagttaagaaatatagaatgaatttgtattcattatttttggaaaattaccattttgcaagtcccattgtaataatttatttaagcaagaattaccaacggatcctacaaaaattgggtggaaagtttttagagaacaagatatttttttcacacagattacttgttaactatagttgataaaagttacctctgcaatggagagatctggcagacatccccttaatcaagtgttcaaactaagcattaccaattagaggacaaatagacattatgtacttccagtgacaatgtaagggaagtacacagcatcacccatgcaacattcttgc

SEQ ID NO: 167791 - DNA, 625 bp, Homo sapiens
accatgatgtgaattactggttatagcatcacaaaataacttaggcctgaaagaaaccttaaagataatgtaatttaattttttaaaccaaaatgcctagtgcatagaaggtactcagaaaaggcccgctgagtgaataacttgccttttttttaaattaggaaacaacagtgactaaaataattattgagtccacaggcataataattagaaaaaagaagaaaaaggcaaaaaaatagggaggcaaaaaatatgagaaaataaatggtgaccctccttttracataaaaatatcagttaagaaatatagaatgaatttgtattcattatttttggaaaattaccattttgcaagtcccattgtaataatttatttaagcaagaattaccaacggatcctacaaaaattgggtggaaagtttttagagaacaagatatttttttcacacagattacttgttaactatagttgataaaagttacctctgcaatggagagatctggcagacatccccttaatcaagtgttcaaactaagcattaccaattagaggacaaatagacattatgtacttccagtgacaatgtaagggaagtacacagcatcacccatgcaacattcttgc

SEQ ID NO: 167792 - DNA, 625 bp, Homo sapiens
accatgatgtgaattactggttatagcatcacaaaataacttaggcctgaaagaaaccttaaagataatgtaatttaattttttaaaccaaaatgcctagtgcatagaaggtactcagaaaaggcccgctgagtgaataacttgccttttttttaaattaggaaacaacagtgactaaaataattattgagtccacaggcataataattagaaaaaagaagaaaaaggcaaaaaaatagggaggcaaaaaatatgagaaaataaatggtgaccctccttttgacataaaaatatcagttaagaaatatagaatgaatttgtattcattatttttggaaaattaccattttgcaagtcccattgtaataatttatttaagcaagaattaccaacggatccyacaaaaattgggtggaaagtttttagagaacaagatatttttttcacacagattacttgttaactatagttgataaaagttacctctgcaatggagagatctggcagacatccccttaatcaagtgttcaaactaagcattaccaattagaggacaaatagacattatgtacttccagtgacaatgtaagggaagtacacagcatcacccatgcaacattcttgc

SEQ ID NO: 167793 - DNA, 625 bp, Homo sapiens
accatgatgtgaattactggttatagcatcacaaaataacttaggcctgaaagaaaccttaaagataatgtaatttaattttttaaaccaaaatgcctagtgcatagaaggtactcagaaaaggcccgctgagtgaataacttgccttttttttaaattaggaaacaacagtgactaaaataattattgagtccacaggcataataattagaaaaaagaagaaaaaggcaaaaaaatagggaggcaaaaaatatgagaaaataaatggtgaccctccttttgacataaaaatatcagttaagaaatatagaatgaatttgtattcattatttttggaaaattaccattttgcaagtcccattgtaataatttatttaagcaagaattaccaacggatcctacaaaaattgggtggaaagtttttagagaacaagatatttttttcacacagattacttgttaactatagttgataaaagttacctctgcaatggagagatctggcagacatccccttaatcaagtgwtcaaactaagcattaccaattagaggacaaatagacattatgtacttccagtgacaatgtaagggaagtacacagcatcacccatgcaacattcttgc

SEQ ID NO: 167794 - DNA, 418 bp, Homo sapiens
gacatgatgtgctagcaaatggtttttccttagacaaagaaagctgcacttataatggcaggttttgggaactactaattttcattaaacagctgaaacctgaattttctttatgtaaaggactaggagaacaacaaagatctgtacagggatgctctggtttttcagtattccctaaatacgaacactcaggttcctacacgtttctcttggaagagaacattggcaaaatgaatgatatcctagaaaaaggctaaaaacyctctgcctcataaagtagcaaactggcaacaaagacctgctcaagaaaaattattactacaaaatgccacagaggtacaaactaaaatattgtttttctaaaggaatgaggaggactggacataccagacatcttgcatactttatctcatttagt

SEQ ID NO: 167795 - DNA, 418 bp, Homo sapiens
gacatgatgtgctagcaaatggtttttccttagacaaagaaagctgcacttataatggcaggttttgggaactactaattttcattaaacagctgaaacctgaattttctttatgtaaaggactaggagaacaacaaagatctgtacagggatgctctggtttttcagtattccctaaatacgaacactcaggttcctacacgtttctcttggaagagaacattggcaaaatgaatgatatcctagaaaaaggctaaaaactctctgcctcataaagtagcaaactggcaacaaagacctgctcaagaaaaattattactacaaaatgccacagaggtacaaactaaaataytgtttttctaaaggaatgaggaggactggacataccagacatcttgcatactttatctcatttagt

SEQ ID NO: 167796 - DNA, 434 bp, Homo sapiens
tagagagctttgtaaagttccaatatactcctggggacttagaaagtcaagagtatgcaaaagactgtgcacatgcctgtcgaaagacttaaggttcaaatcactcacttctatctgacctgcacaagcaggaagtgaaagccaatgcagagtgtaaactgcctgagctgagtactgaagatgtacaccaacacacacacacacatacacacatacacacacacacagcccactggcaaaaggaagactcacttgtcttatatatttaagactmtatctgtccaattattagctgaccactaaggcaaatgatcagagacctcaatggacatatatgacaaagaatacacacataatagaattcatccaagaaagtcactaaacaaacagacaacaaaagcataacaaacccttgggtgcagagtagatatggt

SEQ ID NO: 167797 - DNA, 521 bp, Homo sapiens
caggggagatggactctgcctcttagtggaaggttcagcaacgtcacattgcagaaagtgccccagtgcaagggaaaaggcagaggggactgttgcttttctttttcagtttactttttcattttggtaaaatrtgtgtaaaaaaaatttaccattgtaccattttttgtttgttcatttgttttgagatagggtcttgctttgtcgcccagactgaagtgcagtggcatgttcacagctcactgcagcctcgacctcccaggctcaggtgatcttccaacctcagcctcccaagtagctgggacaataggcatgcaccaccatgcccagctaattttaaaaattatttgtagagatgtagtctccctatgttgcccaggctggtctcaaactcctggcctcaagggatcctctcccctaagtcgctgatatggtttggctgtgtccccaacccaaaatctcatcttgagttgaattaatccccatgcatcaagggcagaaccaggtggagataactgaat

SEQ ID NO: 167798 - DNA, 569 bp, Homo sapiens
ctctgcctcttagtggaaggttcagcaacgtcacattgcagaaagtgccccagtgcaagggaaaaggcagaggggactgttgcttttctttttcagtttactttttcattttggtaaaatgtgtgtaaaaaaaatttaccattgtaccattttttgtttgttcatttgttttgagatagggtcttgctttgtcgcccagactgaagtgcagtggcatgttcacagctcactgcagcctcgacctcccaggctcaggtgatcttccaacctcagcctcccaagtagctgggacaataggcatgcaccaccatgcccagctaattttaaaaattatttgtagagatgtagtctccctatgttgcccaggctggtctcaaactcctggcctcaagggatcctctcccctaagtcgctgatatggtttggctgtgtccccaacccaaaatctcatcttgagttgaattaatccccatgcatcaagggcagaaccaggtggagataamtgaatcatggaggtggtttccctcatgctgttcttgtgatagtgagtgagttcttatgagatctga

SEQ ID NO: 167799 - DNA, 436 bp, Homo sapiens
ttgaaacataattgaattaaatgccaaatatttttatttaatcatttctaatggaacttgtaytaaaatagtttgtcaacagtaaccagcacaggatatggcataaagtaagtggtcagtagaggttttcctgaactaaagtgattcgtatactctcgagccttttcaaatgacacatatcttttagtttgatcttgatttagaattacaagattgttaacaactctctattacctgtaatctccttaaaaaaaaaaaaaaagagaaccaaaggcccaaagcctttgataaacaggggtgtctagaaaaattgagtaagttgtcaaaatttaatttttacaagttatatttatggcaagtaaaaatggttttcatatataataatttattacataaaactttctattcaaatagttttcttaataaaaccaaagcc

SEQ ID NO: 167800 - DNA, 436 bp, Homo sapiens
ttgaaacataattgaattaaatgccaaatatttttatttaatcatttctaatggaacttgtactaaaatagtttgtcaacagtaaccagcacaggatatggcataaagtaagtggtcagtagaggttttcctgaactaaagtgattcgtatactctcgagccttttcaaatgacacatatcttttagtttgatcttgatttagaattacaagattrttaacaactctctattacctgtaatctccttaaaaaaaaaaaaaaagagaaccaaaggcccaaagcctttgataaacaggggtgtctagaaaaattgagtaagttgtcaaaatttaatttttacaagttatatttatggcaagtaaaaatggttttcatatataataatttattacataaaactttctattcaaatagttttcttaataaaaccaaagcc

SEQ ID NO: 167801 - DNA, 436 bp, Homo sapiens
ttgaaacataattgaattaaatgccaaatatttttatttaatcatttctaatggaacttgtactaaaatagtttgtcaacagtaaccagcacaggatatggcataaagtaagtggtcagtagaggttttcctgaactaaagtgattcgtatactctcgagccttttcaaatgacacatatcttttagtttgatcttgatttagaattacaagattgttaacaactctctattacctgtaatctccttaaaaaaaaaaaaaaagagaaccaaaggcccaaagcctttgataaacaggggtgtctagaaaaattgartaagttgtcaaaatttaatttttacaagttatatttatggcaagtaaaaatggttttcatatataataatttattacataaaactttctattcaaatagttttcttaataaaaccaaagcc

SEQ ID NO: 167802 - DNA, 520 bp, Homo sapiens
tctgtacagcgagggcatctgaagccctctgatttgagtggccatcagcagacaccagtcagcccacccaacccaagcccatggaatccctggcagccagggcagttttcaggctgcctgtttattcttctagctccctgagatgccacagcaagcaggagccctgctggtgcatcctcagggtcaccaggggacaggcccagacggatgtcagagcagactgccttggcgaattatttagcaccctcctctgagggggccaggcaygcacctcacagccggctccacacaccacagggcgaggtagcagcctctgactcatccgtcaggcaccacattcctcttcccttaaatggagcacacagagccctgctggggggcggggggctggcagcgtcctctctgctcaactcatcacagctggggcagctgtggaaggaagggctgttaggagcgtggccaaaacagagatacacagaggaggttcagctcgctgggatgaggggagacatattctgca

SEQ ID NO: 167803 - DNA, 520 bp, Homo sapiens
tctgtacagcgagggcatctgaagccctctgatttgagtggccatcagcagacaccagtcagcccacccaacccaagcccatggaatccctggcagccagggcagttttcaggctgcctgtttattcttctagctccctgagatgccacagcaagcaggagccctgctggtgcatcctcagggtcaccaggggacaggcccagacggatgtcagagcagactgccttggcgaattatttagcaccctcctctgagggggccaggcatgcacctcacagccggctccacacaccacasggcgaggtagcagcctctgactcatccgtcaggcaccacattcctcttcccttaaatggagcacacagagccctgctggggggcggggggctggcagcgtcctctctgctcaactcatcacagctggggcagctgtggaaggaagggctgttaggagcgtggccaaaacagagatacacagaggaggttcagctcgctgggatgaggggagacatattctgca

SEQ ID NO: 167804 - DNA, 634 bp, Homo sapiens
ccaaccctccggtcttggctctttcactaagagaccctgtgacataggtaagttttttcccttctgtccatctcaatttcattatctataaaattaagttatctctaagctttcttcctcccaaaaacttttttctaggattaaaaacaaaacaaaaaaatatataattcccattcctcattgactccatgtatgtatctatgtaccagaccagtgagtacccctctaacttctttgctacttctagattccatgagcatctatgactagagaggaagagggtagcttgcatgtaatgaaataaaatccaggaaaattttcaaatcctcaaaagggctaagaatcttggacccgtttcttttcctttttgtgtgtgtgggttctgttttctgaaagaaggtctccctctgtggcagtgcagcagaggcattatcatagctcactgcagcctcgacctcctggtctcaaacaatcctcccayctcggcctcccaagtaactgggactacaggcatgcaccaccacacctggcttttttttttaaattattttttgtagagatggggtctcaccatgttctcgaggctaatctcgaattagcctcaaactatcctaccatctcagcctcccaaaat

SEQ ID NO: 167805 - DNA, 634 bp, Homo sapiens
ccaaccctccggtcttggctctttcactaagagaccctgtgacataggtaagttttttcccttctgtccatctcaatttcattatctataaaattaagttatctctaagctttcttcctcccaaaaacttttttctaggattaaaaacaaaacaaaaaaatatataattcccattcctcattgactccatgtatgtatctatgtaccagaccagtgagtacccctctaacttctttgctacttctagattccatgagcatctatgactagagaggaagagggtagcttgcatgtaatgaaataaaatccaggaaaattttcaaatcctcaaaagggctaagaatcttggacccgtttcttttcctttttgtgtgtgtgggttctgttttctgaaagaaggtctccctctgtggcagtgcagcagaggcattatcatagctcactgcagcctcgacctcctggtctcaaacaatcctcccatctcggcctcccaagtaactgggactacaggcatgcaccaccacacctggcttttttttttwaattattttttgtagagatggggtctcaccatgttctcgaggctaatctcgaattagcctcaaactatcctaccatctcagcctcccaaaat

SEQ ID NO: 167806 - DNA, 470 bp, Homo sapiens
tacatatgcacataaactctccaatgaataattacaagcatattaaatgcagcatattagttaccatcacaaagagaatgaaggcaaaaaaatacacagcatattaggtaaaaccctaagcctgcttgaaaaaattctaatcagtttatactacattagtgacaygacatctctaatgccgaatgacaaaaatattctagttgtatgcagggtaggaatgagatgtaacttgtcttttagcataaccaaactagaagcaaaaaaataggctattttgtttttgcttttctcaaaggctttttgacataccaacatgggcaactctggcctgcagccaagcaaataatcatgtaatttggaataactgcccagagcaggataacagaatcgagactgagacccagagaagacctgaagacctaccttggaaacagacaaagtttactccagtccactgaactttcacattc

SEQ ID NO: 167807 - DNA, 562 bp, Homo sapiens
cctttgtcacacagtatttgaataggcactggaatttgtcaaaactggagggtaaaagctctgtattagtctgttctcacactgctgatgaagacatacctgagactgggcactttacaaaagacagtggtttaagggacttatagctccacatggctggagaggcctcacaatcatgctggaaggcaaggaggagaaagtcacatcttacatrggtggcagcaggtaaagagagagagagagcttgtgcagggaatctcccatttttaaaaccatcagatctcatgagacttattcactatcaccagaacagcatgggaaagacctgcctccatgattcaattgcctcccaccaggttcctccaatgacacatgggcattgtgggaattacaattcaaaatgagatttgggtggggacacagccaaactatatcaggcacagttctctacaagactgccctcacttcaattatcagctccaagtttggggattctagagccactctcagttctgaccagctacctcagggtttcccatgaccacccttaagttcaacaatt

SEQ ID NO: 167808 - DNA, 581 bp, Homo sapiens
tgccagtccagctgagtgatccggccaattagtagcagccatggccatggcaagtctctcagtcagtgagacttgcatttatttagtaaagattaattgacaaaagtcatgagtaaacatcactagagtgtaattgacattgcggacctcctgagtagaaagtaattaaacacccgcagtagatcaaaggttagtcttaggaccacmtgagtaaacaagctagttaggtaaactattctgccttcctttgtactaattttaagctatttacttaagttaaggatcaggttgccttcagccataacccttactaaagctatgcaaacttcttggccttccaaggtttgtggctattactataactatcttttatatttttcccatcagcctgattgaacacccacaatcggagtgaccaggcatcctacagaatgagagaaaatttttgcaatctatccatctgacaaagggctaatatccagaatctacaaaagcttaaatttacaagaaaataaaaaaacaagcccaccaaaaactgtgtgaaggatatgaacagacacttctcaaaagacatttatgaa

SEQ ID NO: 167809 - DNA, 585 bp, Homo sapiens
tctgtttcataccatgtttcttttccatactcagtgtttgcctttaaaaattccagtttgtttctttagtatttttctttgtgctgacttccycaattaatctgaatttacagtttctttctttgggctggcttttctttatataaagacgtgacttttcctgatcttaaatctgggtcttacagtaattctcttctgttttaaacccttttcttggcaattccatgctattagatactcagtgcagtttctactaagaatgtttaataagatatgtttcaaataatacatggatctctcttccctgtggatctctcatataagtatgttgctatgattaatcaacatatattttctcagatgtctttaattgaattccatcaaatctattcatcaagaataacataaaaacgtaatctgctctagggagtttctacatatcttatttttatatttttctaaattttattactatgagactgaatgctgattatttgatttacagatttaaaatttttattttcagttttattgaggtgattaaatatctgattcaacactacaaacatagatgctcattttaat

SEQ ID NO: 167810 - DNA, 585 bp, Homo sapiens
tctgtttcataccatgtttcttttccatactcagtgtttgcctttaaaaattccagtttgtttctttagtatttttctttgtgctgacttcctcaattaatctgaatttacagtttctttctttgggctggcttttctttatataaagacgtgacttttcctgatcttaaatctgggtcttacagtaattmtcttctgttttaaacccttttcttggcaattccatgctattagatactcagtgcagtttctactaagaatgtttaataagatatgtttcaaataatacatggatctctcttccctgtggatctctcatataagtatgttgctatgattaatcaacatatattttctcagatgtctttaattgaattccatcaaatctattcatcaagaataacataaaaacgtaatctgctctagggagtttctacatatcttatttttatatttttctaaattttattactatgagactgaatgctgattatttgatttacagatttaaaatttttattttcagttttattgaggtgattaaatatctgattcaacactacaaacatagatgctcattttaat

SEQ ID NO: 167811 - DNA, 561 bp, Homo sapiens
gagttgagagttgaaatgggaccaaggtagtgcacaatcctccttttccctcaagcttagagctcattaaaaaatgacacagaagctcaataaatatacactaaaatatcatctttattgtcagtggaagtggattagcaaacacagcttgggtytgtgactgtacatggaatttctagtagccgttgcctaagttctgattttgggaaagtccttttaggaatagagtatgcaggttgtttacacagataggctacaagggaaaatcagcctcatacccacagagccctgatagtaggggcaaagaatgaggtcccagggcatgtgcctcactgcaacgtggacaactgggtgacagatcctcctcagctcacccatccaatcaatcaatcccttttccgtggaaaggaggaactaaaggaaggacagacaggctggaggaagaaactcatataaacatggaatagtatatttcctaatactttgtagtgctctgaggcaaatttgaggactaattagtgtgtccctttaaaaggttggtctaaaattgaatgtaccaat

SEQ ID NO: 167812 - DNA, 553 bp, Homo sapiens
gcttgtgtttgccccaaccgcacacacacatacttatatacatgtacatacacgtatatacaaacacatgtattttacatgtgcatttactaatattataattagtaataataactaattaattaaagactgtgaggcatacggacagtttaactcaaattgccttcatatttggattaattttgtgctactgccactgttcakaatctcctgatagaaggtactgatgcttattcagcatgctaaaaataggtcagctatttctttgttttttctttttttcctcctcagatatcatgggtttggttttgtttaatagattctttcacaaaggtgggatcttgcccttggtttttaacgaagtcttttgttaaagtcaagcccagtaatcacaaacagtgtagaaagtaatggtgtgtgatagacatagttggctctgctaaggatttcagtgacacttcagtttttatattcagcaaaagagaatgcttttaaaacctctcatctgtatatcaaagtgagtaaaaaatagaaaatagtagagctacaatca

SEQ ID NO: 167813 - DNA, 452 bp, Homo sapiens
gctaataggctacagaagaaattttatgtccatgacagtattctaggaatgtatatatacatatctatacatcagatatgtacatatgtgttgtgtgtatgtaatctggaggtggagttatggacagagggaatacatcctaagatagaaatgtgttgttggaatagcaggtgccagtgttgcttaaataatgtgagagagcatgtgaaacatgtgacatgagaccagagaggtaattggagaccagataatatgtgctgtgtaggtcattmtaagaatttggctttgcctctgagtccattgatgggttataaacagggaagtaatatgatctgacgtaggatttcaagactctttctggctactatgggaggaaaaataccatggggtaagcaagggtaaaagtcaacagactaatttgatgaatattgtagtaatctatttgaaaagtc

SEQ ID NO: 167814 - DNA, 452 bp, Homo sapiens
gctaataggctacagaagaaattttatgtccatgacagtattctaggaatgtatatatacatatctatacatcagatatgtacatatgtgttgtgtgtatgtaatctggaggtggagttatggacagagggaatacatcctaagatagaaatgtgttgttggaatagcaggtgccagtgttgcttaaataatgtgagagagcatgtgaaacatgtgacatgagaccagagaggtaattggagaccagataatatgtgctgtgtaggtcattataagaatttggctttgcctctgagtccattgatgggttataaacagggaagtaatatgatctgacgtaggatttcaagactctttctggctactatgggaggaaaaataccatggggtaagcaagggtaaaagtcaacagactaatttgatgaataytgtagtaatctatttgaaaagtc

SEQ ID NO: 167815 - DNA, 570 bp, Homo sapiens
tcagatatccttgttatctcttgctggggcctttgctgttgtctcctgtctgatttccttcccactagtacttgggctattcaattaattattcagagagctgccaaattaacatgaataaatcttgaaagcattgtgttaagtgaaagaacacagacacaagagactacatactttatagttccatttatcctaggaaaggaaaggctactgtgatggagagaaggttagtaattgctattacccagatgtgggggaagaagactgactctaaaggggcacaaaggaacrttttgggtgagcagaatgttttatatcgtgactgtagtggtgattacacaatcatgtacatttgtcaaacaaaactcatgaacaattcgtgaattttatgaaatgtatggctgatttatacctaagtatatatgtgtgtgtgtgcgtgtgtatgtataaacatgggactctatgccttacacccgcaggagacattgattcgcttttgcctatgttgcatgtactttgtttagtgtaactgtttttactgcagtgaccacaattacacagcacacatcc

SEQ ID NO: 167816 - DNA, 458 bp, Homo sapiens
tgttcatactgacatgtagacagcatttgtccccaggactctgcaggacatccctgcctgctgggtatctgtaacaatgcagcctttcaacaggaaagtcagacttcgaaagcgaagtttgcaacggtagcagcaaatacgaattttttattttattttttaattatttttatttttttatttttttgagatggagtctcactgtgtcrcccaggccggagtacagtggcgctatcttggctcactgcaacctctgcttcccaggttcaagtgattctcctgcctcagcctcccgagtagctgggactacaggcgtgcaccactgtgctcagctaatttttgtatatatttttagagatggggtttcattatgttggtccaggtctcgaactcctgacctcgtgatccacacgcctcagcatcccaaagccactgggcctagcccccgaaaataagaa

SEQ ID NO: 167817 - DNA, 591 bp, Homo sapiens
aacacaggagtcctccatcgtcaaaggaagctgatagatcaagaattagaaatttaaaacaaaatgagaattagaacaaaatatcaagaatggagagtaagtctattgagtgyggtagagagcagttgctgacagtacatcataatgacaataattattagagcaagcagctcctgagcacatgtaatgtgccagagactgggcccaggcttttgtgcattgtctcactgaatccccacagcagccctaggagataaggtaggctgattagcattgtttttcaatgaggaaacaggcacctaatgcctctagtagcttaatcaagatgaatccaggcagaggggtgtggagattggaatttggaaaaaggtttgatttagtgactgctgatatgaagaagaaacgttctacaggtaaggtgggcaggaactatgattctaagatgctaaaggttgtaaacatggatgttgatgtcgctaagaataatgatggataataaggtgtaaaataaaaaaaaaattcaaactaagtcctgaaatatctaatgaaatacgggatgtgaaaatgttatacaatactgggaaaacagaa

SEQ ID NO: 167818 - DNA, 487 bp, Homo sapiens
gagagtagggattcagaggttggattctatttcagcagatagatgaggtgggaggaagaatataaagaagagttatagaaaggtcaccctaagtcgatagggtagcctgagcagaaaaacattcaatagttagggttttatgtaatggttttgaaactgttattcctggcaaagaagtaagtttttttgtttgtttgtttttgatacgcagtttcgcttttattatccaggctggagtgcaatggcgtgatcttggctcatcgcaacctccgcctcccgggttcaggtgattctcctgcttcagcctcccgagtagctgggattacaggcatgcgccaccacacccggccaattttttgtatttttagtagagwtagggtttcaccatgttggccaggctggtctcaaaactcctggcctcaagtgatccgcttgccttggcctcccaaagtgctggtattacaagcgtgaaccaccacgcccagcc

SEQ ID NO: 167819 - DNA, 557 bp, Homo sapiens
atattttagcaaattatcattggtgtgcttagaataacattaatgatgaggctaaaatttaagtgcttactgtgtgccaggtacttagttatgacaaaactgttttacatgcgttgttacctaatcttccagacaaccagtgaggtaggtggtattgatttgactgtacaaatgggtaaatgctagcttgaaaattaaaaaatgtcttggatggctggttggggtggctcatgcctataatcccagcactttgggaggctgaggtgggtggatcacttgaggctgggagtttgagaccaaccaggccaacagggtgaaaccctgtctctactaaaaacaatgacaaaaaaattagctgggtgtggtggtgcatgcctgtaatgccagctacttgggtggctgaggcatgagaattccttgaaccctggaagcagaggttrtagtgagccaagattgtgccattgcactgcagctggcctacagagcgaggctctgtctcaaaaaaaaaaaaaaattgtctagagtaacatagttattaagtggaagacctgagactg

SEQ ID NO: 167820 - DNA, 460 bp, Homo sapiens
cagcttcagagagggaaccttcgtagcaccagtgatggaagagaattaaatatgggtgttgctgagaaaggcaagaagatttttgttcagaagtgtgcccagtgccacacaatgcaaaagggaggccagcacaagactgggcctaatctccatagtctctccaggcaggagacaggtgaggccgytggatactcttacacagacaccaataagaacaaaggcatcacctggggaaaggatacactgatgcactatttggagactcccaagaagaacatccctggaacaaaaatgatctttgccagcattaagaagaaggcagaaagggcagacttgatagctaatctcaaaaacgctactcatcagtaataactggccactgccttatttattacaaaacagaaatgtctcatgacttttttatgtgtaccataatttaatagatctcatataccagaat

SEQ ID NO: 167821 - DNA, 532 bp, Homo sapiens
ttttctgtgaatgtgtcaaccttcacttcaaagacttcaggcttgtattgaatgagatatatatgagctttatgaagcttttttaatgcaaaatatacaaacatgttgtaaaaataaatattatcaaaaatagtttatgtttctactcaaatgcacttatggaaaggaatgataatttatccaaaaagcyatttagaattttaccaacaatatctcattcaaataatgaggtaagacatttcctaaaatatcttttgtttgtaattttcagtgcagtactttatataagggccattcatcctgcttttaatttgtatttattgaaggagtgactgttagtttagtgcccacaatttttttcttactttattttaattccaaataagaaatttacaacttcatatcttaactagcagttttactttgtaaacattacagagtgggagaagccataaaacatgaatccttattttactaaaataaaatgtctaaatcccattttaaatcccagattgtcccctaatgtcagtca

SEQ ID NO: 167822 - DNA, 532 bp, Homo sapiens
agggggcagggggaggtgccacacacttttaaacaaccagacctcgtgagaactcactcactgtcatgagggcaggatgaaggggatggtgttaaaccattcatgagaaattcacccccatgattgaattacctcaaaccaggcccccacctccaacactggggattacatttcaatgtgaggtttgtgtggagacacattcagactatatcatttcgtcctgacccctcccaaattttatgtccttttcacattttaatatacaatcatgctttcctaataatcctcaaagtcttaacttttccagcattaacygaaaggtccaaagtctcttctgagacaaaactagttccttttgcctatgagcctgcaacatcaaaaacaagttagttacttctaagataccatagggttataggtcttggataaatatttccattccaaaagggagaaataggccaagagaaagatgctatgggccccatgcaaatccaaaacccagcagggcagtcgttacatcttaaagctccaa

SEQ ID NO: 167823 - DNA, 516 bp, Homo sapiens
gctaaaaggggccaaggtacggctcaggacatttcttcagagggtgcaagttccaagccatggcaacttccatgtggtgttgagcctgtgggtgcacagaagtcaagaattgagatttgggaacttctgcctagatttcagaggatgtatggaaatgcctgaatgtcttgctacaggggcctgcatggagaacttctgctagggcagtgtggaaggaaaatgtggggtttaagcttccacagagtccccactggggcactgcctaggggagctgtgaggagaaagccaccatcctccagaacccagaatggtagatccactgacagcttgcaccatgcacctggaaaagctgcagatacttaatgccagcccatgaaagcaacagggagggaggccataccctgcaaagcctcaggggcagagctgyccaagaccatgggaacccacctcttgcataaatgtgacctagatgtgagacatggagtcaaaggagatcattttgaaactttaagagtt

SEQ ID NO: 167824 - DNA, 641 bp, Homo sapiens
aataaaccaatttcccactttgttgtaatctaccccaaatgttcatctaaataactcaccttcatatattacgtctctaaaaaatattccttgatatcccaagtcatagaaaaatgcttatgacactacttttattgctggcttcattgtatgcctgcccagctagattgcaggctctgtgtctgtcatgttcaagtcgtatcttgaatgactagcatagaatctataacctagtaaaatgtcttccaatgagctagcattcttagatttgagagagcttttcttttactctgtccagtaactctgtagaarcatttagctttttccacctcccccttttactttgcctagacagttttctccagcatatttcagaggaaggaaagttggtttgctcttaacctgtttatgagttaatgcagtgcacatttgcccaatccaagaggttggagagaaacatctttacacattattagctactcaggttttcctgtaaaaccttgagttaaatgagttgaaacttaccctgctaaaaaatcttcaccttaaggaatatgaagcacattaagaagaatccatatttcaatgcaagaaaatgcaaacaatgctgctaatacattcaccaacacctatgtatattg

SEQ ID NO: 167825 - DNA, 641 bp, Homo sapiens
aataaaccaatttcccactttgttgtaatctaccccaaatgttcatctaaataactcaccttcatatattacgtctctaaaaaatattccttgatatcccaagtcatagaaaaatgcttatgacactacttttattgctggcttcattgtatgcctgcccagctagattgcaggctctgtgtctgtcatgttcaagtcgtatcttgaatgactagcatagaatctataacctagtaaaatgtcttccaatgagctagcattcttagatttgagagagcttttcttttactctgtccagtaactctgtagaagcatttagctttttccacctcccccttttactttgcctagacagttttctccagcatatttcagaggaaggaaagttggtttgctcttaacctgtttatgagttaatgcagtgcacatttgcccaatccaagaggttggagagaaacatctttacacattattagctactcaggttttcctgtaaaaccttgagttaaatgagttgaaacttaccctgctaaaaaatcttcaccttaaggaatatgaagcacattaagaagaatccatatttcaatgcaagaaaatgcaaayaatgctgctaatacattcaccaacacctatgtatattg

SEQ ID NO: 167826 - DNA, 515 bp, Homo sapiens
cttatttaaagtgtgaatgggatatttattccattccagccgggcatytgcattttgatattctgtctcaatggctaaggtttgtcttagatcttttaccttcctaatagacaccctggttttattattaggtgtagaagcaaccagtgtgggatctaaaactgaagctactgaagaaggggaagatgggggaatattgcatatcttaaaaatgcctagggggtctttcccatttacatcaatccccataccatataagcaactaagggcaggtctagagtcagttaaggtggaggtgctgatagagagaaagactgagaaggggtagtccctttagtgaaatagatgaggggttttagatctgcacaaacctcttccttagaagtccaaccttgctcctgagtagtccaaaggatgtagtcccatctactacaaggttgccaggctgtaggagcagaaaattggcatctcagctacaggtgatcacaacgatgagtgctaggagtaactgtgtc

SEQ ID NO: 167827 - DNA, 613 bp, Homo sapiens
aatagaatgaaccttcttattgtaaataagttaaatcccaatatttaataattaatttctaattcttatatttatcagagtaatatatgcacagaatttaaaggcttgtaatggaaacagcagtcccctgcctctaacttatcctaccatacagtcacttacaaggttgtggatcttttttctgacatttaacttcatgttaaaaaataatatgcctaatmtggtatgtcctgatttatcaagttaggcttctgattttatcgtatttgaagactatagcagtcttactctgctttctgtttctccacctaataccattaaaaatatattttttataaagttggtatttagtatctacattgttttctgcaagaccatgtactgttacattttctttcttaatttcagttttccctaaagttaacagtttcttccttttttttgtgcatctttaacgttttttggtccatttataactttacttgcagcttccaacaattccttgtttcacttttccatatagtcacatttatttttttaaatatccatgagttctatgcttttccaaagtcactctaccttctcttagcttgttgctaagtttgaagcacaa

SEQ ID NO: 167828 - DNA, 530 bp, Homo sapiens
gcactttaatggagtacaggtcatagaattacaagagatagtagtggagaagtaggcatagactagaaaataaagaattttgaatgccaaaattaggagtttgacatttaccatgaagactattggaagccattggagattttaaggagaaacttataggatcagactcacattttggaaggatgattctggcagaaatgtgaagagtagataccaagaaaatgacattagtgataaaaggacaagttaggggccaactgaaggattcctggtaatgcaggatctaatgaccctggaggtgtggccrtggctatgggcatgaaaagaaagggatacattttttaaatcagttaatctgtactacaagaaatcttaaaagaagttctttagtctgaagtgaaatgagactagataaaaactcagacttataccaaggaaagagagcactagaaatggtaaatatgcaggtaaacagaaaacattttcttcctgtttctcaatatctttaaaagaaaatttactttttaaaa

SEQ ID NO: 167829 - DNA, 456 bp, Homo sapiens
acagtagctaccaacttaaactaattgattttatagaatactatattcaaaaacgggaggatacaaattctttacaaatacagatggaatatttactaagacaaggaatatacttgaccttacagaaatacatttcaaagaatcagaacaatacacatcatattctctggctacagtagaattaaattagaagaaaaaaattaagatgctttaagtagatgcatatgcttagaaattacacaacataattctaaataagctttagggcaaagaagaaattataacagcaattttttacattttgaattaaawgataatgaaaacaaaatatacacaaatgtatgaaatataattaaacaagggcttggagaaaaaataatagccttgaatatttatattagaaaagaaagattttttaaattcattatttatgcttctaccttaaggagctaaaga

SEQ ID NO: 167830 - DNA, 375 bp, Homo sapiens
tgtaaaatatgtgttaattgactgttcatgttatcagtaaggcttctagtcaatattatgccagcataatgtgataaatgaaagacctgtttggtaagtaagaaatttcttacraagtaatatgagtaatacagtacaagtaatacagtaagaacccataactttataaagtaaatatcttagatacagataggctagatttaattgcttgaagcactaaagatcacattctttcgaatccctgcatatcacttcactaacaaaagatgatagtatttatttggcacacctggataaatagtcgtgtttactcaagagttggggtgactggcccaggagttcggtctgccttaagtcctctcaggcatgctaggg

SEQ ID NO: 167831 - DNA, 590 bp, Homo sapiens
cagtgctctcctgatatgcctggctggtagtgtgggcttcagttcctgggttagttgacagattatkccatgcctcattaaggcggacttaacgctgactacatctgtagactctcttgtattttttgttttatgttcagtgtgaagaatgtaaagtgtttgtgagatttcttctgaatattctttctggatattcaaataaatgtggtcacagaatgacagtttctcatttaggcctcatgtagtagagacaaactttattaacatccattctggtggtgtgcctgcacccatcttattcttctttacacaatgtttatctttgctccttccctacacccaccctatgctgtagtcacattgattccccccaccctgcacccctctctcccacttcctgatgatgcctattcatttaagactgagtccaaacatctcctttgctgtgaaggtggctcctggagtgatggcagtggcagtgactgaaggaggcctgaggaacactagcactgccttggcaccgtgcatcatgatttattgcctatactgtcatttagcttttcaccttttatactgtgtcttcatatggc

SEQ ID NO: 167832 - DNA, 566 bp, Homo sapiens
gaagtttgattttgtgttccacatactaaaagataaacaaaaatacaaactctaagcctttgaattagaagactgaggaggaaaggacccactatactggagaaatttatytttcaagttgtcaagggtattagaaatgtctctcaaattttggcttatgaatctatattatattgagtttctccagaaacagaccctgagaaaaggattcaagtccaagtggtttacttgagacctgatttcaggaaaaaccagtagagaagtgaggaagagagatagagaagggaaggcagccaatagagtgcatcatcatgcaagttaccactgaggatagaaggagcttcatcctgccggagaacactggagccaatgtagaacatgtgcctcaaaaattctcccactaactccaacaaccagtcactagttaagggtagggtgaggagggtgggaattgattctctggcactactggtctgccatgtgtatgggcagagagagttccactcagggtcaactacaggatttttgtggctcagagcaaaatcaaaatgagaatgtgagatccc

SEQ ID NO: 167833 - DNA, 579 bp, Homo sapiens
cagctttgtgtggctaaaccaaatgaacccccaatgtctttgatccaatcaaaacccagtatgaagcagcaaggtcatcataaccaacaccctcaatttctactttggagacccttgagctgcattggtttctatttggggtttccaggtttatatcctttgtctgacttggtcttgattctcatcaagacaatttttataaaggagtccaccttactctggggtatytgctgccacctcaccaaggtagcttctcttaaattcttactttgtttcaacacaagaaataggggagattttcaaagcagcagggctgacagcaagaatttctccagattttcttaaaacagtttctcattctctagtgagttactttcatcaacattgcaaacccaatccaggacactaagagtctgaatagtagtcaatgcctcctccatgacttctcacacgtttgcctgtctcagagaaatcttcccaaacagggcaacagtctcctaaagaagccaggatcaagtgaagacatctctgggacattttactgttgcctttgaatggatctaagattgtcatgataga

SEQ ID NO: 167834 - DNA, 616 bp, Homo sapiens
ccatctcgaaagtgaaacctgcagtcaaaattctagccaccttagctgatgctacatggagcacagatagtcttttcaaccaaattgaagagtcatatgttaaataaatgattgtcatggttttaagctactaaattttcaggtggattgctatgtagcacttaaccaaaaattaataaattgatattttaactgtgatgtattttcatatttgtgcctgtgcatgtctgtctgtctgtgtgtgcacctgtgtgcattttaaagcaaagtactgagaggactaaaaaggggaatgcattacttcttcttaatcactgaatatagcrgttctgaatctattttctaaaatcagcccaatgctgatctcatccaatcccatttaactgatgagtaattcatagtcagtctctttgtgggtcccccccagtgtgccacagagttgtcttcaatgccaaagactgtaaaaggtatctttggatgaaataaattgttgtttctatgagtggtacatctaattatatatatactggaattattttcgtcactgaatcatttactcattcacttaacagacatttgctgaaatgttattatgtacttattgtggttgacacta

SEQ ID NO: 167835 - DNA, 616 bp, Homo sapiens
ccatctcgaaagtgaaacctgcagtcaaaattctagccaccttagctgatgctacatggagcacagatagtcttttcaaccaaattgaagagtcatatgttaaataaatgattgtcatggttttaagctactaaattttcaggtggattgctatgtagcacttaaccaaaaattaataaattgatattttaactgtgatgtattttcatatttgtgcctgtgcatgtctgtctgtctgtgtgtgcacctgtgtgcattttaaagcaaagtactgagaggactaaaaaggggaatgcattacttcttcttaatcactgaatatagcggttctgaatctattttctaaaatcagcccaatgctgatctcatccaatcccatttaactgatgagtaattcatagtcartctctttgtgggtcccccccagtgtgccacagagttgtcttcaatgccaaagactgtaaaaggtatctttggatgaaataaattgttgtttctatgagtggtacatctaattatatatatactggaattattttcgtcactgaatcatttactcattcacttaacagacatttgctgaaatgttattatgtacttattgtggttgacacta

SEQ ID NO: 167836 - DNA, 570 bp, Homo sapiens
cttttagaaagatacattctagctcttttatggagggtggattccarataacagaggccagactcagagtagaaccttgtaaaagtacacttgaagcatgatgtgagcctaactcagggccatttctaaggtgatggagaagcaaggttgactttttgaggcttgaatttgtcacgtttactccttttttagtcctatctccacctgtttgggggcttctgtggttgatgctcttatagttgctgcctctatagttgctcttgatagagggaacagatagaaggtgggccagcattctgtcatattacatggggctttttccctctcagagattttaccaaactttcccagcagtattaaatgaaacccaattactaatataaagaatttcatgttaatatattagtaaataaattcttttgataccatcttttgtgacaggtaattataacttaagtggcctacatcaaatgtattaattcattcatgaaactttcattgacatttgcaatgtgaaggcactgttagcttcgccgaagggtaacaaaaaagcattgaatatcctctggc

SEQ ID NO: 167837 - DNA, 608 bp, Homo sapiens
agagtcatgtccttttttctttatgcacgatggttattgtctttgagggcttttaatttatttcttttacttacaggacagattacagtatctgcaggaagagggttccggtgtgatgcatcaggaatgtcagatccagtcctgtgagctctcggtggctcagaagcccaggccctcttctcctgcagtgacatccttggcatcaccaccactctgctttggcagtttcctaagctgtgtctgccagaccttctcaaggtctaggaagcagaagcctcccagaagaaagggtaacaaccaggctgaggcaggaggtgatgctgagrtcctgagacctggcccggcaaaaccagagttgagcctcagcaaaacgtgtagccacttgaaatcgatagagctttcctttgtgtttagttttatagttctctctgtatgtcattgttcctcttagttgagtttttgcctgtcaaagagatagagagctgcttttatgctgagatcctcaagccaaaacccacagtaaacgcaaagtaaaactttgaggctttgaacttttactcagtggtggaattacttcctacttccttcccattaggttgaaggtggga

SEQ ID NO: 167838 - DNA, 608 bp, Homo sapiens
agagtcatgtccttttttctttatgcacgatggttattgtctttgagggcttttaatttatttcttttacttacaggacagattacagtatctgcaggaagagggttccggtgtgatgcatcaggaatgtcagatccagtcctgtgagctctcggtggctcagaagcccaggccctcttctcctgcagtgacatccttggcatcaccaccactctgctttggcagtttcctaagctgtgtctgccagaccttctcaaggtctaggaagcagaagcctcccagaagaaagggtaacaaccaggctgaggcaggaggtgatgctgaggtcctgagacctggcccggcaaaaccagagttgagcctcagcaaaacgtgtagccacttgaaatygatagagctttcctttgtgtttagttttatagttctctctgtatgtcattgttcctcttagttgagtttttgcctgtcaaagagatagagagctgcttttatgctgagatcctcaagccaaaacccacagtaaacgcaaagtaaaactttgaggctttgaacttttactcagtggtggaattacttcctacttccttcccattaggttgaaggtggga

SEQ ID NO: 167839 - DNA, 519 bp, Homo sapiens
ttgaggacttgataagtgaagaatcagtattggaactttaaatacttccttgtttatttatcgtaatcccatgaggtacgtgttctccatttttttccaaatgaagtagctcaggcaaaggtgtcttgttcatgtacatacagctaggaagtgagaaagcaagatttaaattcatatctgagtctgaaatgagtcttccttctgttacttgatcrgtagtgcagaagaaaacaagatataacaaagtcacagaattttagatcaggaaagaatcttgtattcctgaggaaatgtgtttccatttcctcattttgtagatgggaacacaaagactctggaaggctaagaaactttttcaggctcacattcatctagtactaaagaggaatgattataacatgtcataatttgaatcatgaagcaatgattctactttattttagacattgttcagtggctgttagtaaattattcaatgatgacatatcatccagatagatcgcttcatgcaatgaattc

SEQ ID NO: 167840 - DNA, 560 bp, Homo sapiens
aaatttacattttgattataaagatatttattgagagaataaggctgataggaaaccaaatttttaaactgggaggataaatgatcgacagattctttttagcttcagcaactccgcattctccccattttgcttttgttgtttgttggttttcctctggttgtattaagaaaatacttattcacatacacaaaaggtaaatgaatagtttcgcaatctcagaatacttttcagaatatagacatggcaagagacaattgaaaagcaaaatcattaacaaatcaggtgatctttagcatattaatatatcattaaaaatgtaacttaatcatttgcaaaatctatcagtcaaaataagctaagcttattctgtgatgccaaatgaacccctaaacytaagtgacttgctgaaataggtgtatatttcttgatgtatttcttgttcctcttacatatccaattttgggttgtattgggagcaggggctctgatccatatagttacatagggatccagactgatggaggctccaccatcttgtagctgtaccgtcctgtgca

SEQ ID NO: 167841 - DNA, 539 bp, Homo sapiens
tgttcccaaagtgctaggattacaggcatgagacactgcgcccggcttgacctcacattaatctgtcaagaaatcctgttggctcaaccttcaaaacttacccaggatcccagcaattgcactcttgggcatatgttttatagaaatagraatttacgttcacattaaaaccggcatatgaatgttcaaagcagctttatttagaatagcccccagatgtcactcactgggtgaataaacaaactgtagtatatccataccatggaatactactcagcaataaaaaagaaacaattattgatccatgcaacaacatggttgcatccccagaaacctatgctgagacaaaaaaaaaaaaaaaaaaaaaaagctagcccaaaaggttacatactggatatgattccatttttataaccttcttgaaagaaaaaaagtttggaaatggtaaacagattagtggttactgccaggggttacactgggtgttaggggtggagtaatggcagggagagaagtcaatgtggttataaaagggcagt

SEQ ID NO: 167842 - DNA, 539 bp, Homo sapiens
tgttcccaaagtgctaggattacaggcatgagacactgcgcccggcttgacctcacattaatctgtcaagaaatcctgttggctcaaccttcaaaacttacccaggatcccagcaattgcactcttgggcatatgttttatagaaatagaaatttacgttcacattaaaaccggcatatgaatgttcaaagcagctttatttagaatagcccccagatgtcactcactgggtgaataaacaaactgtagtatatccataccatggaatactactcagcaataaaaaagaaacaattattgatccatgcaacaacatggttgcatccccagaaacytatgctgagacaaaaaaaaaaaaaaaaaaaaaaagctagcccaaaaggttacatactggatatgattccatttttataaccttcttgaaagaaaaaaagtttggaaatggtaaacagattagtggttactgccaggggttacactgggtgttaggggtggagtaatggcagggagagaagtcaatgtggttataaaagggcagt

SEQ ID NO: 167843 - DNA, 564 bp, Homo sapiens
tatgtatataattttatagacgaggaattgtattatacatactgttctcgctgacacctgcttttctctctcaacaatatgtcctagacatctttctatgtcaataaatagagctctacaaaattattttaattacttcatagtagtccattatatgtatcatactttatttaactgggtctttactgatgatcatttaaggatgttgtgagaattttgttctcataaacaatgttgtgataaatatccttgtgcatattctctttgctcatttttgcaacaattgccttagaataaaatccaataaatgagatggctgcaattaagggtatgctatttctattttrccactctgtccttcagaaagcttacaacagcaaaattctcatcaaccgtgcccacacattagtccagaccctcatcaagcctgggttttgtcagccttaatgtttggccagatcaacagaaggcaaatgatgcttgtttctattggcattgctaagattatagggagggggaaataaatgtctttttgttttttcaggcatttgtagttattttctt

SEQ ID NO: 167844 - DNA, 608 bp, Homo sapiens
caccactcagggcctactgaggacatgagcatgccaggctgacccagcacgatggagcctggactccagactagtgcatccattggacatgcagaacccaaaaaggacatccagggagaggtcaggactgggaggaagatgatctgaatatgaagctagctctasccctcaactgaccttgggaacttaagtgagccatctaacttcccagagctccctgtataatgaaagcatcacggctttcacacctgccccatccctggacaccaatggttccttgacaagtgttcattttcttctctgcccctgccacctccgtgcctcagctcttcatctataaactaaggaggccaatctcctctcctccaaattgttttgtaagtccagataagaagctctgcaaagcccttggcatatgataggtgatcatcaaaccttatttcatgctttcaagttgaacaccaagaaaagttcgaactagaatacgttcctgatgtgttacaatgtgatgtgcacagtactagggacatattcttataaacagtttaatttgaatctaattaagcatctaggatgaacatccagcttacaggaaaaaaatgaagatg

SEQ ID NO: 167845 - DNA, 401 bp, Homo sapiens
ctggacaaaaagaatgaaactctgtctcaaaaaaagcgggggaggggtgtggcagacatggtcaaaagagcccttccatgactggattctaagatgaaagtgggggcaggacagagtaggggtgatccagggtgatctgttggcagttttgtggaatgattcagtcattagaccagttgttctacagacagagctcaacagatcatcccctgtttaaattagaccccaactccactagaasaacaaaattctcgtatgagtcagagtttaaccatgaaaacagaaatcaccttaagaatttataataggaggaatttagtgcagggaattggttacataggtcatagagaaactgaacccccaccaggtgacagtgaggtgaccaaagataagcaggaagt

SEQ ID NO: 167846 - DNA, 583 bp, Homo sapiens
catgcggtttcacatgtacgccaaaagcatcaagcattggaatgctgcaaaggtcccaggtggctggtgcaagtcagattccccaggaaacattctgagatggagatttatgtaaatggaatttataagaaactcaacacgtgtcaagggtgaaggaagcaggattggacagagagagaamttgaactgtaatgcagtctaaatgaaggcctcagctgctcccacagggagctctggcacttggctgggacttcagagaaggttcgatttgaggccaggggcagggcctttgtgcccttgcacagccgaagaccggatgtggactgcccccagggaggagacagaacgtggagctggccgggtgtcttcagccaagagcagttcccagaaagggactccacggggagcagccaatgctccagaagccggggaatgagtgccttcttcccaaagaagggatccggcagtcacacacagcatccactaccactgcacaggaccaaaagaattttccaaggagaaaggcctaacgctgtgggaggtgtttggggagctaactgtgctctatgtttttattgttgtt

SEQ ID NO: 167847 - DNA, 314 bp, Homo sapiens
agctttctatcagtttagttggaagaatcatttgagggaagttctatttgttaagctcgattacagaaagcaatcaatagaggaaaattcccyggtcactataggcaagaaatatagagctcagaggatccatcctgggaaggagattgatgccactgtcccataatccctctctccttcccccaaaggtaggagatgtgggtgcaaccttgagttatggagtgtcaggctgaagaagtccccatctggtgctgacagagaaactgaggcctgaggagagaaagggaattattcacatcatagagtggcagaat

SEQ ID NO: 167848 - DNA, 477 bp, Homo sapiens
actctgttcattttcctttattctttttacttctgttgtcaggttaaataacctcaattgatctgtcttcatgtttgctgattcttttttctctccatttaaatctggtttggggcacctctagttaattttcaagcttagtgatagtatttctcaactccaaaatttctagttggtgattttctatattttctgtctctttatttctaagtctttgttttgtgagacttacttccataattttctttgaacatattcaaaattgcttaaagtctttrtttagtaagtccaatgtatgagcttccttagggacagtttctattcactgctttttttctccctgtgaatggccctttatttgtttttctcataattccttattgaaaactagacatcttaaataatataatttgctaactctctctgcctccttttcctatgattggtttttgttgttgctgttgctgttgtttattt

SEQ ID NO: 167849 - DNA, 436 bp, Homo sapiens
ctaatccatctctctagcagaagtcctgcaaatttgtttttattttacaaaagagaagctaatttatatttagtttttcaagtatgatgtcttcatgcataactggaaaagttgaaaaaaggattcaaaatcaggtaagagtttataaaataaaattgtaggatctttgcattaatatacccagtatcatatcattaaaaataaaaaatgttagctaggcataaacattacttcattgaaatatgcctgccttctggacatgataaatgttcatgaaaaaagaaaacaaaattatgaaaagaaatatgcctgccttaaactaaattttaccaataaccaaattgaatatagtttaaaaaagtaataatcaaaaatgtttcttatttracaaatagttggaatgtttacattatgcatagattttttagttacccat

SEQ ID NO: 167850 - DNA, 507 bp, Homo sapiens
gtctttgaattaacccaatccatcaaagacaaagaaaatagaataaaaaaatatgaacacagcctccaagaagtctgggattatgttaaacgaccaaacctaagaataatcagtgttcctgaggaagaagagaattccaaaaattcggaaaacatatttgggggaataattgaggaaaacttcccctgtgttgctrgagacctagacatccaaatacaagaagcacaaagaacacctgagaaattcatcgtaaaaagatcattgcctaggcacattgtcatcaggctatacaaagttaagatgaaagaaagactcttaagagctgtgagacagaagcaccagataacctataaaggaaaacctatcagattagcagcagatttttcagcagaaaccctacaagctagaaaggattggggccctatcttcagccttcttgaacaaaacaattatcagccaagaattttgtatccagcgaaactaagcatcatacatgaaggaaagata

SEQ ID NO: 167851 - DNA, 580 bp, Homo sapiens
cttttttaggctttaactatggattatttgtataatgaaaaaataagataacttatattatatattgaactgagtaaggggtaaattcagtcattcttaggtaaaaagacaggataattaggttctcattcttgtttttcattcgttcatgtattcaatcaattttttttattaaataagcactcattaatatgccagatactgtggtagttgctgatgaggaaccaataaagagcccatgtggtatcaaagggctttcctgtctaatatttatttattctgttactctggaaaacttatttggcatctggtttcatatattgwaaaataaagatagctgtctctgccttctttatgttctatattttacctctttctcattgtaaactttgtatggtcaatggagaaggatgtggattcaactctgaatatacactatgtaaggcacacttttcattctcgtgtgaaactagttttataactcagctcagagcacacagtaggttctcactaaaaattttatcttccttctcttttttcttttctaagatggtagtgtagaagataagttgataccatg

SEQ ID NO: 167852 - DNA, 588 bp, Homo sapiens
tacctaactgtttaatttcagtacactagtataacattatgagaatcawtaacctgtacccttatggaaagtagctttatcaagtgcagcatattgcttactggtaattccttttgacttcagtcttatggattacattaattttcaaagtttattagatcagcaacttttccctctccataccccatacagtgagattatttgttacaatcagaacatgtgtaaataatgttgtcaaactttgcattctttcctaggatcctagccctcctaaatgattttttcaaaacttacataattgaggtttactctttgtgctgtaaatttctatggcttttgacaaaggtatgtcatgtatccaccattaatatatacaaaattgatttaccagtcaaaaaaggcctgcgcttcacctattcaatcctcctcctctcgccttggatcattggcagtctctcattggtttactgttcctctagttttgttcttttcaacatactgttcaattgggatcatatagtctgtagccttttcaggtgggattctttcacccagctataagcatttaaagttcatccaggtgttctc

SEQ ID NO: 167853 - DNA, 588 bp, Homo sapiens
tacctaactgtttaatttcagtacactagtataacattatgagaatcattaacctgtacccttatggaaagtagctttatcaagtgcagcatattgcttactggtaattccttttgacttcagtcttatggattacattaattttcaaagtttattagatcagcaacttttccctctccataccccatacagtgagattatttgttacaatcagaacatgtgtaaataatgttgtcaaactttgcattctttcctaggatcctagccctcctaaatgattttttcaaaacttacataattgaggtttactctttgtgctgtaaatttctatggcttttgacaaaggtatgtcatgtatccaccattaatatatacaaaattgatttaccagtcaaaaaaggcctgygcttcacctattcaatcctcctcctctcgccttggatcattggcagtctctcattggtttactgttcctctagttttgttcttttcaacatactgttcaattgggatcatatagtctgtagccttttcaggtgggattctttcacccagctataagcatttaaagttcatccaggtgttctc

SEQ ID NO: 167854 - DNA, 588 bp, Homo sapiens
tacctaactgtttaatttcagtacactagtataacattatgagaatcattaacctgtacccttatggaaagtagctttatcaagtgcagcatattgcttactggtaattccttttgacttcagtcttatggattacattaattttcaaagtttattagatcagcaacttttccctctccataccccatacagtgagattatttgttacaatcagaacatgtgtaaataatgttgtcaaactttgcattctttcctaggatcctagccctcctaaatgattttttcaaaacttacataattgaggtttactctttgtgctgtaaatttctatggcttttgacaaaggtatgtcatgtatccaccattaatatatacaaaattgatttaccagtcaaaaaaggcctgcgcttcacctattcaatcctcctcctctcrccttggatcattggcagtctctcattggtttactgttcctctagttttgttcttttcaacatactgttcaattgggatcatatagtctgtagccttttcaggtgggattctttcacccagctataagcatttaaagttcatccaggtgttctc

SEQ ID NO: 167855 - DNA, 606 bp, Homo sapiens
aatttatggcaaaaacacatcaaaaaagaaagatttcaaataaacaacctaatgatgcattctgagaaattagaaaagcaagaacaaaccaaacccaacttagtagatagaaagaaataataaaattcagagcaaaaataaacaaaacaggcacaaaaaatacaaaagatcaataaaataaaaacaatataatgatagtgttttggaaagataatcaaaattgaacagttgttagtgagacaaacaaagaaaaaagagagatgacccacataaatcaaaaatcataatgcaggcattacaacagataccacggaaatataaaggatcacaagagaatrttgtgaacaactatatgccaataaattggaaaacctagaggaaatgaataaatttttggatacatccaccttcgaagactgaaccaggaagaatttgaaaatctaaccagaccaataatgagtaaggatgttaaatcagaaataaaaaatctcccaataacaacagcacaaagcctaggaccagatgacttcactgctaaattctaccaaatttttaaagaactaaaatcagttctcacaattttgcaaaaaagtaaaaaggagtaca

SEQ ID NO: 167856 - DNA, 606 bp, Homo sapiens
aatttatggcaaaaacacatcaaaaaagaaagatttcaaataaacaacctaatgatgcattctgagaaattagaaaagcaagaacaaaccaaacccaacttagtagatagaaagaaataataaaattcagagcaaaaataaacaaaacaggcacaaaaaatacaaaagatcaataaaataaaaacaatataatgatagtgttttggaaagataatcaaaattgaacagttgttagtgagacaaacaaagaaaaaagagagatgacccacataaatcaaaaatcataatgcaggcattacaacagataccacggaaatataaaggatcacaagagaatattgtgaacaactatatgccaataaattggaaaacctagaggaaatgaataaatttttggatacatccaccttcgaagactgaaccaggaagaatttgaaaatctaaccagaccaataatgagtaaggatgttaaatcagaaataaaaaatctcccaataacaacagcacaaagcctaggaccagatgacttcactgctaaattctaccaaatttttaaaraactaaaatcagttctcacaattttgcaaaaaagtaaaaaggagtaca

SEQ ID NO: 167857 - DNA, 522 bp, Homo sapiens
ggttcttgtcatatggcccagaaaatttaggcatgcggacacattgcagggtgagtaggacaggyttattaggtgaaaagaaaaaaggaaagaggaactttcagcaaagtgagagactcctgttggcaggtctcctgcctcacagattgaatcccaggccaccacacaggagctggagaggcctggctcctcccctctgaaaacagtttaagcttctcctggctccagctccttcccctagtgcgcaggtgggcattattcagaatcagttaggaggtgacagacttcatctggtacccgcagtctggtttttcagtcttcaggctgccctaggcttgaaggtggagtttcgctggacctcccgctatctcctgtctctatccctaccacagccatcatggatactgtttatccaaatatagtaagtactaaaataactaaaatacagtggttaaacattaatccttttggggggagaaaatggcagtttcttaaaaacaaacaaaaataaactaaatatac

SEQ ID NO: 167858 - DNA, 539 bp, Homo sapiens
aacaggttcttgtcatatggcccagaaaatttaggcatgcggacacattgcagggtgagtaggacaggcttattaggtgaaaagaaaaaaggaaagaggaactttcagcaaagtgagagactcctgttggcaggtctcctgcctcacagattgaatcccaggccaccacacaggagctggagaggcctggctcctcccctctgaaaacagtttaagcttctcctggctccagctccttcccctagtgcgcaggtgggcattattcagaatcagttaggaggtgacagacttcatctggtacccgcagtctggtttttcagtcttcaggctgccytaggcttgaaggtggagtttcgctggacctcccgctatctcctgtctctatccctaccacagccatcatggatactgtttatccaaatatagtaagtactaaaataactaaaatacagtggttaaacattaatccttttggggggagaaaatggcagtttcttaaaaacaaacaaaaataaactaaatatacatttaccatatga

SEQ ID NO: 167859 - DNA, 539 bp, Homo sapiens
aacaggttcttgtcatatggcccagaaaatttaggcatgcggacacattgcagggtgagtaggacaggcttattaggtgaaaagaaaaaaggaaagaggaactttcagcaaagtgagagactcctgttggcaggtctcctgcctcacagattgaatcccaggccaccacacaggagctggagaggcctggctcctcccctctgaaaacagtttaagcttctcctggctccagctccttcccctagtgcgcaggtgggcattattcagaatcagttaggaggtgacagacttcatctggtacccgcagtctggtttttcagtcttcaggctgccctaggcttgaaggtggagtttcgcyggacctcccgctatctcctgtctctatccctaccacagccatcatggatactgtttatccaaatatagtaagtactaaaataactaaaatacagtggttaaacattaatccttttggggggagaaaatggcagtttcttaaaaacaaacaaaaataaactaaatatacatttaccatatga

SEQ ID NO: 167860 - DNA, 539 bp, Homo sapiens
aacaggttcttgtcatatggcccagaaaatttaggcatgcggacacattgcagggtgagtaggacaggcttattaggtgaaaagaaaaaaggaaagaggaactttcagcaaagtgagagactcctgttggcaggtctcctgcctcacagattgaatcccaggccaccacacaggagctggagaggcctggctcctcccctctgaaaacagtttaagcttctcctggctccagctccttcccctagtgcgcaggtgggcattattcagaatcagttaggaggtgacagacttcatctggtacccgcagtctggtttttcagtcttcaggctgccctaggcttgaaggtggagtttcgctggacctccygctatctcctgtctctatccctaccacagccatcatggatactgtttatccaaatatagtaagtactaaaataactaaaatacagtggttaaacattaatccttttggggggagaaaatggcagtttcttaaaaacaaacaaaaataaactaaatatacatttaccatatga

SEQ ID NO: 167861 - DNA, 394 bp, Homo sapiens
gttggaggagagtgtagttgtgactgtagaagggtaatatgagggagatcttcgtgataaggaataggtctgtattttagctgtggtgatggtagttacaagaatctatacacaagataaaatggcatgaagctatacacatktattgcaccaatgacaacttcctggtatttatattgtaatgtagttatgtaccacagaaccattggaagaaactgggtgaagggtgtaggttcctctctgtactatcttgcaaattcttgtgaatataatatttaattattttaaaataaaaagcattaaaaaatggctcctcaagtcagacagactgtgtttacatcccaactctgttacctattaactgtgtagctgtggatgcattgcttaaccattt

SEQ ID NO: 167862 - DNA, 478 bp, Homo sapiens
agtcagaattaagctagataagtaaggatatatagatatttatgtggataaagtagaaatgtattaggtaatgagaatgggattaaaatcacataagtttatagattttggagatggagaaatactgagtgataagtgctgttatgaagtcaggcagtgtagtaagcaagctaaagaaactgagtttcagggtgtcacatgggtcggcaacactggtttcatggtgtcagtaacaatggataataagaaaaatactaatctaaatgctggggtcatgagaagataggctgatttggatttcttaaatcattatttgtaggtgaaatgttttctacaaagtgcaacytaaagcaatttgccttatagcaaaatattgcctaagctttagctattaaattatattttatatgctgggtaatgtttaatacaaccagatttcagtaaaatgctataaccacagggatgtgattcatatgca

SEQ ID NO: 167863 - DNA, 471 bp, Homo sapiens
gaggcctggtccagatgatgtataaaccatcataagacatttgccttttactttgagtagaatgagaagccattggaggggtttgaagccagaagaatcatgatatgacatgttttaaaggagtctttctgaatgctgtgttgaaaatagtctgagaagtgattcaggaagaagcagaaagttaaaaaccattgctattattttggtgaaaaatggtggagacagagaccaggattttagaaatggggaggttgaacgttgttgattgtgtatatatggtgagaggtaaaactaactaaatttgctaaaagattggatattgggaatgagagagacaggagtcagggacaactcaaggttttggcttcagaactgggaagatgggcttactatttataytgatacagaggagactgaattgagcagtctggagatggtgaaagagcagaaattaattttgactgtgactag

SEQ ID NO: 167864 - DNA, 462 bp, Homo sapiens
cttttctgacatacttgttctcttgaatagcacctttttagtaatgccaccactaaccactgacttaaaactgtgactccatttccaactctcttataacctctttccattttttctttacttttttccataacattaccttcactctctgatgtattacatatttgcttgtttgtttagtctccctattagatagcaaattcaatgaaggcaacagttttaatgttcttttttttcccatgatgtattcccccacacttagaacagtgtctggctagtaaatgtgctttaaatatttattgagtcaataaataaacrgtgttaaccatatatgtgctttgggaaaagagacctgtgcagaaaatttgggggtggtggggttgtttcagatacagcacttgaatccaaccaattataatgtagctacagaataaatagggtagctcctatatttccaaaata

SEQ ID NO: 167865 - DNA, 561 bp, Homo sapiens
acaaaactaacatgtccttctcagtccatcaaatcaggaggttcaagatattaatagatcttatttctggtgatgttggtttttgtcatttggtgttggttgctggctttttccactgaaaaactaagttttttttttttctttgtagttaatatcttgggtgcagtgccagtttttatgtttatttttatttttatttttttgccagagttttgctctgttgcccaggctggagtgcaatagcgagatcttggctcactgccacctcagcctcccgggttcaagcgattctcctgcctcagcctccagagtagctgggattacaggcacccacyaccatgcccagctaattttttgtatttttagtagagatggggtttcaccatgctggtcaggctgatctcgaattcctgacctcaagtgatccgcccaccgcagcctcccaaagtgctgggattacaggcgtgcgcgtgcacccagccaaagtgcagtgctttaagactattcaattttgttccttctcaaatgttcacctataaattttaatctccatcaatgaac

SEQ ID NO: 167866 - DNA, 561 bp, Homo sapiens
acaaaactaacatgtccttctcagtccatcaaatcaggaggttcaagatattaatagatcttatttctggtgatgttggtttttgtcatttggtgttggttgctggctttttccactgaaaaactaagttttttttttttctttgtagttaatatcttgggtgcagtgccagtttttatgtttatttttatttttatttttttgccagagttttgctctgttgcccaggctggagtgcaatagcgagatcttggctcactgccacctcagcctcccgggttcaagcgattctcctgcctcagcctccagagtagctgggattacaggcacccaccaccawgcccagctaattttttgtatttttagtagagatggggtttcaccatgctggtcaggctgatctcgaattcctgacctcaagtgatccgcccaccgcagcctcccaaagtgctgggattacaggcgtgcgcgtgcacccagccaaagtgcagtgctttaagactattcaattttgttccttctcaaatgttcacctataaattttaatctccatcaatgaac

SEQ ID NO: 167867 - DNA, 573 bp, Homo sapiens
ctgtccctttgtgatgtacatcttgtcccagtttcttgccaatttaacaaaatataatatctttcttaagcatctgtgaaccatctctgaaatgtagttatcaagaaaggtaaagcctctatttcctactctctgtaggagggtagaagcctattcagtaagtaccatttagcaaacacagatggtctaatgacattgaccatctccactaatgtcctccartacttttctactagctcaccccagtgcttaaaaactctccttcacttcgcttcagcagagttgagttccatctctgcctccattgcagcagtattgaataaaattttccttggctgtttaactcagtcagtgaaattattatttgacaactatgattggctttaggaaaagtcatggacttgcagagttttggctttggttgttgatgtaaatgtggaagcgatacttttttacccatattctacatctttaagtaaaaatcagagatattgcaatgttaagtcattttactttgtaaaattctcatgttgtccctaaacattttcacaaaccttcacatgtacacaaatg

SEQ ID NO: 167868 - DNA, 573 bp, Homo sapiens
ctgtccctttgtgatgtacatcttgtcccagtttcttgccaatttaacaaaatataatatctttcttaagcatctgtgaaccatctctgaaatgtagttatcaagaaaggtaaagcctctatttcctactctctgtaggagggtagaagcctattcagtaagtaccatttagcaaacacagatggtctaatgacattgaccatctccactaatgtcctccagtacttttctactagctcaccccagtgcttaaaaactctccttcacttcgcttcagcagagttgagttccatctctgcctccattgcagcagtattgaataaaattttccttggctgtttaactcagtcagtgaarttattatttgacaactatgattggctttaggaaaagtcatggacttgcagagttttggctttggttgttgatgtaaatgtggaagcgatacttttttacccatattctacatctttaagtaaaaatcagagatattgcaatgttaagtcattttactttgtaaaattctcatgttgtccctaaacattttcacaaaccttcacatgtacacaaatg

SEQ ID NO: 167869 - DNA, 573 bp, Homo sapiens
ctgtccctttgtgatgtacatcttgtcccagtttcttgccaatttaacaaaatataatatctttcttaagcatctgtgaaccatctctgaaatgtagttatcaagaaaggtaaagcctctatttcctactctctgtaggagggtagaagcctattcagtaagtaccatttagcaaacacagatggtctaatgacattgaccatctccactaatgtcctccagtacttttctactagctcaccccagtgcttaaaaactctccttcacttcgcttcagcagagttgagttccatctctgcctccattgcagcagtattgaataaaattttccttggctgtttaactcagtcagtgaaattattatttgacmactatgattggctttaggaaaagtcatggacttgcagagttttggctttggttgttgatgtaaatgtggaagcgatacttttttacccatattctacatctttaagtaaaaatcagagatattgcaatgttaagtcattttactttgtaaaattctcatgttgtccctaaacattttcacaaaccttcacatgtacacaaatg

SEQ ID NO: 167870 - DNA, 573 bp, Homo sapiens
ctgtccctttgtgatgtacatcttgtcccagtttcttgccaatttaacaaaatataatatctttcttaagcatctgtgaaccatctctgaaatgtagttatcaagaaaggtaaagcctctatttcctactctctgtaggagggtagaagcctattcagtaagtaccatttagcaaacacagatggtctaatgacattgaccatctccactaatgtcctccagtacttttctactagctcaccccagtgcttaaaaactctccttcacttcgcttcagcagagttgagttccatctctgcctccattgcagcagtattgaataaaattttccttggctgtttaactcagtcagtgaaattattatttgacaactatgattggctttaggaaaagtcatggacttgcagagttttggctttggttgttgatgtaaatgtggaagcratacttttttacccatattctacatctttaagtaaaaatcagagatattgcaatgttaagtcattttactttgtaaaattctcatgttgtccctaaacattttcacaaaccttcacatgtacacaaatg

SEQ ID NO: 167871 - DNA, 559 bp, Homo sapiens
tcaaaattatctaggaagagagcaattagacatgagaagatggaagaggtttgagttttggaccatcccaaaatttaggggtcaggaagagactccagcaaagaccaaaaacagctgccaccaaaatagaaaattaaactagaggaatctgttatcttggaagccaagtgaaaatagtatttcttttgtgtcaaatgtttctgagaagtagaataagaaaggcacaaagaatttaccrttgaattaaacaaggtagaaatcattgtttatctgacaagagtggtttccctaaaatgatacagacgaagtactgaaatgaatgggttaaggacagaatggcaaacaatgaagtttaggcagcaaatatacgtaactcttgagaagtgattcgttcaaaataggagcagagaaatggggcaggagtgagagagtcacttgaacatcaggccgaggaacaatttaaattttacatcatagaagatattgccacatgttaatattctgataaaaatctgctatagaggagaaagttgatgatgtgcaggagagagagtggaca

SEQ ID NO: 167872 - DNA, 583 bp, Homo sapiens
gacatcaataatgcatgcacagttcataatcataccagttatgtaacctgtcgtgcaagccacatcttccaaggcatgtatccccagaggacagacaaagctatgcacagagaacctgctgtttcttaagtatttccacttyccataaatttacaattaatattaatcctgatcttgaaaataagctgtgaaccaaagcaaatcaccttaaaagcagattttcattaatgaggagatttactgtaagtttctcaaagcctacctttcttacttggcttttgtgagaaattgcaaatctttccctggtgagatccataccatgactgctgatacatggtcgagagcacttttgtacttaattggtgcagaaatacaagtaaaggcagagctgtgttcacttcctccttcatttcctctctattccttttctgtgatgtcacatactgatacagcatctacacatagccatgtgtctaacaaacatatctgctcaaggcttagtcaatctttgaccttcctccttcctcatgcataccttaagcattaatttaaggtcaagcacatttacaggttccccagcatg

SEQ ID NO: 167873 - DNA, 540 bp, Homo sapiens
gcacatttgagtagtgctctgttgttttaaaaatgcttttgtttatgtattaattcatctggaaggtcaagattcaagttgccctcagtaattttatcatatcttgaatgaatactgctagtccttttcattttccaaataacatctctttattcctatacttttaaaaaatgcatcatgaattcatactgattttttcaattcaaatgtaagagagttcaataattctaagggattctttataaatttgaggtaaattttacatgcaattaagtgcacaaatatcaagtgctctatctgatgatragtttgacaaatgcatacacccacaaaataagatttttattttttaattaatacactttattttttaagagaagttttagattcacagcaaaattgagcagaaagtacagaggattccctctgtctctatgcacacacaacatcccccacctatcaacatttggcaccagtgttgtacgcttgttataatcaatgagcctacattgccacaccattatcacccaaagtccacag

SEQ ID NO: 167874 - DNA, 540 bp, Homo sapiens
gcacatttgagtagtgctctgttgttttaaaaatgcttttgtttatgtattaattcatctggaaggtcaagattcaagttgccctcagtaattttatcatatcttgaatgaatactgctagtccttttcattttccaaataacatctctttattcctatacttttaaaaaatgcatcatgaattcatactgattttttcaattcaaatgtaagagagttcaataattctaagggattctttataaatttgaggtaaattttacatgcaattaagtgcacaaatatcaagtgctctatctgatgatgagtttgacaaatgcatacacccacaaaataagatttttattttttaattaatacactttattttttaagagaagttttagattcacagcaaaattgagcagaaagtacagaggattccctctgtctctatgcacacacaacatcccccacctatcaacatttggcaccagtgttgtacgcttgttataatcaatgagcctacattgccacaycattatcacccaaagtccacag

SEQ ID NO: 167875 - DNA, 475 bp, Homo sapiens
tcattaatctaacaattactgagcccttaatatgagtcagatttttttctaatcattttatctttattatttcactgtgctctcaatctgatgaagaattastgttagagtcctaatctcaaagatgcagaaagaggcataaagaagttggtttgcccaaggttacacagctagcaaatgccgcagcagagatacaaacccaatctctctagctccatagttgatgctcccagtgctatgattattctgcctttctggcctaatctcactttcacagccaaggcctcttatgttctaactgacatattttttaagaggttaaccgagaccaaatttaggttaactgtctcgttgggctttattatcaacatacctaaatgaaagaattaactatgttgacatatattagacacatgaaagctatgacttgaacctgatttcctgttatgtgaacatgggtctaacaaacaggtac

SEQ ID NO: 167876 - DNA, 475 bp, Homo sapiens
tcattaatctaacaattactgagcccttaatatgagtcagatttttttctaatcattttatctttattatttcactgtgctctcaatctgatgaagaattagtgttagagtcctaatctcaaagatgcagaaagaggcataaagaagttggtttgcccaaggttacmcagctagcaaatgccgcagcagagatacaaacccaatctctctagctccatagttgatgctcccagtgctatgattattctgcctttctggcctaatctcactttcacagccaaggcctcttatgttctaactgacatattttttaagaggttaaccgagaccaaatttaggttaactgtctcgttgggctttattatcaacatacctaaatgaaagaattaactatgttgacatatattagacacatgaaagctatgacttgaacctgatttcctgttatgtgaacatgggtctaacaaacaggtac

SEQ ID NO: 167877 - DNA, 489 bp, Homo sapiens
gaattcaggaggcggagatagcagtgagccaagaccttgccactgcactccagcctgggtgacagagcgagactccattcgctgtccacccccaccccctaaaaaaagcttctttaaatatgatattaggcatctgtaaattactttaacttcatctttcattgygtctcaaatctcagtctaacatctatatttttaagagagaaaggcaaaacttaccaatacttctcaggaaactagaaaaagttaaggttatagggccacaaagcccaaaagacattttacagacattttctgaggtcagacaccatggaagcaatatatcagggagtcctaagtaaggatttgactcctgatgccctctctaaagtcttgaacacagtttaattatcttggagttatgaataatgttgaagccaattaaaataaggttatagtttcaagggcagacccataaaaatgagcctctggttttcacagcaaacacca

SEQ ID NO: 167878 - DNA, 489 bp, Homo sapiens
gaattcaggaggcggagatagcagtgagccaagaccttgccactgcactccagcctgggtgacagagcgagactccattcgctgtccacccccaccccctaaaaaaagcttctttaaatatgatattaggcatctgtaaattactttaacttcatctttcattgtgtctcaaatctcagtctaacatctatatttttaagagagaaaggcaaaacttaccaatacttctcaggaaactagamaaagttaaggttatagggccacaaagcccaaaagacattttacagacattttctgaggtcagacaccatggaagcaatatatcagggagtcctaagtaaggatttgactcctgatgccctctctaaagtcttgaacacagtttaattatcttggagttatgaataatgttgaagccaattaaaataaggttatagtttcaagggcagacccataaaaatgagcctctggttttcacagcaaacacca

SEQ ID NO: 167879 - DNA, 474 bp, Homo sapiens
tgctactccaggccccaggctactctgttgtcattttatttatttatttatttatttatttattatttatttatatttattcattttgagaccgagtctcctcttgtcgcccaggctggagtgtagtggcgygatcgcggctcactgcaacttacgcctcccgggttcaagagattctcctgcttcagcctctgagtagctgagattacaggtggccgccaccacgcccagctaatttttgtacttttagtggagactgggttttgccattttggccaagctggtctcgaactcctggcctcaggtgagccgcccgcctcggcctcccaaagttctgggattacaggcgttagtcaccgtccccggccgtcatttcttagcaatatttctttttcatgtctgcatttaaagttcattttaactttattgttctaaataaatctgttcagaaatgggaaattgattttctgaagc

SEQ ID NO: 167880 - DNA, 629 bp, Homo sapiens
tatcatctaacatattcataaaggcagatgaaggaggcaatcaaattcaatctacagccattacagagagtgtggagatagaaaagatggaaaataaatattaaaaagtttaggaagagaagaagataaaaaatgaagcataggaaagaaggaaaagattgagttaaggagagagttctgcatttttatcactcgtgaagaagcaaagtaaaattcaatccctttgaaagaaaatttcttccacctgatttgaaactttgatttcttgaggtataaagatgggatgaaggggcaaaggtaagtaaaataaaaacagtaagaaaatatagaagaaaattaatagggcttctccaagtaagacctaaatgttattggaagagtctataaaacaagtagtaagttagcattaagtattttgtagtctgtgctcttgtgtatcttcattgtctgctacttctgtcaaaggcatatacacaacatcttcacacaatatttttgatattaaaaaaytggagatttaaagagaaaaaaggaaagtgaagtcatattccttcctgttctttcctttgttttttctttttaaacctcacacatcttctccctggggagttgcatgggggtgacagagt

SEQ ID NO: 167881 - DNA, 471 bp, Homo sapiens
tgtctaaattattctgtgttgtacttttttttggtagttaaatacatgatgaacatacatagagcttactattacggaagcttcttcctctccttggccatcacatattgttgagcaagatatcattcactcaacaggtattctgtttgytttgtgtttgtttgtttcccaaatgcaggcatattaatttgccagggctgctatcacaaaatagcagtctgggtggcttacccaacagaaatttattttctcacagttctggaggctggaagtctaagatcaaggtgtcaacaggcttgctttcttctgatgaaggtgccagcatggtcggtttctgctgggcttacagatggctgccttcttgctgtgtccttatgtggtttttcttttctgtgtgcacatccctagggtctccatgtatgttcaaattcctcttcttaggggatagttaatgggtacaaaaatacagtt

SEQ ID NO: 167882 - DNA, 519 bp, Homo sapiens
cattggtattttgaaagagattacattgaatctgtagattgcttggggtagtatggacattttaacaatatttatttttccaatccattaacataaatatcctttcatttttctgtgtctgcttcaatttcttgcatccatattttatggttttaactggaaagtctttcacttctttggttaagttaattcctaggtatttaattttatttgtagctattgtaaatgggattactttcttgatttctttttcagattgttcattgttggcatatagaaatgctactgatttttgtatgttaattttgtatgccgaaactttactgaatttgcttatcagttctaatagtttttcagtggagtctttaggtttttccaaatgtaagatcatatcatccrcaatcaaggataatttgacttctttctttacaatctgtatgtcttttatttctttctcttgtctgattgctctagctaggacttccagtactaggttgaataacagtgtggacagtggga

SEQ ID NO: 167883 - DNA, 580 bp, Homo sapiens
acagtcatttattttgttcctaagtctgcatttggtcagggctcagcaggggaggctggcctctgatcagcgcagttttgtcaggggcagctcaactgctggccagaggattcatttctaagatagttcactcactttgctggtgagttggttttggctttggctgcccactgggacctctgccaggggccggggctggggactttggttctccatgtggcctaaatttccacatagtatggtggctggkttccatgggtgaaatccccagagagagagagagagagaggctggtggaaactatgttgatttttatgacctgctcagaggtcacttctgctgcatacaaagtttaaggagaaagaacgtaaaaatccatcttttaatggaggagaggaaaaattctgaaaaagcacaagagatggaaaatattgttgcagttgttcttggaaagtacaatgtgccacatcttggttgcgtgaatgttgtttcaatgtgggactgtgagagtaatagtgagtacccacggagatagatatgaaagtgtttagccatactaatttcttggttcaatcttgaa

SEQ ID NO: 167884 - DNA, 415 bp, Homo sapiens
ataatagacaggctttctcaggaagaaaacacagagttacaagagatctctgggcaattccaacatttaccaatccttaaatgatgagctgtaaaggaagagcctgcaaaacaatgagaaggcagaggcaaggaaggagagggagaaccagaaaattaggggagtcagaggaaccaagggaggaagctgagcttacagaaagtgtcaacagtggcaaatgcaaccaagaagacaaataaggaaaaggctagaaagtttccgttgtatttaacaaccaagatgccattattgacctggrttgagagcaatttgagggagaggtcaagatgagggccagattttagtggacttgggactgaaaggcaagagagaaaggataaaaaaaagaagtagatgagggaggtagctggaggga

SEQ ID NO: 167885 - DNA, 546 bp, Homo sapiens
tgattttgtcactgcatgaatgcttctttagagcatagattttatttatctattttcgtatctatatctccaaagcagcctacttcaaatctaggcatacagattcaataaacatgtgttttatttctacataaatgctcacataaagagctaattgtgattaataatagcaatgggagttgatagataaatggcagcaatgagacctctaccctcaccatcactaaaatgttttcaaagaatcatgggcagaagaaagtaggaggtgcttcagcagcagtctgagatgaaggtgcagttggagaaggatcccatcawaaagctgcagagtcaacacccccatccttcttttcttattaccattaaccataggacacggaaggtagtgggtgtgggttgtactattactgacatcattttagagagctttttaggggctctgatgttacaacacttttcataagtgacataaaactacattgtgtggacgagcacggtgactcacacctataatcccagcactttgggaggccatggtgggatgat

SEQ ID NO: 167886 - DNA, 554 bp, Homo sapiens
tccaaggaaatacagtgttatgcatacatcatgttttatcattttttttgtttatttgagatggagtcttgctctgtcaccagactggagtgcagcagtgcaatctcagctcactgcaacctccacctcccaggttcaagcaattctgctgcctcagccttccaagtagctgggactacaggtggtgccaccacacccagataattttttttatttttagtagagacggggtttctccttgttggccaggatggtctcaatctcctgacyctgtgatctgtctgcctcggcctaccaaagtgctgggattacagatgtgagccactgcacatgacccacatcatgcttttaagctgtgcggtctccttattcccatgttgctttgttaactgactataaaattttatggaatcacgtcactagcacccatcttagtatactcagtcatcctgtgttacactcatgcagcctgaccttctgcgaagaaatgaaatatgggagggagtgttcaaaaagaaccatagacagtagtaggtaggagctaaacatgggtg

SEQ ID NO: 167887 - DNA, 506 bp, Homo sapiens
ttttttttgagacaagtctcactctgtggccagactggagtgcagtggtacaatctcagctcactggaaccactgcctcctgggttcaagtgattctcctgcctcagcctcccaagtagctgggactacaggcatgtgccaccatgcccagttaatttttgtatttttagtagagatggagtttccccatgttggccaggatggtctcaatctcctgaccttgtgatccgcctgcccttggcctcccaaagtgttaggattacagtcatgagcccccgtgcatggcccacatcacacttttaagctgtgtggtctacttattcccatgttgctttgttaactgagtttaaaattttatggaatcacatcaccagcgtccgtcttagtatactcagtcctcctgtgtcacactcakgcagcctgaccttctgcaaaaaaattaaacatgggagggagtgttcaaaaagaaccacagagggtagtaggtaggagctaagcatgggtgt

SEQ ID NO: 167888 - DNA, 346 bp, Homo sapiens
tacaaataggtctgagacacaggagagaatcycaaaagggatattaagcttccatctctgtaagagccatatggttgggtagttggtttgctttgtgctatacaactatttgaagttctttacattttctttcctcctgttttttttttttttttttttttgaaacaagatcttgctctgttacccaggctggagtccagtggtgtgatcatagctcactgcagcctcaaactcctaggctcaagcgatcctcccacctcagccaactgagtagctgggactacaggcatgtgccaccatgccccattaattttttatttgtatttttttaaagacaggggtctca

SEQ ID NO: 167889 - DNA, 570 bp, Homo sapiens
tgtctagcaggctaagataataccatgttgtgcagtggtggtaattagagcacatcacgtgactctgagtttttgagggcagtggtcaatatctttatctttgtatccccaagggtgttggctaaaatgttcagttagcactttgaatgagggaatgcttattgagtaaaaagtcaattacatgtgacaataaatgcagtaagaattagtcaagagaaagacaagtgtggcctgcagtcaccaacagaagctttaagctccaaggatacccaaatgcgtatgttaatcatgtgttattgttaaagcatttagatgatgatgtttggaagttgtgtgcaaaaccaggaaaaatttgaccaagttttggaagttcctttctgtttgatttatctgctgttatggtgttagggctattgctgttttatagatcagttctacactgtagtaattaactgggkaaagaagaccaaaagtatttagaaaccctctgacatatcaaaaaattagtgtcccccacccaaagggttttttgttttttcagcataattttccatttcaggtatacctaaa

SEQ ID NO: 167890 - DNA, 617 bp, Homo sapiens
gatcatttcagtctttttgaacttttcacttttcctgtgtaagtataagctaagtacttattgggttctaaagctaaaagcctatgaagataaagggccttattgaaatagtgaagtgagcaaaatatctttatggttcctgaccttgtcctcctgggctttgtccttcttttaatgaatgacaccttaccctcaggttcccagtatttacacctttgtagtgtttttgcaattcagaaaaatgtatttgatagatgagtagggtgactgtcgtttacaataatctattttctmtctcaaaatagctaaaagagaatagtttgaatgtttctagcattaacaaaagacaaacatttaaggtgatacatattccaattataccgacttgatctttacaagttatacaaatgtattaattcaccacgtgtagcccaaaaatatgtacaactattaagtatcaatttaaatttttttaaaaggacacagtgaaggaccatacttaaacttgattatttaattgctcatcatgaaattttatagggaaagaagaagaaaatcttcaataactcaaactcataagtaaagggacatacatggctgtatataaaggctattta

SEQ ID NO: 167891 - DNA, 617 bp, Homo sapiens
gatcatttcagtctttttgaacttttcacttttcctgtgtaagtataagctaagtacttattgggttctaaagctaaaagcctatgaagataaagggccttattgaaatagtgaagtgagcaaaatatctttatggttcctgaccttgtcctcctgggctttgtccttcttttaatgaatgacaccttaccctcaggttcccagtatttacacctttgtagtgtttttgcaattcagaaaaatgtatttgatagatgagtagggtgactgtcgtttacaataatctattttctatctcaaaatagctaaaagagaatagtttgaatgtttctagcattaacaaaagacaaacatttaaggtgatacatattccaattataccgacttgatctttacaagttatacaaatgtattaattcaccacgtgtagcccaaaaatatgtacaactattaagtatcaatttaaatttttttaaaaggacacagtgaaggaccatacttaaacttgattatttaattgctmatcatgaaattttatagggaaagaagaagaaaatcttcaataactcaaactcataagtaaagggacatacatggctgtatataaaggctattta

SEQ ID NO: 167892 - DNA, 438 bp, Homo sapiens
cacaattatgaccacataactaagttaaaattgagtcaaaaagtgtgctaagattaggttttagatttttttttactttcagggaccaatgttgtgaacttcccatcacctatcttcatcttcatcccaaaatagcacaccctttcttggttattatgtacttcttttgtgttctgctaaactattatatactatacttatgctttcaaaataattcatttatatataattaagttttgtgtaaatatttaacatataaatatttagtagaatctctgaaaggagtgaaggcaaaaactttcctgacccataataattacatacctagagcatcacaaaatctatkatcaatgaatggattctgaattctttgataacatgtctttaatttttaggatttaaagtacctcctttaaagcaccagaccagtagtcaatt

SEQ ID NO: 167893 - DNA, 600 bp, Homo sapiens
tttcagtagtcagacttatgtttcttccagttgtatttccaggctgagacaatacaaaagatggacagctctaagttgattatcaagctttaaatatgtttcacttgattaagarcattgaaggtgagaatggaattatgtaggcttcactgagtatccgtaaagttgggaacaatgatatacaacacagaaaagaagctccataagaaaacagctgcaactaacccatctggaaagagacctcaatcaaaatgatacttagcgaaagaaaaatactttcagtgatcaaattatttgtctgaccaatgcttggtggaaagattccacattactagttatttgtaatgggtaattgcacaatatactgtattgttcaatctggtgtgaatgaaagtggggagatcttgacaattgtcttggaacaatagatgtaaaattgagactattctgggaaaaccaggatgtttgggccccctggtaatagtctaatcattatacatctgtgctataagcacacaaataacatctagtaatgaaagaaacattcagctaagaaaacttgcagtcaaaaacttttgataaagctgtgaagacttgtta

SEQ ID NO: 167894 - DNA, 569 bp, Homo sapiens
tcaatgggacaatgcagtttggaattggctgagggaatcttgaccttctaagattgaaatgtattaagcagctccctaaggaagcactgtgcagtgaattgtagtggggaaattgtaatyagggataataggataaatgtctcaaatatataaaggtgcaatttcaaataatgggacatatacaccagcctaatgtgtagctttcaaagattaggagtctcttgaattttggctaactatcaaatgtcttcatgcaggtttttggagtagatattcttgtatttttctacacacagttttaagaataatcataaatatgtccctactcttattgcttttccagattattactccagaatgcaaaagcaagtctaggagagatgattaggccctcagaatctttgtggtttgtatccctaaatttctacatggtaagatgtaggtgagttgcagaaacacaagattgaccataagttacaaaaatgtttcttgacattgcacattttttctccttttcttcctagttatggtcatctgcctttcttggggatccagcagttcacaatgct

SEQ ID NO: 167895 - DNA, 569 bp, Homo sapiens
tcaatgggacaatgcagtttggaattggctgagggaatcttgaccttctaagattgaaatgtattaagcagctccctaaggaagcactgtgcagtgaattgtagtggggaaattgtaattagggataataggataaatgtctcaaatatwtaaaggtgcaatttcaaataatgggacatatacaccagcctaatgtgtagctttcaaagattaggagtctcttgaattttggctaactatcaaatgtcttcatgcaggtttttggagtagatattcttgtatttttctacacacagttttaagaataatcataaatatgtccctactcttattgcttttccagattattactccagaatgcaaaagcaagtctaggagagatgattaggccctcagaatctttgtggtttgtatccctaaatttctacatggtaagatgtaggtgagttgcagaaacacaagattgaccataagttacaaaaatgtttcttgacattgcacattttttctccttttcttcctagttatggtcatctgcctttcttggggatccagcagttcacaatgct

SEQ ID NO: 167896 - DNA, 557 bp, Homo sapiens
agcataaatatgaatatctacttacctgcatttctgaagctagaccataagtattaacagtgcttatatctacagtccctggcagatagtcggtgtaagaaatatagattaattgaatgaatcatatgatcatggttaagkttcttcttttgtgcgttttagcatttttaaatttttacattgatcatgtattgcttttgaaattttaaaaaacctggcaaaatgtaattacgatagaaactgacatcaaaaagctttgtagctgaaatagtgtaattttacactgagtttgaaacttctgatatcaggaactttgatgagcctaatacaggtgctatacgggatgaagtgaatatgcttagaatttttgatgaaaacaaatctgactactcaggtttctctatgagaagggtaggcagtttgatttgtaattatgggaagctgaatgtgaggcttggatgaggctttgtcagtatcagaccagctccttcctattgggggctgaattcccttgggctctccatcagagagaccaacaggaagcaatcatgtagttc

SEQ ID NO: 167897 - DNA, 557 bp, Homo sapiens
agcataaatatgaatatctacttacctgcatttctgaagctagaccataagtattaacagtgcttatatctacagtccctggcagatagtcggtgtaagaaatatagattaattgaatgaatcatatgatcatggttaaggttcttcttttgtgcgttttagcatttttaaatttttacattgatcatgtattgcttttgaaattttaaaaaacctggcaaaatrtaattacgatagaaactgacatcaaaaagctttgtagctgaaatagtgtaattttacactgagtttgaaacttctgatatcaggaactttgatgagcctaatacaggtgctatacgggatgaagtgaatatgcttagaatttttgatgaaaacaaatctgactactcaggtttctctatgagaagggtaggcagtttgatttgtaattatgggaagctgaatgtgaggcttggatgaggctttgtcagtatcagaccagctccttcctattgggggctgaattcccttgggctctccatcagagagaccaacaggaagcaatcatgtagttc

SEQ ID NO: 167898 - DNA, 557 bp, Homo sapiens
agcataaatatgaatatctacttacctgcatttctgaagctagaccataagtattaacagtgcttatatctacagtccctggcagatagtcggtgtaagaaatatagattaattgaatgaatcatatgatcatggttaaggttcttcttttgtgcgttttagcatttttaaatttttacattgatcatgtattgcttttgaaattttaaaaaacctggcaaaatgtaattacgatagaaactgacatcaaaaagctttgtagctgaaatagtgtaattttacactgagtttgaaacttctgatatcaggaactttgatgagcctaatacaggtgctatacgggatgaagtgaatatgcttagaatttttgatgaaaacaaatctgactaytcaggtttctctatgagaagggtaggcagtttgatttgtaattatgggaagctgaatgtgaggcttggatgaggctttgtcagtatcagaccagctccttcctattgggggctgaattcccttgggctctccatcagagagaccaacaggaagcaatcatgtagttc

SEQ ID NO: 167899 - DNA, 468 bp, Homo sapiens
ggtcatgccactcagaaaagagaagagatgtttcgatctgtggattgttatcatctgcaacccaggaggctctttgattcttcatatcacrttatttttacctgaggattgtagataccctacagtcttaaagcctctggccaatctgccttggaaccacaggatacattaggcaaggtctggggctggctttgacaaaggacacagtattgctggcagaagaaatcactcttaaagggaatatagatgctactgtgagagactgatcaactaattaagatcttgttgaagattctcaaattgagtttgagcttgttgacaaaaaccaggcttaggcagagggatgatgatcctgagagcatcctatctccatcaataggagtatgttttcaacctagtggtttttttttttaatttttattttaggttccagggtacatatgcagatttgttatataggtaaactaa

SEQ ID NO: 167900 - DNA, 547 bp, Homo sapiens
ggtttgttctaaattttacattagataacaggtcagcaacaaaataatgggagggggaaattagaaaacattaagtcttatttcatgtcatgtgatacagtatatatgtatttttttaataaaagaaagtgacatatattgtagttcaattggatatttacatttcatgtagaccataatggtagcggtaattatagaaatcttagcaactttcaaaggaaatttttcccagcaagatgactgacaaaatttttgaaagtaatagagagaaactgaggcataaaatttacctgaaagcagtcctgtttaaattggacaaaataattaccttttcttacatccctcttttagagttttcctaatatcatttaatacatagatagtactagaaagaaaaagacattttaaattaagaccaatgtgaagcattataccmatttagtatcattttgcccattacccttatagaaactaaaaatagaatgagtgctcagagtttgtactgtaactgcctgccacttacatgggataactatttttagttcca

SEQ ID NO: 167901 - DNA, 518 bp, Homo sapiens
ccatgtgttacttaaagatgttttgttttgaaactttgtgataggtaagatccactaatgtttgtaaaatttaccatttgtaggaaatattctattctcagtaattcctggtgaaagtggtaggtgggttagagatcataaaatccagtcttcacgggaccaagctggaacatggctgggtagctggtggggtagtgacagccctgcttcaaggagagatcagaaatgagggatgagactgagtgcaaagtcaaggtcaacacaggctaatcttggcttttggctacttttctgtaaagagtaatgtttctctatttgaaggagtgattttaattcagaagtatattggaaaagtgaaagaattcctagagaaaagttaatcccagacaagatagtgaatgacatatagtttattatccagtgacctttagcacaacaactacacatatgcgcaagcrtaactgctgggctgctctggagttcgccagaaaccccttgcccttagtttgaaggaggga

SEQ ID NO: 167902 - DNA, 481 bp, Homo sapiens
tcacctgggattatattggtgatttttggttcaactatttctcaaatttgagatgctattcagaatttaagtgaggtctaataccataggcagggattagaagtccaggccagaagtctgaartcatcagcttgggttctgttgatgtgaagtgaattggatcacacagagatagacatggccacagtcaggtgtgatacttgatgtgcctatgctttgcctcttagccagttcttagtcattccatgcaccgtgctccttagtagaagagagaacccttcaggtagacttctgtgaaatcctcacaaggcacagaaatttaatggcatttctgagagtcacaagggttctgtgaagtagaaattatgctctcattacattagcttaatgctgagtatattgggactcttgtaaatggacattttgttcatggatattttgttttagcaatttaaagaatgttaactagcttaatatttta

SEQ ID NO: 167903 - DNA, 251 bp, Homo sapiens
ctcttttttttttaagaatacaatgtatcattaatgatagtcaccatggtacaataaatatctgtaatttattcctcctatctaactgaaattatgtatcctttaaccgacatcttcctaacacctycaatcagttcaatccaccattctgttctctcctatgagatcagcttttttagattctgagtatgagtgagatcatgcaatatttgtctttctgtgcctggattatttcacttaatacaatgtcc

SEQ ID NO: 167904 - DNA, 573 bp, Homo sapiens
ttgccttgtttgaacatggtttgaacagttgattgactgaagctaggctgctgtgattggctgatactttactatttgttacaaaggcaaattcctaatttaagctttcaaattgtttaagtactaagttaggttttactttgttacttaggactcatatcgaggtttctaaagcccacatctgatacgatttaacattacctatgtgaagaattactaagcagaaacattttgaaagcctcatgacctgaatcgtattaaatacttaacaattgaatttgtctcaataataattatgtttaaaattatgaatgctggtttgtaaaaaaaaaagccacaaattttaaaattctgatataatctaatatctggtattcagctttgtattatcattttaaaatttaatgaacatctctggactctaaatatttttctttttaaagttatataaaacattctctttatattcattataactattaaactatttgcctacttatttatattgaaagtccttaatatttttacaataayttaataggtttcacaatcatcattacttattatagttta

SEQ ID NO: 167905 - DNA, 569 bp, Homo sapiens
tttgttcattccttttcattcttttttctctaatcttggctgcctgctttatttcggcaagatagtcttcaagctctgatatcctttttttccacttggtctattcagttattgatactcgtggttgcattgtgaagttctcatgttatgttttttcagctccatcaggtcatttctgtcctctctgagctggtgattttggttaacagctcctgtaatattttatcatggttcttagcttctttgcaatggattaggacatacttctttagctcagtgaagtttgttattacccatcttctgaagcctacttctgtcaattcatccatctcagcctcagctcagttcagggcccttactggagatatgttatgatcatttgaaggagaagaggcactctggctttttgagttttcaatgtttttgcattgattctttctcmtctgcatgggtttatttacctttgatctttgaggctgctgacctttggatgaggtttttatgggttctttttaattgatattgttgtcctggctttctgtttgtttttcttttagcagtcaggacct

SEQ ID NO: 167906 - DNA, 663 bp, Homo sapiens
gagttcgagaccagcctgggccataaaccaagaccttatcgctacaaaatagaaaaaaaaaaaattagccggaaatggtggtgtgtgaatgtagtccaagctacttggggctgaggtgggaggattgcttgaaccgaagagtttgagcctgcagtgagccattatcacaccactgcactccagcctaggtgacagagccagatcctgtctcaaaaccagaaaacaacaaaacaaacagacaaaaaacagactctttctagtcatgactttattccagtgcttaccacctggtccttgccctcagagttcacaataaagggattctggtctgggaagaaagcaactttaaagaatttctatcatcattctcataataccaataaactccaaaaaagagcctaaagattttcaaatgaccttccttagaagttctagatcctagttgattacctgagcaaccatttgcctatgtgtatttcaatttaaattgtcataaacagctactcaaggaattgattaatctgaattcaraaataacttttatttagtgaaagtcaaagcacattattgtgttttaaaaagtcaaatgttgccaactcatgacttagttaagcctggaatatgaatgtgcaattgaagcagacattggctgtatgcacaatg

SEQ ID NO: 167907 - DNA, 552 bp, Homo sapiens
agaaattgacctaagcccttctcattcacagactcaacctcgtcacccccagctatccttcccttgtactccaatcccacttgcctactacatatactctgttagcccctccagtccatgttcccccctccaccttcatccactgagttctaacacaaatatttactatggtagcaggttgtttctttctgcaactatgtacagttgaaaaatctctcagtacaacttcatgctttttatcagttctgctaagatttaaccacaatcttcccgctctatagcccagctctaaataagccaagcaaaccttgtcatcatttctcttgagcctttgaggtcctggctggcctgtgatcaaggttcttcaacaactggtgtaaagctttggacctcagactctcaccttccaatcttcaaattgtttcagtgtctcatctttccatccamaatgttttcctccattcctgccatccttcctattcttcttaagtccttcttgccctagggtgaagtcattcatctccatcttcgatcagatggtgattcctaggt

SEQ ID NO: 167908 - DNA, 552 bp, Homo sapiens
agaaattgacctaagcccttctcattcacagactcaacctcgtcacccccagctatccttcccttgtactccaatcccacttgcctactacatatactctgttagcccctccagtccatgttcccccctccaccttcatccactgagttctaacacaaatatttactatggtagcaggttgtttctttctgcaactatgtacagttgaaaaatctctcagtacaacttcatgctttttatcagttctgctaagatttaaccacaatcttcccgctctatagcccagctctaaataagccaagcaaaccttgtcatcatttctcttgagcctttgaggtcctggctggcctgtgatcaaggttcttcaacaactggtgtaaagctttggacctcagactctcaccttccaatcttcaaattgtttcagtgtctcatctttccatccaamatgttttcctccattcctgccatccttcctattcttcttaagtccttcttgccctagggtgaagtcattcatctccatcttcgatcagatggtgattcctaggt

SEQ ID NO: 167909 - DNA, 594 bp, Homo sapiens
aagcttaggtatgaaagtcaacatctctcctattgtctgggtccaggtatgaaagtcattgctgtgcctcttagttgggttttatgagtcaccctcccacctgtggttggatccacacatgacattaaaaattccaactgtggactgcatctgtaagtgagtttcaggacttcacaagtgggttctgtccatrtatgtgggggacaattcttactgtttgctgggtgtgcatttgagagtcacaatctcaaattttgctgagttatgtaatgacactttttgtacaacctgagggcattatacaatattagtgagtgtagtaatcctctgtgacatttatacaagtagaaaacccaaaaccttacctgttgccctaagcctaagtacaagcatcaacatatcttctattggctgggtttattgtgcaagtgaattgggttcagaaatttgccaccatccaaccggcggaataggttcatgtgtgaggttcaggacctcaccagtaagctcagtctacatgtgagggtggcaattcaaactgttggctaggtgtgtataggagagtcacaatctcacctgtgtgctcagtcttgt

SEQ ID NO: 167910 - DNA, 282 bp, Homo sapiens
cccatgtgggtaaggttcatgaagaagagaggagtcacataacctaggaattgggactagttaaatgtcacaatcaccccagtggggggacccaggtatgagatgaaagtcacattatgaagatgctgagtcaagtgacatgtcacaatccccactrtggacaggtctcagagacaaaaggagaggcacagcatctagtttatggacccagggacatgtcacaatgtcccctgtggatagggaccaggcagaaaattacatcatctgtgtgctgaacccagt

SEQ ID NO: 167911 - DNA, 526 bp, Homo sapiens
gaattcataatcagcttaattgacgtatatttcacatagtaaatttcatcaatgtaaagtgaattgtattgtgaattttgagagacaaatgtacaaatccatataactaccatggcattcaagatacagaatatttccatcaccctaaaaagtaacctcataccctcttgcagtagatcccctccatatacccatttcaacactaataactattgattgttaatttttcctttattcaaattttatataagtgggattatatggtacatgaatttctttttgtttgtttttgccttcttttacttagcataatgcttttgttgtgagtaagcacagttgtttgttttgtaggtttatgccacaatttgtttatccttttatttgtwgataggcatttgggtttagagcttatggtcattatgaaaaagtctttgttaacattcatgtatacatctttgactcgacatatattttcatttatgttggtgtgtaccttggagtgagattgctgggttgtgtggtaagt

SEQ ID NO: 167912 - DNA, 552 bp, Homo sapiens
tctaaatcagacctccagtaaaataaaatgaatgttattttctatggaagattgaagtcttctatttatttgccaaaatttaaaatttgatsggggcggctcctattttaaaatgtgtgtttagagaggtggggaaagggaaacaactgattgtttaggtctatactggtcatttttcctattgctaaaatattttctctattttatattactgaagaatggtttataacttttttgatttttataatagcagtgactgatcccctgggtgtatgtgactaagctaatttctgagtagtattatgtgcagaacctaaaatgtactataatttgaatgataagattattattttaaaaattagtggtaggtagtaggtaggttgttttcatgttaaaaacgtgataagatgatgttttccatattagtgaatccaagaggttaatgagtgaagccacctggtttttatcaaagtatgttaagtattatcccatttaaaccacttagcatagttcaaggacttgccagatctatagttcaggcagaccatacat

SEQ ID NO: 167913 - DNA, 472 bp, Homo sapiens
tttcctacctttataaaactaaatgctggtaaaaaccccttttttttttttttttttttttttttttttttttttgtgacggagtctctctctgtcacccaggctgatgagctggagtacactggcgcaatctccactcattgaaacctctgcctcccgggttcaagcaattctcctgcctcagcctcatgagtagctgggactacaggcatgtgctgccacgtccagctaatttttgtatttctagtagaggcggagtttcaccacgttggctagactggtcttgaactcctgccctcaggtgatctgcccgtctcagcctcccaaagtgytgagattacaggagtgagtcaccatgcctggctgctaataactttttatatatttatccaaatttcctgattattattatttaagacataaaataaaactatatgtaattttctaccatcttttttttagttaacaatct

SEQ ID NO: 167914 - DNA, 579 bp, Homo sapiens
aaatgccttcactagaagccaaaggaagcagtaaatatacatgcaagtccctggaagctcagacatcggcatatgccatgggaaatggggtggtaatatatactgcatatatactacaccaccttaagtttttgtttcttggcaaagcaaagcaaaaatgtaaggggaactaacgattattcatggcaggacagcccaggggtcaaaggctgtggcacagatcgattgtcaagtggaagagttgtagccagactattctcttggtctgcctgatccagctttgtgttcagctccctggtctcacctggtatggagcttcccttgacatccttcagaagcttggatctagccacccagcagattctaggagttctttaatagccttctaacccatcattattttgctcaaggtccccagaggtagtttttattgttcataaaccacaaacttttatacctgtcacaactttttttwaaaaaaatttaattacacagactttcattacaaaaggagtaactttattgtctgtggaatatttgcataacacataggagcacaaagacaggaattaataatca

SEQ ID NO: 167915 - DNA, 529 bp, Homo sapiens
actttgttccatataaaacattaattcttaagagttaacaaattttgtgttttaggctatccaacaacgtaggctttagttctgtccaaggcccaattctcgtcaaccttaaattcaatatgagtcaagattacraaacaaccatcttcaaagctaatctcattaggcaggtttgtggggatgtgtgggtgggcagcaaggggtgttaacggaaatttattctcaagaacaaaattggttttcctttttttttttttgaaatttttttattatactttaagttctagggtacatgtgcacaacgtgcaggtttgttacatatgtatacttgtgccatgttggtgtgctgcacccattaactcgtcatttacattaggtacacctcctaatgctatccctctccactcccctcaccccaccacaggccccagtgtgtgatgttccccttcttgtgtccaagtgctctcattgttccttttgctgtgatgttcagactaaaactgggtcctacagtcaactttgggtatgg

SEQ ID NO: 167916 - DNA, 574 bp, Homo sapiens
gattattttccttgagtttctgaaaactggcaagatgagaaaaacacacaaaaaaataaagtaagattttaatagcttggtgtgattttctattattttgacctttaggcaaaaccaaaatttgcatactttcagtgtgatcacacggctgctrgctgatcaatttcagatacttcagaccctagaaaatgtttggagaaaaacttttctctatatacctgagaggtaattaaattactcattaccttcaaagtataaagcagagaaacagatcaatgctttgtacaaacagtcatcttgatcattttgcttctattaagtcctaagaacttgtggttttgatgatgcttttttggttgtaaagcataggcaaactcacatttttatttcatttgacaaaataaaaggtagcttcatgacagtaataactgggaggcagatcagagtgtttgacctaacggcacttggcattttatattttggtttcagacagctcatcttcggatactttcatcagtacataagagaagaatttagtgttgaatgctctaataagtatgcaacttctggaaag

SEQ ID NO: 167917 - DNA, 574 bp, Homo sapiens
gattattttccttgagtttctgaaaactggcaagatgagaaaaacacacaaaaaaataaagtaagattttaatagcttggtgtgattttctattattttgacctttaggcaaaaccaaaatttgcatactttcagtgtgatcacacggctgctggctgatcaatttcagatacttcagaccctagaaaatgtttggagaaaaacttttctctatatacctgagaggtaattaaattactcattaccttcaaagtataaagcagagaaacagatcaatgctttgtacaaacagtcatcttgatcattttgcttctattaagtcctaagaacttgtggttttgatgatgcttttttggttgtaaagcataggcaaactcacatttttatttcatttgacaaaataaaaggtagcttcatgacagtaataactgggaggcagatcagagtgtttgacctaacggcacttggcattttatattttggtttcagacagctcatcttcgkatactttcatcagtacataagagaagaatttagtgttgaatgctctaataagtatgcaacttctggaaag

SEQ ID NO: 167918 - DNA, 564 bp, Homo sapiens
ggtgctcattgaatacttactaaaaaattcaaattttatatttttacacgttaatagtgtctctcttcaatgtatctaagctttccattagctttccaatggataaatcacatgtaacttaatatagaagtatcataaggctaagtcatatgcagatcatgaccaatttaaaatctcacaaatatttataggaaaacattgtctataaaaatataaattcaaattcaatacacactagtgtttccagtttgttttttaaattgtaacatttcactataaaaacaaaaattagtaaatttggtttatgactaaattttggttaccggggattctaataactgttatgatatatagctgtttaaattattatttttcttactgaatacagtagttacttggttccattaatgagacagatcaagttttctgtaatacagattcaactgtgattctttaataataygtgattttttaatagaaaaaaaataatggggtaagagaattgtcctctagcttaaaaggtacaaaaatttctttttataaaatatggtcaaaaactataag

SEQ ID NO: 167919 - DNA, 440 bp, Homo sapiens
tatgtaagtgatgtgtcttcccccaccccccttcccagctgcttttaaggttgttttyaattactgatttttagcagtttgattatgatgtgcctcggtgtgactttttgttcgtttggtttttttttttttatcttgctgttttttttagcttccaaaaaaggatatgggattttatgaaattgatttaaaaatgtaaccattatttttcaaatgagttttctgaccatcccctttctttttctgggacttcagttaaatgtatattagcatacttagtattgtctcatgttactgtgattttgattattttttcaaccttttttctttgtgcttcagtttggatgagttccattactatgtctccaagttcactgttcattgttatgtcttcaagttcttttgcagtgtctactctgctattaataccatccactgat

SEQ ID NO: 167920 - DNA, 596 bp, Homo sapiens
aaagtatcaactccctactcagacttctctgacaccaacccagtggtgggattggggcctctctttatatcctgttaagaatgaaaatctaggttccctacttggcctttgtttgtgtgagtagaagtggtcacacggttttctccagtgtttgagtaagtagtgcaattattgtctaagaggtttttatctcactgtgcggccccttttctagaccctatctatagaaagaaagcttttgatgaagatatattttttttgtctgcatccattggcatttgtagctttctagcttcttcrgtttccagtctggaatatatgatgccaaaaaaaaactcaaggaactcaccattgtccaattccttggatcctgaggtccctagccagtctgtcttcttcttttcagctttcagttttcttatgtttgcttcatagattatgtcctgggatttagttgtacttcatctaattttattttatttttcccctctattcacatggaattcaacacaaaatataaaaaaatatatctaacataatgtaagcatgtatatagaaaaccctcaataatctgcaaaaagttactagaactaata

SEQ ID NO: 167921 - DNA, 591 bp, Homo sapiens
taataaactgaccaatcaattacctggggtacttaaaataagtatcatcattttggtgaaggcttaggtttaatttaaggactkatcatcagtgaaaccaaggaaataaaaatataatttaactattaactccaagaaaaagttttgatttgtgcaacacagaaaaagtaattttaattttatacatggttcagatatgaacaataattgtatggccatgtaaaattggctatttacttaaaactgttcagaactatgcatcataggagaatgcaaatagaataaatgtaggataggtgggacaggttgtaaaagagctaaaatgttatcttcagtagtaaagtcaaaaaataatgtctaaagtgaagaaaaagatagaaaagcaatataagcatgttattagaagtaagaagctgaatataaaatagagaataaaactgcaaaataaattaaaatttaggtgaggagttaatctggggaataaattgagggtaacagtagcctgagagtggtattgaagaccaaagggacatgaagcatgagcttctgctttaaaatattcgttcaaaatatttacttttagatgcaata

SEQ ID NO: 167922 - DNA, 591 bp, Homo sapiens
taataaactgaccaatcaattacctggggtacttaaaataagtatcatcattttggtgaaggcttaggtttaatttaaggacttatcatcagtgaaaccaaggaaataaaaatataatttaactattaactccaagaaaaagttttgatttgtgcaacacagaaaaagtaattttaattttatacatggttcagatatgaacaataattgtatggccatgtaaaattggctatttacttaaaactgttcagaactatgcatcataggagaatgcaaatagaataaatgtaggataggtgggacaggttgtaaaagagctaaaatgttatcttcagtagtaaagtcaaaaaataaygtctaaagtgaagaaaaagatagaaaagcaatataagcatgttattagaagtaagaagctgaatataaaatagagaataaaactgcaaaataaattaaaatttaggtgaggagttaatctggggaataaattgagggtaacagtagcctgagagtggtattgaagaccaaagggacatgaagcatgagcttctgctttaaaatattcgttcaaaatatttacttttagatgcaata

SEQ ID NO: 167923 - DNA, 582 bp, Homo sapiens
ggctatttacttaaaactgttcagaactatgcatcataggagaatgcaaatagaataaatgtaggataggtgggacaggttgtaaaagagctaaaatgttatcttcagtagtaaagtcaaaaaataatgtctaaagtgaagaaaaagatagaaaagcaatataagcatgttattagaagtaagaagctgaatataaaatagagaataaaactgcaaaatamattaaaatttaggtgaggagttaatctggggaataaattgagggtaacagtagcctgagagtggtattgaagaccaaagggacatgaagcatgagcttctgctttaaaatattcgttcaaaatatttacttttagatgcaataaataggtcttctttgataaaaatgaacatcgcatttagaaaaatggaaagggaatatggtagagacggaggaaggaagatagaaaagagacagagcactacagtaagttgcgttattgtacagataatgactgtaaccttgcaggataaatgaactaaaactagctaaatgttatgcaaatgaatatttattacttgagatgaaaattgaaccgacag

SEQ ID NO: 167924 - DNA, 633 bp, Homo sapiens
tctagtttatttcccaatggttacatcttgcataagtatactactgctatatagaaaccaggtagttgscattggtacaatccacaaaacttttcaggttttatcagtttactgtactcatttgtggtgtgtgtgtgtgtgtgtgtgtgtgtgtgtgtcttctcctgagtttcaaagaggcaaaatttttagtcttctgcttgactttagaatggctcagagtcagattcaataaacattcattaagagtatgtatgagacagtctcatataattaacatgagcttgttgagtggatctgcacattaactctttcaagaggagattatattattcataatacctgtgatgaattaaaaaccttcagagaagtgatattcccaaggtcatctaaataatggtcagaatttaagtctagggcccaccatgctgctcacctattcctgcagcctcggtacagatcgtaacttctgttttcatgtgctttattgctacactttgaatgtttgtcctttccaaaactcatgttgaaatttaattgccatcgtaacagtattaagaggtgggacctttaagaggtgattaggccataagagctccattctcataggcagtgttgataacattataaaag

SEQ ID NO: 167925 - DNA, 633 bp, Homo sapiens
tctagtttatttcccaatggttacatcttgcataagtatactactgctatatagaaaccaggtagttgccattggtacaatccacaaaacttttcaggttttatcagtttactgtactcatttgtggtgtgtgtgtgtgtgtgtgtgtgtgtgtgtgtcttctcctgagtttcaaagrggcaaaatttttagtcttctgcttgactttagaatggctcagagtcagattcaataaacattcattaagagtatgtatgagacagtctcatataattaacatgagcttgttgagtggatctgcacattaactctttcaagaggagattatattattcataatacctgtgatgaattaaaaaccttcagagaagtgatattcccaaggtcatctaaataatggtcagaatttaagtctagggcccaccatgctgctcacctattcctgcagcctcggtacagatcgtaacttctgttttcatgtgctttattgctacactttgaatgtttgtcctttccaaaactcatgttgaaatttaattgccatcgtaacagtattaagaggtgggacctttaagaggtgattaggccataagagctccattctcataggcagtgttgataacattataaaag

SEQ ID NO: 167926 - DNA, 190 bp, Homo sapiens
taattatggatggatttttacttgattctacctggtataatggattttctaggctttatatgtttcttcagtgatttctcagatgggattttatctagtatgaatagtataaattcggacttttcatccatacmctgcataggtttggggttctgaaatttaataggtgattcatttttcattcacaggt

SEQ ID NO: 167927 - DNA, 597 bp, Homo sapiens
actttcttcacttatctacatatggttgtgaatgaaaatctattaaatagagaaaagggtgacttcttaatggcattgctrtcaatgagggtcatcgtcacagctttcaaaatctatgcagcagggatcccctagagcagtggctctcaatggggagaaaattgtctatcccccagggggtgtttggcaatatctgggaatagtttttgttgtcataactggtgtgtatgtgggatgctattggcaaaggatgctgctaaacatcttacaaacccaaggcactctcccacaagaaagaattatctagcccaaatatcaacagtactaagattgaaaaaccctgacctagagggtagtctttagacatcaccctgaaaactgaatgctctgcattccaggcttggatcaactcctaactgattattttaacatggtcaaacaacttaatgcctttgaacaccagcttgcttatatataaaatgcaagaaatggctgttgggaaagaaaattgagccaccaattgtattttaaggccaaaggaaagaggaaaataatgtgtaatattcacagatgttcatttgagttatttataagagc

SEQ ID NO: 167928 - DNA, 575 bp, Homo sapiens
aacaaataaattattctatgttacatgccttatatatatatgaggcattcaataaatactgaataaattcccttttctttgacccaagtcttttctgcttttctgtctcttaaaagccttataaatagttatttatccaactacttattaagtatgttctttctatcaactccagtgccaggcagtggatatcacggaagaatcaggcatggcttttacctaggaggagctcatggtctggtaaggaagaacaatatataaacaaatgctacatcgccattctacagtcaaaggcagtrgtggaaagagtagaaccacacaggtagagtgactagttttgcttagctgtctcaggcaaggctttttagagaaggagcacaaagcaggtcttgaaagatgcgtgagagttaaccacgtttatgtggatttgattgtggattccaaactgaaaaaaacaaaagctgtacattgcattcataactattaccaacaaagtcctttttatagctcatacttcatgatataattctgaatccacatgcactgaaaacaacttcagggcctccctgagctta

SEQ ID NO: 167929 - DNA, 578 bp, Homo sapiens
aatatatggtcaattgattttgacagttatttctctgaagtgtagtttaaaaataatgatctttgcaataaatgctactgactcaattggaaattattattgaaaaatgtaaatctcaattgtttctgaacaagaagcaacaaaaactaattatcagtgaaatacagatctaaatatgaaaatgtagaacattaaagcttctagaagaaaacaaaagaatatacttttatgatcttagggtaagaaacacagatttattaaacartacaaaatcaataacagaaattataaattatataaaaattagtaactcttatataccaaaagagtatttaaagagtggaaagtcaaatcagggggctatgggtaaggaaaaaataaaataaataattaatttaaaaaagaaaaagtcaagttacagagtaggagaatatatttgacatatatatagcaaagaatccatatccagattaaaaaataataataataaactacaaatcaagaagaaagaggcacaatcaaaataggcatttcacaaaagatgtccaaatagccaataagcatatgaaaaggtactc

SEQ ID NO: 167930 - DNA, 588 bp, Homo sapiens
cttcttcaaacacttaaagtatctggagttgggggaggatgggcatttttctctctccacattgcctttccaactggcttgcttagccttctgcattacataatggtctcagggtagttggactttcttacatggcagctggcttcccccagagggagtgtttcaagataagtatgtgttttgttaaaacaggtgttttttgttgttgttttgttttgtttttcttatggctcagtaccagcctatggtcaattaaaaaaaattccaggtgcactagagaagactgtatcatttgcagttgttggatgttaatatggtttggctgtgtccccacccaaatctcatgtcaaattgtgattcccaatattgggggagggacctggtgggaggtgattggatcatgagggtggatttcctccatgctgttctcatgakagtgagtgagttctcatgaaatctggttgtttaaaagcctgtaacacttcccccttcactctctatgtcctgctctgccatcgtaagacgtgcttgcttccctttcaccttccaccatgagtgtaactttcctgaggcctcccagccatgctt

SEQ ID NO: 167931 - DNA, 548 bp, Homo sapiens
agatcttgcgagggatctggagaaataggatagggcagtgattaaaaaggcctatcaggaccaggctaacaggagttagccagggaacaygagacaaataaataacttggaatctggcttcattggaagcttgctgcataatcactgtagctgctctctcatcttggccctttaggcccagaaagtaacagccctgatattattagctcttgagtcttgcacagaccctcactgtttccctacacacttgccacacctttgaaaatagtccttctatgaaatgacctgttaaatcaatttgcctaatatgaatgcaccatctgcctgctgctgggactactgatgcagaagccattctgttgatggctccagggggaccctctggaactctggctctcagtaaccagctctggagataaaagacagggactgagatttaaatggtggaccctttatatcacataaaactaaagatatagattgtgacttcactgacatacttcagagatccctggtagaaatttggtaatacatggcagcctaactca

SEQ ID NO: 167932 - DNA, 489 bp, Homo sapiens
caatttagaaagtttattttggcaaggttaaggatgtgcccctgacacagcctcaggaagtcctgagacatgtgcccaaggtggtcgggggtacagtttgcttttatatattttagagagacatgagacatcaatcaatatgtgtaagatgtacattggttcagtccagtaaggtgagacaaytggaagtgggggcttccaggttagaagtataatagacaagagacaaaaggttgcattcttttgaggccatgatcagccttccactcaatagacagtttagtctggcccagtgaatctgcattttttgcataaacgatggagaagagaaagcaatcagatatgcatttgtctcaggtgagcctcagagggatgaatttgaatagaatggcaggcaggtttgccctaagctggtcccttcttgatgtttccctttagcttggtgattttgaagtctcaagatttattttcctttcacagccatctaac

SEQ ID NO: 167933 - DNA, 560 bp, Homo sapiens
  misc_feature (1)...(560): n = A,T,C or G
gactttacagtctattggaggagayatgacatatgcacatataattataatgcacgaaacagtgatatgcctgattaaggaactaacccatttatgcctgaggttgcaattttttgaatttttgcaatcagaccttggcaatgaccttgagcagtgggatataaataactcccacatgcttagtgtttcaataatggaacactaggaataaatgtgtttaaaaaccaatgtgagataagacctgtgttttcagaacattaatctgacatgagagtgtggaatgtattggagtgggtcaaggtgggagctaaggagccatctgcagtggatttcatgagatgtaaggaccacttgaatttggagaaactcagaaggtaatataaaggctctgccttcagagacttcaagaagagcaggcatggctgaagagtatgcaaaaggccccaaagataagccttttctatttcaatattttgcctgtaatcattatttatttaagtattgctagatctcttccttcattatcttctgaccctgtgatgccagaaggagaaagaatn

SEQ ID NO: 167934 - DNA, 605 bp, Homo sapiens
ggactacaggcatgcaccactaacttggctaattttttgtagagaaatgttctcactatagtgccctgtctggtgtctaactcctggacttaagcaatcctccctcctcagcctcccaatgtgctgggattacaggcatgagccactgtgtccagcgagcataatgtttttgagattcatccatgatgttgcctgtatcagtagttcattcttactgttgtcaggtatgctactgtgtggatgtaccacaatttgctcatccattcaatagttattgggcatatggtgttcacacttccaactttctctagttcctttcctgatatctacctctgccacaaaaagctacataggcttaatcttttcctttgtatctgtagaaatgattctcactgttaataattatttgtctatgaatgtgtttccattaatagactgaratccttgagagtagaaactgggtttattcatccactttccccaatgcctactgcatagttagggctcaataaagttggctgactagaacaaatataccctttaaagctgacctccagtttagcctaaaacaagatgaaagattaaaattagagccattgcttcct

SEQ ID NO: 167935 - DNA, 605 bp, Homo sapiens
ggactacaggcatgcaccactaacttggctaattttttgtagagaaatgttctcactatagtgccctgtctggtgtctaactcctggacttaagcaatcctccctcctcagcctcccaatgtgctgggattacaggcatgagccactgtgtccagcgagcataatgtttttgagattcatccatgatgttgcctgtatcagtagttcattcttactgttgtcaggtatgctactgtgtggatgtaccacaatttgctcatccattcaatagttattgggcatatggtgttcacacttccaactttctctagttcctttcctgatatctacctctgccacaaaaagctacataggcttaatcttttcctttgtatctgtagaaatgattctcactgttaataattatttgtctatgaatgtgtttccattaatagactgaaatccttgagagtagaaactgggtttattcatccactttccccaatgcctactgcatagttagggctcaataaagttggctgactagaacaaatataccctttaaagctgacctccagtttagcctaaarcaagatgaaagattaaaattagagccattgcttcct

SEQ ID NO: 167936 - DNA, 551 bp, Homo sapiens
gttatctcaacttcctttagtgattattattaaaacagattgacccagttgtcagaatgttgaattgtgactctccttgagctacaaatatggatatcctttaatacatgtatcttttattatcaaatatagtaattgcaactcttttccaatattgctagatctgacaatgagaacagttatggtattttaagtaagattgtcacagaaaacactgaaggaagaatttcayagaacaacacaacttagaagagcagccagatatataactggggctgactgggaaggggatcatattgacagcataatcaaagggaagactatcatttaacctgttcagaaacatggatccaggctgttagcagcataaacaaatgaaaataaaaggaatgtatactagaaccacaaaaattaagcaaccaagcaaacaaacaaataaaattctactaatttatagttttcaatattttttaaaatctttgaacccataaaacctgtaccaaaattctttgccttaccttggcattcaagttctactgacccattgtatt

SEQ ID NO: 167937 - DNA, 551 bp, Homo sapiens
gttatctcaacttcctttagtgattattattaaaacagattgacccagttgtcagaatgttgaattgtgactctccttgagctacaaatatggatatcctttaatacatgtatcttttattatcaaatatagtaattgcaactcttttccaatattgctagatctgacaatgagaacagttatggtattttaagtaagattgtcacagaaaacactgaaggaagaatttcatrgaacaacacaacttagaagagcagccagatatataactggggctgactgggaaggggatcatattgacagcataatcaaagggaagactatcatttaacctgttcagaaacatggatccaggctgttagcagcataaacaaatgaaaataaaaggaatgtatactagaaccacaaaaattaagcaaccaagcaaacaaacaaataaaattctactaatttatagttttcaatattttttaaaatctttgaacccataaaacctgtaccaaaattctttgccttaccttggcattcaagttctactgacccattgtatt

SEQ ID NO: 167938 - DNA, 575 bp, Homo sapiens
tacagtctacacaatggtagtataggattaaggcaaacattcccattccaaacgggagaaataggcaaaaagaaaagaataacaggccccaagcaaatccaaaacccagcaggacagacattgtatcttagagctggagaataatctcttttgagttcacacactgcctcctggacacgctggagcaggagttgggccctcaaggcctcaggaagctgcactcctatggctttgctgggtgcagccgctgctcctttggattggagtccagtgcctgaagctttcctaagtagatgttgcatactgctggtgacttcacagttctgaggtcatggtggcagtcttggtcccagagctccactaggctttatcctagtgaggactctctgcagtgrccatggctccactaggcattgccctggtggggactctctgcggtgcctcaaccccacatttcagctgcgcgttgcctactggggtctctctgtggtggttccagcccctgtaacaagtctctgcttaggtccccaggatttccataacattctctgaaatctgggtagaggctgccaaac

SEQ ID NO: 167939 - DNA, 575 bp, Homo sapiens
tacagtctacacaatggtagtataggattaaggcaaacattcccattccaaacgggagaaataggcaaaaagaaaagaataacaggccccaagcaaatccaaaacccagcaggacagacattgtatcttagagctggagaataatctcttttgagttcacacactgcctcctggacacgctggagcaggagttgggccctcaaggcctcaggaagctgcactcctatggctttgctgggtgcagccgctgctcctttggattggagtccagtgcctgaagctttcctaagtagatgttgcatactgctggtgacttcacagttctgaggtcatggtggcagtcttggtcccagagctccactaggctttatcctagtgaggactctctgcagtgaccatggctccactaggcattgccctggtggggactctctgcrgtgcctcaaccccacatttcagctgcgcgttgcctactggggtctctctgtggtggttccagcccctgtaacaagtctctgcttaggtccccaggatttccataacattctctgaaatctgggtagaggctgccaaac

SEQ ID NO: 167940 - DNA, 575 bp, Homo sapiens
tacagtctacacaatggtagtataggattaaggcaaacattcccattccaaacgggagaaataggcaaaaagaaaagaataacaggccccaagcaaatccaaaacccagcaggacagacattgtatcttagagctggagaataatctcttttgagttcacacactgcctcctggacacgctggagcaggagttgggccctcaaggcctcaggaagctgcactcctatggctttgctgggtgcagccgctgctcctttggattggagtccagtgcctgaagctttcctaagtagatgttgcatactgctggtgacttcacagttctgaggtcatggtggcagtcttggtcccagagctccactaggctttatcctagtgaggactctctgcagtgaccatggctccactaggcattgccctggtggggactctctgcggtgcctcaaccccacatttcagctgcgcgttgcctactggggtctctctgtggtggttccagccyctgtaacaagtctctgcttaggtccccaggatttccataacattctctgaaatctgggtagaggctgccaaac

SEQ ID NO: 167941 - DNA, 439 bp, Homo sapiens
cactttccttattgggaatgtgagctactcagcctcccacagaatctcaatctattgcaaaacaaaatctgaaaccatttctggggtggcttttgaatgggatgatatttcatttctggtgtgatgtgaaggccttggtataatggtacaggatcagatggtcttactgtattgtattatttaatgggtgccacttgataagacaaccaagcagacaaaacagcctgtgtgtggagaayaggaagaagtgtggaagctttaaagagtggaaaggcttatctttttgttttcctataggttatgatgtagcattcattcactagcttttaaaagtgacttttaaataattactttatgtatccatcagtactcttttatttgtaagagtgaaaaaaaatcaactttaattagcttaagccgaaagggaattcattggccc

SEQ ID NO: 167942 - DNA, 499 bp, Homo sapiens
gaatgaatgagtgaatattaattttatcttgtgattaagtgagaatgaatgagtgaatattaattttrtcttgtacttattgtagtaacttctatataaaattttaaagaggacaacatttctgtctcaacaccgtcttgcctttcgcaacctttcagacaaacatctcaggcttccatattttccctattgtctgctctaacgtaacatgatttccaggaaagataataaattgctcactgtaaggtaaaaggttgcaaagtttatgcctttccaaagagatttgctttaacacaggaccaaaatttcaatttccaattctggaaatgcaaaatcagtaagaaatcttggagaaggacaattttctggtatcctttaaattatacccctacaaacattgtgttcaaataacaactcactcatggttcataaaatcattttcatggattaatatcagtttattttttaatagaatggaaggaaacaaatatcaatgtac

SEQ ID NO: 167943 - DNA, 460 bp, Homo sapiens
atggcctggtgtgggctaaatgaagtgtcacatttaagggtcatttcctcaacaaacatttgaatgtgtttgtgacaagggattgctgggggctggggaagggggtggctacaatgatagctatgacttcttcttatgtccccrttctaatatagctaaatttatcctatcctcatttatcattttgacaatcagaaaggtcagaatgccgaccagatcgagaaagactacctagactatctgaaggctagatcctgtaatttcccaggcagtgtcttctcagaatagtattccatttctttttattattagaagacaaacaaaaatctgactatcttattcactgacctagtaaacatgaacaaccccaaattttccattaactgacattagggactcaaacattccatcaggagattacagtccactggatatggcaaattatcaaatataactatag

SEQ ID NO: 167944 - DNA, 460 bp, Homo sapiens
atggcctggtgtgggctaaatgaagtgtcacatttaagggtcatttcctcaacaaacatttgaatgtgtttgtgacaagggattgctgggggctggggaagggggtggctacaatgatagctatgacttcttcttatgtccccgtwctaatatagctaaatttatcctatcctcatttatcattttgacaatcagaaaggtcagaatgccgaccagatcgagaaagactacctagactatctgaaggctagatcctgtaatttcccaggcagtgtcttctcagaatagtattccatttctttttattattagaagacaaacaaaaatctgactatcttattcactgacctagtaaacatgaacaaccccaaattttccattaactgacattagggactcaaacattccatcaggagattacagtccactggatatggcaaattatcaaatataactatag

SEQ ID NO: 167945 - DNA, 460 bp, Homo sapiens
atggcctggtgtgggctaaatgaagtgtcacatttaagggtcatttcctcaacaaacatttgaatgtgtttgtgacaagggattgctgggggctggggaagggggtggctacaatgatagctatgacttcttcttatgtccccgttctaatatagctaaatttatcctatcctcatttatcattttgacaatcagaaaggtcagaatgccgaccagatcgagaaagactacctagactatctgaaggctagatccygtaatttcccaggcagtgtcttctcagaatagtattccatttctttttattattagaagacaaacaaaaatctgactatcttattcactgacctagtaaacatgaacaaccccaaattttccattaactgacattagggactcaaacattccatcaggagattacagtccactggatatggcaaattatcaaatataactatag

SEQ ID NO: 167946 - DNA, 463 bp, Homo sapiens
tacctcaaatgccgagtaatattcaccccaatccatagctggctgacacctattttcggtgatttctgtggtactgattggtgaagatccccttagcttgaaggaaattgaagaagcgactacatagcccataacatcccttttgaattccagcttgcaatttaaataacctggtccttcctagaagcataaacyttcaggattgctcaagtagaaatactgacttttattttgcctcttggtcagacagatctacaccctttgttaaggtatgctcccagaaacgcatgttcttgggctaaacatttacctcatgggagcctaaggagtttctgaatgtctccagaacagtagtttactgtaatggagaagcagtccagcctcattccctccacatctacacatggctttgataccgtaccctctttatttggtctaaaaatatttttaaagaaaaaaagtc

SEQ ID NO: 167947 - DNA, 625 bp, Homo sapiens
ttctaaaacattgcagtgtgcctgacatctttactgcaagtggcactgttctcaacaagttatctcgaagaaaatggcagtgttcatcaatacaaaaattgttatatccagcaggtgggattctacatagccaatctaataagagaactctttgtaaaactaggttaaaaattcagartgtcttgatcattaccagtaatctcaaaggtgaaaatcagaaaaagtacagaaaatagaagtactcattaataatatgagttgccttgagaaagccagaatgattctattccgaaaaataagcaataatgataaaagatgtgattaacatatggtgtcttttaagccaaagcatatttttcacctcaaagaggatggttttgactattacattcttaattacctttgtccagaagaggatcccgttttaaaccattatttgaatagagtttattgactgaagtcatttttatctgcaggatattttcatttcagtacataagatgcaaaatgggaaatgactaagtcagttataaaatctttgtaggataataaatgctaatttacaataacttccaacaaacaccaacaagtgtttatacccaagtctaaaagttactgcagtact

SEQ ID NO: 167948 - DNA, 569 bp, Homo sapiens
ttggaagatttcctggctttttttttctattatcaactgggctgccacatatgtctttatgcctgtttcatgataaatacgtgcaagaggccaggctatgcaaagtgccagctttacaagatcatgagcagctgttttgctacgtggtattgccagtttagactcacacaagtggtaaagaagcatccccagtgtcctaaatccttgccaacacttagtgtcaccaggcttcttaatttttaccaatctggccagtggataatagcattgaaaagttatttttattgtgatttggagtccaatattttttctgtaagaaatgcatgtacaatgttataagaacatgcaaaaatcaaaatactttataaatgttcactttataaaaaatgaatgagaaaaacataaygcattttacataaagaaaatctgtaatgcttttgttattggctgggtattttcacaccttccaagtggtggctgttgataaattcagcaataatacctttatgtttattaatattaaatgataatgtcgaattaattaaatgaagttcaatttattgatagtt

SEQ ID NO: 167949 - DNA, 557 bp, Homo sapiens
tgctgttaacacagttgcttatcaggagtcaagtaaactaaaaaggagaaaagtttgcttagttccctatttaatattcaaagatctgactgcatccttttaggactctttgccaacttccactatgcccagtaaattcatatgacttcatattctttgccctatacttccccaggaattgttaaaaaaawttttttttaagatggagtctcgctctgttgcccaggctaaagtgcagtggcatgatctcggctcactgcaacctccacctccagcttcaagtgattctcctgcctcagccgcctgagtagctgggattacaggtgcatgccaccacgcctggctaatttttgtatttttagtagagatggagtttcaccatgtagttcaggctggtcttgaactcctgacctcatgatctacccgcctaagcctcccaaagtgctgggattacaggcgggagccaacgtgcctgactttttttttttttttttttttaaattcctgggcactttccacttaactagtgtctcatgctcccaggatatgggaggtgt

SEQ ID NO: 167950 - DNA, 557 bp, Homo sapiens
tgctgttaacacagttgcttatcaggagtcaagtaaactaaaaaggagaaaagtttgcttagttccctatttaatattcaaagatctgactgcatccttttaggactctttgccaacttccactatgcccagtaaattcatatgacttcatattctttgccctatacttccccaggaattgttaaaaaaatttttttttaagatggagtctcgctctgttgcccaggctaaagtgcagtggcatgatctcggctcactgcaacctccacctccagcttcaagtgattctcctgcctcagcckcctgagtagctgggattacaggtgcatgccaccacgcctggctaatttttgtatttttagtagagatggagtttcaccatgtagttcaggctggtcttgaactcctgacctcatgatctacccgcctaagcctcccaaagtgctgggattacaggcgggagccaacgtgcctgactttttttttttttttttttttaaattcctgggcactttccacttaactagtgtctcatgctcccaggatatgggaggtgt

SEQ ID NO: 167951 - DNA, 538 bp, Homo sapiens
gaattcaatcctgagatggagattgacaaacaagaagttgactggggagccctcgtggcagaatagcccgtaagggagtaggggagggaggttctgtcagaaggaggaattgaatggagatgtagttgccccagagtccttatccaggcccacacaggacttcggagcttcatggcacaaatgagcaagggggccaggccttgaccatctctctcttggagaggggatgraggaggtgcacttgcatgtgctatagtccacctgccgggctgttgggatccacttgcttcatttaaactcatggggaagagttcctccagggagtggaatgaatccctagctgcagcagctggtctctgggctgcactgctcctcctcatgtcctttctctcctaccaatactagattccccacatcctctgttagcatctctgtttgtctagatggataacgaggtaaagtgatccagatctccatctgaacaccatgcctgtctcaggctgtggcacttctccatactccatcacagttgggcagg

SEQ ID NO: 167952 - DNA, 521 bp, Homo sapiens
agctgggctcactttctttatgtgacttcttttagtgcatatttgcactttcctggagtgatgcctgtcttccccattgaattgtaagctccttgagagcaaggaccaaatatctttaggctcaccatttccttctcagcatgaagcttagtgtctgacatcttgtatgcattgaacaaatatttgttgagagaatgaatgaataaagtgataacactttygcatgcttgcagtctcagtttaaatgctaataatggaaagtactcaggtgaatttattccaggcagaggcaatagcagaggctctagataagaaataatttaatagaatcaagaagccgaaagaccaggaggaaccgaagtgtggtggtccacaaggagaaatgggcttacagaggaagcagggcgccagtcatctagggcttcttggtcatggggaggaatttacattttgttcgaagtgcaatgggaagggaccaggggacttaaagcagggtcataatgccatgtatttaagatcat

SEQ ID NO: 167953 - DNA, 561 bp, Homo sapiens
gggaaatacacaatacattattattaattatggtcaacatgctgtgcagtacatctcaaaaacttatttctatgtctaatcgaaaatttgtaaatttgtattctttaattaacatttttttcattccttcattcccacccccatgcctttgatgaccaccattctactctgtatttctataaatgtgactttaggtccaggggtacatgtgcagctttgtcatataggtaaactgtacatcgcaggggtttggtgtatggataattttgtcggctgggtaataggtatagtactcaataggtgttttttctgattctctcccttctcctacgcttcaccctcaagtaggcccactgtctgttgttctcctcctagtaackatgtgttctcattgtttagctccatttataagtgagaacatgcagtatttgtttttctgtccctatgttagtttgcttgggataatggtctcccacaaatgcagcaccgtccttgttgctgcaaaggacatgagctcattctttttttatggctgcatattattccatggtgtgtatgtac

SEQ ID NO: 167954 - DNA, 550 bp, Homo sapiens
ttcttaaaagccatgtaatttcaatgtacttaacacatagaaaatgttctaagatggagatagatgggagttaaggagaaatgcaatatatggtttatgtcttgagaaactttggcttgctaggtcacaaggtacacasaaccaggtataaaatggctaaaacctaaatattaatgtgaacatttaatacatatcatacaaataaatactagcatttcttcattactacttcattcattcaacaagcctttaccttgtgtttactgcttacaggcactatggaaggcagtggcagtggacagccacgatatggccttgtgaggggttcagttgagtgacgacatgatggtgaatactcaataaatatgtgctgaatttataagctcaaaatagcatgtgctggagatacccacagcatgtaaagaggaatagaagagtgtcactactcctgactggaagtcctggtgttagaggaaggggtatagatttgtggactaacagaaaagcaagtctcactgctgctggagttgagtcttgaagaaacaaaagc

SEQ ID NO: 167955 - DNA, 550 bp, Homo sapiens
ttcttaaaagccatgtaatttcaatgtacttaacacatagaaaatgttctaagatggagatagatgggagttaaggagaaatgcaatatatggtttatgtcttgagaaactttggcttgctaggtcacaaggtacacagaaccaggtataaaatggctaaaacctaaatattaatgtgaacatttaatacatatcatacaaataaatactagcatttcttcattactacttcattcattcaacaagcctttaccttgtgtttactgcttacaggcactatggaaggcagtggcagtgsacagccacgatatggccttgtgaggggttcagttgagtgacgacatgatggtgaatactcaataaatatgtgctgaatttataagctcaaaatagcatgtgctggagatacccacagcatgtaaagaggaatagaagagtgtcactactcctgactggaagtcctggtgttagaggaaggggtatagatttgtggactaacagaaaagcaagtctcactgctgctggagttgagtcttgaagaaacaaaagc

SEQ ID NO: 167956 - DNA, 535 bp, Homo sapiens
taatatcttaatttatgaatattaatttcatatcctgttgccttactaaattattttacgatttgggaattaacattaattattattgattcttaagtgtttttcaggtatcatatcatctataagtagggatacttttacctcttctctaccaattctaatacctttaatagatttgttttgtctaattgcatttttttaacactttcagtaaaataatagatagtaatggagataactagcatcttccccttgttcctgatgtgaataggaatgcttctagtgttgtccarttaaaataccaattttagcattgacaaatatatatttttaatatgttaaaaatcacattcaatttcttgaatattcttataatgagtgaatgttgaatttcattaaggcctttcagcatatatgggaaaaatcatattgcatatgatcataatagatttcctagtaggaaccaaccttgaatttctataataaatcccacttagttgtattcattattttcttaatatgatatataatacta

SEQ ID NO: 167957 - DNA, 400 bp, Homo sapiens
ccagcctgggcaacacggggagaccccgtttgtgcaaaaaaaaaaaaaaaaaaaattaattagccaggtatggtggcacatgtgtgcctgtggtcccagctgcttaggaggctgaggtgggaggatcccttaagcctgggaggtcgaggctgcagagagctatgatctcgccactgcactccagcctgggcaacaaagcaagamcctgtctcaaaaaacaaaacacaacaaaaaaagggggtttaggcctggcacaaagatttcacatcctccttcagaataatgttcaggagagaacagaattgacagcaaagacacaggtgacaagacaggaaaagctcatccaacagaagagcagaggtgtcccagacatcgagcctaacggagctgtgtgtgactc

SEQ ID NO: 167958 - DNA, 598 bp, Homo sapiens
ttcatttccttttccacagagctgatcactaaagcgtaggtcttactgacatggaaattatttcggaacaataagaagaaagctacatagcacattatctaaattattgaattcttacaaaatcaaggtagaggtcagaagtaggatggaatctttttccagctgtttaggaagacrtattattaaggtttttatacaatggtattatgagaagatgttaggccataaaaagtgacctgggctcgatcttctttatcttctctatcttggactctatcatgaggacactgcacaaagtgatcttgaaggtcaccctcacttgtaaaatctatgcactatcctgctttttgatatatcttcctccaattacttgtcctttagttattttgttgatcatcaatgatcaacatctatgatggcctaacacttcctaatcatttaatttgaattcttgttagcagttcctgggtgggaatagttaaaagaataggctttggaaaggttgaatagtacattcactggaatttgccagtttaccaactatatgaactcagttaagtttctcaacttctactagcccagatttcctcatttgtac

SEQ ID NO: 167959 - DNA, 598 bp, Homo sapiens
ttcatttccttttccacagagctgatcactaaagcgtaggtcttactgacatggaaattatttcggaacaataagaagaaagctacatagcacattatctaaattattgaattcttacaaaatcaaggtagaggtcagaagtaggatggaatctttttccagctgtttaggaagacgtattattaaggtttttatacaatggtattatgagaagatgttaggccataaaaagtgacctgggctcgatcttctttatcttctctatcttggactctatcatgaggacactgcacaaagtgatcttgaaggtcacmctcacttgtaaaatctatgcactatcctgctttttgatatatcttcctccaattacttgtcctttagttattttgttgatcatcaatgatcaacatctatgatggcctaacacttcctaatcatttaatttgaattcttgttagcagttcctgggtgggaatagttaaaagaataggctttggaaaggttgaatagtacattcactggaatttgccagtttaccaactatatgaactcagttaagtttctcaacttctactagcccagatttcctcatttgtac

SEQ ID NO: 167960 - DNA, 520 bp, Homo sapiens
tatttgtcactgtttggtcaactgtagggacgtgtatcaagaaggagtttccattagcttgggaccctgagcaactataatcagctgagcccctggtgaaccatgttkcacttgtatgagcaagaaataaacttttgttgtgtcatgacactaatattttgctactgcagcataacttagactgatacaaaaatggtgtggaaaaatattccaaggtacactggctgttccaaaagaattagtacacttttaagctttatttatttatttattttattatactttaagttctagggtacatgtgcacagcattcagttttgttacatatgtatctatgtgccatgttggtgtgctgcacccatgaactcgtcacttacattaggtatatctcctaatgctatccctcccctctcccccgaccccacaataagctccggtgtgtgatgttccccaccctgtggccaagtgttctcattgttcaattcccacctatgagagagaacatgtggtgtttggttt

SEQ ID NO: 167961 - DNA, 541 bp, Homo sapiens
gtttcattgagtctttcctaggcatgaaagttggaggaattgaaagttacaaagttgctaagtgccaaaacaggaggcttaagatagggtatatttgctgggcttcctacaagaaatgtctcaattctcttcttggtaatgttcaactggaaataatattggggtgggactagggttaccaattaagcaatattcatattccatgcttccgttaccaactttctcagtttatccagaactgaaaggtttcctgggatgtggtatagtcagtgctaaaactgggaaagccctgaacaaatsaggataagcgggtctctttagctgatccatatatggcatatgtgaagagcttaagcaaccagaagtatactttcatatttggcctaacatcaactgagttccatcactgaaatagagcaaataagaaactgttgtgagttgtgttttgatgtacaacatctacgtttatttatactttgcttctggggagatggtagagcatgatgcttggtgaccttgatccataatgcttggtgacctt

SEQ ID NO: 167962 - DNA, 541 bp, Homo sapiens
gtttcattgagtctttcctaggcatgaaagttggaggaattgaaagttacaaagttgctaagtgccaaaacaggaggcttaagatagggtatatttgctgggcttcctacaagaaatgtctcaattctcttcttggtaatgttcaactggaaataatattggggtgggactagggttaccaattaagcaatattcatattccatgcttccgttaccaactttctcagtttatccagaactgaaaggtttcctgggatgtggtatagtcagtgctaaaactgggaaagccctgaacaaatcaggataagcrggtctctttagctgatccatatatggcatatgtgaagagcttaagcaaccagaagtatactttcatatttggcctaacatcaactgagttccatcactgaaatagagcaaataagaaactgttgtgagttgtgttttgatgtacaacatctacgtttatttatactttgcttctggggagatggtagagcatgatgcttggtgaccttgatccataatgcttggtgacctt

SEQ ID NO: 167963 - DNA, 585 bp, Homo sapiens
agtctgactcccacatctgtgatcttaacctctcctttatagtattcctaatataatagccaccttaaggtaagaaagtttatatcacatactgtattaagtacattatatgtattgcttgatttaaatatgttccagttatctcttgcttcataccaaaatttagtgactgaaatcaataaaagtcatttatttctctcatgaatctgtgatttgggctgggtcctaccctacgcaataccaactaaattgaggtgtgcaggatctgcttttaagatgggtcactcacatgctgggaagttattactggctccagggtgagtttttcccacctwggcctctgggcctgtgatgggagaggatgccatgaaggtctctgacataactggagacatattccccattgtcttggtgattaacatttggctcctttttacttatgccaatttctgcagccaacttcaatttttccccataaaacaggtttttcttttctatcacattgtcagtctgcaatttttgcaagtctttatgctctgcttcctcttgaatgttttgccacttagaaattttttctgctagtta

SEQ ID NO: 167964 - DNA, 425 bp, Homo sapiens
ctgatttgcagatgccttgattgttcatcatacaaacctagctctgaggacctcatgaattgtgaaatgggtaatgctttaaaacaaaggaggttgttattttgttctcctactttgagcattatttttttggcatttgccaatgtccaagtaatttcccagctgttgaatagagttctatttcttaacccataaatttgcaacttgaaaggatgcttgactcaagggcttctgaaactaacacagtttgagattggcattgcataataataatttgccctacatatttggtaccaggttttggatatttttggctacctctgacaaccagagtaattgttctgtgtrtgtctttcatttggcacatgaaaaggtacagatcctgcctggagacatgtgtactctttttgagggaatgaaatatt

SEQ ID NO: 167965 - DNA, 425 bp, Homo sapiens
ctgatttgcagatgccttgattgttcatcatacaaacctagctctgaggacctcatgaattgtgaaatgggtaatgctttaaaacaaaggaggttgttattttgttctcctactttgagcattatttttttggcatttgccaatgtccaagtaatttcccagctgttgaatagagttctatttcttaacccataaatttgcaacttgaaaggatgcttgactcaagggcttctgaaactaacacagtttgagattggcattgcataataataatttgccctacatatttggtaccaggttttggatatttttggctacctctgacaaccagagtaattgttctgtgtatgtctttcatttggcacatgaaaaggtacasatcctgcctggagacatgtgtactctttttgagggaatgaaatatt

SEQ ID NO: 167966 - DNA, 419 bp, Homo sapiens
acatccccagtcttcaagctgatgtgatagcgaaagtctgaacagcccaaggcagagggaggaagggaaggggttagtgcagggggtgacaggaagcagggtgcgtgtataggagggcagcctggagctggaggtttgyggggaacacacgctgggaattgaaaatccaggctcctgttctaagcagccctgcaacttggggcaggggttccttccatctctgtgaggtctcctcaactgtaatggcagaattctagtaggttctctgtctgctccagaaggtgtgaatgggcttagagcaggaaagcgtgtaaatcacaagcaagaacatcaaaacataagagcctgaaaggatttcccacaatcatctggtctagcttctctgacagtggacaaggaaactgagacaaaggaaggat

SEQ ID NO: 167967 - DNA, 428 bp, Homo sapiens
atccccagtcttcaagctgatgtgatagcgaaagtctgaacagcccaaggcagagggaggaagggaaggggttagtgcagggggtgacaggaagcagggtgcgtgtataggagggcagcctggagctggaggtttgtggggaacacacgctgggaattgaaaatccaggctcctgttctaagcagccctgcaacttggggcaggggttccttccatctctgtgaggtctcctcaactgtaatggcagaattctagtaggttctctgtctgctccagaaggtgtgaatgggcttagagcaggaaagcgtgtaaatcacaagcaagaacatcaaaacataagagcctgaaaggatytcccacaatcatctggtctagcttctctgacagtggacaaggaaactgagacaaaggaaggatcaacctttcca

SEQ ID NO: 167968 - DNA, 595 bp, Homo sapiens
aataatagaatctggctcttaatgtatgtgtagtatcatcagccttgatagctgagyaaatttggggtgggtggattcaccctgtttctgcagaatggccaccacactccggcttttgatggaaatgtttagtctaattaaatttaatgtaatacatttaatgcaattactgatatgttcagattgacatttgccattttgctaactatattttgtatgtcatatcttttttgtttcttactacttatatgtcttatacatttttatattcttactgctttctttactgcttttatattttttacagagtaccatttttggtccctcattgtttttttaatcatatttttggggtgattttcttagtggttgcccagaaaattacaattaccatcttaatttaaaataatctagttcagattaatattaacaatttcagtagtatacaaaaactttgttccaatataggtttgttctcttccccttccttcatgctattattgtaatataaattgcatctttacatattataaactcactagtggtgcagctctatatttactgctttatgcagtaatatgagatatgagaagaa

SEQ ID NO: 167969 - DNA, 501 bp, Homo sapiens
gtgcctggcacctactaggcttcagtaaaccgatttggggtgaataagtgagtgaatgggtacattttacttttcagcttaytttaagtgagaaggagggctgggcatgcagggatgcaggtctaccccctccacagtacattttcaacatgggaagaagttgctgcccttcccacagtgactgcatttcatgcctttctctctgcttactggcatgtccttatcagtgggagttctgaagagaagacacaattcttgttcatggagaaaagttatctttcttgagaacacatagaagttggagaacaacctaaggcaaaaggtttactgggatggatggaattgagggcaaacatgtttgggttagaccagtggtccccaagcactggccagctccatcagagtcccccaagaaagcttggaagcaattcacgtttagtagactgagctctggaaattcagagttgagaaacctgaagcagggctcaggaatctgaattc

SEQ ID NO: 167970 - DNA, 473 bp, Homo sapiens
cctcaggggtgggcggagagggaaagatgccgggcactgtggactagaggacctgggctggagaaagctgggcccccaggggccaatgtgggaacttggcattctcccctatggcmtgaccattgcaggcatcttgttcatgacctttaggaaagagaaatcaagaaagaccctaaagatggggtgggagaacttgcttctgttgctagcctcattacagttgtgttgggtgttccccctgtttccccagccatcacatgggtgttctggggaggaggctgtggaagcagtggggaaagagctaggcaagtttgaggcaaacccagccttgggctacctgcttcattctcctgagcctcagtttcctcatgcctgaaatggggaaaggatgcctacctgtggtgggctgttgtgagcattaggggcagtggatgtaccgtctctgaggtcagatctggcccacagcacacagt

SEQ ID NO: 167971 - DNA, 580 bp, Homo sapiens
accactggtgggacataagatgctagcaatgctatatgagatttatctaatgttgtgaatttatgttaatatctactagtgtatgcctgacatttatagcaaatgataacagttttttatgatagtaatatcaactttcttattaaaataaatttataagttaatgtaagttgtaaaaagtgagttaaagaagtagtagtaattaataatgcaagcagtacttgaatcaggcaaamctcttgaagatgaaatgtgagttactgaagtttgagagccccctagatggattgagggagcacaaacaacctgcctcttcagaccccagcaatagatccccgagtcctggagatcagacccagaaaaccaaaagccacagccatttggttggtcctgcttgatgtcttgaagatgccaaatgtagcgatttccaccaacaaattgagaaggactaagaaattgaacttggttctaggatcttctatccacaaaactgtgaggctgatcagcttctgcctccttcccttgaaacctcctgtctgtctttcatcatctctaccttctacccagtggaccccattaa

SEQ ID NO: 167972 - DNA, 498 bp, Homo sapiens
tgcaaccttgtgtgtacataggaatcacctggaagtctttataaaataatccccaagccaggtcctttacttcccggaggatctgattcagcaggcctggggatagggcctggtatccctattttgaaagatctcattaagtggttctgtctcacatggttgggagtcattaccctaaggcaggcagtctatgccttggtgcacgctagagtcgtctgaagagctttaagaaatactcgtgcgaccccaccccttgacattctgagtcaggtggtctgagatgtgacctgaatattaggatttcacaaattctccagatgtttctaatgtgcagccagccttgagaaccactattctaggtcagcagttctcaaactggaggctgcctcagaatckcttggagagctccttgattatgggccccgccccagagttatttggtgaggccagggtggagcatctctaacaagttcccaggtgatgccaatgctggtccag

SEQ ID NO: 167973 - DNA, 355 bp, Homo sapiens
caacctctgcatgtgcgtttgctcttgtgcctacctcaggagggggacgaatgtgttgtcattctctccctatctgcaggatatcctctgcaagcaatgcaatacccagaattttctagtcactttctcgccaaaagtcactcaaatcatagacagttggcagtcatggttctcagacagaacccccaaagaaatccagagggtgggcttctgcacctcagacaactggtcaaccakgaccaagacaactgagtccagaggaccgtgagtgagtcaggcaaaaccccagggacattgccacggagggctactgctggattggctccctcgccccacccagaccgcccccgcccaa

SEQ ID NO: 167974 - DNA, 624 bp, Homo sapiens
gggttaatttttttttctggaatattaaagtattttaaatatattgaaatatctaaaagtaagcatattaaaactcataacattagtataagtttaaatattttatttagataaaaattagaattaaaaaaattttattggctttaatggaaaaaataatgaataatatattcaaaataaaattattgaaaaaatttagctattaataatacatgaaaacatttataagggcttcagactccaaacaatagctcagtatatagcactgtcagatcctatctttatttaaaattttaatattgtgttcactgtgaattttttgcattaattttcattctgaaacattgtattaaagtatttatcttgcttactgtggttttttggtaccyacttaaattttgccctcaaggtaagtgtcttactcatctcaccttatttctggtcctaggagagtcaatatctggagggctaagagagttataaagaaatagtgcccccaataatgtcttgaatctttagataaacctgatactagagtcatatttttcagttacagggcaaagacatcccctttgttgcaggccaaaatcgagttggattttctcttattcataatataaagta

SEQ ID NO: 167975 - DNA, 624 bp, Homo sapiens
gggttaatttttttttctggaatattaaagtattttaaatatattgaaatatctaaaagtaagcatattaaaactcataacattagtataagtttaaatattttatttagataaaaattagaattaaaaaaattttattggctttaatggaaaaaataatgaataatatattcaaaataaaattattgaaaaaatttagctattaataatacatgaaaacatttataagggcttcagactccaaacaatagctcagtatatagcactgtcagatcctatctttatttaaaattttaatattgtgttcactgtgaattttttgcattaattttcattctgaaacattgtattaaagtatttatcttgcttactgtggttttttggtacctacttaaattttgccctcaaggtaagtgtcttactcatctcaccttatttctggtcctaggagagtcaatatctggagggctaagagagttataaagaaatagtgcccccaataatgtcttgaatctttagataaacmtgatactagagtcatatttttcagttacagggcaaagacatcccctttgttgcaggccaaaatcgagttggattttctcttattcataatataaagta

SEQ ID NO: 167976 - DNA, 451 bp, Homo sapiens
gaattcaagaacagcctggccaacatggccaaaccctgtcttactaaaaatacaaaaattagccaggcatggtggtgtgcacctgtagtcccagctacttgggaagctgaggcaggagaatcgcttgaacccgggtggtagagattgcattgagccgagatcatgccactgtactctagcctgggcaatagagtgagactgtgcctcaaataaataaataaataaataaataaataaataaataaayaaacaaactgtatgccatgatgaatactttttaatttttaatggaaacaaaacattccattgtaatatggatatggaagttttaacagtttcttttgccattgcagcaatgtaccaaagaatatccttatagatatatctctatgttcttaagctgtaatttcagcaggtagttgccaaaagtgatattatcagattaaatgat

SEQ ID NO: 167977 - DNA, 623 bp, Homo sapiens
accacatgaatttcaacaggagaaagttaatataaataatttttaattataacaagggattggagtatcaagagattgactagtaagtagagaaaacgctaaagaatataagaatagtagatgcagggaggagccattgtcactacagatgagagagactacctaagataaaggactcctgggctgagatccagaccttattggagaggatacagaatggagagaaaatgcaatcatgctgtgctcatgaaacttgctgaaaatctacattctaggatgctagggaaagttgttcataaggagatagctcaccagagaccctctgctataaaatcacccccaggaagctactggggggaagctgctggccactggatgctgctgactgccatgtactgcaggaactgggtattggagaarctgtacatgctgcagctaagcctgacaggcaagcacatcagaaccaggaaataaaatcctctctagtgactttagtgagaatagtgaattaagaaattccaagagcctgcccctccaccaaactaacaaataaacaggcacaaattgttagaatgaactttaatggaactggtcaaaggtctgcatcaatgaggtgaacactt

SEQ ID NO: 167978 - DNA, 607 bp, Homo sapiens
ggaaagggtgggaaaagatattctatgcaaatagtgagcaaaagaaagctatcctatattatactagaatacaatatatgagtatacagtagtccccctttatccgtggttttacattacatggtttcagttaactgcattcaaccatgatcttaaaatattaaattaaaacatccagaaataaacaattcataagtttgtcattgcataccactttgagtagcatgatgaaatctcacaccactctatttcactcaggacatgaatcttccctttgtccaggatatccacactgtatatccacactgctatccacccattagtcacttagtaatcctctagagtatcagatcaaatgtcacatatagtgtacataggttttggtactatttgtggtttcaggcattcattcactyggaatcttagagcatattccccatagataagtatatatagctagactaatatgtgacaaaacagattttttaaaactgttatgagagatgaagaacaatattatataatgataaaaggcaaaaaggcaaatctgtcaagcaacttcaacaattatacatatatatgcaccaaaaaacagagcccctaaata

SEQ ID NO: 167979 - DNA, 607 bp, Homo sapiens
ggaaagggtgggaaaagatattctatgcaaatagtgagcaaaagaaagctatcctatattatactagaatacaatatatgagtatacagtagtccccctttatccgtggttttacattacatggtttcagttaactgcattcaaccatgatcttaaaatattaaattaaaacatccagaaataaacaattcataagtttgtcattgcataccactttgagtagcatgatgaaatctcacaccactctatttcactcaggacatgaatcttccctttgtccaggatatccacactgtatatccacactgctatccacccattagtcacttagtaatcctctagagtatcagatcaaatgtcacatatagtgtacataggttttggtactatttgtggtttcaggcattcattcacttggaatcttagagcatatyccccatagataagtatatatagctagactaatatgtgacaaaacagattttttaaaactgttatgagagatgaagaacaatattatataatgataaaaggcaaaaaggcaaatctgtcaagcaacttcaacaattatacatatatatgcaccaaaaaacagagcccctaaata

SEQ ID NO: 167980 - DNA, 497 bp, Homo sapiens
  misc_feature (1)...(497): n = A,T,C or G
nnnnnnnnnnnnnnnnnnnnnnnnnnnnnnnnnnggtgtgggccactatgctcagccaagattttgtttttgaaaatagggctcctaggatttcactaacgatggagttaggggtaaaatgtgccctgttgtctgtgagagcttaagaagagtttaagaagcggaagtttcttctgacaaggggagattccctaagacaaggaaaaggaatgagattcttgacagttatattagttttttgtggggtttttkttttgttttgttttgttttgttttgtttttttgctgctgtaacatattaccacaaatttaacagcttaaaacagtacccatttattctcacagttctgtgagttagaaaaatccaagccagtgtcagtcaactagacctctgttcggggcctccaaatgctgaaatcaaggtgtcagatggactaggctgttacctggagactatagggaagaatctgcctccaagttcattcaagttgttagca

SEQ ID NO: 167981 - DNA, 585 bp, Homo sapiens
tttggtccctgaataatcagcaacactacacaggtagtaccacagtagtagtcgtgggctttaggtgagactctgagacgtgctggcttcaggtgagacccagcacatttctagctgtggtggctatagtgagagattccttctgcttgagaaaagcagagggaaaagtaaaggggactttgtcatgcatcttaggtaccagctcaaccccagtgaggtagagcatcaagtggactcagsgttcccagttctaggtcttagctcttagatagcatttctggacctgccctaggcaagaggggagcccactaccctgaagggtgagtcccaggtctggcagcattcaccatagctgactgaagagccctgagccttaggtaaacatcagtagtagtttggcagtactccccatgggccatggggtggtggccatgggaagaagctattctgcctgggaaaggaaagagtgggatcttccctttccttccctggtatctcgtgatttgagtgccagcatagctgcaaagaatagagcaccaggcaaatttacaaggttttttactgcagtccctggtccttagacag

SEQ ID NO: 167982 - DNA, 474 bp, Homo sapiens
tccagaagaggatttagtgctgtacaacaccgcgaggacccaagatttctgatctgtaatctatcatgtaaagtaataagctactcatatgtgttcttgctcatggatcattttaagcggaaaacaatagaacaggcccacatggagccagctgttatctaagaaccctattctatagatgttggtggtagctgcactagccaaaaatgtgagaaaatcagagtcagtctccagacagaaccctcctatcctatttttcttgtcagtctaacagcaactaagaaatccaacaagcctcccctctccctaccccacccaactcctcacagagagctgacaccctgctctggggagcaggctctggtatatagcccccagatcacaggtgtcagatcccctcctctaatggtcaacgtcacaggaaaagaccagccagytggttcccaagatgtgcttagatagcttctataagta

SEQ ID NO: 167983 - DNA, 584 bp, Homo sapiens
agatctttcccagtcaagccttctgctggtgatttcttcctcattcatttatccattcaacatgtattaagcttcttaggtgggctggatcccacctaagtcaatctacttgtcctgcctcctccaatgtcagagatgcttcttcytcagatggctgctactctgagttgagtgccattttctccctctatgtcacctccactcgctctggcatgccaggaatgagactctagtgggacccacttttgtaccgtgaagaaggaaaggaaacggagaagaaaagtcccgtttcgtactgccatctctctctctgttgcttcccagccccaacttcaactctccagctggtgttcagcatcaagttcagaacgtaagcaccctgcaccccaaaaacccagcaagttttcccttgccacaccaagctcccagattcactccagattccatctgcctcccactacggtttctccctttctttatactctgcctcctctcttcctggatggttggtgctgagaatgggcaattgctcagagctgggcaaaccttaatatcactgtacccaccaggcctatacagctgaa

SEQ ID NO: 167984 - DNA, 568 bp, Homo sapiens
tcctcattcatttatccattcaacatgtattaagcttcttaggtgggctggatcccacctaagtcaatctacttgtcctgcctcctccaatgtcagagatgcttcttcctcagatggctgctactctgagttgagtgccattttctccctctatgtcacctccactcgctctggcatgccaggaatgagactctagtgggacccacttttgtaycgtgaagaaggaaaggaaacggagaagaaaagtcccgtttcgtactgccatctctctctctgttgcttcccagccccaacttcaactctccagctggtgttcagcatcaagttcagaacgtaagcaccctgcaccccaaaaacccagcaagttttcccttgccacaccaagctcccagattcactccagattccatctgcctcccactacggtttctccctttctttatactctgcctcctctcttcctggatggttggtgctgagaatgggcaattgctcagagctgggcaaaccttaatatcactgtacccaccaggcctatacagctgaagaagctgaggtccagagatct

SEQ ID NO: 167985 - DNA, 485 bp, Homo sapiens
gaattcaactgccaactggatttgctgctgcaggagataatccactttggttcagaggtggccccttttgcttgaaaggaaaccaggaccttcctgaaactgtcatgggctatctaaaccacaccagcccttaraactcacactcccaatttctaaattcccaagtgtctcccttcaaaaacgagaaagggggtacctccatgtatttaaagaggtcgattaattttatctcccgaggtctaagtaaacaaacaaacaaacaaacaaaaaccctggcaatttgctttaaaacatacagagtactttcccaaggagttgacaatgtggtgagaaacaatcagaagccagaactcaaaagaacagaggggcaagttgttgcgttactagagtaggttggtagccaagttttcgtttcatttagaaactttataaagaagtttccgtgaacatgaaagttatgacagtcatctgtcacagtcagtaac

SEQ ID NO: 167986 - DNA, 485 bp, Homo sapiens
gaattcaactgccaactggatttgctgctgcaggagataatccactttggttcagaggtggccccttttgcttgaaaggaaaccaggaccttcctgaaactgtcatgggctatctaaaccacaccagcccttagaactcacactcccaatttctaaattcccaagtgtctcccttcaaaaacgagaaagggggtacctccatgtatttaaagaggtcgattaattttatctcccgaggtctaagtaaacaaacaaacaaacaaacaaaaaccctggcaatttgctttaaaacatacagagtactttcccaaggagttgacaatgtggtgagaaacaatcagaagccagaactcaaaagaacagaggggcaagttgttgcgttactagagtaggttggtagccaagttttcgtttcatttaraaactttataaagaagtttccgtgaacatgaaagttatgacagtcatctgtcacagtcagtaac

SEQ ID NO: 167987 - DNA, 493 bp, Homo sapiens
atttcaggttttggatttttggattagggatgctcaatgctcaatctgtagtaaggttttatcttaatcaaaaaacagatcattattttgttagggaataataattcttcagataaattcaagagaaatgtgatccatttcacccaccttaacacagaggcaccagtgtgcctgctaaggttatttatagatccgaagtcacttaatggtgcagataatctcccactttttcttcccatcatagtgtctgggcttatgttgttcaacaccaacagggtagccactgggcatttaaattcaaatgtaaattaattaaaatgaaatgaaaaatttaattcttattgcacactatctacattccacacactatgtagccacagttggccaccatrttagacagcaaagaactagaacagctatacaatcacagaatgtattattagacagcactggacatggttgggttggtcaaatgaactgctattcaaattta

SEQ ID NO: 167988 - DNA, 565 bp, Homo sapiens
aatcttacctaaattcaccaatttttatatatatatatatatatatatayatgaagccctgaagcatataagcttccttcaaattcttatttagctacaaatgtgactaattttaccccttcctatttttattggttacttaaatagaatagtgcagtatcattgctagtgaatcaacattctgtgagaatgagctgagtcagcataatcatgtgctacgctactttattgatgagtaacccgaggtaaagagaagcagtgactttcccagtgtcaaacacatcagccaaaggacaccttgaaaaccctgagtccgtgaattgccatccagttgcttaatgtgctgaatcaaactgtttctctttaaaatctgaaattagttttcctcatatatctatatgtaacagtagctgagttagaacctgctgtgttctcatgggatagatttttaacatgatgatgatgacgtcgccagacatactggtgaaatcttctcagaagaaacacttcatatgaagtataaaaacttacactctacactgtttttctaacttttagaaggcat

SEQ ID NO: 167989 - DNA, 445 bp, Homo sapiens
atgaaacatgaagacagcaactcctcataaaatagtgttataaacaacacttaatcatttatatatctacttctttattattatgtatatttaaggtatacagcatcaggtttgatatacatatacaaataaaataactactgcaggtaagtaaatgaacctattcatccccttcaatagctacctttttattttcctggtaagagtacctacaatctacacatttatcacattttcaatatagaataaaatattatttactatagtcttcttgcagtgcattagacctttagaattattcatcttatgttactgctaagttctaccctttgacctaggtctctccattttcttcacctcccagccactggaaaccacctttctattctcagtttctaagtattcaactttyctttttagattccacatatatatgagagcatac

SEQ ID NO: 167990 - DNA, 616 bp, Homo sapiens
ggttatgcttgtttaaaattgtattattattattattttctgtgatccttgatgggcattgcactgttataatctgatgaatataaaagaattgatgggcattgcactgttataatctgatgaatacaaaagaactgatgggcattgcactgttataatctgatgaatataaaatgacaggaggtacaaagagttctcggaggagagtactactcttccttatgtaaaaataatactttctgtccgtaatcccagcactttgggagattgaggcaggcagatcaccaggtcaggagtttgagaccagcctggccaatatggtgaaatccgatctctactaaaaatacaataattacccgggtgtggtggtgcgcacatgttgccccagctactcgggaggctgaggcakaagaatcacttgaacccaaaaggcagaggttgcagtgagccaagatcgtgccactgtactccagcctgggtgacaaagtgagactgtctcaaaaaaaataaaataataataataataatactttttataccttatacaaagtagtattttattctttaatataaatgccatgtaacaagacatttctgcagttagtttcttaacaat

SEQ ID NO: 167991 - DNA, 606 bp, Homo sapiens
acttgtattcaattcatttatatttgttcatttttcatatatattgaatgaaatttaaacagaaaactactrtttaatgagctgaaaacagcaattttataaatgtttacattggaataatgcatagtgccaagattccatgacaatattgttatatcaatatatataattattagtgtttttgtttgttaattacactgctacattgatcattgcaaaatggtcctgacaaacttttcttttttatatgccctttctctctgttttgtacagaaattgtgatgaataagcgatgtagatcaacacttcaaagatatgctaaccgttggtactatttattattttgaatttgtagttttaataaaataaaaacattctacaataagaatttcacagaaaacgcaaataattgatacattttgtttataaattattctttttgttggtacctacagttggtataaaaaaaaaacttcgaaagagaaaaaaaaaaaaactacacctccactttttgtcagtcagaagactttcatcttttgaaatatcaaaataatccaacctttcaaacagagttgtcataaatgtcctgtttatgaggacaagctt

SEQ ID NO: 167992 - DNA, 584 bp, Homo sapiens
aaataattgatacattttgtttataaattattctttttgttggtacctacagttggtataaaaaaaaaacttcgaaagagaaaaaaaaaaaaactacacctccactttttgtcagtcagaagactttcatcttttgaaatatcaaaataatccaacctttcaaacagagttgtcataaatgtcctgtttatgaggacaagcttctgtagttttccacagaagggagctaagtaactattttcttgtgtgtgcaatatttggagcaagaagcaggtcatttaagataagtgttcacaatgttccccatgatagcagcagtatgaattaagtgaagaaaagtgggaatataatgaaaatgaccacagagaaacttatcaaaagattcagytaagttaatattgttagtttcagaatgtgaattcgactttgagaattaaggtgccaggaggaagtggaaatagttttggggaaaattctgcatatgaaggtaacactatgaactgtagatgtagaacactattgtaaccgtgatactagagtatgtttttattataacctttgaaattgattgggctgtttcatgc

SEQ ID NO: 167993 - DNA, 579 bp, Homo sapiens
acagtctgccacagacactatgtcctgagataattaagaatatttctacttcagacctggaggaggattttgtagcagggggttgacaatgaacaacagtgaaatgctgaagtctgggtgaggtggaaagagcattcacatggtgaagtggaggggaagaaatgttggttatgtaaaggtaggatttatcaaataaataaaaatattgggaataataggagcaagatttctcaggttgaaaaaggaagttatagaaaaaggaagttatagaaaatgcagaaaaattaggataaaacttctagcactagtattggattggaattggagatrtttgtgtgaacttaaagttttaatgcatatagatggatacagaaagaatataggtgtgtatgtattgcaggtgtatgcatgcttacctcctcaagctctgctcactgagagggctttgagacatcaacacccatgtaataatgagcatgtctagcctcagattttgttttctgaaggtcatttttcactaaaataaaacatagctccttggatcaatggctaatttcaggactaagggaaaaaaatgta

SEQ ID NO: 167994 - DNA, 508 bp, Homo sapiens
cttggggatcagggtttttaaggacaatttggtgggtaggggccagtgagtcgggagtgctgattggttgggtcggagatgaaatcatagggagttgaggctgacctcttgtgctgtcatttcctgagtgagggcaacaagaccagaggagccactttatcgatctgggtggtgccaactgatccatcaagtgccaggtctgcaaaatatctcagacastgatcttaggttttacaatagtgatgttatcaccaggagtaatttgaagaggtttagaatctcgcaggcagcctccagctgcatgactcctaaaccacaatttttaatcttgtggataatttgttagtcctgcaaaggctgttattgtctttgtttcaaactataaactaaattcctcccaaagttaatttggcctacacccaggagtgaacaagaacagcttggggattacaagcaagatggagttggttaggtcagatctttttcactgtaataattttctcattta

SEQ ID NO: 167995 - DNA, 613 bp, Homo sapiens
tcctttaatcctttgtttgccagataaatatgactctatcagtctaaggacagcctaacatttcactcagtttaatcattggtaaaggcttttatcacacttaagatttaagtggggaaggtttatcacaaacctagagcctggaattttttttcaatggctcaatctkctgaagggaaaaactataatcatttttctgagagtagaaagaacagttgactttactaagaggtttttaataacagttgtgcttagagggtaagagtatctatattagtttagttgtttgtattatttaagctgttttccttattctgcaattctcacactttagcataaagtaattcacctggagttgagctctgtctctagaatttcagacagagtaggtcatactttggtgatgctgatgctgctggtctgacagtcacatctgagaaggacagccttagtggatcttgactatgcttgtaaaataaatgcagaattgagtattagtgcataattatttttataataatgaattgtgcatgaaaacgaaaaaggaaggaaaatacgttactctctcatctttcattcatagccggatgaaatcttcatgtttaaactttag

SEQ ID NO: 167996 - DNA, 519 bp, Homo sapiens
ttgcagtgcttcgagagcccctgaagcatccaaaagaatgataaacagaattatttgacatattaaattacactggaaacattgctgaataagaagtgatgtttaatcttcgagttatacttttattaatgttattaatatatgtttcaatattgtacgggattcttaacattctgagatgtctgtgtatataccatcacctgaaactatcgttatgatgttaaattattatagaccacagaaataaccaaatttccttgtcttttaactgtgaccatttcaagccatttccacagttaawtgtttagttctgatatggtttctgaaaactcttcacaaggaaccaatctagaaagtaaaatcctagattatggtgtcttcaaggagaactgttagaaaggatgaaaaggactttgacaaaaatccttgcatacaacaagtttctagtaactttatgattatatcattttgactgggtaacagttcccagaaccataatgaagagactggctggtttat

SEQ ID NO: 167997 - DNA, 590 bp, Homo sapiens
gcactctgtgatgcctgtagacatgcactggtcagatttcctttcataatagatcrtgctgttgtgctgcaaggagagctgttagctggcagccttcaactacacagcacattcagcacctgtcacagcattagagtcaatgtcatgcctccccccaggaagcccccagccaatgagtaagcatggaagagctactaggccttggccattttcaagcaacttgggaacccttgaatgagccatctactttggaactctccattggtttggctgagactttctcagatgtgaattacattcagacctctccttccccaaattttctttctctcttctttccttccacaaatgtcagatcttcttcacaatctgaagggttccctgctcagtactgatttctcccactttatctttcacaggcattatcctccactcccctaactcccatctataaagctcttgtacatctaactttgtctccatgtctgcttctcagaggacccaaactgatatcattccctacctgaaatatcccatgctgccttcttctctagctaaaaaggccttatcttaattctgctcaatgctgg

SEQ ID NO: 167998 - DNA, 590 bp, Homo sapiens
gcactctgtgatgcctgtagacatgcactggtcagatttcctttcataatagatcatgctgttgtgctgcaaggagagctgttagctggcagccttcaactacacagcacattcagcacctgtcacagcattagagtcaatgtcatgcctccccccaggaagcccccagccaatgagtaagcatggaagagctactaggccttggccattttcaagcaacttgggaacccttgaatgagccatctactttggaactctccattggtttggctgagactttctcagatgtgaattacattcagacctctccttccccaaattttctttctctcttctttccttccacaaatgtcagatcttcttcacaatctraagggttccctgctcagtactgatttctcccactttatctttcacaggcattatcctccactcccctaactcccatctataaagctcttgtacatctaactttgtctccatgtctgcttctcagaggacccaaactgatatcattccctacctgaaatatcccatgctgccttcttctctagctaaaaaggccttatcttaattctgctcaatgctgg

SEQ ID NO: 167999 - DNA, 470 bp, Homo sapiens
cccttgaatgagccatctactttggaactctccattggtttggctgagactttctcagatgtgaattacattcagacctctccttccccaaattttctttctctcttctttccttccacaaatgtcagatcttcttcacaatctgaagggttccctgctcagtactgatttctcccactttatctttcacaggcattatcctccactcccctaactcccatctataaagctcttgtacatctaactttgtctccatgtctgcttctcagaggacccaaactgatatcattccctmcctgaaatatcccatgctgccttcttctctagctaaaaaggccttatcttaattctgctcaatgctggacctactttatgtgtctgaaacatgcagtcgcctagagccctgtgctcagaagggtccgtacttggtttaaccttcttcttgaaggttgccatcttgaaattataaa

SEQ ID NO: 168000 - DNA, 656 bp, Homo sapiens
gcaaaatgtaactccagtttgctcttgaaaagttttcttcaagttaagtttaatatcatagtcttctcctgatgctacctgaaagaggctgcagagtttgtttatataaagagaagatatgggggtctgggcacagtggctcacgcttgtaattccagcatgtggggaagttaatgtaggagattacttgaggccaggagttcaagaccagcctgggaaatatagtgagacytcccctatacaaaagaaaaaaagtagctgaatacggtggtgcacacctgtactaccagctactcaaggggctaaggagggaagatgcttgagtccaggagttctaggttgcagtgagctatcatggcaccactgcattccagcttgggtgacaggggaagaccctgtctctagaagaaaaaaaaaaaatagaagagattggagtgcaaatcctgagtctatcccttcctaatggatgaaacttagccacttagcaagttagtttctcgagggagaatatagacctggtaatatgttatgaatatgactcaaagttccataaaatctagctgctaaataaatgttcatttccctcaccattgtgtaaccaacttgtttgtatgagtgttactaatagggttatcataattaagaaggaaacaagg

SEQ ID NO: 168001 - DNA, 609 bp, Homo sapiens
ctgttaccataaaggagaactcacccgagtctcatactatgatactactcagaggttctggaagtcatgcttttaaagggataattattttaataataaatacctttcagaaactagtatgcatctagcaaagtgctctatgatagagataaaaagtatatagacccagtttctgtttttaaagaaatgttaatctagtgtgactttaaaaaatctttttgaccttgcccattgtatgaaatacattttactttacaatgcagttcacatatacatcttttgtatacatgtgtatgtctgaaaaaatatctcataaaatcttagactactgagactctagcattttttattatgtcctttttatttaaagcaagcatatgtttatcacaatatcctaatgtgcttttgttgtcaaaacagacagagatttaaatgtataaaaaatktactgctcttataggttgtacagacacacgtctaacagtgtaataaagataatagcaccattactagctagaggaatgcagactatacttgagtaatggcttcacagagaccttacaggatgtgttgtttaaagtgaaccttaaaaggtaactaaacatttgc

SEQ ID NO: 168002 - DNA, 290 bp, Homo sapiens
tccatatagtcagcacaattggagtgattggactgggaatggttggttagcataccaattacattaatacaaccaagacttaataggtacatgacttttccatagcgactcaaccattcttgagcttgaattataaagacagctatggttgagtgacatctttgtagtgtcaaggggagtccttcttgtggggcrgtataattaatgacattgttctgagagtctaactgttctgtgtcagggggagttaggggtcctggagtccatgctccctgatcatgatagatctc

SEQ ID NO: 168003 - DNA, 356 bp, Homo sapiens
acaagtcacatcttacgtggatggtggcaggcaaaaaatgagagagcttgttcaggggaacacctctttataaaccatcagatcttgtgaracttactcactgtcacaagaacagcatttgaatgacttgcccctatcattcaattgtctcccaccgggttctcacacaacaagggggaattcaagatgagatttggatggggacacagccaaaccatatccccatggttttgtttatctcatacttatagtattatagacagaactaccattataatgttattgtaaaataagtcacagttactatagcatgaaacatttctgaaattatttcacgttgtggttttaggaaagag

SEQ ID NO: 168004 - DNA, 356 bp, Homo sapiens
acaagtcacatcttacgtggatggtggcaggcaaaaaatgagagagcttgttcaggggaacacctctttataaaccatcagatcttgtgagacttactcactgtcacaagaacagcrtttgaatgacttgcccctatcattcaattgtctcccaccgggttctcacacaacaagggggaattcaagatgagatttggatggggacacagccaaaccatatccccatggttttgtttatctcatacttatagtattatagacagaactaccattataatgttattgtaaaataagtcacagttactatagcatgaaacatttctgaaattatttcacgttgtggttttaggaaagag

SEQ ID NO: 168005 - DNA, 514 bp, Homo sapiens
attctatatctaaataagaacttttgtcttattaagttgttgttgctgctaatgctactgtcactaacttttgaggacattagaaaatgttcataattttatgaactccagtgtaagtctaatacagttatcaaaatatattttctttaaaaaatatctttgccacatttccataattatgtcaatggttgttatatgatgtgagtgaagtaaagagtaagtatcatgtgaatcaatctgaaaaatgatacacttgttgtattcccagtattaagtaatgctatataaaatttattccaatattaggtattcataataattcaaatgggtaagtgtgagatgattactgtgcttcaggcaccgtattktgagtaaccaaaataatactggtaactcacagcctaatgcgagagacagccaactatattccaatgtaatttctaaaaatggagatataataaaggtcactgggtgtgtgtgtgggggggggaatttttacaaatacatgaaatgg

SEQ ID NO: 168006 - DNA, 590 bp, Homo sapiens
atttccatggactgaaaatttctctactattaatctatattcatttgacaaagtctagggaatgtggcatgggatcctgaaggcagtgagtatgggtcagcagttcctctcggccaaaggctgtaacaaatggtcagctgccttaaattgcagcaaatgccaaagtgaacaatatcaggtcatttacgtgtcccctgagtggtgctgttttgtggtgcttgagtatagcaggctttcatgtataaatagaggatggtgatcagttgctctctatcttaataaaaagcaaaatgaagggtttaagttaaacaaagagaaaatttttagatgctaaggttgttaaacaggagaatgtgttcctgcacttgcttatgaagtataaatatttttttcctaaaaatgcaacataktcttaactatttatcttggataaggtatacacctgtcccaatttgggtatacatttctaggtttaaatttctttaattatacaattgctgtaatttctcaacttaacattaatgtgtaaacatttatccaaaacatgatgttttcttaactatctgaacaccagaatttgaacagtaagg

SEQ ID NO: 168007 - DNA, 587 bp, Homo sapiens
gagccctcggtcacctttttccccttgttctcctggaggaccaatcaggccaattaaaccaggatgtccctttgaaaggcagagaaaaaaaataataacatgtacattactatcttcataaaattttagttataaaatatttgcacattaaatttctaaagcataaaaatgaacaatgctgataaaacaacattaaaatacccttctgaatgaaatatacagttaagaatctccttctcatcacctaactggatcttttactgcttactttaagtgagggctttattaagcattggaaatattacaaaacaaaatgctttctaaaaatatcattttaagtgttccatttgaggaatctctaaaccaataatgatctcctataatataagttgaataaataacasaaaactcattattttaataggcatctcatttaatatgaaataatttctactcttcagagactctgcagtctttaaaaggcatttgaagatttaaaaataatccaaacaataataataccatttttaaaaaggctaatttctctaagtacttggtgcaactcagcataaattctagtacatcaa

SEQ ID NO: 168008 - DNA, 516 bp, Homo sapiens
catttaatatgaaataatttctactcttcagagactctgcagtctttaaaaggcatttgaagatttaaaaataatccaaacaataataataccatttttaaaaaggctaatttctctaagtacttggtgcaactcagcataaattctagtacatcaaattagtatttgaaagatatttctagtttaaaatttttattttcacatttaaaaacataaaaatagatattttgttattcagtctgtttattttctgaatagttattttagtataaccatatgctttctmcatatggttgctataatggaaccttgagaagatatagcactgaattccagcacatttttcactatttgcatattttctcccctctacatacatctgggaagctaaggattgaagcttttttcagggttagaatgaagatattgtttgaaattttcttttgaatgattttaatctgcaaaagcagggctattagtatataaaagcatattcttttattaataacacattct

SEQ ID NO: 168009 - DNA, 553 bp, Homo sapiens
cctggtttctcctttggccatgatgaaattcttacctgttgcaaaggaacagaaaagttagtgagtaggtgaaaatttacaatataaacagtatttttatatacatataattcattttcagtaagactaagaaaataaagagtgcttaaaatcgttttaaaatgacacaaattagattatacaaaatgagacaaagagaaaaatttgagatagatcctgtacattctatgtagtgaagattgagtcatttcctttttgttgtctttatcagctctaaaggaaaaggggaaagacaaccgggtataggcatwctaagggttataggggacattggtggaacactcagaaaccctttgcaaaggaaatcctcaaaatgtcagtcagcttcatcaagcaaggcaggtaccatcttcactccatagccaaggaacatgtttgaaagtatttagccagtagctaaggagatatactgtgtgaaaggcactgattggaagcaacctgaattactccctgctggttagaatatttagaatcttatagatctgcatttatt

SEQ ID NO: 168010 - DNA, 413 bp, Homo sapiens
ggctacacccgtatttcaggtgtcagtgctggatttgttttaaaaaaaaaaaaaaaaaaaaaamacacactttggaaggaaagatataataagtagcaaagacctctaaaaatggtttttaaaaattcatatagacataaaaactggatagaaagcatttgatttacaagattaaactgcaaggccaccttgcaatgcaaccaggaaagttaaaagccgcttatcaagaatagatccatcttagaagtaaatagcacatttgacttcatcttaaaacagtaagcatgcaataacttaagcaataactttttaacaaagaaaaataaaatgtgattttttttttttcttactgaatatactactttggtacttgggccattaaaaatgataaaaaacaaaggagatgcagagaa

SEQ ID NO: 168011 - DNA, 599 bp, Homo sapiens
taaacactcaaaaattatatgaggaacaaacaaactaaacagagacatggtttaaaaaaaaaagaagagagagatcctagcaagaaagttgctacgctctatcaatatgaacaaaacaaatgctgtattctaatacttctttaggaaataactcgattgccaggtaacctactttagtttcctgccagaatcttttgctgtgaggggtactcatattgactgtaacactggagaatttaaaagggaaaaggactgctgctcaggaagctcaggtgacagcatcactggagccctggagttcaaagctgcagtgagctatgatccagccactgtactccaatctaggtgacagagtgagaccctgtcactcagtcatacatacatacgtacatatatacacacatacatacatggaaaaggaaacaaaaattgggaaaagtgcacctccataaatgaagccttcccagtccttacccttactctgtttatcaactgttatcaaaatcagctgcatcatcttaargattctaaacttggtgggaaaagatcccagataacatatatctttgttcccctcttttttaaacataataattaca

SEQ ID NO: 168012 - DNA, 537 bp, Homo sapiens
attcctatcactgacccagtagccagcacatggtaaccctcaataaagcattgcccttcccatgagctaagcatcattctaagtgtyattcatgtattagctcatttaatcctagaacaaccctaggaattagtactattattttctccatgttattaataaaggaagtgaggccagagaaattaagtaatttgtccaacatcacaagagaataagattcatacatagcctggattcaaacccacctgcctgattggagttggtgctgttggtcactccttatgctgcctcttcacttaacagagaaacagtctccagttccatggagctagagttaggatcaagagccccagtagtactcttcctgccagacttggttcctgcagctttgcctgtagcaactctatcaaatgtttataatctactcatctacggcctggcctcaactctgccttcatatcaaagtcactgggggcatttcttaaattttcagacttctgggttacaagagggcctactctgggcttgcatgcacac

SEQ ID NO: 168013 - DNA, 597 bp, Homo sapiens
taatttctgcataagtgatgagtttcttttctttcctttcctttttcctatgaacatccactggcttcaacaccacttcttgaaatggctaccttttcttcatttaattgcatttgtacctttatttttaaaaatcacttcgagctgggwgtggtggctcatgcctgcaatcccagcactttgggaggtcaaggcaggcagatcacttgagcctaggaatttgagagcagcatggggaacatggcaaaatctcatctctactaaaaatacaaaaattagctgggcatggtggcatacacctagagtcccagctactcaggaggctgaggtgggaggctcgtttgaggccaggagacagaggttgcagtgagccaagatcatgccactgcactccagcctatcaccctgtctcaaaaaaaaaaaaaatcagttaggcatatttgtgtgggtcgtttctgggctctctgttctgttccattgatctatgtgtctattcctctacacatccttgattactatagctatataatgtctcaaaataaaatagacttaattgatttagctactatttttttccaaaattgttttgccattcta

SEQ ID NO: 168014 - DNA, 578 bp, Homo sapiens
taagtgatgagtttcttttctttcctttcctttttcctatgaacatccactggcttcaacaccacttcttgaaatggctaccttttcttcatttaattgcatttgtacctttatttttaaaaatcacttcgagctgggagtggtggctcatgcctgcaatcccagcactttgggaggtcaaggcaggcagatcacttgagcctaggaatttgagagcagcatggggaacatggcaaaatctcatctctactaaaaatacaaaaattagctgggcatggtggcatacacctagagtcccagctactcaggaggctgaggtgggaggctcrtttgaggccaggagacagaggttgcagtgagccaagatcatgccactgcactccagcctatcaccctgtctcaaaaaaaaaaaaaatcagttaggcatatttgtgtgggtcgtttctgggctctctgttctgttccattgatctatgtgtctattcctctacacatccttgattactatagctatataatgtctcaaaataaaatagacttaattgatttagctactatttttttccaaaattgttttg

SEQ ID NO: 168015 - DNA, 554 bp, Homo sapiens
gagcttgccctctcttgtgtggggccagattccccttgcaattactctkggccacccattatcgctaggtgggggaatagactctcaggtcctagaaggaaagaaaggactctgagtctttcctttcttcttctgttaggtagaggtttgtaaggcaccctgctgctatgtcattcctcctatcctggatccctgaaggttgaataatgtctccccaaaattcatgtccatctggaacctcaaagtgttatcttatgtggactctatttaatttttttagagatggggtctcactatgttgcccaggctgaactcgaacacttgaactcctgggctcaagaattcctcccaatctcagcctcccaggtagctgggactacaggtgtgcaccaccacaccagccagcttgtggtttatttgcaacaaaaggtcttttcaaatgtaactagttcagataagatagtactggattagggtgggttttaatccaatgagtagtgacctgataagagggatatttctggacacagagacacacacaaagagggagaaca

SEQ ID NO: 168016 - DNA, 388 bp, Homo sapiens
gccactgcatcttccccaagtcttacccagctctctgcaaaaagggcttcaggctagaaaaggttagtgaccagcaagagagacttctggaagctaggagtagccagtacacaggaggccatctgtcccactccacaggaaatgagtacctacctgtcgaggaatgctacctcttggtggctgggtagtggtcctcactcgggggtcgtcrtcctgcacgatttccccattggccaagatccgcaccatcctcccaggcgctgtgggtccctgatgggctgcacctgcattgtgtggtcagggtgggcaggctaatggaagccaagtggcacagaagttctccccaccacaaaacctttagctgttagtgatctgggaccagactcgt

SEQ ID NO: 168017 - DNA, 556 bp, Homo sapiens
atatgctgtttccctgtaacttctgccatcttcaaggcacccgttagaatgggtgggccaaaatgcccatccatcatttaccacatacttagaaatacctactgtgkccctgtcattgggctggtaatgtcatggcgaatcaggcagacatggctactgtcctcttcaaaaaggaatgatagacactaaataaagagttacaactgagcgtaggccctgaaggagaaattgaaggagtatacacgataaggggaggagcaaatatcctcatctggtctagacaggggctgggggaggaatgtcaaggagggcgtctcacaaagagtgactttcacctgaggcctgaagcttgagaaggagttgcagaaggtaaagggtcgggggagagcaacagtgtgcaaaggccctgaggcagaaggagcatcaaggaggggtctggagctgagctcacggcacaggggccctcacatgccaaggcaggtatgcagcctggtcaggcggggtgggcctgtaggattggagaccttatcctcaaggcaatagaagccactgacca

SEQ ID NO: 168018 - DNA, 559 bp, Homo sapiens
ccctgtaacttctgccatcttcaaggcacccgttagaatgggtgggccaaaatgcccatccatcatttaccacatacttagaaatacctactgtgtccctgtcattgggctggtaatgtcatggcgaatcaggcagacatggctactgtcctcttcaaaaaggaatgatagacactaaataaagagttacaactgagcgtaggccctgaaggagaaattgaaggagtatacacgataaggggaggagcaaatatcctcatctggtctagacaggggctgggggaggaatgtcaaggagggcgtctcacaaagagtgactttcacctgaggcctgaagcttgagaaggagttgcagaaggtaaagggtcggggragagcaacagtgtgcaaaggccctgaggcagaaggagcatcaaggaggggtctggagctgagctcacggcacaggggccctcacatgccaaggcaggtatgcagcctggtcaggcggggtgggcctgtaggattggagaccttatcctcaaggcaatagaagccactgaccagggagttaagcaac

SEQ ID NO: 168019 - DNA, 556 bp, Homo sapiens
atatgctgtttccctgtaacttctgccatcttcaaggcacccgttagaatgggtgggccaaaatgcccatccatcatttaccacatacttagaaatacctactgtgtccctgtcattgggctggtaatgtcatggcgaatcaggcagacatggctactgtcctcttcaaaaaggaatgatagacactaaataaagagttacaactgagcgtaggccctgaaggagaaattgaaggagtatacacgataaggggaggagcaaatatcctcatctggtctagacaggggctgggggaggaatgtcaaggagggcgtctcacaaagagtgactttcacctgaggcctgaagcttgagaaggagttgcagaaggtaaagggtcgggggagagcaacagtgtgcaaaggccctgaggcagaaggagcatcaaggaggggtctggagctgagctcacggcacaggggccctcacatgccaaggcaggtatgcwgcctggtcaggcggggtgggcctgtaggattggagaccttatcctcaaggcaatagaagccactgacca

SEQ ID NO: 168020 - DNA, 629 bp, Homo sapiens
atttatagatcaatagaacagaatagaaaatccagatataaattcacatgcatctggtaataaattgatttgacaaagattctaagacactttaatgtggaaagaatttccttttcaacaaatggtgctgcagcaattggatagccatagaggaaaaaaaaaaatccaacttcggcctcattgcttcacaccacgcataaaaatactcaaaatggacacagaccaaagcacaaaaactaaaacttctagaagaatatataggagacagtttttttgcccttaaggtaggacacaaaagagcataaaccatgaaataaaaaaattcataagttggacttaattaaaatggattttttctgctcttggaaagatatcttaagaaaatgtaaagatccagcctgggcaacatagggagaccccatctctacaaaacacttaaaaaaattagccaggtgtggtggcatgtgcctgtggttccagcaacttaggaggttgaggggaaargttttcttgggcaaccttccagtctgtgcagcatcccaaggctgagcaaggaacaccaggagaaggaacaattaccaggagctgtaagctgggaggtctgggcttcaatgagccatgattgtgcc

SEQ ID NO: 168021 - DNA, 629 bp, Homo sapiens
atttatagatcaatagaacagaatagaaaatccagatataaattcacatgcatctggtaataaattgatttgacaaagattctaagacactttaatgtggaaagaatttccttttcaacaaatggtgctgcagcaattggatagccatagaggaaaaaaaaaaatccaacttcggcctcattgcttcacaccacgcataaaaatactcaaaatggacacagaccaaagcacaaaaactaaaacttctagaagaatatataggagacagtttttttgcccttaaggtaggacacaaaagagcataaaccatgaaataaaaaaattcataagttggacttaattaaaatggattttttctgctcttggaaagatatcttaagaaaatgtaaagatccagcctgggcaacatagggagaccccatctctacaaaacacttaaaaaaattagccaggtgtggtggcatgtgcctgtggttccagcaacttaggaggttgaggggaaaagktttcttgggcaaccttccagtctgtgcagcatcccaaggctgagcaaggaacaccaggagaaggaacaattaccaggagctgtaagctgggaggtctgggcttcaatgagccatgattgtgcc

SEQ ID NO: 168022 - DNA, 558 bp, Homo sapiens
gctaggcttgatgtggctgtatgaataagagacctatattaagaataagtaaggggtatggtatgggcaaaggaatttatataaggagttcgatagatagggctagggttggagcgataatgtatagaggaatggtggatgctaatggtcatagaggttctttaatataaagttttattgcatctgtaaaggattgatgtagtccatatggacctacaatgttaggtcctttgcatagttgcagatagcctaaaatttttcattcaatgagtgtaaggaatgctatggtgatgagagtggggataatgagtagaaaaaggttaattataggcatattgttaagaagagagccaagcccttttctcttctgccaggatatgtagtgatttcccagcaggctgtgatgtctctataagagtctggacctgtttttcctcagatcccctttttgtcttttcctgcttctgctctgagttgcagggaaccaaccccatggtctgtgtttcccaagctcttargagaactggtttctggctggaatcaacaaaagggagacac

SEQ ID NO: 168023 - DNA, 538 bp, Homo sapiens
ttctcactcactgcttttaaaaagtggttgcaaaaagccagcaacagctcaaaaggactccaggaagaaaactccctcaagcccaggctggaaacggcctcagggaccactgagtcccattctttggtttcacagctgtggaggctgaaggccagagaggagaagagactggcccagggtcacaacagagatagtggcagagcagggtccagccccgagtgcaccaggggctcagyctggactcccccacttagaatggatggctacgcctctgtccccttgacacagactctatccctcaggtaggactctggttgtctgggcctagagtcgtggcttgaaagcaggggccatgtccaggacatcgctgtgtcccttgaatacttagcaagtggtaggtgttcagtggcagcggtggtatttttaataaaactgaactgaacgaatgtggcggccaggctgtcccctgctctttgggcctcttactggacaccttatgggccatggctttgctgtaggcctagggaataatggctga

SEQ ID NO: 168024 - DNA, 525 bp, Homo sapiens
ggctgattgagctcatttaaggccatggtgacatcttccatctctgtrttacatgatgacatgtcaaggtgagaagctgataattttttcttgtgtgcttgcttggagggtgcatggaaggggaatggtacctctcttagacctttgcaaaaggaggtaggcttatatccattttttttttttttgagatgtagtctgtctctgtcacccaggctggagtgcagtggcgtgatctcggcttacttcaacctctgcctcccgtgttcatgccattctcctgcctcagcctcctgagtagctgggactacaggtgcccaccaccacacctggctatttttttttttttttgtatttttagtagagatggggtttcacagtgttagccaggatggtctcgatctcctgacctcgtgatctgcccgcctcagcctcccaaagtgctgggattacaggcctgagccaccacgcccggtctgtatcttgttctttagaggatctgctatgactcttctttagccatattct

SEQ ID NO: 168025 - DNA, 525 bp, Homo sapiens
ggctgattgagctcatttaaggccatggtgacatcttccatctctgtattacatgatracatgtcaaggtgagaagctgataattttttcttgtgtgcttgcttggagggtgcatggaaggggaatggtacctctcttagacctttgcaaaaggaggtaggcttatatccattttttttttttttgagatgtagtctgtctctgtcacccaggctggagtgcagtggcgtgatctcggcttacttcaacctctgcctcccgtgttcatgccattctcctgcctcagcctcctgagtagctgggactacaggtgcccaccaccacacctggctatttttttttttttttgtatttttagtagagatggggtttcacagtgttagccaggatggtctcgatctcctgacctcgtgatctgcccgcctcagcctcccaaagtgctgggattacaggcctgagccaccacgcccggtctgtatcttgttctttagaggatctgctatgactcttctttagccatattct

SEQ ID NO: 168026 - DNA, 554 bp, Homo sapiens
catcaattctggctgattgagctcatttaaggccatggtgacatcttccatctctgtattacatgatgacatgtcaaggtgagaagctgataattttttcttgtgtgcttgcttggagggtgcatggaaggggaatggtacctctcttagacctttgcaaaaggaggtaggcttatatccattttttttttttttgagatgtagtctgtctctgtcacccaggctggagtgcagtggcgtgayctcggcttacttcaacctctgcctcccgtgttcatgccattctcctgcctcagcctcctgagtagctgggactacaggtgcccaccaccacacctggctatttttttttttttttgtatttttagtagagatggggtttcacagtgttagccaggatggtctcgatctcctgacctcgtgatctgcccgcctcagcctcccaaagtgctgggattacaggcctgagccaccacgcccggtctgtatcttgttctttagaggatctgctatgactcttctttagccatattctttcccattaggcaagaatt

SEQ ID NO: 168027 - DNA, 554 bp, Homo sapiens
atcaattctggctgattgagctcatttaaggccatggtgacatcttccatctctgtattacatgatgacatgtcaaggtgagaagctgataattttttcttgtgtgcttgcttggagggtgcatggaaggggaatggtacctctcttagacctttgcaaaaggaggtaggcttatatccattttttttttttttgagatgtagtctgtctctgtcacccaggctggagtgcagtggcgtgatctcggcttacttcaacctctgcctcccgtgttcatgccattctcctgcctcagcctcctgagtagctgggactacaggtgcccaccaccacacctggctatttttttttttttttktatttttagtagagatggggtttcacagtgttagccaggatggtctcgatctcctgacctcgtgatctgcccgcctcagcctcccaaagtgctgggattacaggcctgagccaccacgcccggtctgtatcttgttctttagaggatctgctatgactcttctttagccatattctttcccattaggcaagaattc

SEQ ID NO: 168028 - DNA, 554 bp, Homo sapiens
catcaattctggctgattgagctcatttaaggccatggtgacatcttccatctctgtattacatgatgacatgtcaaggtgagaagctgataattttttcttgtgtgcttgcttggagggtgcatggaaggggaatggtacctctcttagacctttgcaaaaggaggtaggcttatatccattttttttttttttgagatgtagtctgtctctgtcacccaggctggagtgcagtggcgtgatctcggcttacttcaacctctgcctcccgtgttcatgccattctcctgcctcagcctcctgagtagctgggactacaggtgcccaccaccacacctggctatttttttttttttttgwatttttagtagagatggggtttcacagtgttagccaggatggtctcgatctcctgacctcgtgatctgcccgcctcagcctcccaaagtgctgggattacaggcctgagccaccacgcccggtctgtatcttgttctttagaggatctgctatgactcttctttagccatattctttcccattaggcaagaatt

SEQ ID NO: 168029 - DNA, 565 bp, Homo sapiens
ttattacttagtggccgtatgcataacagaattgattattacttaaaagttattattaagaacagtcagtttaggaatttctgctttgagacaactggtctrctctcttttcccttggttcaatttgattttccttagaactttagagcatagcaatgatcattttacatattgctccaagttatctgaaagttaatctagtgggattattatctttatttttaaagtaagaaaactcacagtcagaaatatcagtgctttctcataagacacacatctaccaaacatgactggattgtctatagtctacaaacgtgccttctgtgtattatctactcactaattagtattaacaaaaggtttaaattgtcttatgtttaggtttattgctcatgcacttttcttgtcaaattcattctaggataattctatactcttaaatattttaaaaaacaaaatccatttcctaagccatttctaattctacaattagatttctaaaacatttttaaacaaatctgaagatcagtataaccatgttgtatcctaacccctcccaaactgc

SEQ ID NO: 168030 - DNA, 317 bp, Homo sapiens
tagaagaaaatatgggaaaaaaatacatgacattagtgtagtccatatatttttttaattkggccccaaaagtacacacaacaaaagcaaagataggcaaataggattacatcaaactgaaaagctatgcacagtaaaagaaactattaactgtttgcagagacaacctatggattgggaaaaaatatttgcaagtcatacataaagtaagttaatatttaaactattaacaattcaatagcaaagagttcagataactcaatagcaagaaaacaaaacaagaatgaaaaagaaaaaaatatttaaaaatatgcaag

SEQ ID NO: 168031 - DNA, 590 bp, Homo sapiens
ctgtaattcaccaacaattttttttgaatgattaatctgtgctcagttttgtgctacaatctgtgacatcattcatgttgtcaactctgaagccttgaacccttaagaaagaaaaggttgaaaaatttccttaagtggataatatataccaaaagggtctcttcctaactcctatcacaaacatcatgatgaacacactaatactaatactataactcaagatatccataattataaatcctggagtttctacccatacaccaatgaatagcaatagtctccattaaccatactggcctaaaggtgtgtgtgtcaattcaaactccattgtgtctaaatatatatattcaagtagataccataaaagcattttaaagaagaaacaagtataataggagtttattgtaacacgtttaaggaatgaaataattgtccagatttcagaagcaatgttgggattgggatactagtagaagatattatggtaaggaagctaggaaacctcagattcttgcctaaggttgtcttgcttctctgcytcacaacgtcctcaaagaacataaaacacaagaaattacagcaaataaatg

SEQ ID NO: 168032 - DNA, 590 bp, Homo sapiens
ctgtaattcaccaacaattttttttgaatgattaatctgtgctcagttttgtgctacaatctgtgacatcattcatgttgtcaactctgaagccttgaacccttaagaaagaaaaggttgaaaaatttccttaagtggataatatataccaaaagggtctcttcctaactcctatcacaaacatcatgatgaacacactaatactaatactataactcaagatatccataattataaatcctggagtttctacccatacaccaatgaatagcaatagtctccattaaccatactggcctaaaggtgtgtgtgtcaattcaaactccattgtgtctaaatatatatattcaagtagataccataaaagcattttaaagaagaaacaagtataataggagtttattgtaacacgtttaaggaatgaaataattgtccagatttcagaagcaatgttgggattgggatactagtagaagatattatggtaaggaagctaggaaacctcagattcttgcctaaggttgtcttgcttctctgcctcacaasgtcctcaaagaacataaaacacaagaaattacagcaaataaatg

SEQ ID NO: 168033 - DNA, 592 bp, Homo sapiens
gtaatcacctcccaaagactccatctcttaacactatcacctcaggtgttaggtttcagcatatcaattttgaaggaacacaaacattaaaaccatagtagccaccaagggacaggttgcggattgccattttaatcccctcccataatatcatctttctgtatcaagatgctattcaaacttcttttcaaaaacacacaatttcctatagcaagaaagaagcatataatcatttgtgcaccaaaacataagcttcttgacttcagatggaactgtgacttttaaatgccctgrgatgctgagatgctctctttactgtatgctatggcttcaagtccatttttctcaaagaaaataccaacttgtcccaaattaaaactcagttttcttagttgagctacgtacaagatgtgaattcactggagaaatcctggaaacttccttttcttagaacaaacaattttttctcccttctctcccaactttttctgacatcattttactagaaagaaatgaaagtccttttaacttatgtaggtagcatccatagcctataacggaaagaccgttgaggtctcaaaaagagaaatta

SEQ ID NO: 168034 - DNA, 598 bp, Homo sapiens
cattgcctgacttcaaaatattctacaaaactgtagacaaaaaacagcatggcattgctataaacacagacacatagataaatggaacagaacagaatatccagaaataaatctacatatttatagccaactggttttcagcaaaagagcatatattaaagaaaggacaccatcttcaataaatggtgctctgaaaactggatattcatatgcacaaaaatacagctagacccctatcatttgccatttagaaaaaatcaaatcaaaggggattaatgacttaaatgtgagaccccaaactataaaactactagaataaaacataggsgaaacacttcaggacattggtctaggaaaaattttataggtaagacttcaaaagcttagacaacaaaaacaaaaatagacaagtgggattaatagtaaatgaaaaagcttctgcacagcaaaagaaacaaccaacaaagtggagaaacaacctgtaaaatgggagaaaatatttgcatactatttatccaataagtgactaatatccagaatatatgaggaactcaaataactcatcagcaaaaaaacaaataatttgactgaaaatgga

SEQ ID NO: 168035 - DNA, 598 bp, Homo sapiens
cattgcctgacttcaaaatattctacaaaactgtagacaaaaaacagcatggcattgctataaacacagacacatagataaatggaacagaacagaatatccagaaataaatctacatatttatagccaactggttttcagcaaaagagcatatattaaagaaaggacaccatcttcaataaatggtgctctgaaaactggatattcatatgcacaaaaatacagctagacccctatcatttgccatttagaaaaaatcaaatcaaaggggattaatgacttaaatgtgagaccccaaactataaaactactagaataaaacataggcgaaacacttcaggacattggtctaggaaaaattttataggtaagacttcaaaagcttagacaacaaaaacaaaaatagacaagtgggattaatagtaaatgaaaaagcttctgcacagcaaaagaaacaaycaacaaagtggagaaacaacctgtaaaatgggagaaaatatttgcatactatttatccaataagtgactaatatccagaatatatgaggaactcaaataactcatcagcaaaaaaacaaataatttgactgaaaatgga

SEQ ID NO: 168036 - DNA, 466 bp, Homo sapiens
aacctgcacgttgtgcacatgtaccctagaacttaaagtataataaataaacaaataaataaaattaaaaaaaataaaaccatcagatctcatgagacttattcattaccatgagaatgggatgagggataccggccccatcattcaattatctcccacagggtccttcccacaacatatgggaattatgggagtgccattcaagatgagatttgcatggggacatggaaccaaaccatatcatggtccctgtacttagataactttatgaaaaagttatatacagtaatctccagggacttctctctccyacctttactcatctattcaagaaatgccctatctctgaattcctcttttactctgtgtgtctagagacactactgcatcactgccacatgctctgcactgtggcaggtttagaaagaggtgcagtaatgaaaatgactggaactatagggccaca

SEQ ID NO: 168037 - DNA, 479 bp, Homo sapiens
tagcttgtgttgtaaaaaaatacattcttcagtatttagtaagtttatcacgctttggtgttaaattacagtacatgaagctttatgagatgaatattcaccttttttaacatctccaattttttctaggccaatgtagtagtgaacataataaatattttgctcaggtaatttctctatgttacagcaattacatcaaatttcataaacacttattatgtgagtgttatatgaaaagcataaggctaaggccatgcatggtggctcacgcctgtaatcccaacactttgggaggctgaggcaggtgtttcacctgaggtcatgagttcaagsctagcctggccaacccggtgaaaccccatctctactaaaaatacaaaaattagctgggtgtggtggtgagtgcctataatcccagctacttgggaggctgaggccggaaaattgcttgaacccaggaagagtttgcagtgagccaa

SEQ ID NO: 168038 - DNA, 461 bp, Homo sapiens
agatctcatggttttataagcacctggcatttccctgcttgtacttctctctcctgccaccatgtgaggaaggtccttgcttcccccttgcctttcaccataattgtaagtttcctgaggcctccccagccacgtggaactgtragtccattaaacctcttccctttataaattacccagtctcaggtgtttgtaaatatgaaaacaaggaagtcaggactgaaatgaaaaatagagaacaaaacaaaatcagttgtttgtttctgtttttcaaaggagcaggacagatataatcctgttttatctattttgtggttgaagaaactaaggcatgtgtaggttaagaaacacatgtattagtcatacaggttgtaaaagctagtacagacactgctctcaaacactacttcttttccagaacaatattatccctaagtataggacagggtcacagtaagtac

SEQ ID NO: 168039 - DNA, 587 bp, Homo sapiens
tctgtcaggttttatgttacttggagtcaaaccccatgatgattaatggatgatgtgtggatatctagtcattataccrtttctctacagtctcccatgacttttgatattttttcattttagaatttttcaggttgagatttcctgaagtgcaatgatcataaatttgtcaaattcaactcaacaaatgtttactatctcattcttctattaaactgtgggctgatgaaggacaatgttttatttatctttgcatatctagtattttgatgaaacatataatagatattcaataaatttgtcttgaataaattaatttacatttttctaactgtaccaggaattgtgttggatgccagagaagcaaatataaatgtaacatgctaatttcacacaatgatatatttcataatttagatgatatttacgtgcctttttttttctttccaaagcactgtaaaactttgagggcagggcctatgtctgctttgttcttatagatcataaagttttagcaagcagtttcaaacgtctaagaccttaaaagtctaatgaaatttaataaatatgtgtcagataaatgtgtt

SEQ ID NO: 168040 - DNA, 573 bp, Homo sapiens
gtttactaaatccttcacaattgcaatatgaaaaaatttgataaactttgaataacagaagccaaataaaaagtagtacatattgcctaattccatttatataatgtttgattacagtaaaaactgatttttttcttttgagaaacctgtttcctttagagtagggagtgattgaaagggatgcttctggaatgatggtaatgatctgttttttgatctgggtgccagttatatagatgttttcagtttgtaaatatwtgctgaattatgcaattgaatatgttcacttttacttatgaatattgtacttcaataacaactttaaagacaaaccttcactctttctatgttttatgaataatactgattttaaaactgagatgtaggatagttaagcaacagagcatgcattaaagttgcaaagtggctgatcaatggtctggatcaatgtctgctttaattttaagtatcatcttctgccaccataaaattgacctgtaggcttttctgtcccgtcatatacaatgataagcagtactagaagggcttaaaaggacataatgtggctggacg

SEQ ID NO: 168041 - DNA, 640 bp, Homo sapiens
ttgcctaaattagacataagtgcaacttggaggatgaaacttagttctagatttgaatgcgaagccacctgcatttccaaataggagtcttctactggtggttaaactcagattgtcaaagtgaactggtccttctgtgtgaaagagaagctcatgttctttttattcatgtcgaattgaggtgctcagtttctgaacaaagaggatgaatattggaaggtttggtaagaaagaatctcattgaacagacattgttagatcagtctgttctccgttttcttttgcagagtagagtcctttgcaatgctaagaactagttactacatagatttttatggtggagcctgacagattctattacggccagacttaatatgaagccctcagtgattccttttgggtcacagataaactatgccttaggaaattaagggtatcttttatttacarcactaaatctaaaataatgactgtgaagaaacagtgtggatggtggtctttctgtgacattttcttgcaggtcaaagtatgttgaagtaatttgactacaagaatggtttctacattagagatttatgtgtcatgcttagccgtgattgtctaatcatttaggagccaaaaggaagctgacttagacaat

SEQ ID NO: 168042 - DNA, 505 bp, Homo sapiens
aaaaaacaaaaaacaaaaaacactgctatgaacatttccatgtaagtttttatgtggatgcaagtttttgtstctctgaaatatatgcccaggagtctaattgttggatgatataacagttgcatggttagttttttcaaagcaaatgaaaagttgctttacatagaacctgtaacattctgtgttcctatcaacaacccaacagcttctctgcatccacactagcatttgatgttgtcactatggtttttagttttatttttgttttttaaggacaggtcctcactttgttgtacaagctggacttgaactgagctcaaaccatactccctagtagctgggaatacaggcatgggccattatgcatgactactgccactatttttttcattttaaccattctgataaacatgcaataatatctattataactttagtttaaatttccctaatggctaatgatgttgaacatctttttatttattttatgccatctctatgtcct

SEQ ID NO: 168043 - DNA, 505 bp, Homo sapiens
aaaaaacaaaaaacaaaaaacactgctatgaacatttccatgtaagtttttatgtggatgcaagtttttgtgtctctgaaatatatgcccaggagtctaattgttggatgatataacagttgcatggttagttttttcaaagcaaatgaaaagttgctttacatagaacctgtaacattctgtgttcctatcaacaacccaacagcttctctgcatccacactagcatttgrtgttgtcactatggtttttagttttatttttgttttttaaggacaggtcctcactttgttgtacaagctggacttgaactgagctcaaaccatactccctagtagctgggaatacaggcatgggccattatgcatgactactgccactatttttttcattttaaccattctgataaacatgcaataatatctattataactttagtttaaatttccctaatggctaatgatgttgaacatctttttatttattttatgccatctctatgtcct

SEQ ID NO: 168044 - DNA, 441 bp, Homo sapiens
ggtccagttttaatagtgtgaatatggttagccacttatcccagcaccatttagtgaatagggaatcctttccccattgcttgttttgttgactttgttggagatcagatagttgtaagtgtgttaccttattctagtctctattctgtkccattggtcaatgtgtttgtctttgtgccagtacattgctgtttgagtcattgaagccttgtagtatagtttgaagttgaatactctggcaccttcagctttgttctgtttgcctagaattgccttggctattcagactcttttttgattccataagagttgtagaattgttatttctaattgtgtaaagaatgtcattggtagattgacaggaatagcacttaatctgtagattgctttgggaagtgtggccattttaacagtatcattcttcttatccatgagcatgga

SEQ ID NO: 168045 - DNA, 561 bp, Homo sapiens
ccagtgtggtggctcacacttgtgatcccagcactttgggaggctgaggtgagaggatcacttgacgccaggaatgtgagaccagtctgggcgacatagtgagacctcctctctatttaaaaaaaaaaaaaaagaaaaaaaattggtgtggtagcgcacctgtagtctcagctacttgggaggctgaggtgggaggatcacttgagcccaggaggttgaggctgcagtaagctgtgtttgcgccactgcactccagcctgagcaacagagcaagaccctgtttcaaaaaaaaaaaaattagaaaaagtttggcaagccaaactagatacacctgcttgccagaagtagcccactggacaccaattwacagccttgctttaaaattccaggtagaaggaacaacatatgcaaatactttgaggcaagaaagagcttcacttgttcatggaaaagacagaaaggcggtatgtccagagccaggtgaccccggaggagagtgatgtgtgagaggaagttgaggaacagccagatcacaggagcttcctaagccatggtgagaag

SEQ ID NO: 168046 - DNA, 564 bp, Homo sapiens
  misc_feature (1)...(564): n = A,T,C or G
agtggttcatgcctgtaatcccaggactttgggaggcagaagcaggaggattgcttgagcccaagagtttgaggccagcccgggcaacatagtgagactccattcctacaaaaaaagaaaaagccaggtatggtggtgagtgcttgtagtccaagctacttgggaggctgaggtgggaggatggcttgagcctgggaagtggaggctgcagtgagccgtgatcattgcactccagcctgggcaacagagcaagaccctgcctcaaaaaaaaaaraaaccactttttatagaatttcttttggacaattctacacttaaaaaaaaagcctgggctgttttcagtgatttgaaaaaaaaaaaaatccccagggaantggaaccttttttttttttttttttttttttttttttttttttttttaactcctaagaagaaagtgtggacaggcagacttcaagtgtaacattcatggagttaattaagttgccatttattttgctaaccagagagggaaccactgattttgtcaaaaagatgaaacgcttgagtgtcttcaaaaaatc

SEQ ID NO: 168047 - DNA, 550 bp, Homo sapiens
aaacaggatttgtgtgaacaacaaggctgtttacttcacctgagtgcaggtgggctgagtctgaaaagagagtcagcgaagagagataggggtggggccgttttataggatttgggtaggtaaaggaaaattacagtcaaagggggttgttctctggtgggcaggggtgggggacacaaggtgctcaktaggggagcttttgagccaggatgagccaggagaaggcattttacaaggtaatgccatcagttaaggcaggaacaggccattttcacttcttttgtgattcttcagttacttcaggccatctagatgtatatgtgcaggtcacaggggatataatggcttagcttgggctcagaggcctgacactataccgactctatcagcagcctcactgtctcagaattctggaatgcattccatattgttctttctttctttctctttttaaagtgacttcttaagcataacatatatgaaccatatgtgaatacatgaaccagaaatgaatagtccatgttgttttaatgcattttattatatcctg

SEQ ID NO: 168048 - DNA, 581 bp, Homo sapiens
gggggttatatctcgataacccccttgtaagtgggaaatattgtaagtaaagttcaacttatggtattttccacttacaatgggtttatccagaggtaaccacatcataagttgaggagtgtactgaaggcatatggttttggcaccattgtaaagtagaaaaatctaagttgaaccttcataaattrgagaccatctataatctcaattgttgtcacccttatctattattatgtcctgtatatgttttttaatgattttgacataaaagttaaaatgaataatacatttttaaaaacccatttaattctctcagaggctatttatttctgtgatccaagatttttttttttttttaaacaggccaggcatctgtttaatgtttaatatcagatgaagccagaaaagaatttgacagtattaatttcatttttatccttgcaaaattttgttttagctttttaaaaaatttaacatatttaattgtcgaaagtgaaattaaatgtatgatttctctaattgatttctaaagttttattaacccataaacaagctagatactaattatttatatttaagct

SEQ ID NO: 168049 - DNA, 513 bp, Homo sapiens
aagtttcacgttttattttctcattcattaggagtaacttcttacacagcttctgtttttgcagatgcataacataaataggtttcaatttcctagtttctctctttttaaatgtgggcgacagaagatgtgaatttaattccttctggtccctcattctgtccagggtttccattcatgtggttgttcataagcattataggcacacttggcttttgggcataaatttattccctactcaacaatagaaatgatttttctctgaactgggactgtggaatcgatggctctggttaaatgatgtctttgtctgagtctcactttttaatgtttacytcagttgcttttccattaactctaagttgcagggcacctttgttcaagggcacttttgtagaggtaaacaaagttggctggagggcacacagacagaagtgatatcaaagagagtcacatgtctggtgctccagctgctgcagcattcaggaggcaaattccaagaatgggtcaatt

SEQ ID NO: 168050 - DNA, 576 bp, Homo sapiens
caattttggcttttgttgccattgcttttggtgttttagacatgaartccttgcccatgcctatgtcctgaatggtattgcctaggttttcttctagggtttttatggttttgggttttacatttaagtctttaatccatctttttttttttttttttgtataaaaacggcatattctttattttacattctttaatttcagaacaaaatgaagaaaataaaataaaccacaatacacaacatccaatcctgctgtcaagagtagagagggaatggggcttgacacccttggtttcctgccttcaacacaaggacaggagagggaaaaaaacactagacaccagcagccaggtgggacaggggcactcgaggctgcagtgggagccatggggacactatacaagggcacaagttttccaactatgaactcctaatcgacttcttccatgcgagacgcatcctcatcaccctcaagaggggggatctcatcaggaactgcatcactgggttcctctgctgccacttcatcttcatcagtacctagacctagcttgatcatgtggtagatgtggttgg

SEQ ID NO: 168051 - DNA, 534 bp, Homo sapiens
ggaattctataaacaatccacagcaatatatgttktgaaatttcctttccccttcctcttgcactcaatttctctccccatgactccctgagatctatcttgtcaccaaccataaatgttttccctgaagtctactgatttactatcccctttctgtctctcctaattttttttccatacatagtaaatctggccttttatttgtgacttttccccaactgtatcttcttctcagatttttgccttcccaattaacctggtctacatcaatgtttcccaaccttcttttcattattgcctttcctaagaagactttgtaactccctcccacggatataccatatatttgcttatgtgctatatgtatatctgtgttttagacataaaaatagtataattttttcacccctcaagaaccagtcctccttcttgggagcagtatcaccccagctgagaatgcatggtctccaacacaggcaggataagaagagaggagcaggaactgacaggtgagcaacgccagcaaactgcaag

SEQ ID NO: 168052 - DNA, 497 bp, Homo sapiens
atatatgttttgaaatttcctttccccttcctcttgcactcaatttctctccccatgactccctgagatctatcttgtcaccaaccataaatgttttccctgaagyctactgatttactatcccctttctgtctctcctaattttttttccatacatagtaaatctggccttttatttgtgacttttccccaactgtatcttcttctcagatttttgccttcccaattaacctggtctacatcaatgtttcccaaccttcttttcattattgcctttcctaagaagactttgtaactccctcccacggatataccatatatttgcttatgtgctatatgtatatctgtgttttagacataaaaatagtataattttttcacccctcaagaaccagtcctccttcttgggagcagtatcaccccagctgagaatgcatggtctccaacacaggcaggataagaagagaggagcaggaactgacaggtgagcaacgcca

SEQ ID NO: 168053 - DNA, 497 bp, Homo sapiens
atatatgttttgaaatttcctttccccttcctcttgcactcaatttctctccccatgactccctgagatctatcttgtcaccaaccataaatgttttccctgaagtctactgatttactatcccctttctgtctctcctaattttttttccatacatagtaaatctggccttttatttgtgacttttccccaactgtatcttcttctcagatttttgccttcccaattaacctggtctacatcaatgtttcycaaccttcttttcattattgcctttcctaagaagactttgtaactccctcccacggatataccatatatttgcttatgtgctatatgtatatctgtgttttagacataaaaatagtataattttttcacccctcaagaaccagtcctccttcttgggagcagtatcaccccagctgagaatgcatggtctccaacacaggcaggataagaagagaggagcaggaactgacaggtgagcaacgcca

SEQ ID NO: 168054 - DNA, 522 bp, Homo sapiens
gggaattctataaacaatccacagcaatatatgttttgaaatttcctttccccttcctcttgcactcaatttctctccccatgactccctgagatctatcttgtcaccaaccataaatgttttccctgaagtctactgatttactatcccctttctgtctctcctaattttttttccatacatagtaaatctggccttttatttgtgacttttccccaactgtatcttcttctcagatttttgccttcccaattaacctggtctacatcaatgtttcccaaccttcttttcattattgcctttcctaagaagactttgtaactccctcccayggatataccatatatttgcttatgtgctatatgtatatctgtgttttagacataaaaatagtataattttttcacccctcaagaaccagtcctccttcttgggagcagtatcaccccagctgagaatgcatggtctccaacacaggcaggataagaagagaggagcaggaactgacaggtgagcaacgcc

SEQ ID NO: 168055 - DNA, 479 bp, Homo sapiens
gtggaccacggttgaaaactattaacttgggtgaagtttctggaattcacagaaatggagataatttaatacaggattatgagaaagttgaagtcttgtgagaagttgactgagaagagttattctgccaatttttagctctgcggtgtttttaatcagaaagaaagcactgaataacagtatgatatgcttaccactggtctatttcaaaaggtacattattctatcattcctttgaaatctaaaaataccctgcttcttgtatgaataaaatattttatttagacataatagtgaaggaacctgtaggctttacttttattaaaaaaaaaaaaacactgctttygccagttacaaaaatctggaaaatcataagcaatactgttggttgaactaatcataagacttggtgcttctatttttccccttccctgcatattgcttcaacttcttgctctttcctttgctaaatataacta

SEQ ID NO: 168056 - DNA, 420 bp, Homo sapiens
aacatttacttaatactttgtgaaaattgtagagtaggtcatcatacaaatataaaatcatttatttagtccgttttctgctaarggaaattgagaagttactttttcctatttttaaaattataaatagtattataataaacattttgtttatatattcttggacatttataaaaatatgtctatggagtaaatttcttagaagtggaatttcttgctcatatagatttctgcatttttgatattgagagattgccaaataaatatttttaagaaatttcaactctttctccaaccaataacctttacattgtttttctgcttacaataatagttgaattaaaaatattaatgcatcacatattaaaaagaaatacaatactttggttcttatattccataacaataattctaaaccca

SEQ ID NO: 168057 - DNA, 488 bp, Homo sapiens
ggaaaacatacttacaagtgggttcataagccaaacaaaagctgtaatttagtggaaggaactgacagttctctttagctttcaaaatgtttttgaactcagaaaggggcatgtatagtgctccaacacaaacgtgtaatctttggcccagacaaatggatgctcttgtggacaatgtagaatttgtcatttccttcacatggaatttgctttggttacaccatcttaccacatccttccttagagggtcctcttttcstcttccactttgtgcatcttctacccccctccagcttgtaccagaggaaagaaaacatattatttttcttgcccagctattcaaacatatcgctacaagaaactgcactttaaatacacaatacattgggttacttctggccagtcttatttattaattaactctttactgcagccaaagccaagactgatttgtttatcagaagccttaaagttgtgtctctctacag

SEQ ID NO: 168058 - DNA, 488 bp, Homo sapiens
ggaaaacatacttacaagtgggttcataagccaaacaaaagctgtaatttagtggaaggaactgacagttctctttagctttcaaaatgtttttgaactcagaaaggggcatgtatagtgctccaacacaaacgtgtaatctttggcccagacaaatggatgctcttgtggacaatgtagaatttgtcatttccttcacatggaatttgctttggttacaccatcttaccacatccttccttagagggtcctcttttcctcttccactttgtgcatcttctacccccctccagcttgtaccagaggaaagaaaacatattatttttcttgcccagctattcaaacatatcgctacaagaaactgcrctttaaatacacaatacattgggttacttctggccagtcttatttattaattaactctttactgcagccaaagccaagactgatttgtttatcagaagccttaaagttgtgtctctctacag

SEQ ID NO: 168059 - DNA, 415 bp, Homo sapiens
tgggttacttctggccagtcttatttattaattaactctttactgcagccaaagccaagactgattygtttatcagaagccttaaagttgtgtctctctacagggttagcagagcattcactgcttcttcttgtttgttttttaattgaaaacacaacatgagtgaccttcaaatgcacctttaatttccatttaatcatcatattactccttcaacttctctattttattaaatatgtataaagttcatttagaagtcttaagtttagagcctggaatgtgttataaatatgtattccaaaggacaagaccatggaatgtaaacagaaatggtaaattctggtgtaacaacagaatttttatttagttttttactttttcatgcattgggtggggcaaaaacattatttcaatc

SEQ ID NO: 168060 - DNA, 415 bp, Homo sapiens
tgggttacttctggccagtcttatttattaattaactctttactgcagccaaagccaagactgatttgtttatcagaagccttaaagttgygtctctctacagggttagcagagcattcactgcttcttcttgtttgttttttaattgaaaacacaacatgagtgaccttcaaatgcacctttaatttccatttaatcatcatattactccttcaacttctctattttattaaatatgtataaagttcatttagaagtcttaagtttagagcctggaatgtgttataaatatgtattccaaaggacaagaccatggaatgtaaacagaaatggtaaattctggtgtaacaacagaatttttatttagttttttactttttcatgcattgggtggggcaaaaacattatttcaatc

SEQ ID NO: 168061 - DNA, 415 bp, Homo sapiens
tgggttacttctggccagtcttatttattaattaactctttactgcagccaaagccaagactgatttgtttatcagaagccttaaagttgtgtctctctacagggttagcagagcattcactgyttcttcttgtttgttttttaattgaaaacacaacatgagtgaccttcaaatgcacctttaatttccatttaatcatcatattactccttcaacttctctattttattaaatatgtataaagttcatttagaagtcttaagtttagagcctggaatgtgttataaatatgtattccaaaggacaagaccatggaatgtaaacagaaatggtaaattctggtgtaacaacagaatttttatttagttttttactttttcatgcattgggtggggcaaaaacattatttcaatc

SEQ ID NO: 168062 - DNA, 391 bp, Homo sapiens
caatttcctgagctggagttatttttcacatcacattcctcctagtgaagctataaaacaacaatgtcattgcatccctaggagttgtcagaggaaaatctcaccagctcgggaagtggcattgggcaggaaaggggtgggggtgacayggctgtgacacagaactaactggagtcctggaggggagggaaacccttccttcaggtgaggcaataagccacatccttgactatttgtgtgaacatttagaagagttcccctggtaccttccacaagaatttgtctttggcctattcttgtcatttttggttacagcaaaatatttttctgagaattttaattagataccctttccttgacttcttgacctgccagtgttcttcagccctgc

SEQ ID NO: 168063 - DNA, 391 bp, Homo sapiens
caatttcctgagctggagttatttttcacatcacattcctcctagtgaagctataaaacaacaatgtcattgcatccctaggagttgtcagaggaaaatctcaccagctcgggaagtggcattgggcaggaaaggggtgggggtgacatggctgtgacacagaactaactggagtcctggaggggagggaaacccttccttcaggtgaggcaataagccacatccttgactatttgtgtgaacatttagaagagttcccctggtaccttccacaagaatttgtctttggcctatwcttgtcatttttggttacagcaaaatatttttctgagaattttaattagataccctttccttgacttcttgacctgccagtgttcttcagccctgc

SEQ ID NO: 168064 - DNA, 580 bp, Homo sapiens
ggtagtttacataagccaaacaacttgcaagtagcagaaccaacaattggctccagagactcaaaccttaactctgctgtatgtgatatcattgattacccaacagttgcatttttattgacccctattaggtaaaacgactactagtattactaacactaataatcatagttaacattgattgaacacgcattgtgtatcaagcactgggctaaggccttacacttacaattccatttaatctttgtcaacaattctatgaggcagatattatcaatattacagtcaattagcacagaaagattaggtaacttattcaaggtcacacagtaaacaattggtttgaattcaggaagtctaactatagtattagcataattttttaatttaaattttaaaaggagaatctgtggcctattcatagaattaagcttactcatccaaatgtcatttgaasatttgttttaagagtgtagtgatctacagtgagaacacatggacacatggtggggaacaacacacactgttgggaggagggagagcttcaggaagaatagctagtgagtgctggacttaacac

SEQ ID NO: 168065 - DNA, 445 bp, Homo sapiens
gtcacccaggctgaagtacagtggtgcagtcttggctcactgcaacctccacctcctgggttcaagtgattcttgtgcctgagaagctgggatcacagatgtgcaccaccatgcctggcaaaaagaaacaaacaaacaaaacaaacagcatagtgttctaaccagctaagtgaactagttcttaacaaaakcctgaagacatatttaatagcaatcacttacaaaacatttcaacagaaaagtttcagtgttccatagctggtagagctccaagacctctgcaaagtacccactgacagcaaatatttcaaatctccccacggacccatcctatcccacatcataatttgctttttacttaaatgtagtagagcatcatctcttctactcaaaagtaaaagaaaataatctgaacatttcataagctattacagctaaggtatta

SEQ ID NO: 168066 - DNA, 445 bp, Homo sapiens
gtcacccaggctgaagtacagtggtgcagtcttggctcactgcaacctccacctcctgggttcaagtgattcttgtgcctgagaagctgggatcacagatgtgcaccaccatgcctggcaaaaagaaacaaacaaacaaaacaaacagcatagtgttctaaccagctaagtgaactagttcttaacaaaatcctgaagacatatttaatagcaatcacttacaaaacatttcaacagaaaagtttcagtgttccatagstggtagagctccaagacctctgcaaagtacccactgacagcaaatatttcaaatctccccacggacccatcctatcccacatcataatttgctttttacttaaatgtagtagagcatcatctcttctactcaaaagtaaaagaaaataatctgaacatttcataagctattacagctaaggtatta

SEQ ID NO: 168067 - DNA, 445 bp, Homo sapiens
gtcacccaggctgaagtacagtggtgcagtcttggctcactgcaacctccacctcctgggttcaagtgattcttgtgcctgagaagctgggatcacagatgtgcaccaccatgcctggcaaaaagaaacaaacaaacaaaacaaacagcatagtgttctaaccagctaagtgaactagttcttaacaaaatcctgaagacatatttaatagcaatcacttacaaaacatttcaacagaaaagtttcagtgttccatagctggtagagctccaagacctctgcaaagtacccactgacagcaaatatttcaaatctccccacggacccatcctatcccacatyataatttgctttttacttaaatgtagtagagcatcatctcttctactcaaaagtaaaagaaaataatctgaacatttcataagctattacagctaaggtatta

SEQ ID NO: 168068 - DNA, 630 bp, Homo sapiens
tttaacctaaattgctaataacattttagagaatgaggaaaaaagatgtttcagaatctcttcaggatgaaagacttctggttttgtttacccgcttttccattactacttttaatgaatgaagtttgttgcatttattcctctgaagtttcaaaaccaaaccaccagatatgtactgggcaccatatatgtataagaaattatgctaggcagcatgaagagatataaaactgagtagcatggctcttccccaaagcagggattttaacctatggtcatgaggtgtctgcagacacgttctgggaagaccttaaatgktcagagatccttggcaaaattttgtgtgtacttgatttcatcagagtccccaaagaagtcctagtcttcctcagtcctcaaccaccacaacaacaaacgaagagccactcccaaaagttatgcaatctagttgggaaatgtagttgacaaggcaattttacaatcactgtacagcaaatagctataactaaatggataaccttagcctagttcttgtgtaagattgctatgtggaactccagcagaaatgttgtgggatttagtgggtggcatttttcctggtactggcttaacattcttgtaaggccttcc

SEQ ID NO: 168069 - DNA, 604 bp, Homo sapiens
cccttgctcaggcctccaaccaaagtggcctcttctctgttcctggaacaagtcacaaggcttttatttctggggcactatttttcttatttcttcttcctggaatggtcttcccatagacagtcatatggctgcaggyttatctgagtctgttcatgctgctactacagaataccacagactgggtaatttataaaaaacagaaatttatttcacacagttctggaggctgggaattccgcaatgaagaggccagcatgttcattgcctgacgagggctgtctatctcttcttccaatttggcaccttgctactgcatctccagaggggacaaatgctgtgtcttcacactgcagacaagcagaagggcaaaaagggactagctagtttcttcttgcccttttataaggtcattaatcccattcatactggggtctgccttcatgacttaatcaccttctaaagagcccatctctcaatactgtcaccttgggtttaagttctaacatgggaattttggagggacacgtacattgaaaccataacaaggtctttactcaaaagttgccttctcattgaggccttcccaggacttcctatctaa

SEQ ID NO: 168070 - DNA, 604 bp, Homo sapiens
cccttgctcaggcctccaaccaaagtggcctcttctctgttcctggaacaagtcacaaggcttttatttctggggcactatttttcttatttcttcttcctggaatggtcttcccatagacagtcatatggctgcaggcttatctgagtctgttcatgctgctactacagaataccacagactgggtaatttataaaaaacagaaatttatttcacacagttctggaggctgggaattccgcaatgaagaggccagcatgttcattgcctgacgagggctgtctatctcttcttccaatttggcaccttgctactgcatctccagaggggacaaatgctgtgtcttcacactgcagacaagcagaagggcaaaaagggactagctagtttcttcttgcccttttataaggtcaytaatcccattcatactggggtctgccttcatgacttaatcaccttctaaagagcccatctctcaatactgtcaccttgggtttaagttctaacatgggaattttggagggacacgtacattgaaaccataacaaggtctttactcaaaagttgccttctcattgaggccttcccaggacttcctatctaa

SEQ ID NO: 168071 - DNA, 619 bp, Homo sapiens
attagataatgtctgagcagcatcctaacttatcagaataacctttttggttggagaaccatggaaacaaatagtcatcccattgccaatcatacttatatataggtcctgagtgagtgggtgactgctagggtaaccaggctgatgaggatgaccagggaagcagagggcctcatggagggcagtggaagttggggaaatgtgttcccttctccgcacacactctgtgcaacaagggtgtgcagtacagtactgtggaggctgtactgctcacaacacacatttgcgagaccccatgcacagacctcactcaatcaaggcctagaggctcaggtgcctctcccacctctcacggtggaaaaatgagtcttgctgacctagctcaagtyggccagctgaagattttattttgagcaacatgttccaagaagcagctggagtggggctttctcatcattttccagtaaatgtgctatgtcaacattgattcagtgaccactgatcagaagaggatgccagctttcctgcccagaggcagacaatgccatctccattacagggccacattcaagcctaagacatctgcttgggggtatagaggggacaagggagggatgcg

SEQ ID NO: 168072 - DNA, 195 bp, Homo sapiens
aagcacttgaagaaataatggctgaaagctttccaaattggcaaaagacaaaaacctacagayttaaataggtgggtgaactgcagacaggataaaccaataaacctacagaaacctacagcaagctagaaagatcatgcaggtttctcctttctgaatgaacagagtgagagaatctgatgcatccattagctg

SEQ ID NO: 168073 - DNA, 546 bp, Homo sapiens
cttcactaccactgtagcattggcataagyagctgaaaatgcattggtatgatgatgtaaaatatgtcaagagttacagagaggaccatccgcttgatatatgttgtcttttaagtataaaactgtcaagaacaagttgatataaaacccagtggcttcagaatggtatgcacatgctatttctcattttttaaagaagtagctaaatatattttaaagcaagtgcagtactaaggattcagagtttagctcaggattgaatgctttatttaacaagagtggtgagagccatggtagaatcacacaatgtgtgactgcaaagaaagaatattttaaatcccccattgtactgatgaataaatcaggtccatagagtcactttgctggtcaatggcagagtgggactacagttaaagtctcttgatccttaatcctctgcttttgctatgataatatattatattacattgaaaatcctacaattaatcctgcttacaaagtttatttcctcattcttattccctttaaaattgtaataactatttc

SEQ ID NO: 168074 - DNA, 605 bp, Homo sapiens
taagaccttcactaccactgtagcattggcataagcagctgaaaatgcattggtatgatgatgtaaaatatgtcaagagttacagagaggaccatccgcttgatatatgttgtcttttaagtataaaactgtcaagaacaagttgatataaaacccagtggcttcagaatggtatgcacatgctatttctcattttttaaagaagtagctaaatatattttaaagcaagtgcagtactaaggattcagagtttagctcaggattgaatgctttatttaacaagagtggtgagagccatggtagaatcacacaatgtgtgactgcaaagaaagaatattttaaatcccccattgtactgatgaataaatcaggtccatagagtcactttgctggtcaatggcagagtgggactacagttaaagtctcttgatccttaatcctctgctttygctatgataatatattatattacattgaaaatcctacaattaatcctgcttacaaagtttatttcctcattcttattccctttaaaattgtaataactatttcctacatttcttggattagagaattgcaggtaaaacccctcacaaaggaaaaca

SEQ ID NO: 168075 - DNA, 520 bp, Homo sapiens
tgtctattcctcagtctctttcgtgatttgaaacaggtctgtaatactgacacatgcttgatgttactacttttgaatagagacatggctcatattctgtcaaaattacatttctagttactaattgttttccttttcacgcaattccctgatagattttgtgtgtaatggaatttgtgagaatattcaatatgcaataaattctaactgctctttcagtagcattgttacttttccctggatacacaactactgcattgaagccacgttgataaacccatctactttcaaaaccaaattacaataggaatttagaaggctrcaggacttttaaacgttgtggaaaagtacctcctttgccaaaagagtatatacatacagtgtacagtgtgaatatttaaaatcacattttattatttagaatatttctactttatgcaagtgtcttgtaataatgtgagttacttagattaccaaagtgcctggagaatacagcagaaatgcctgataaaagcagtta

SEQ ID NO: 168076 - DNA, 511 bp, Homo sapiens
gaattcttttttaatgattccaggaacaatgcaatataatcaaaatgttaatgtatagttycccagtacttgatacattctagaacatactaactcaaagaagagttccagcagcagcagccctccctgatctcttattaaaaatgcaaaatgtcacactcaacccagacatcagaatctgcattttaaacagatttctacttaggtgatttttgtgcaaatgaaagtttgagaagccctgatttaaaatattatactttcatccaccaaccatagtcttcttgagtaccacaaatatacgagactctatgctagacatagtgggtattaagataaattattcctgcactgaagagtcttaacacagtagaaggagagaaaagcagccactatggtgatagttgggtgaacaaaaggaaccaagaagagaaaataagtcaccaccctgtgataggcagagaataaagagatcgacattgccactgggccttaaaaggtgggagtatttctc

SEQ ID NO: 168077 - DNA, 510 bp, Homo sapiens
aaaatgttaatgtatagttccccagtacttgatacattctagaacatactaactcaaagaagagttccagcagcagcagccctccctgatctcttattaaaaatgcaaaatgtcacactcaacccagacatcagaatctgcattttaaacagatttctacttaggtgatttttgtgcaaatgaaagtttgagaagccctgatttaaaatattatactttcatccaccaaccatagtcttcttgagtaccacaaatatacgagactctatgctagacatagtgggtattaagataaattattcctgcactgaagagtcttaacacagtagaaggagagaaaagcagccactatggtgatagttgggtgaacaaaaggaaccaagaagagaaaataagtcaccaccctgtgataggcagaraataaagagatcgacattgccactgggccttaaaaggtgggagtatttctcaagctttcaaacttttatcagcaaaggatagaagggaatt

SEQ ID NO: 168078 - DNA, 633 bp, Homo sapiens
  misc_feature (1)...(633): n = A,T,C or G
gctccacattcttgccaacatttgatgttctcagtgtttgggatttttatcctcctaacaggtgtaaactggcatctcgttgttttaatttgcaattccctaatgacatgtgatgtggaacgttttcartaggcttatttgtcatctgtgtatatccttttgtgagatgtctgtttgatctttggttcatttttaaattgagtttttttttttcttgttgttgagctttgagagttctgtttatattttaaataacagccctttatcagatatgttttgcaaatattttcttttattatgtggcttgtcttctcactcaaatatagacagtgcctttgcagagcttaagtttttaattttaataaagtacagtttatcaattatttatttgatggattgtgcttttggtgttttaattaaaaagtgattgccaaatccaaggtcatctacactttttcctgtgttattttttaggagatttatagctttgtgtgttacatttagaaccacgatttattctgagctaatttttgtaagaagtggaaggcctgtgcttaaattcatttttgcatatgacgcccagntgttccagcatcattagctgaaaacactatcttcactccactgtattgc

SEQ ID NO: 168079 - DNA, 633 bp, Homo sapiens
  misc_feature (1)...(633): n = A,T,C or G
gctccacattcttgccaacatttgatgttctcagtgtttgggatttttatcctcctaacaggtgtaaactggcatctcgttgttttaatttgcaattccctaatgacatgtgatgtggaacgttttcagtaggcttatttgtcatctgtgtatatccttttgtgagatgtctgtttgatctttggttcatttttaaattgagtttttttttttcttgttgttgagctttgagagttctgtttatattttaaataacagccctttatcagatatgttttgcaaatattttcttttattatgtggcttgtcttctcactcaaatatagacagtgcctttgcagagcttaagtttttaattttaatamagtacagtttatcaattatttatttgatggattgtgcttttggtgttttaattaaaaagtgattgccaaatccaaggtcatctacactttttcctgtgttattttttaggagatttatagctttgtgtgttacatttagaaccacgatttattctgagctaatttttgtaagaagtggaaggcctgtgcttaaattcatttttgcatatgacgcccagntgttccagcatcattagctgaaaacactatcttcactccactgtattgc

SEQ ID NO: 168080 - DNA, 418 bp, Homo sapiens
tccttctgtggttttgtttctcttgttgtattgtatttaacttttattaaagttttgtgagatttggttagcccctgamataatccaaatgtgcataattaacaaaactggctatataaaaatttatatacacatatatgtatgtataaaatgtacgtatgcacatttcatctatttatttattatatgatccgtgattattggttgtaagccagacactgactgaaaaaatgatgcaacacaaagataagcaaaatgtgatccttccttgagctactcacacttctttttgcatgttagtaaattagtaatgatgatattaggtaattaaggagtcaagtactgtcaccccaaaatatggcatccttttatactgagtattttgtaactaaaatacttaaccattcctttcagtgaa

SEQ ID NO: 168081 - DNA, 418 bp, Homo sapiens
tccttctgtggttttgtttctcttgttgtattgtatttaacttttattaaagttttgtgagatttggttagcccctgaaataatccaaatgtgcataattaacaaaactggctatataaaaatttatatacacatatatgtatgtataaaatgtacgtatgcacatttcatctatttatttattatatgatccgtgattattggtwgtaagccagacactgactgaaaaaatgatgcaacacaaagataagcaaaatgtgatccttccttgagctactcacacttctttttgcatgttagtaaattagtaatgatgatattaggtaattaaggagtcaagtactgtcaccccaaaatatggcatccttttatactgagtattttgtaactaaaatacttaaccattcctttcagtgaa

SEQ ID NO: 168082 - DNA, 538 bp, Homo sapiens
ttgactgtcttttttttcccttgaaatttatgtgtccaccatcttatatatataaaagtcttctactgacttaatctaatcagattgtagatgaagagatgggaatcccatttctacatttctttaagaaacaacccaaaatctcaaattaaaaaaaatgaattattatatttctttactttttcacttagctcctgttaaatttcttacataaataatacatgggctgagaacaggtagtctctctgatagctatttaattaacttacttaactgtgacactgagggctctcatacagtttttttctcccaaattgttgatgcctttaaatgattacccaggattgtggaatgagaytcacaacaacaatcttttttatgaacatggcacaacttttttgtatgagtaaattaaagacagtatttaaaatcctaaaactcattggatgtatggtcgattcagggatatggagatctctacacatgagaagtttgccagccagctataaaggaattggtaccagataagtcccattac

SEQ ID NO: 168083 - DNA, 423 bp, Homo sapiens
aaataaattttcctgaatcatatatttaggtcaacttaattattttttgaacttatgagaattctttcagtttccaatcttcagctttgaagttttctttcattgctaaccttcattataaagtatgcctgcctttattgtctttcaraagatgaataatgaatatatttttgaaggtagataagaaatctgttcctataataacattcagaaatatgtttcctcagtataatgaatatttttatttggtcagtagatctttatttttttcttgatattggtaaattgtagtgttttgggctgtatatatttatcctttatataaaatggctttggaaaattagactttccttgtctttctcatagtagcacatgactttgaaaggacatttattttctctttcttgaaaattattggaaaac

SEQ ID NO: 168084 - DNA, 574 bp, Homo sapiens
aaattagactttccttgtctttctcatagtagcacrtgactttgaaaggacatttattttctctttcttgaaaattattggaaaacaggccttttcctctagacttctattgcatcaataaatgtggcctaacagtgacatttatagcatgaagtcctcctgttctgcttaggatctctgtttacattaaattgccattgtgctgctttcttatatgcaaaataaatagaaaagactactgttttaacattttatttttaacataatatatttttatgaaacataatctaccactcttgtttccctgatctggagtcatttctgccaaatgcagggattttagtcacaggactgatagaccaatggaatcagtgaattccaagatactttccagctacaaaagtctgtggtaattctaatttttaataatgggaaattttcagaactttttcaatatattgtctctgctttctttttctggaacgtcctctctcaggctaacacacttggaagttcctccagaatctatctttagaagtcatagctcaatttccattttccacaaaacatcatt

SEQ ID NO: 168085 - DNA, 486 bp, Homo sapiens
ctttatgtcttctggtagtaattttcgatttactgaccacttagctctactcccttgctataaaaccccacttttccttctgttcagagtccagctcaatctctctctttattgcagcagccttgaaggaagtcttccttactgtttttaacaagygtcagaataattgttcttagacaggagggatactttgattcttcttccttgtatttccatgacatgatttttgttctaaacctccaatctcaagaggaaatagtattgggaaaactacgtttgttttttcactccacttctctcattgatttctcccctcaaaaaaaaaaaaaaaaaaaggaaagaaaaggaacgaagaaggtaaatatatagaaaaatttgttgaaaaatgaattcctattatgtctactattactaaatatctactgctgtgtttacagtcatagttcctgtatggccccatatcttctcatccccttttctcccctc

SEQ ID NO: 168086 - DNA, 392 bp, Homo sapiens
tcggttgaattctgagaaaagggaaaaaaaaaagaaacaatttaggatcattttcaaacctctgcctccaacccactattgtttctgtagtgaaaacaaagtcattgaattctcatatggtctcagtttagaatacartagtgaggagagttcccactgtcatctctataaataattagggtttataagaaacctggaaaacaagatcaaggtatagcaataacttgattaatggggtcagaaaaacacccaataaacttcatagagggggctgctctttgttagataggagatgtgccttagcttagctttgatttagaaagatctataagaacatccccttccctaaatcaaatctacacgttccccatcagtatcttatacaatgtttg

SEQ ID NO: 168087 - DNA, 501 bp, Homo sapiens
acccactcacatcagcaataaccactatctaaaagtagagattgtatgtgataagaatatattttcttattatggtatgtggatctgaaggaattctaggaaacaagaatatagtgtgtgtgtgtgtgtgtgtgtgtgtgtggtactggcaattgactttaggattggtgaaattttaatatgctgtcttattgcaaggccaagcctctgaaaagttacaaataaaatcactctaaaatgaaaaaatttaaaaaatagaaataacttcattttacccacataaaattttgtgtaacaaatgartgatgggctgcttcgtagtattacttttttgtatgtgtcaaataactatacaaagcataaaatgaaattaatggatttaagttatctcagttttaaagagaatatattctttatgttaatttttctgcctttgagagtggataagttggaatttttacagttacagataatattaactcaaattacatgtttgattta

SEQ ID NO: 168088 - DNA, 563 bp, Homo sapiens
attttccattttaatagttcttacttttgtatcataacaagacagtacacttggatgttttatctgtttaattttttgagaatgatagttcaatttagtttgtgtagtcttcccgatgagtatataaaccgttaacagatatttcacaaaattaagaatcacttctaagagcaaatatttttaaactatttaactctgcaattgaacacactgacacttttccctacaacactagtcatgtactgtaattctgtaataaaaaaactattattttacttcagcaatgtctctggtaacaccagttatgtcaacttgagaaaatatcttaaattatccaattttctgtatattctccccatcccctttttttgagatggagtcttgctttggagtgcagtggagcaatcttggcytactggagcctccacgtccttggttcaagtgattctcatgtctcagcctcccaagtagctgggactacaggcacgcaccaccacacccagctaactttctgtatttttagtagagatgaggtttcaccacattggccaggctggttttga

SEQ ID NO: 168089 - DNA, 604 bp, Homo sapiens
ggtttattatgactatgcatggctgaagaaagaatgactcagcttgaaaatatgacattaggaacttcaaaaaagaaaaaaaaagactgcaaaaaaaaattagtcaataacagtgggacaactacaaaaggtataaatgtgcaaaattagaataccaggaggagaagaaagagacagtaagaaaaaaaatatttgacgaataatgactaaaaatttcaccaaattaatgccctaaacctcataagacccaggaagctcagagaacaccaagcaagataaatgccaaaaataaactacactcaggcatgtatgtcatattcaaacttgagaaaaatcaaagacaaagaaaaaaatatattgaaagaagccagaggaaaacaataccttacctacagaggagtgaaaataaraattccatctgacttttcagaaagcatggcaacaagaagacaagtatggagtgaaatatttatagtgttgagagagaagaaaaaaaaaaaaaaaaacaaagaaaaagcctgccacacctgtaatcccagcactttgtgaggctgaggcaggcgatcacttgggcccaggagtttgagaacagcctgggcaacat

SEQ ID NO: 168090 - DNA, 615 bp, Homo sapiens
ctaaccataaagaaaaaaattgataaattgaactcattaagttaagggcatattccttaaaacacaccaacaagagagtaaaaaagcaagttaaacaatgggagaatatattataatatatatatcacgcaaaggagttatgtggaataaagaacttataaaaattaataaggaaaagcagacaactactcaacaaattggcaaaaaattgaacaagtatttcttaaaagagatattcaaaacccccataggcatcttgaagacataccaatgaaaaccacaatgagagatgactatacactccacagtgtgaaaaaagtattagacttttcatatactgctggtggaagtataaattagtatatctactatggaatactgtttgtcaatagcttctaaaactgagygtacagcaaccctgtcacttggtattgctccactacatctataaaaaagagaaatataccaaaagatatacacaattatggacatagtagcattattcatagtagtttcaaactggaagtaccctaaatgtctatcaatattagactggattaaagaaaattatagtctatcaacaaccaattactgttaaacacaacagcagatgaa

SEQ ID NO: 168091 - DNA, 551 bp, Homo sapiens
gaaatcaactgctttactaaaataattatcaaatgactgccaagtattcaagtgtctaggacatgggcttaatagatagtttctatcaaaattaattatatttatatagaaataaaaagaaaaaaacgctatataacactatttaaatgatattaacattctcaaagacaaaaataattgaccccaaatcatatctactttcacaaaaataatacatcagaggttaaatactcactaagaaatcttaaaaataaggcaaaatagtaaattaactgaatgttcagaatattgctgttatctgttrgctatttttcaacttttacacagtggatggggttaagcatttgtgtctgagccttgtcatgtatttcactattttgagcatatcatctgatcagttataaaatctgttcctgccacaggtatcactgattcaaaatttctatgcatcaaaatattttttaaagtgtgtaaaatttttatgttaaaaagttcatctataccagtacttctgctattaataatagccaattttattaaatgcttactgt

SEQ ID NO: 168092 - DNA, 547 bp, Homo sapiens
atcttatttcttcttttcttagttaatctcgctaatagtcttatcaaatttgtttatgttttcaaagaagcggctttttgtttcatttatatttcatattttttgtttcaatttcatttaattctgctatgaaatttgttatttcttttcttctgcagtcagtctttgggtttggtttgttcttgtttctctagttccttgaggtatgaccttagattgcctattcatgctctttcagactttttgatataggaatttaatgctatgaactttcctcttggtagtgctttttctgtaccccagtggttttgataagatgtttcactattgttccattcacagaatttttaaatttctatcttgatttcattgttgaccctaagatcattcaagakaatagtattgaatttacatgtatttgtatggttttgagggctccttttgaggttaattttcagttttgtttcactgaggatggagagaatgctcaatgtaatttagatttccttaaatttattgagacttgttttgtgacctatcatatggt

SEQ ID NO: 168093 - DNA, 547 bp, Homo sapiens
atcttatttcttcttttcttagttaatctcgctaatagtcttatcaaatttgtttatgttttcaaagaagcggctttttgtttcatttatatttcatattttttgtttcaatttcatttaattctgctatgaaatttgttatttcttttcttctgcagtcagtctttgggtttggtttgttcttgtttctctagttccttgaggtatgaccttagattgcctattcatgctctttcagactttttgatataggaatttaatgctatgaactttcctcttggtagtgctttttctgtaccccagtggttttgataagatgtttcactattgttccattcacagaatttttaaatttctatcttgatttcattgttgaccctaagatcattcaagataataktattgaatttacatgtatttgtatggttttgagggctccttttgaggttaattttcagttttgtttcactgaggatggagagaatgctcaatgtaatttagatttccttaaatttattgagacttgttttgtgacctatcatatggt

SEQ ID NO: 168094 - DNA, 609 bp, Homo sapiens
aaaaatcatgtaagggccggtcatataaatctaaaatgcactagggtggaaatggtgatagatacaactacctataaaatatgacataatgtatgaaaaagtatctagatgatgaaataataggaggtactgaagtggaagcagataacacagacaattgtttctaaagatttgatgaaggtagggagttctagatggggtatatttgttgatatatatgtatgatgtcaagggagtgtgtatatatatgtatatatgtatgtatgtacgtgtgtgtgtgtgtgtgtgtgtgtgtgtgtgtgtgtgtaaaaagaaaggttgcagggaagagtctcactctttcccccaggctggagtgctcaggcaattctcccacctcagcctcctgagtagctgcgactacaggtacacaccaccacatctgactcatttttraatttttgtaaaggcagggtttcactatgtcaccaaagatggtctggaattcctaggctcaagcaatcctcctatgtttggcctcccaaaatgttgggattataggtgtgagacaccatgcttaattcattaagagacaaatttacatcaataattctgtatggatatcactgt

SEQ ID NO: 168095 - DNA, 422 bp, Homo sapiens
ggaatcatgtagtatgttgccttttgtgtctggcttctttttcktagtataataatgttgagattcatccatgctgttgcattgatcagtagttccttcttatttattgctaaggagtataccatctgctatagcctgaatgtgtcccccaaaattcatatgttgaaacttagttaccatgtgatcatattaagaggtgaggccttaaggaggtgattgagtttagagggcaaagaccacataaatggaattatagactttataaacggacttgagggaactagttagtccctttcctgcccttctgtcgtgtctgccatctgaggacacagcattcctcccctctggtgggcacagcaaggcgccatcttggaagtagagaacagggccctcaccagacactgaacctgctggtgctttga

SEQ ID NO: 168096 - DNA, 443 bp, Homo sapiens
tccagctaatgactggtagatttagtatttgaacccacatttgcctgattccaaagttcaaactcccaacaacatgtggtaaccaaagcargaacagaagagaaagaagaaatagaagggagggaagatgaacaaagtagacaaagtttagttaatagaattagtggatacccaagaaaaaactatgtacaagagggggaaaaaaaccctgttttctcacatctgggaaacattgatatctatatatttttggttttaaataaaaattaggttatgtcattcatttgcataaaaccatccaaagaagggcctcacaaaattaaaacaaaatccaaactctctactatgggccacaccctccagaacttcagctcgtactatgtttttcctcacacctctcaacataccaacatgtttccacctgcagccctcaccactagtta

SEQ ID NO: 168097 - DNA, 443 bp, Homo sapiens
tccagctaatgactggtagatttagtatttgaacccacatttgcctgattccaaagttcaaactcccaacaacatgtggtaaccaaagcaggaacagaagagaaagaagaaatagaagggagggaagatgaacaaagtagacaaagtttagttaatagaattagtggatacccaagaaaaaactatgtacaagagggggaaaaaaaccctgttttctcacatctgggaaacattgatatctatatatttttggttttaaataaaaattaggttatgtcattcatytgcataaaaccatccaaagaagggcctcacaaaattaaaacaaaatccaaactctctactatgggccacaccctccagaacttcagctcgtactatgtttttcctcacacctctcaacataccaacatgtttccacctgcagccctcaccactagtta

SEQ ID NO: 168098 - DNA, 599 bp, Homo sapiens
ttcttcacttgtttcctctccacgacctgtaagccccaagtggacccggacttggtctgctctgcttacagctggattccagytcccatagtgctagacactaggattaagccaggaaacatgggtgaagcagcaagcacagagcttggggcacagcctagcaaacactccacaaaggaccatgattgtaactgtagtagggcacaccaatgaacaggttgggaaactgagtctctgagaagagactaatgttgtgctggatgaaatttctttttctgacaatacattatccaaatcctccaagctttcagtttaaaggggaaagcaggaactatcattataattttatttacaaagtgtccatgtatgaacattattcaccgccgaatcatctcttcctatgcaagcaacaccgtcctatgcatcaatatcctgatctgtcaggattcaggataaagtggacatatacacactaattgcaaagggaaattgtacatcttgcaaaagatgcaggggtttatagagtcttgtaacattggtgagctgctcagatcacacacatgaccgtggttggacaaggatctggcaaagttaacaca

SEQ ID NO: 168099 - DNA, 599 bp, Homo sapiens
ttcttcacttgtttcctctccacgacctgtaagccccaagtggacccggacttggtctgctctgcttacagctggattccagttcccatagtgctagacactaggattaagccaggaaacatgggtgaagcagcaagcacagagcttggggcacagcctagcaaacactccacaaaggaccatgattgtaactgtagtagggcacaccaatgaacaggttgggaaactgagtctctgagaagagactaatgttgtgctggatgaaatttctttttctgacaatacattatccaaatcctccaagctttcagtttaaaggggaaagcaggaactatcattataattttatttacaaagtgtccatgtatgaacattattcaccgccgaatcatctcttcctatgcaagcaacaccrtcctatgcatcaatatcctgatctgtcaggattcaggataaagtggacatatacacactaattgcaaagggaaattgtacatcttgcaaaagatgcaggggtttatagagtcttgtaacattggtgagctgctcagatcacacacatgaccgtggttggacaaggatctggcaaagttaacaca

SEQ ID NO: 168100 - DNA, 622 bp, Homo sapiens
gagttcactaagagtaaagtttctccttgctacacagacttcaggtggtgctcaccatcatgctcccaacttggtttgcctmttaatcttctctctttacgatctccacccctcttcaaatattgacaagcacatgtggctgtcatctcctgttatcaaactgctttcctgaaaatctggatagagctggtttttgaatcaaaaagagtcattggaaaactgaaattggaaatctccccaggaccctctttcagacctgcccctgcctctctgcatatattccgtcctccacccaggcttctcgctcatgctaagccatgttggctgtgtttttgatcactgaaccagcggaaggcatgacccagccattatagtgtggtcatgcacccagggcctgtcagtgacagctggtctcctgccagtcaggatgcccaccctgctccagctgagacaggaaatctgacatgcacctttgtctttctgtatgccacccatcacttggcatttttcagatcactttcttgtgctttatctgatatgctccttactataatcctatgacataagaagtatctatttgcctgaggaggaaacagtttcaatgaagaccaatgtcttatgc

SEQ ID NO: 168101 - DNA, 622 bp, Homo sapiens
gagttcactaagagtaaagtttctccttgctacacagacttcaggtggtgctcaccatcatgctcccaacttggtttgcctattaatcttctctctttacgatctccacccctcttcaaatattgacaagcacatgtggctgtcatctcctgttatcaaactgctttcctgaaaatctggatagagctggtttttgaatcaaaaagagtcattggaaaactgaaattggaaatctccccaggaccctctttcagacctgcccctgcctctctgcawatattccgtcctccacccaggcttctcgctcatgctaagccatgttggctgtgtttttgatcactgaaccagcggaaggcatgacccagccattatagtgtggtcatgcacccagggcctgtcagtgacagctggtctcctgccagtcaggatgcccaccctgctccagctgagacaggaaatctgacatgcacctttgtctttctgtatgccacccatcacttggcatttttcagatcactttcttgtgctttatctgatatgctccttactataatcctatgacataagaagtatctatttgcctgaggaggaaacagtttcaatgaagaccaatgtcttatgc

SEQ ID NO: 168102 - DNA, 430 bp, Homo sapiens
catagaacgaaattgtccaaaggtaacatggcaagtgagaaaaattccacatgagcagagaggagggacattcatactcaaagccttctcagttacctcagggaatcttcagtatacctcaggtataaagcagaaatggtcagatgaaaagggcatgtcccattcttggtaatattaaaagatcaatgaagraagtttccaaggtgtccctggagcacaagagggaaagaagcacaagcaaagtctttggatgaaaggaaagagatgtggaaaattccagaagatgagcaaggcttggattcctcttctccattttagcaattgaccacagagcagaagcatctgtcacccttgaaaaatcccccaagggaagaatgttaaaagcctggctacgggcttgaattgggagcaagggaatgacctgggacta

SEQ ID NO: 168103 - DNA, 554 bp, Homo sapiens
ttatatgtaactagttaattatatatgtagatatgtagatacacagagaaagagagagacaaaagaaagaaaaaatattaacatttatcatgatgactaaaagatcaaaagctaacacaatcccattagatttaccaatgaagacattcattttttaaacaaaaaaaccctaatatgttctcctgatttagtggaaagtttacttggttgcgtgtatctttagtggaattttattttgttttgaagatctcccattaacagtcatattccaaatattttaaaaatattaaacaagggaaaaatttttgtgggtggctcttaaggctgctagtaatagttgtctgttatacctatatttctttgtttttaacttgctgttttaaaataacttaagatttatagcaggtttgcaaagatttacagagtattttgtgtacacttcacccagcttttcactccagttcccccratattagcatcttaccattaaggtactatgtaatcatagtacattaatcaaaactaaggaacattgttgcagtgctaccctacaa

SEQ ID NO: 168104 - DNA, 603 bp, Homo sapiens
tttctgtctctgcaagatgctacagactcaacttatgtttttcttgctttaactctagaatccctgtttctttaagaattcctaggtatttgattagatgattgagcttaaaaaccaagatcttggcttcagtatgcttgctgcttttgaggtgtcactgttactaggccctttcacagaggccaaggcatatatgtgtgtataaaaactcatgtatacaaatacatgtgtgtgtgttcatttcagtatctatttttctgtrtgtgtatgtgtgtgtatatatatttatatatatacgtttctgtgtgtgtatacatgtatttgtatgtgtgtgtgtatgggtgaactgcagtgaactgcaacctaacatagtatgtaaattaactgcaacataacctaaaaggacattcttgtaaatagctgagtcccagacaattacagtagtcaagatacagtcaatcacaggctgccaactgattagactatgtccatataaggaaatttccaattataccatgcccaaataaggcatacacccaggtgtaacaaattaagttgtttttgttaagtcccttcctttttcttctgcaaatattgaatgct

SEQ ID NO: 168105 - DNA, 502 bp, Homo sapiens
ggaattcctaggtaacaccatctgccgtcttctctttcctctttattgacccatcaacagaacctgccacaaaagccattgtgagtggtattgcaaaaggcagatttacagggaagctagagaaacttaaacytcaaggcccctcttttgcaagcatcacttctaaggccctgagtggggcgggcgggcgcggggggtgctataaatgtgttcacattggcatcatttttgaaaatttgtaatagtaagattttttttctcattctttaaaattgcctctcagattgaataggctttaagttcagcaaaacttttatccgcttctggcaatctttgagtacttatgggcacaggaagaaggaatcaataataatgataataaaattgttgagctagatggagctttatacttcagctacttcaactccttcctactaaagatgaaagaattaaggtttcatcttagtgatgaacttcagtgacatgactgaagtcacagagc

SEQ ID NO: 168106 - DNA, 502 bp, Homo sapiens
ggaattcctaggtaacaccatctgccgtcttctctttcctctttattgacccatcaacagaacctgccacaaaagccattgtgagtggtattgcaaaaggcagatttacagggaagctagagaaacttaaacctcaaggcccctcttttgcaagcatcacttctaaggccctgagtggggcgggcgggcgsggggggtgctataaatgtgttcacattggcatcatttttgaaaatttgtaatagtaagattttttttctcattctttaaaattgcctctcagattgaataggctttaagttcagcaaaacttttatccgcttctggcaatctttgagtacttatgggcacaggaagaaggaatcaataataatgataataaaattgttgagctagatggagctttatacttcagctacttcaactccttcctactaaagatgaaagaattaaggtttcatcttagtgatgaacttcagtgacatgactgaagtcacagagc

SEQ ID NO: 168107 - DNA, 612 bp, Homo sapiens
ataagtactcaagctgatgaacactctaaataccttggcttgatcattacacattctatgcatgtaacaaaatatcacatgtgccccatgaatatgtacatatgtgtaccaataaaaaattaattatttcttttttgcttttctggtcaacttctgctttcttcttactttttttcaatgcttcactcgtaatttaagagtttggattagtctgggtggctttctgctttcttatgatcttgtttctgcccaggtcagggtcttcctgttcactgttttcttatccactgtccttayggtgttcttgattagtacctcatatacttcacttacttaaaaattttttgtatgtccttttgttaagtaagatttttttgttcatagatagtctgtctgtgaaaatttttactttacttatcatatactctttacattccttactttttctctgagaaaataataatcacaaattatatttctgaatatctctcattgaattccaagcaatctaaagttataattgccactctttgtcttaacaaaatgaatctgctaaaaatgaggaaccaatttaaaaaatctatttcagtgactatcatgacatattatatt

SEQ ID NO: 168108 - DNA, 589 bp, Homo sapiens
attccactcttatgctagtttctctgctactctaagtatcttatgtagtcaattaattaatttaaaaatctatgtcagcaaagcataaagtgtagaacaatttaaccaaatgcaattaaaaaataactaggcatgccactaaatctacagttgataataggatgagaaaaatgcacaatagatgctgacatggaagttagatgaaaactttgaatggcacgtaaaccacaaaggtgcattttcatttcacaagcaaagtctcatttggaattacacagcagagctcatttttatgtaatacatcatattgcayagaattgttttcacactgatttccatgattcttttcaacattctttttagactcatcagtgcacatactctcaaataatctggttaaacttgtcttatctaaaattctaatgttacttgaaataaagtggaaagaacaactctgtgtttacacttcaaactgtgtcttaaagtacaccccaaagctagttgttccatattgtaatacacaggttttgcttcagaggctgattacttttattgattaacattgcatttgatttattagcttttgcct

SEQ ID NO: 168109 - DNA, 589 bp, Homo sapiens
attccactcttatgctagtttctctgctactctaagtatcttatgtagtcaattaattaatttaaaaatctatgtcagcaaagcataaagtgtagaacaatttaaccaaatgcaattaaaaaataactaggcatgccactaaatctacagttgataataggatgagaaaaatgcacaatagatgctgacatggaagttagatgaaaactttgaatggcacgtaaaccacaaaggtgcattttcatttcacaagcaaagtctcatttggaattacacagcagagctcatttttatgtaatacatcatattgcatagaattgttttcacactgatttccatgattcttttcaacattctttttagactcatcagtgcacatactctcaaakaatctggttaaacttgtcttatctaaaattctaatgttacttgaaataaagtggaaagaacaactctgtgtttacacttcaaactgtgtcttaaagtacaccccaaagctagttgttccatattgtaatacacaggttttgcttcagaggctgattacttttattgattaacattgcatttgatttattagcttttgcct

SEQ ID NO: 168110 - DNA, 584 bp, Homo sapiens
aatttacagaatcaatacaaaaacagcaacagcaattatatctccatgtacaggtaaaaaaataactcttttcagttaaaagatcaaagaaaattataaattagatttacaatgaaagggaatggacacgtacactgatccaaatgatttggaaaataaaatcttaataaataattattggtaaagaatgtagaaagaagtcagatatcagtatcttcaaaatatttaaatatcaatttttttaagctgggaaaaaacccacaaaacaggctaacatacatacttacccgtattaggaaaagaatttaagggcaatttgatactgtgaataytgcaaacaagagagcaagtaaacttccacttacagctatataaaactggctggtaggacctgatgctctaaaaaggaaaatgttattaaaattcaagtagaatcagaaattgatattccagtaagaaggggaaagaaaacaatataaacttcattttttttgctatttttctctagaggcatttagcataaggtcctgaagaggtaaaggtcctgaagagctatgtagaaaaccataactaagagaatatgg

SEQ ID NO: 168111 - DNA, 584 bp, Homo sapiens
aatttacagaatcaatacaaaaacagcaacagcaattatatctccatgtacaggtaaaaaaataactcttttcagttaaaagatcaaagaaaattataaattagatttacaatgaaagggaatggacacgtacactgatccaaatgatttggaaaataaaatcttaataaataattattggtaaagaatgtagaaagaagtcagatatcagtatcttcaaaatatttaaatatcaatttttttaagctgggaaaaaacccacaaaacaggctaacatacatacttacccgtattaggaaaagaatttaagggcaatttgatactgtgaatattgcaaacaagwgagcaagtaaacttccacttacagctatataaaactggctggtaggacctgatgctctaaaaaggaaaatgttattaaaattcaagtagaatcagaaattgatattccagtaagaaggggaaagaaaacaatataaacttcattttttttgctatttttctctagaggcatttagcataaggtcctgaagaggtaaaggtcctgaagagctatgtagaaaaccataactaagagaatatgg

SEQ ID NO: 168112 - DNA, 381 bp, Homo sapiens
ctcccacctgcctcccaaaatgctgggattacagccctgagcctctgtgcctggcccagctagaatggttttaaattaaaagtcctgttgatggatcactaaacatgagacagataattttgtatattgttaagatcattagcattaatttcaaacaaattgatgcttgaatattagtgctgcccttattagcctgtgaaaccttattagcaattactgaacacagaagtaacagcagtatgacacacatgtgcactacatctaaactaattctagcgctaactttttttccygtcagttgggttcccaaaacacctgtgcctacaccaaatcccccccctactaaataaaactaggcaaagttaaacaggtaaggaaggc

SEQ ID NO: 168113 - DNA, 381 bp, Homo sapiens
ctcccacctgcctcccaaaatgctgggattacagccctgagcctctgtgcctggcccagctagaatggttttaaattaaaagtcctgttgatggatcactaaacatgagacagataattttgtatattgttaagatcattagcattaatttcaaacaaattgatgcttgaatattagtgctgcccttattagcctgtgaaaccttattagcaattactgaacacagaagtaacagcagtatgacacacatgtgcactacatctaaactaattctagcgctaactttttttcccgtcagttgggttcccaaaacacctktgcctacaccaaatcccccccctactaaataaaactaggcaaagttaaacaggtaaggaaggc

SEQ ID NO: 168114 - DNA, 586 bp, Homo sapiens
ggttgtaaaactggcagtcttttaaaaagatttacatctcaaatgggttgggaaaaaatttacaacgacaattttttttaagtcattgctacaagaaaagtgagattggaaggttagtgaggaagcctgtctaaagtttatttaaactcaggggaattaaaactgtcttggccacaactaacataaggagaactggaaagaaagaggagtctgagaggaaagacagtgaacttttacaccttttacagaagtttgtgcccatgacaacaccctaatcatttgtagggacctgattaaatgaagaatactggyttaaatttctttcacttcccaatatatctaccactgtgaaagtacatgggacattaaattagacagagccaagcagaaatcccagctctgtcatttataaaacattttcttggcatatgcttgttctttcttcacccctcattctttatatcaaccgagcagccagatctgaaaattaggcctcccaaaggtttttctattcttctcttccatattcacagatatcatatggtacagaacgtcatgatctttcacatagaataacgttgacacc

SEQ ID NO: 168115 - DNA, 586 bp, Homo sapiens
ggttgtaaaactggcagtcttttaaaaagatttacatctcaaatgggttgggaaaaaatttacaacgacaattttttttaagtcattgctacaagaaaagtgagattggaaggttagtgaggaagcctgtctaaagtttatttaaactcaggggaattaaaactgtcttggccacaactaacataaggagaactggaaagaaagaggagtctgagaggaaagacagtgaacttttacaccttttacagaagtttgtgcccatgacaacaccctaatcatttgtagggacctgattaaatgaagaatactggcttaaatttctttcacttcccaatatatctaccactgtraaagtacatgggacattaaattagacagagccaagcagaaatcccagctctgtcatttataaaacattttcttggcatatgcttgttctttcttcacccctcattctttatatcaaccgagcagccagatctgaaaattaggcctcccaaaggtttttctattcttctcttccatattcacagatatcatatggtacagaacgtcatgatctttcacatagaataacgttgacacc

SEQ ID NO: 168116 - DNA, 459 bp, Homo sapiens
tttggagtcaagtgtgttctttttcaatatgaaaacaaatttaaaatttgtcattatttttgtgcttcctttttttttttttttttttgaaatggagtctggctctgtcaccaggctggagtgcgatggcacaatctcggctcactgcaacctccactttctgggttcaagagagtctcctgcttcagcctcctgagtagggattacaggcacgtgccaccatgcccagctaatttttgtatttttttagtagagatggagtttcaccatgttagccaggatggtcttgatctcctgatctcgtgatccgcccgcctcggcctccaaaagtgctggaattataggcgtgagccaccgtgtctggcctgtccttcctgtcttctctctgtttctattttytgtctttctgtttatatacatatctctgaaagtatattgtgttttcacttggagaatatt

SEQ ID NO: 168117 - DNA, 569 bp, Homo sapiens
ccacaatcatctgctgtatggtctgcttagtgtgaactgctaagtttactttgtgggagctgattcatagtctgaaagaagagagtctgcaaatcatctcatcgtagaatctaaaaagtggcaaggaatagaggccacatacttatttaatgcagcatctctccaattaggactttagcccaaagaggagaaaacagagacactattctagcttctagaaaataaggacactctcttccttttctttctctgcttctcattgaccatcctcagtgttatgaaaattgccaccacaccttttcttcttcccataccttcttttcttcctccaaaataaaaagatgtagaaacaaaaaatatagtctctaaacctcaaatgagctttctcaactaagtcagccagactaaccattgatatattaaagaaattgataaagaaatttacaaaatcctttttcagtctaatttgcctgacttaaaaacctcayacatctcagtgccagatctttgtagaaaacataaaaagttaaagattttctgggtgcctcactttgattatttcagtaaca

SEQ ID NO: 168118 - DNA, 581 bp, Homo sapiens
ttagtgatgaatatttttaaaatgttttgatactaataaaaattgaaacaccgcataccaaaacctgaggaatacagcagaagcaatgctaagatggaaatttataataataaatgcctacatcaaaaaagtaaaaggattacaaaayagcaatctaacaatgcatcccaaggagctagaaaggccaaaacaaactaaacctaaaattagtggaagaaaagaaataataaagattagactagaactaaataaaacaagataaaaaattaatgcaaaatatcaatgaaacaaaaattgattcttaaaaatataaactaaatggataaaccagtagctagactaaccaaaaaaagagcaatgactcagtaaacaatatcagaaatgaaaaaataagacattataactgatcccacagaaataaaaaaatcatcagatacaattataaacaattatgtgctcataccctaaaaaccctagtgaaaatagatacaatcccggaaacattcaatctcctaagattaaattatgaagaaatagaaaacttgaacagattataatgagtagtgagattgaatccatgg

SEQ ID NO: 168119 - DNA, 398 bp, Homo sapiens
actatgggctctctgttcagaactgatttgctcaggtagatcagacgattaacccagttccattaaccattacaagggtggatctcctcggatatgtggatacagaaaagaagccttccatgctgggggggcaatttgtagtggtgggtcatcagaggagcaggaattcctaaataaatataccrtatatcttctcttctagccactgaacagcactgagagaataaatggcccagccctgacttttgggttcccatagcaatgtgtttatgttcttactttggtcatagcactaaccataacatattatgctcatgtatttatcacactgtcatcccaagcaatttgtgaactcctcgacaccaaggattgagtcctatttattcttgtactcctgg

SEQ ID NO: 168120 - DNA, 452 bp, Homo sapiens
tgtcgctcctgctgataagagaagctctctagggagtatggaggcaagaaacgcttgatagtcagagaagcttattggagaaagattctagccttctgtaaaatataaaaatcatgtgagacaaaaagccaaaagatttttaggaaaatggaaaaggtacattaatgaaataatgctgaaactttacttcattaagtttattcatttattcctcatctttcccacctctacctacagccacaaatagcttttcaaattttgcccaaaaycagtttgcaatatttatcaggcgaatttaattttcattgtttccaaatacagcactcaaaaaatcccacaaaaggttgtactgaacaatcaacctctaaaaggaaaaacaaaatccatacctgttataaatgtctttctctatacctggacatttttgctattatcttgaattttctaagaaa

SEQ ID NO: 168121 - DNA, 452 bp, Homo sapiens
tgtcgctcctgctgataagagaagctctctagggagtatggaggcaagaaacgcttgatagtcagagaagcttattggagaaagattctagccttctgtaaaatataaaaatcatgtgagacaaaaagccaaaagatttttaggaaaatggaaaaggtacattaatgaaataatgctgaaactttacttcattaagtttattcatttattcctcatctttcccacctctacctacagccacaaatagcttttcaaattttgcccaaaaccagtttgcaatatttmtcaggcgaatttaattttcattgtttccaaatacagcactcaaaaaatcccacaaaaggttgtactgaacaatcaacctctaaaaggaaaaacaaaatccatacctgttataaatgtctttctctatacctggacatttttgctattatcttgaattttctaagaaa

SEQ ID NO: 168122 - DNA, 452 bp, Homo sapiens
tgtcgctcctgctgataagagaagctctctagggagtatggaggcaagaaacgcttgatagtcagagaagcttattggagaaagattctagccttctgtaaaatataaaaatcatgtgagacaaaaagccaaaagatttttaggaaaatggaaaaggtacattaatgaaataatgctgaaactttacttcattaagtttattcatttattcctcatctttcccacctctacctacagccacaaatagcttttcaaattttgcccaaaaccagtttgcaatatttatcaggmgaatttaattttcattgtttccaaatacagcactcaaaaaatcccacaaaaggttgtactgaacaatcaacctctaaaaggaaaaacaaaatccatacctgttataaatgtctttctctatacctggacatttttgctattatcttgaattttctaagaaa

SEQ ID NO: 168123 - DNA, 452 bp, Homo sapiens
tgtcgctcctgctgataagagaagctctctagggagtatggaggcaagaaacgcttgatagtcagagaagcttattggagaaagattctagccttctgtaaaatataaaaatcatgtgagacaaaaagccaaaagatttttaggaaaatggaaaaggtacattaatgaaataatgctgaaactttacttcattaagtttattcatttattcctcatctttcccacctctacctacagccacaaatagcttttcaaattttgcccaaaaccagtttgcaatatttatcaggcgaatttaattttcattgtttccaaatacagcactcaaaaaatcccacaaaaggttgtactgaacaatcaacctctaaaaggaaaaacaaaatccatacctgttataaatgtctttctctataccyggacatttttgctattatcttgaattttctaagaaa

SEQ ID NO: 168124 - DNA, 407 bp, Homo sapiens
cagaactcactatcatgaagatagcaataagccatgagggctccacccccaagacccaaataccttccaccaggccccacctctagtgctggggattakaattcaacaggagacaggcagggacaatatccaaactatatcacctacccagggtaaagttagctactttctcttctgtgttccaataactagctactgcaaatctttattactggtagttatctaagtatctgcctacctaataactatccagctccttaagaacatgaaccgttttgaattcacagtgatttcctcaatatcttacacaaaaaaagccatgatttgtataaaattcaactcctgtttatcaaagaaataagaaatcagcaactgtataaatagaaaacgcaattctttctaatgca

SEQ ID NO: 168125 - DNA, 407 bp, Homo sapiens
cagaactcactatcatgaagatagcaataagccatgagggctccacccccaagacccaaataccttccaccaggccccacctctagtgctggggattataattcaacaggagrcaggcagggacaatatccaaactatatcacctacccagggtaaagttagctactttctcttctgtgttccaataactagctactgcaaatctttattactggtagttatctaagtatctgcctacctaataactatccagctccttaagaacatgaaccgttttgaattcacagtgatttcctcaatatcttacacaaaaaaagccatgatttgtataaaattcaactcctgtttatcaaagaaataagaaatcagcaactgtataaatagaaaacgcaattctttctaatgca

SEQ ID NO: 168126 - DNA, 400 bp, Homo sapiens
tcactatcatgaagatagcaataagccatgagggctccacccccaagacccaaataccttccaccaggccccacctctagtgctggggattataattcaacaggagacaggcagggacaatatccaaactatatcacctacccagggtaaagttagctactttctcttctgtgttccaataactagctactgcaaatctttattactggtagttatctaagtatctgcctacctaataactatccagctccttaagaacatgaaccgttttgaattcacagtgatttcctcaatatcttacacaaaaaaarccatgatttgtataaaattcaactcctgtttatcaaagaaataagaaatcagcaactgtataaatagaaaacgcaattctttctaatgc

SEQ ID NO: 168127 - DNA, 400 bp, Homo sapiens
tcactatcatgaagatagcaataagccatgagggctccacccccaagacccaaataccttccaccaggccccacctctagtgctggggattataattcaacaggagacaggcagggacaatatccaaactatatcacctacccagggtaaagttagctactttctcttctgtgttccaataactagctactgcaaatctttattactggtagttatctaagtatctgcctacctaataactatccagctccttaagaacatgaaccgttttgaattcacagtgatttcctcaatatcttacacaaaaaaagccmtgatttgtataaaattcaactcctgtttatcaaagaaataagaaatcagcaactgtataaatagaaaacgcaattctttctaatgc

SEQ ID NO: 168128 - DNA, 394 bp, Homo sapiens
tatcttacacaaaaaaagccatgatttgtataaaattcaactcctgtttatcaaagaaataagaaatcagcaactgtataaatagaaaacgcaattctttctaatgsaatctttttaatacaattatgaataatgctgctgtgaagatctcaatgcaaaaatttgcatgcagatataactaaaggccattatagctctagtagacttttcatagatctgcatgaaaagatttgcaatatagatgcatggacatatgttgaggtacatattgaagttcatttgtttacatctggatattgtcatgggctgaattgtggtttcttgcaaattcttgcaccataaatcctaactccaagtacttcagagtactatcaaaagagagtagagatgcagt

SEQ ID NO: 168129 - DNA, 549 bp, Homo sapiens
acagactgattgtaaagaatcactcaataaaataattaatttaaaggccatagccttttattcacttattatagataataatttcctagtctacatttcattacagcaaaaaaaggtaagcacaaaaacgactgtttatacctgtgcaataagtttgtgtgtgtgtacatgtaagcatgtgcatgcatgtggggtgtgtcgatcatgaaacagcaagcaaataaaacttatrcttcaggggtgctcatttgagtaggtcctttccagcgccccgggagagggtcagcagcgggttcacatgaccatgaggtgggttcacataaccacatgtttttaaaagattcacaaaagtaagttacttttactgtagttggttaagagggccatgtcttttcactctcacttaatcttcgtcacacttcacctggcatagaatgttgtcaaagtgattgcaggaatacttgagatccatcaagaggaagttgaataggggatacacttagttctggtttagtgtgcctcccagtcactgccacatatagtcaagct

SEQ ID NO: 168130 - DNA, 583 bp, Homo sapiens
cctatgcaagcttttccaatttgtgtaaatatttcatgttacatggaccaaagcaatcataataaaaccaattcgattgatacattcaggcattagccttcttttagttgacttaattctctttttttcttgatgccttagtacttttgaagccagatttgtccttcatagcctgaggattaatttttgcattgggaataccataactaaatactcaagaatctagaaatagaggcagaaaatcttaaaattattgtatacaagcctggatgtcaacatttcaatgttatttctttgttccatgaggattccagtataggaagaccctcagtgatagccttccttcctgtgaacagtgaggtatattccactaatcttttaaatctaacccataggcaactatcttggtattctgctctgattgaagtatttccttagtctgctcagcactttcccagtggcctttccctaggggctcataacttcaaggctgtgactctctagagcaactggtactcagtccccttgttttctatttctgtgaagcatcttatcraatagtttaaggaagatattttcagag

SEQ ID NO: 168131 - DNA, 563 bp, Homo sapiens
ttttagaattcttcctctgcttgctgaaatatcttgtcagcaccaattacaaagatccagttatttgtttgtatatttaaactctctggatttgacttagctgcatttgatacagcgataatttctgtattgttatttctttgtcttcgtatagtgactggagataggagagcttttgcagcaaggacagctatggcactacttaaaaatggtctgttacacagactggtcttcaggctcttactagttggtgcttgatgagcacttaaaataacttaaggatagaaagagttcattagacaataacaaatatagaacattataccgcagcaggacaagcctaatgttgtgtaaaaagaaagaaaaaaaaagcaactaatacaaaacagaaatcagtctctgaatgtctcaggaaacacctagagataattttcagttttgaagctggaaacactctgtttaggggctagattttttattcgtttatctttttttttttkttgttgagacggagtgagtcttgctctgtcgcccaggctggagtgcagtggcgcgatctcggc

SEQ ID NO: 168132 - DNA, 584 bp, Homo sapiens
aagacatctgcgttatgtctcatctctccttacataaatcattcagccagccggacacaggctctcacctgtaatcccaacactttgggatgctgaggtgggagcattgcttgagctcaggagtttgagaccagccaggacaacatggcaaaaccccatctctacagaaaaaaaaaataataaaaaaataagaattagctgtggtggcacatgcctgtagtcccagctacctgggaggctaaggtgggaggatcatttgagcctgggaggtgcaggttgcagtgagctgtgatcaggccactgcactccagcctggatgacagagtgagacactgtctcaaaaaaagaacaacaacaacaaaaactacccagccaatcatgttattacttttgtctaatatctttcacattcattctattcactctctgcttctcttttcactgctttagtctaggttcttatcattcctcrgaaggtatatcataatagcctcttaacaggtctctgactttccacacctttaatccatgctccacgttgctaacactaaaatctgtctcttccccagacagattccataccc

SEQ ID NO: 168133 - DNA, 638 bp, Homo sapiens
atgcatgctatctgatatggtttggctctgtgtccctactcaaatctaccttgataatccccatatgtcataggagggacctggtgggaggtaattgaatcaygggggcgggtttttcccatgctgttcttgtgatagtgaataagtctcatgagatctgatggttttataaatgggagttcccctgcacatgccctcttgcctgccgccatgtaagatgtgcctttgctcttcctttgccttccaccatgattgtgaggccttcccagtcatgtggaactgtgagtccattaaacctctttcctttataaattacccagtctctggtgtgtctttattagcagcatgagaacaaactaaaacactatcttattgattttttatgagccttatgaactaggttcattttcacctttattttaaggataacaaaatgaaggtcagaaagatttggtaatttctccaagattagattaagtactaagcaaatttagtcatatctgtctctccaaatggtgtgatgtctctaccacatgagtttctgattgttttgactccctttttacaatctcaacaattttttaatttacttgacctggcatagacagtaaatgtggttaagtccagacacataattt

SEQ ID NO: 168134 - DNA, 422 bp, Homo sapiens
aacgattgggaatgcaaaggagaccacagtggtgggcaaagttttttcatggagcttacagtttagtagagaaaggaatataaaagtgaaccggcaataaataattccaaaatgttataaacctatgaagaaacaaataataaggatgtgttttgagatggaacctagtgtaaatcatggagtgagagaaaatgtttcacaagaggtgragtgtaagttgatatctaaagcaaatggtaaaaaataattgaatgtaagctgatattttatatctgagcaaaaggcaggtaaggtgaaaagtgttctaggaacaggggtctgtgcaaaggccctgtgataggagagagctggccattcccagaaactgaaagaaggattttgagaacaggagaaatattttaaaaggaaggcagaagtttata

SEQ ID NO: 168135 - DNA, 498 bp, Homo sapiens
agattctgggagcttgaagatatttttggttcaccttctctcacaaacaaagactacaactacctagctacaaacttgttgttgtttgaatagatgatagatggagaggaggaatggaaagctggatgtctttgcttacttaggaaacggttgggtatttgctgtttggcaaaagaattgcaactaaaacaagtgggttattaagaagagtcagatattttaaagatgaaaaataccaaaaaaagaaaaataaagccattgaaacaaaaataaaaatgtgtaatgtaaaattcaaatgtggttaaaaagcacaatgtggaattatattagtgccttataaataacttycaaataaaataattatgaatagtttggtacatatgtctttttcttcttttctatctatcattattgacttttaatttcttataagcattgttacatactattcataatgttttgcagattcctttttcaattgtctttgtataaactgtc

SEQ ID NO: 168136 - DNA, 498 bp, Homo sapiens
agattctgggagcttgaagatatttttggttcaccttctctcacaaacaaagactacaactacctagctacaaacttgttgttgtttgaatagatgatagatggagaggaggaatggaaagctggatgtctttgcttacttaggaaacggttgggtatttgctgtttggcaaaagaattgcaactaaaacaagtgggttattaagaagagtcagatattttaaagatgaaaaataccaaaaaaagaaaaataaagccattgaaacaaaaataaaaatgtgtaatgtaaaattcaaatgtggttaaaaagcacaatgtggaattatattagtgccttataaataacttccaaataaaataattatgaatagtttggyacatatgtctttttcttcttttctatctatcattattgacttttaatttcttataagcattgttacatactattcataatgttttgcagattcctttttcaattgtctttgtataaactgtc

SEQ ID NO: 168137 - DNA, 313 bp, Homo sapiens
ggtgcataatatgatacgtcatgtgcaggcttttcacaggaagtggtagtagaagtcttctgagcagctatgctttgctgctgactgtaatgtttcattatctctcacatccattmatttctttccatctccacaactactgtgatccttgtccaagccttgtgagctctagtcaaaagcatggctaagtaagggagcaaggggatggaaaagccatttgaggtagggtttcgacagggggtctctaaagggttttgaatagaaaggagcagtactttttaataatttggcagttgttaggtgggctttactg

SEQ ID NO: 168138 - DNA, 549 bp, Homo sapiens
gaataaagataataccataatgaatccctgtgtagctatcacccagcctccaaaatattatattcaactcatgtccagttttattttctctcctctccatttcctccacttcagtgtattttgaagcctatctcaagtatcatattatttctgctgtaaatatttcaacatacttttctaaaaaatacaatattccttacttgaaaattataatttcttaatattatcaaatatctagtcatagtgcacatttgtatgattagcttatgatttttacagtatgttttttcaaatcaaacagtttcatacattgcaattggtggatatgtttcttatcctttttaatcatctcatttttttcttatttgtttattgaataaactaggtcatctatctgttagaatttccagccctctgcatctttatgatttcatctgtgtggctgacgtagagatgtaccacccagatcccacttcaggaaggtcttgttgcacagttgctgggaatgtgagcagcaracagattccctcttccagctttcagttcctt

SEQ ID NO: 168139 - DNA, 586 bp, Homo sapiens
tgttattattttattattttttctagtgtatatttttaaaacaaaaaaccctacacaaatatgcaaagtataaaatttgcmaagtttttacatgtatatacacctatgaatgaatcaccaaaatcaagaaaatggaattatttttcactccccaaagtttcctcatgcacctttgtaacgcctccctatcatcccttctcaccctcttacaggtcccaggaaacactgatctgctttctgtcaccaaagagcattttgcattttccaggattttataaaattttataaaatgactcatagtatataatgatttttgccaggcttatttcatttagcataattatgttgaaagctattcatgtcatgatcatggatttagatagacctttcttctttacatatataggcatttaatactataaattttcctctaaatattggtttagcaaaatcccacaaatgcattttgttgtgttttcattttcattcagttcaaaatattactttccattttgattttttttcctttggtgttattaaattttcaaatattagtgaattttccagaaatcattttgatttctaa

SEQ ID NO: 168140 - DNA, 586 bp, Homo sapiens
tgttattattttattattttttctagtgtatatttttaaaacaaaaaaccctacacaaatatgcaaagtataaaatttgcaaagtttttacatgtatatacacctatgaatgaatcaccaaaatcaagaaaatggaattatttttcactccccaaagtttcctcatgcacctttgtaacgcctccctatcatcccttctcaccctcttacaggtcccaggaaacactgatctgctttctgtcaccaaagagcattttgcattttccaggattttataaaattttataaaatgactcatagtatrtaatgatttttgccaggcttatttcatttagcataattatgttgaaagctattcatgtcatgatcatggatttagatagacctttcttctttacatatataggcatttaatactataaattttcctctaaatattggtttagcaaaatcccacaaatgcattttgttgtgttttcattttcattcagttcaaaatattactttccattttgattttttttcctttggtgttattaaattttcaaatattagtgaattttccagaaatcattttgatttctaa

SEQ ID NO: 168141 - DNA, 586 bp, Homo sapiens
tgttattattttattattttttctagtgtatatttttaaaacaaaaaaccctacacaaatatgcaaagtataaaatttgcaaagtttttacatgtatatacacctatgaatgaatcaccaaaatcaagaaaatggaattatttttcactccccaaagtttcctcatgcacctttgtaacgcctccctatcatcccttctcaccctcttacaggtcccaggaaacactgatctgctttctgtcaccaaagagcattttgcattttccaggattttataaaattttataaaatgactcatagtatataatgatttttgccaggcttatttcatttagcataattatgttgaaagctattcatgtcatgatcatggatttagatagacctttcttctttacatatataggcatttaatactataaattttcctctaaatattggtttagcaaaatcccacaaatgcattttgttgtgttttcattttcattcagttcaaaatattactttccattttgattttttttcctttggtgttattaaattttcaaatattwgtgaattttccagaaatcattttgatttctaa

SEQ ID NO: 168142 - DNA, 569 bp, Homo sapiens
ccgtctcaaaaaaaaaaaaaaaagaaaaagaaaaaaaaaaggctcttcctctctgcttcctgatggcttttttgttcctggttcttgttctcctggaggcatcgcttaccatttccctgaaagtctgggacacttgtgtgtttttacaacaatttcacttattttttcctaagctaatttgaaggaatttctattactttcagacaaataagctgaaatcaagaacaaacagagaaggacagggaagacttttataccaatcagtaagaaatcattgaaaaaacaaagaggggggaaaaarctcttacttttatttaaagcccaaagaaatgtggacacaaagaaatctagaagtaaaacctccacagggaatgagctcctcctagatgagcaagggcaaagaatgtttgcatgcttaggaccacttgttggggttggagataaggcaggcagatgtgctataagtgtgaaatacaaactagactcaaaaggcttagtaccaaaaatatgtgaactatctcaacaatgactttttatattgattgcatattgaaattataataccttga

SEQ ID NO: 168143 - DNA, 670 bp, Homo sapiens
ggagcttgttaaaatgcaggtgctgtctcaggcttcctggatcagaatctgcattttaatatgatctccaggtgatttggatgcgcataaaagtttttaaagtatttctctggaaattctgactccctctccccacctaacccacagatatatctctagctggatgagttgcatgttttaagcatgaaccagcctcaccactcagtactgtgaatttataagtattggttctattgcaatctccttgagaggtaggtctccttttcattaatttacccttagcaattagtattgtagcacatagcacattgtaaaccctctctaaatactggttgactggctgaatggatctgaatttcccagcatcattagctctatacaatttagcatcgagctggatttttccaatgaggcaaacacgttctcatgaagctcttcaaagacacacaaggagaaggttctaacacatgggcctgatgaattatgtgtttttgatgactcattaaaggaagagggagaggtgaaaccaagggttactctattccaggaggcagcgttgtgtaatgataaacacacacatttkgatgcctccaaagtctaggctcaaatcctggttctgttccctaccagctttatagtattgtgccaaatttctctgagcctcagtttc

SEQ ID NO: 168144 - DNA, 506 bp, Homo sapiens
cttagctgtgagcaaatgaatattttcaaaattagagcttttatgagtataggataagttgttccggacagaaatgcttatcaaaaaaaaatttaagattttaaatattttgttgtaaaaaatcagagaatatatgaaacaagggattacaagttaatatttggaaataatattttcgggccaagcctaaacaaaggatttgaaaagaagaaagtatagcrgagggaatttgaaagcagaaatatgttagataaagcagcttttggctctaaaagccaaaatcaaatattatgttttccaaaagagatttcaggtataaagttgaactttgtcacctgaaataactgaattatattctctttcctgtttgtagacactcaaccctataatgatagttgaatctaataaaatgcaaatactcattttaactggagtcgactgattttatagacacaattgttactagattttcctatgagaatgatgacataattgaattgctcctt

SEQ ID NO: 168145 - DNA, 506 bp, Homo sapiens
cttagctgtgagcaaatgaatattttcaaaattagagcttttatgagtataggataagttgttccggacagaaatgcttatcaaaaaaaaatttaagattttaaatattttgttgtaaaaaatcagagaatatatgaaacaagggattacaagttaatatttggaaataatattttcgggccaagcctaaacaaaggatttgaaaagaagaaagtatagcagagggaatttgaaagcagaaatatgttagataaagcagcttttggctctaaaagccaaaatcaaatattatgttttccaaaagagatttcaggtataaagttgaactttgtcacctgaaataactgaattatattctctttcctgtttgtagacactcaaccctataatgatagttgaatctaataaaatgcaaatactcattttaactggagtcgactgattttayagacacaattgttactagattttcctatgagaatgatgacataattgaattgctcctt

SEQ ID NO: 168146 - DNA, 538 bp, Homo sapiens
taaaataattataatatctaaaatgaaaaagtcactgaataaacataactagagatgaggtgctacagaaggagtttaaataaacttgaatttgattaaatagaaattacccaagctgaagaacagagaaaaaaattaaacgactcagtgtcttttaaggtggtcccaaatggtttttaataagtaawattgaagtcctatagggacaggagagagagaaggggacagaaaattatttgaagatattcaaattttgaacattttaaaattatgttgaaaacagcagcccattgattcaagactttcagtaaataccaaacaagataagtataaaacacatacacacccctaagcacctcatagtaaaactgagaaaaatgtaaagtcaaaggtaaagaaagaaaatcctaacagtcacagaaaaaggcaattcatacatcagagaacatgctacaaatgatgactgacttttcatcagaaacaataactagaggacttttttaagttctgagagagacagagactatacatacaatac

SEQ ID NO: 168147 - DNA, 538 bp, Homo sapiens
taaaataattataatatctaaaatgaaaaagtcactgaataaacataactagagatgaggtgctacagaaggagtttaaataaacttgaatttgattaaatagaaattacccaagctgaagaacagagaaaaaaattaaacgactcagtgtcttttaaggtggtcccaaatggtttttaataagtaaawttgaagtcctatagggacaggagagagagaaggggacagaaaattatttgaagatattcaaattttgaacattttaaaattatgttgaaaacagcagcccattgattcaagactttcagtaaataccaaacaagataagtataaaacacatacacacccctaagcacctcatagtaaaactgagaaaaatgtaaagtcaaaggtaaagaaagaaaatcctaacagtcacagaaaaaggcaattcatacatcagagaacatgctacaaatgatgactgacttttcatcagaaacaataactagaggacttttttaagttctgagagagacagagactatacatacaatac

SEQ ID NO: 168148 - DNA, 538 bp, Homo sapiens
taaaataattataatatctaaaatgaaaaagtcactgaataaacataactagagatgaggtgctacagaaggagtttaaataaacttgaatttgattaaatagaaattacccaagctgaagaacagagaaaaaaattaaacgactcagtgtcttttaaggtggtcccaaatggtttttaataagtaaaattgaagtcctatagggacaggagagagagaaggggacagaaaattatttgaagatattcaaattttgaacattttawaattatgttgaaaacagcagcccattgattcaagactttcagtaaataccaaacaagataagtataaaacacatacacacccctaagcacctcatagtaaaactgagaaaaatgtaaagtcaaaggtaaagaaagaaaatcctaacagtcacagaaaaaggcaattcatacatcagagaacatgctacaaatgatgactgacttttcatcagaaacaataactagaggacttttttaagttctgagagagacagagactatacatacaatac

SEQ ID NO: 168149 - DNA, 395 bp, Homo sapiens
gacttttggcagagtcttcagggttttctaggtatagaatcatatcattggtgaagagggatagtttgactttttcttttcctattcgaaygccttttatttctttcttttgtctgattactgtagccaagacttcccagcttctggtttaaggattgcacacaactggagaagtaatgtctgaatggaaatcgagatgctcacaaataaggaactaatgttgggggggaatattaaatgttcagtattaaaagattagtgactggcaccaagcaggcattttaaaattatctgttaaatgaatgagtaaacaaatatggcacagtcttaattactttctgcattcacattgacctttatcgggtcccacttccatcctggacctagaagaattc

SEQ ID NO: 168150 - DNA, 603 bp, Homo sapiens
taagttagttcaacactgcttaatatgtattcttaatgatacaattattaagtttctgtgtgcctctctttgacctcactttctttgcctaattaatttataattatttcccattatctggagtactgtgcatgtcccctaccatctagctcattggctagcacagtgcaggtacacaaacgtttgatgaatatccttatgagggatgcagataacaatgatgaagaccatracaataattgcctttatggagcatattccatgggccaggctctgtctttttctctgtttataatcaacacaaatattctgcaaggtattttataatattgctgtgttacagctgaagacaccaaagcaatcacaagcatagtcgtttgctaaagccacacacagtcactaaatggccagaccagaattgaagccaactctttcaagtgacagagctttttctcttttcgttgtgctaacttaactcagtctcttacttctcagtgtctgttacaggatcaggcctggagtttgttatataattgatacctggagatgcctcggtggtctatggattggcacaattgtggcattgccttcccatgaattcaa

SEQ ID NO: 168151 - DNA, 603 bp, Homo sapiens
taagttagttcaacactgcttaatatgtattcttaatgatacaattattaagtttctgtgtgcctctctttgacctcactttctttgcctaattaatttataattatttcccattatctggagtactgtgcatgtcccctaccatctagctcattggctagcacagtgcaggtacacaaacgtttgatgaatatccttatgagggatgcagataacaatgatgaagaccatgacaataattgcctttatggagcatattccatgggccaggctctgtctttttctctgtttataatcaacacaaatattctgcaaggtattttataatattgctgtgttacagctgaagacaccaaagcaatcacaagcatagtcgtttgctaaagccacacacagtcactaaatggccagaccagaaytgaagccaactctttcaagtgacagagctttttctcttttcgttgtgctaacttaactcagtctcttacttctcagtgtctgttacaggatcaggcctggagtttgttatataattgatacctggagatgcctcggtggtctatggattggcacaattgtggcattgccttcccatgaattcaa

SEQ ID NO: 168152 - DNA, 572 bp, Homo sapiens
ctcggtggtctatggattggcacaattgtggcattgccttcccatgaattcaaggctattgctgtctttgaactgatataaactgtatttttaattggtaactagtaaaaaaggatttgaaggaaaagttccttcaggaagttaaacctggttatttatctgccacttttgttgtataaccatggaatgtacaatggcagttatgctaagtaagtgatttatctccacaagttattgattttctcatgagtcaagaagggtggaactgagcggagctatgagtgatttatggagaggtatcaataaaggataccaataagaaggtgtctccatagtcaggcccattttatrtttcctttttgccacattgaacccaaataaatgtcctaaatctatcacctgatgtgggtaccatgccccagccaactgtttagaagcgtaggtttaatcatcaacaagaaaaatttatcttgataagatcctttaaattgtacttgtcaccagaaaagtgttctttaaaaatgctacaaggtttcatatctcttctttcacaatgaattatgagctcaatt

SEQ ID NO: 168153 - DNA, 528 bp, Homo sapiens
tccatttgaatttggaaaaccctccattrcacattactaaccagaatcagttgagactgggagttggtatactgaaagtggttcctttcaggcttataatgcattgatcctaaataatttttggagagatgtgtaggctgccagtgtacaaatgatgcagtgcaagtgatattattttagtttgataatcaacgtgtcatagcttctctccccgcttggtacgttgcattgtaaatccgatactcacaggcaaagtccctgtgatccactatactgccttgagttgcggcaacgttattatgaaaaatacattcatttgtctatatggaagggatttaaaggttgctgcattcattttttaccgcagtctaagtacttaatcttatggacattgctcaacaagaaaatgatctcttcctctctacccccattagcaacattctttcagtctcaagaaatataaatattggggcatattaatgaaaatgacatctactgctgatatattaaaactcaaatgtgtgatta

SEQ ID NO: 168154 - DNA, 494 bp, Homo sapiens
gaattcaacctgtgagacagtgagaaattacttaactttgaacttttggtctttcttcttcaaaacttgagataatatatacagtcctctgcatgtaagaagacagaatgagtgtactttttatctccaaatttgtatgtaaggatatttgaaagggagtcaagtgtgtagtttaraaatagtcttcttaaacattcacatagctcctttcacaaaaataaaattctctgagcccttttcattatgatttaccaagtctggtcttgttttcactgttgtcattgttgttgtttaaagaaaattcttttctagttgatttctggaagttgaatggcagggagatgaaggtaccttaaaggtaaatttttgcatgactaacttgtccctcttgtgctaattatacgtgctttcacttttctccaacagtctccaagttcatcttccctctggcctttgatgtgtgtctgtcagctaatatttttatacaggtaata

SEQ ID NO: 168155 - DNA, 431 bp, Homo sapiens
gtctgcttagcttacagatgcatcagaaagctccagtctcagagaggactatgtgcttgaccccagcaaagggggattgggtagggctggaagaaccaccacatcttgtastaaccttttgttctgctttgcttccatcatcatctttaccagggtatgttggagctagaggctgagcatgaccaggacctgagtaaacaggataagcaagaaacagatgttgatgaggaccctcaagcgtctacatctctgcagttttcaaagaagaacctccttgaactgtaagtcttgacacatgcaagacagagcatttaataatgtgtggaggggaaaatagaatttaagcagataacttagggaaagtctggaagatttaaaatccatacatgtcttgaaccataaagcagtcctgtgcataggtaactacctac

SEQ ID NO: 168156 - DNA, 431 bp, Homo sapiens
gtctgcttagcttacagatgcatcagaaagctccagtctcagagaggactatgtgcttgaccccagcaaagggggattgggtagggctggaagaaccaccacatcttgtagtaaccttttgttctgctttgcttccatcatcatctttaccagggtatgttggagctagaggctgagcatgaccaggacctgagtaaacaggataagcaagaaacagatgttgatgaggaccctcaagcrtctacatctctgcagttttcaaagaagaacctccttgaactgtaagtcttgacacatgcaagacagagcatttaataatgtgtggaggggaaaatagaatttaagcagataacttagggaaagtctggaagatttaaaatccatacatgtcttgaaccataaagcagtcctgtgcataggtaactacctac

SEQ ID NO: 168157 - DNA, 512 bp, Homo sapiens
tctttttctattataataatcagttagtgctctgcacttccctgtaagcactgtwtccactgcatcaaactgatttttatatattgtgttttcattttcaatcagctcagaatacattctaatgtcccttttgatctctcctttgacccatggattatttttatatatgtaaatatattttaatgttttatattttgagatggagtctcgcttcatctccatcagcccaagctggagtgcaatagcatgatcttggctcactgcagcctctgcctcccgggttcaagcatttctcctgctcagcctctcgagcagctgggattacaggcattcgccaccatgcctggctaatttttatatttttggtagaggcagggttccagcacgttggccaggctggtcttgaactcctgacctcaggtgatccgcccacattggcctaccaaagtgcttggattacaggcatgagccaccacacccggccaacccatggattatttaaagtatgtttt

SEQ ID NO: 168158 - DNA, 512 bp, Homo sapiens
tctttttctattataataatcagttagtgctctgcacttccctgtaagcactgtatccactgcatcaaactgatttttatatattgtgttttcattttcaatcagctcagaatacattctaatgtcccttttgatctctcctttgacccatggattatttttatatmtgtaaatatattttaatgttttatattttgagatggagtctcgcttcatctccatcagcccaagctggagtgcaatagcatgatcttggctcactgcagcctctgcctcccgggttcaagcatttctcctgctcagcctctcgagcagctgggattacaggcattcgccaccatgcctggctaatttttatatttttggtagaggcagggttccagcacgttggccaggctggtcttgaactcctgacctcaggtgatccgcccacattggcctaccaaagtgcttggattacaggcatgagccaccacacccggccaacccatggattatttaaagtatgtttt

SEQ ID NO: 168159 - DNA, 608 bp, Homo sapiens
ccactgcatggcttccactaagtatcaagaaataccaaggcttgtcattaataaggtgacttaacaaaattgaggggatggctggtgggggataattctgacatcattctatctctaaggctgcgtagaataaaacctcagggaaaaactttcagcaagatcttaagacagctaaacccaagtttctcagcaagaatttacaattgagctctctttttcttaggctacagaaaaatgaatagaaatttagccaaactgtaacactgaaggcagwcatacaacttcaatatccttgtaccaaacaggacaggaaaaacttcaaagattactctaaaatatatcagagaaaacataaaagtctgaatatatttgcccaggtcaatcacgagcaagatgaaagatgaaaagaaatggcataacaactatgctagtgtacttaaaaacaaaacaaaaataataaaccagaaaaaatgtgcacagcattcacaaagcaaataacccagtatggaaagcagccgcaaatttggacaaagacaaattaagaacaaaggcaaattaaccaaagatgcttcataattaaattaaaatataaatcctataaaagctta

SEQ ID NO: 168160 - DNA, 521 bp, Homo sapiens
ggcatgaacaaaacagtgaaaaatttgagtcaccaaatgtgcacattctcagctgaggctgagcaaagcaacattctgtcttgttttagttctcaaactataaacaagtgtcctttacatggtctatttagggccacgctgttgtgcttttgtgtagattttgccgtttaaaagggccctyaagcacagtgctgaagtgctatcacgctcttaagcacaaggaggctgtgatgtgctttacagaaaaaatacatgtgttagataagcttcattcaggaatgagctatagtgctgttggccataagttcaatattaatgaatcaacaatacatattaaataaagttttttaaaacagaaacacatgtaaacaaggttatgtagtgatcaactgatgatcaatactgttgtgaccagagccacataggaacctaactctgtattactcttaggaacaatggttcagtattttctaattcagtgcttgcagcaacttcacagaactactgtgaataatgaaaaa

SEQ ID NO: 168161 - DNA, 620 bp, Homo sapiens
ttctctctgacagagcctacccaaatgagaaggaaccagaaaaacaaccctcataatatgacaaaacgaggctcttcaacaccccccaaaaattacactagttcaccagcaatggatccaaaccaagaagaaatccctgatttacctgaaaaagaattcaggagattagttattaagctaatcagggagggaccacagaaaggcaaagcccaatgcaaggaaatccaaaacatgatacaagaagggaagggagaaatattcatggaaatacatagcttaaaggaaaaacaataaaaaattcaggaaaccttggacacacttttaaaaatgcaaaattccctggaaagtctcagcaatagaattgaataagtagaagaagaaaattcagagctcaaagacaaggtcttcaaattaacccaatccaacaaagacaaagaaaaactmataagaaaatataaacaaagccttccagaagtctgggattatgttaaacgaccaaacctaagaataatcagtgaacctgaggaagaagagaattctaaaagcctgaaaaacatatttgggaaaataatcaaggaaaacttccctggccttgcaagaaacctaaacaaccaaataca

SEQ ID NO: 168162 - DNA, 444 bp, Homo sapiens
ttgctcttttatcaatgacctctttcattcatcatgtcattttagatgtttggyttttagcccaagtgaagaaaaaaatgtattcttgaaaaggtgagtattatagggactggtatgagggtggtgactgcatgtcaatggatggtgatgaatagtacattcaatacaatcgatgacaaagttatggatcttattatttcataccttgcattcacttcactttctcagagtctccagaatatgaataatgacccttttatgggtttaagggtctaacctttacttggcaaatgagattgcatacagaatattagggataatttaagagataaaatagagacatttttgactagagttggtgacccaggaaggtgactagcttgtcacctttatcaaccattccacattctcagaccagctcgactatgtaggtttccaggaact

SEQ ID NO: 168163 - DNA, 537 bp, Homo sapiens
gaattcacaactgcattttcctcctatgctcactctcttactgcacacacaggtgacattttaattatggagctctgagctggggaaacacaactgcctgactctctcccacttacccaatctcgtttccagtccagctgggagggaagggggtgagatgaagccacagcccttgcatgaagatgaggatttctcctcttagaaaggccccttctttctccgtttcttcttcatctttcatgagaatgcttcctctgtcctggagtccaaggtcactgctaatagttcttcactctgctttcactgactgccactttcctgaggacctgccgtgtgccaaggacctactgtattctgagcatcatggccatcctggggcatggaggtrcataaggcccccttcaaagggccacctgtcaggcttgcagggtgacaggcaaaggcagaggtacagcatggagtggccatgtggtacactgacccaggggaatgggggcccaaggagggacattagaccttacatgcattcatggagac

SEQ ID NO: 168164 - DNA, 564 bp, Homo sapiens
agagtgaggccaagggagatttgatagaggaggaagaggcaatgtgaccaacacggtagagatggaagtgatgcagccaaaggcccaggaatgcttggagctgccagaaactggaagagacaaggaacagattctcccttcgagctgccataacatagtgctgccaacaccttggtttctgaytttggctctagaactgtaaggtaagcatttatacaggtatcagacgggggagaacccagaaggacttttgatgttcttgggatcagtgctctcttaatatttatttgaaatgggatctctttttgtcaagtcccacttcttccttgctaatggaaacctgtttctgaggatctctgtcttctgtgcagcaatgtgcctcagggaaagctgaccccatccagcatcaggacacgcattcacttctcatgaataaacacatggtctcgccctggttgtgtgttatcagttaaagtctgatgaaccttttagaacacattctttaatcctaatagagaagcaggaggtgacactcttttcttccacaagataccagtggatcat

SEQ ID NO: 168165 - DNA, 463 bp, Homo sapiens
cccagatttttacatatcagttgaatttaaaatcatgtttaagaactctatttttctgccactatttattctataagcycttcactaacttacataaaactatcaccaaagctttctccatgatttagaattaagattaattctaaatgtaggctcgaagtttataaaaatgaaagcaatgtggaaacaggcttgctgtgcaaattatgagagaaaaagaacatgttttatcttcacagtgagattcacaaactatcatcattgacttttcttcagcaatgagtgtgctaattactactgctgatacctatttgtttattgtcacctttttcaagatcctcagaggtgtttaatttcattgacttttcctctgtccctgatggctgtgatactccatttacatgagattaataaaatcaagtccttgttaaaatagtaaataatggaaaaggttgaaggtttt

SEQ ID NO: 168166 - DNA, 463 bp, Homo sapiens
cccagatttttacatatcagttgaatttaaaatcatgtttaagaactctatttttctgccactatttattctataagcccttcactaacttacataaaactatcaccaaagcyttctccatgatttagaattaagattaattctaaatgtaggctcgaagtttataaaaatgaaagcaatgtggaaacaggcttgctgtgcaaattatgagagaaaaagaacatgttttatcttcacagtgagattcacaaactatcatcattgacttttcttcagcaatgagtgtgctaattactactgctgatacctatttgtttattgtcacctttttcaagatcctcagaggtgtttaatttcattgacttttcctctgtccctgatggctgtgatactccatttacatgagattaataaaatcaagtccttgttaaaatagtaaataatggaaaaggttgaaggtttt

SEQ ID NO: 168167 - DNA, 463 bp, Homo sapiens
cccagatttttacatatcagttgaatttaaaatcatgtttaagaactctatttttctgccactatttattctataagcccttcactaacttacataaaactatcaccaaagctttctccatgatttagaattaagattaattctaaatgtaggctcgaagtttataaaaatgaaagcaatgtggaaacaggcttgctgtgcaaattatgagagaaaaagaacatgttttatcttcacagtgagattcacaaactatcatcattgacttttcttcagcaatgagkgtgctaattactactgctgatacctatttgtttattgtcacctttttcaagatcctcagaggtgtttaatttcattgacttttcctctgtccctgatggctgtgatactccatttacatgagattaataaaatcaagtccttgttaaaatagtaaataatggaaaaggttgaaggtttt

SEQ ID NO: 168168 - DNA, 560 bp, Homo sapiens
ctggggccagagagagaacccacaccagttatctgaacagaaagaatttaatataaagaattgtgaactaggtaaaagtcaacaaggcaatcaaaaggacagaaaggccactgaaggacatcacagaggtgggaactgcagggctcagggacagaagggaaatggttagaggaacagatgttggaatttagacattgaaagtggggtcagggagccatgtgactgcctgttggggactgcctgatcagttgatgctgatgtgtctgatgggtcctgaaaaagctggttctgtgagtgatggtgaaaatgcaaactggattcagtggctcttacgggaagaaaagagccactgctatcatggagaagacttgcaggtgatgatgagagaaacaggaaatagacaggaagtgcrtggagagggaacaggaaggagcaagtcccttcttcctccttctctcagccctgctctagtgccccctactggccgagcttaacatggagctgacaaagattatttgcttcccaaactttcctccagcttctgaatattcagttgggcc

SEQ ID NO: 168169 - DNA, 601 bp, Homo sapiens
agaagatattattccatttccatctgcaactgttttcttgctgatgagaaatctgctcttaaacrgatttctttgtaggtaatctattctctctggaaggcttctaggattttctcatttttctttacattttaaagcttttagacatccatgcctattgcctagaactcagaatatcctcttctaatgtgaaagcccacatcttttttaaagttcttcacttctggaacattctttgttattatcccccttgtcaacatccatttattttcttctggcatttttattacatggatgctggaggttcccaatgtagcctcagtacttcttgccaggtatttcatttcattttttgtttatttatcactctatattacattctaggcagtttcatcagtgctgtcttcctatgcaccatctcttctgctggatctagtaaaggttttaatgtgattttaaaaatttttattaagatataattcgcatactataaactttattcccataaaggaaacatttccatatctttgagtatattcatagagttgcaaaactgtattagtcggttctcgcactgctaataaaggcataactgacactg

SEQ ID NO: 168170 - DNA, 505 bp, Homo sapiens
aaagaataaggatttttaaaacttcgcttataaatggtcttggctgagcactttttcagaagcaattatgtaactactttcattccagtttgtttctggttactgtcttattcaggttatctgtgttttctagtattactttagtaatttgttattatacaaatatttaaattcagattttctaattaagatgtttttatatttttaatttccttgaagtctatcattatagytttaagatactaatttggatatttgtgttttcatctctccacttttttctctgtaacctggagtggttttgcaaatctgttatccatattatttatttgactctatccatttttacattcacttttaaaatatttgttttagattctagtatgattttttaatatgcatgttctgtttttttgactttatctcattcattttttcccccatcttgcctagctgactcaagtcgtattctccttatggttttctttttttttttttttttttt

SEQ ID NO: 168171 - DNA, 474 bp, Homo sapiens
tggcaactggttgagagagtcaggttttgcctgaagtattcaaattagtagaaagaaatgcttagggttaagataataggggctgtggaagccaagggttcttgttatatagataagcctccaggtagcaggtgtcagagagaatagatggtacatgtctcttatcagaccttaaaaggtgccaaactcttaggagttaaatctctcctaaatcaggaaaatacctggaaagggaatgggattctctacaaaatgtagactttccccataagagatakctttacagggccatttcaaatatatcaaataaatatatttggaggtaaaatacttcaatttctttcaaggcctgctatgtgtcatgtgatgttatgctagttggcatttggtatctcattgccacaaaaagtctgtttttatcagtcttaggatctctattttaaatgttaatgctggtcagttgtgcctgaattc

SEQ ID NO: 168172 - DNA, 474 bp, Homo sapiens
tggcaactggttgagagagtcaggttttgcctgaagtattcaaattagtagaaagaaatgcttagggttaagataataggggctgtggaagccaagggttcttgttatatagataagcctccaggtagcaggtgtcagagagaatagatggtacatgtctcttatcagaccttaaaaggtgccaaactcttaggagttaaatctctcctaaatcaggaaaatacctggaaagggaatgggattctctacaaaatgtagactttccccataagagatatctttacagggccatttcaaatatatcaaataaatatatttggaggtaaaatacttcaatttctttcaaggcctgctatgtgtcaygtgatgttatgctagttggcatttggtatctcattgccacaaaaagtctgtttttatcagtcttaggatctctattttaaatgttaatgctggtcagttgtgcctgaattc

SEQ ID NO: 168173 - DNA, 566 bp, Homo sapiens
gctaagttttttaaatatgtatcctttaactacaatgatgtctctgaagactgccagtgtttgttctcttttcacaggtgaataaaaattatagctttaaaacattacgtgactattattgtgtggtaaagaatttaatcttgcctaaagggaggtgtgaccattaccctaggctcttggaggtgatctccaaccccttagaatgtcatacctgataggagtgtctttgcttgctggggttggggtggggagacttagaccagccagatggcaaaaaatgtgatttagggtggagttttaggtcacccagtatgagattgacttcctgagggactagaaattgacatcagccatgtagacaatccaccatgcctaagtaatggaactccaataaagactctggacatagaagctcaggtragcttcctggttggcaatactctgtgcatattttcacatatagatgctgagaaaataatgctcctggctccgtagggagaggacagtggaagttgtcctttcagtggaagcttactcagagtgtgccctatgctctttttctttgg

SEQ ID NO: 168174 - DNA, 588 bp, Homo sapiens
caggttcatccaaggaagagtgggaggtagcccaacttttggctatggaaattggggagatatttctttttccatgcctcctggcaactaaatatgggttcacaacataaacatggccaatcagacattcacacccaggattttgaacataaaaggaatgacacaaaggactatgatctgttgaaggtttctcagtgtgactggagtggaatagaggatgccaggcagggtatggtggagatgcctgctgtggaaggaacagagtgtttcaggtgactgggtcctcatggtcagacagtgcctgtggctgcacctttcactctctggatyccccatgtcttctgtaaactgcccaaaacccttctgataaatcccactcagacttaagttaatcagaagcagtttttgttgcttccagccaacagttcttactcatacagtctctcaaatgctatcgtctgtagatgaagcaaacctaatacttaaaatatgaactgtttcttaagtgtaggccaataagagatgggcagtttggttcttcacaggctgacctggccgtgattcctaggtctatttttccaaggctat

SEQ ID NO: 168175 - DNA, 585 bp, Homo sapiens
ttaccattttccaaatagctgtttcaaatggtgatgaattaggtttattttttcctgttctctctgtctctctctctctgtgtgtcttttctctttctctttygtgttctctctctctctttttggaagataaaccaagtgacattgttggatcatttgggaaagcttgcatatggtctgaatattggtcggatgatataaaagtatactatagcagaaagatgcagattgtgaattgaaaaaaagcacattaaaaacaccacgatctcatttactacatgtatgtataaaagtatacacacagagaaagatctggaaggatatgcaccaatgtgttgcgaaatggggtcccctgggaagtgggaacatcttaataatgtaaatgcttgattatacatatttataattttgtacaatttacatgtcctgctttggtactaataaaaagctttcctttttaaaaagagaagtgaaataaaccacttagtacaatacctggcatatactaagaactccagaaatagaagttatttttaaaagtctccttactaaaacaactacatataaatatttggtagttactaa

SEQ ID NO: 168176 - DNA, 575 bp, Homo sapiens
ataactgtttgattcttcccctttaattaccattttccaaatagctgtttcaaatggtgatgaattaggtttattttttcctgttctctctgtctctctctctctgtgtgtcttttctctttctcttttgtgttctctctctctctttttggaagataaaccaagtgacattgttggatcatttgggaaagcttgcatatggtctgaatattggtcggatgatataaaagtatactatagcagaaagatgcagattgtgaattgaaaaaaagcacattaaaawcaccacgatctcatttactacatgtatgtataaaagtatacacacagagaaagatctggaaggatatgcaccaatgtgttgcgaaatggggtcccctgggaagtgggaacatcttaataatgtaaatgcttgattatacatatttataattttgtacaatttacatgtcctgctttggtactaataaaaagctttcctttttaaaaagagaagtgaaataaaccacttagtacaatacctggcatatactaagaactccagaaatagaagttatttttaaaagtctccttac

SEQ ID NO: 168177 - DNA, 575 bp, Homo sapiens
ataactgtttgattcttcccctttaattaccattttccaaatagctgtttcaaatggtgatgaattaggtttattttttcctgttctctctgtctctctctctctgtgtgtcttttctctttctcttttgtgttctctctctctctttttggaagataaaccaagtgacattgttggatcatttgggaaagcttgcatatggtctgaatattggtcggatgatataaaagtatactatagcagaaagatgcagattgtgaattgaaaaaaagcacattaaaaacaccacgatctcatttactacatrtatgtataaaagtatacacacagagaaagatctggaaggatatgcaccaatgtgttgcgaaatggggtcccctgggaagtgggaacatcttaataatgtaaatgcttgattatacatatttataattttgtacaatttacatgtcctgctttggtactaataaaaagctttcctttttaaaaagagaagtgaaataaaccacttagtacaatacctggcatatactaagaactccagaaatagaagttatttttaaaagtctccttac

SEQ ID NO: 168178 - DNA, 368 bp, Homo sapiens
acacaaaaagcttcccactctatgaaggtaccaacagttatttcaaggtttttcaacctcggaactgttgacrtttaggactggataattttttgttgaaggaggctgtcctgtgtattgtaggatgttttgcagcatccctgacctttacccataagatgcctgtagcactcccttcaccccagttgtggcaaccaaaaatgtctccagacactgctgaatgcctcctgaggggaaaaatcacacacacactcacatctgacaaccactgctttgtcatttccctacagatggatacttaagttgctatgcattctccctatcacaaacaattccatgatataaactaccttatgtgtgtatatata

SEQ ID NO: 168179 - DNA, 269 bp, Homo sapiens
ttcaggctccctctgcccttcattccccactacagaactttcctgaaattcttttcacagactgccatgctctgtacaaggtaaagagttaaaaaatatttcctgagttgacttaaagaatgctgaatacacttgctcrtttcattaatgctttagtggcatattacatccaaagagtttagccactgtagcttgtttcctggtttgacaaagtattgcttattatttgaatttatgagaaatttcaaactaggtcttccagtgtgata

SEQ ID NO: 168180 - DNA, 635 bp, Homo sapiens
aaatttgtctagtattcaaccccttctcacctgctccactgctgtcacctggtcagagccactatctcctctcacttgcaagagcctcttccttggtattcttgtttccaccctttctctcctgctttctgttcttgacacagcagccacacagtgatcctataaaagcacaagtcgtaaatccattcctctagacggtccctgatgtagtttggatatttgtccctgcccaaattgaattgtaatccccagtgctggaggtggggtctggtgggaggtgtttgggtcatatggtcagatctttcatggcgtggtgttgtctttgcaatagtgagtgagttctcatgagatctgatcatttaaaagtgtgtggcacctccccaaccccttgctcctgctctagccatgtgatgtgcctgctcccacttcatattctgccatgagtaaaagcttcctgaggcttccccaaaagcagaygctggtcctatgcttcctgtacagcctacggagatgggagccaattaaacctcttttcttataaattacccagtctcaggtatttctttatagcaatgcaagagtagcctgttacagtcccctttttaactggccctgcattacctacctgagctccc

SEQ ID NO: 168181 - DNA, 438 bp, Homo sapiens
catttaaaagtgtgtggcacctccccaaccccttgctcctgctctagccatgtgatgtgcctgctcccacttcatattctgccatgagtaaaagcttcctgaggcttccccaaaagcagacgctggtcctatgcttcctgtacagcctacggagatgggagccaattaaacctcttttyttataaattacccagtctcaggtatttctttatagcaatgcaagagtagcctgttacagtcccctttttaactggccctgcattacctacctgagctccctaccgttttttttcactccactccagccaatctattcttcattaaacagaccaagcccacctgtaactcagggcttttgcaatgattgtgccctgtgcatgggatacatttctccaattatctacgctgataactcttcactccaagtcattgcttaag

SEQ ID NO: 168182 - DNA, 524 bp, Homo sapiens
aaccactggcacaagcatcacctggagctttttagaaatgcagattataggtgctactccagacctattgaatcagagactgctgtttaacaagatccccaggtgagttgtgtgtacattaatgtttcagaggcacttcctagatcagagatctgcaaactacagcctgtgggccaaatccaggctgtgtttgtaaagctttgttggaacacagcatgtttatgtgtttatgaattgtcagtggctgtgtttgcactatgtagtggttaatattgagtgtgaatttgattggactgaaggatgcgaagtattgttcctgggtgtgtctgtgaggatgttgccaaagaagattaacatttgagtcagtggactgggagaggcagacccaccctcaattttgggtgggcaccatctaatcagctgctggmgtgaccagaataaaaagcagacagaagaacgtggaaagactagactggctgagtcttctggcctccgtctttctcccgtgctggttgcttcctgcc

SEQ ID NO: 168183 - DNA, 463 bp, Homo sapiens
gatgagagagtcaaagacagaagggttcggttaccttctcaagaccacacatctaataagtgatagagctaggaattatctcaaagaaggtaaaattgggacaaaccctttgatagtctctgatttwaaaaaaaaagccactgtcacaacagaggagaaaaacatgtcaatctcacacgtaagcagatggtggggatgcaagttaatgacagtgagaggggaactggtcacctgcagacagagcttttgaagaattctgctccaatctaacagcttgtcaagtgactagtgacctaggacagttggtcaccacaaaatcaagtgtcacagcagggctacatcaacctgcctgcaaagccttctaagattctgctcatgtttggaggtgagaagagggaaaccccaagagaaatccccacatcaatgatgagctaaatccatctcctcatctcaattccaagat

SEQ ID NO: 168184 - DNA, 450 bp, Homo sapiens
atttgtggatgagagagtcaaagacagaagggttcggttaccttctcaagaccacacatctaataagtgatagagctaggaattatctcaaagaaggtaaaattgggacaaaccctttgatagtctctgattttaaaaaaaaagccactgtcacaacagaggagaaaaacatgtcaatctcacaygtaagcagatggtggggatgcaagttaatgacagtgagaggggaactggtcacctgcagacagagcttttgaagaattctgctccaatctaacagcttgtcaagtgactagtgacctaggacagttggtcaccacaaaatcaagtgtcacagcagggctacatcaacctgcctgcaaagccttctaagattctgctcatgtttggaggtgagaagagggaaaccccaagagaaatccccacatcaatgatgagctaaatccatct

SEQ ID NO: 168185 - DNA, 414 bp, Homo sapiens
tcggttaccttctcaagaccacacatctaataagtgatagagctaggaattatctcaaagaaggtaaaattgggacaaaccctttgatagtctctgattttaaaaaaaaagccactgtcacaacagaggagaaaaacatgtcaatctcacacgtaagcagatggtggggatgcaagttaatgacagtgagaggggaactggtcacctgcagacagagcttttgaagaattctgctccaatctaacagcttgtcaagtgactagtgacctaggacagttggtcaccacaaaatcaagtgtcacagcagggctacatcaacctgcctgcaaagccttctaagattctgctcatgtttggaggtgagaagagggaaaccccaagagaaatccccacakcaatgatgagctaaatcca

SEQ ID NO: 168186 - DNA, 631 bp, Homo sapiens
attcacaatagccaaaaggtggaaacaacccaagtgtcattaacagatgaatgtataaacaaagtgtagtatgtacttacaatggaatattattcagccataaaaaggagtgaagtttttacacctactacaaaatgaatggacgaaccttgaaaacattgtgctaaatgaaataagccaggtagacacaaaagaaaatattgtattattctacttagttgaaatatctagaataggtttatcaagatggaactttataaagatggaaataagattagaaattacyaggggctggggcaggggaataggaaattactgcttcatgggtacagagtctctgtttggggtgatgaaaaatttttggaaataatggtggtcatatctacatgtaacattgtaggtatgattaatgccactaaattgaatgcttaaaaatggttaaaatagcaaattttatgtgataaatatcttactaaaataataaaatgaagaaaaataatcaactgatctacagttgaacttcaaaatatatatatgattcaatatactctcaacttgctttcagagagaatcaaatgtgttcttcctgagtcgagagaaggggaatgaagattataggggtccttgctgg

SEQ ID NO: 168187 - DNA, 631 bp, Homo sapiens
attcacaatagccaaaaggtggaaacaacccaagtgtcattaacagatgaatgtataaacaaagtgtagtatgtacttacaatggaatattattcagccataaaaaggagtgaagtttttacacctactacaaaatgaatggacgaaccttgaaaacattgtgctaaatgaaataagccaggtagacacaaaagaaaatattgtattattctacttagttgaaatatctagaataggtttatcaagatggaactttataaagatggaaataagattagaaattaccaggggctggggcaggggaataggaaattactgcttcatgggtacagagtctctgtttggggtgatgaaaaatttttggaaataatggtggtcatatctacatgtaacattgtaggtatgattaatgccactaaattgaatgcttaaaaatggttaaaatagcaaattttatgtgataaatatcttactaaaataataaaatgaagaaaaataatcaactgatctacagttgaacttcaraatatatatatgattcaatatactctcaacttgctttcagagagaatcaaatgtgttcttcctgagtcgagagaaggggaatgaagattataggggtccttgctgg

SEQ ID NO: 168188 - DNA, 590 bp, Homo sapiens
tcatttttctctctgtgtcaagtggttttgttcctagtatttcatggtttaatgtctgaaatagtgctttgaaattaggtagaataatattaataattcattcattcaacaaatactgggaactggtaatgctaacagggaaacagggatgatgtcaggcactgggggtctgagtgtgtttaaaatatctttcccagctgccttcttcgagctggacgttccttactgccagtgatcccatcatattctagaagtaagatgtgagcttagagaaggtggcagtgaagaaggagtgggtgaggcaccaggtttaccagcgacggagcatctactatgaattgggcacagtggtgggtgcagaccacagagggggcagaaaacacaggtgtagtcctgcccacaaagtctccatccaaatgcctrtgcagatattaaacacataaacatgcaaatacatatttaattaaaatggagataattgctatagctatagaaacagagcaatatgagaaagaataaaaggaaaggacttaacgtggggtgatggtgttaggagaaattctttttgagaaaaatgaggtttaagcaga

SEQ ID NO: 168189 - DNA, 574 bp, Homo sapiens
tcagagctccttggggtctaggctcaaaagtgccacactgtttcttctgcaacagtctgttgactaaagtaagtcacacagtgaaacccagatcaaaatgaaacccagatcaccaattaaataggtgaaaaagactccacctatttaatgaaagaaactaaaaacttatgtggtgaaaagtgtagctatggagagaggtgaagaatcagggctgttaatgaatcacattatcacaggggtaacatgcccagtacccctttgctaattctgacacctatttttaaaacttaatcagagccttccttctgtagctagaggtaaagtgaatgagtgactacttgggcaactctatttacttatgtggcataaakaatgcagagctaggtttaaccagggtgactatgaaatagtttaggagagacattctgccaggtgggcgttctcgctagtctttcagacccatctggggaaccagagggaaaaggctggtgcttctccagcacatacccaataaatgtcatctaccatctgagaagcacagtcatgcatgcacttcattttagcatcaaaattc

SEQ ID NO: 168190 - DNA, 572 bp, Homo sapiens
caccatcctaagacaattcagtttgacaacccatttcagacaaaatactattatgcctctattttatttacctaataatttccataactgtatatcaatggtactataagctttatttcctttctgtctcatttccccaaaatcagccttgagctcattaatatgatgcatggggctgcttttctataaaatcaccttttcccaaactaggtagaatttagaccatagttctttccatctctattagtttgttaaatatatatttgtaactgttttaactcaagcaaatataataagtatccttgcttttgcttttctctaaattataggaattcaaacaatctattattctaaaattattataattagtattcaaaagcaatgtcctaataagtcacatattttaagcctcagtagtccactagatttgtgaataaataccatagtcacttctgacagcccccrtaatgatgcttagatttctctcttctttgctaactagtgcagagtttgatgttactcgtgtttcgaaggcctaataacacctaagcgtttcttactggtagttctac

SEQ ID NO: 168191 - DNA, 571 bp, Homo sapiens
tctattcttggttctgaaactaaatggctctacgactctcagtaaaagactgaccttttcacgcctaaatctcctcatggttaaatgtaggggaggatcagatgagatgagtgataaggtccttccaactctaaaatcccawcattctgtaatagtgctgcattagattccaatgttagcgtagttggaaatgctcacttcacaattttttaccttttgcaaaattccctgtatcaggagattcaaaacatactttatgccaaaactcagaagggaaagaaatacagcagccttttagctataatctgatatgcagcaactatagtgtatgtgcaaggtgaaggaagagtgacaaaataagactaagaaaaggaaaaacaaaactgtcaccattacaggacaccaaaccagccaagacatgatgaaagacatggcaagattcatacagggaattagagcaatctgagccattttctagaactttctcaattttaattgggcttatttaaaattcagttatccactttggtgtacatgaaataaaatctaaaatatcaccaagacttactgt

SEQ ID NO: 168192 - DNA, 406 bp, Homo sapiens
gggagacctcatctctacaaaacataaaaaaaaaaaaaaaactagccaggtgtggtggtgcatgcctcaactcagcaacttgggaggctgaggtgggaggattgtttgagcccagaaggtcaaagctgaagtgaaccatgattgtgccactgcattccagcctgggtaacagagtgagaccctgtctcaaaaaaaaaaaaaaaaaaaaaaaggcttttatttagcagcaatgttgtatgagacatggcactaagcaatatgagagataaactgctttctacacrtttagtgtttaatagaaaaatgtaaggcattcactcaaataaagctgtgatgcctgtgaaaggagagatgaaaatgatcaagaagtgtgtaagagagaaatttcccacgtagaggaaataaa

SEQ ID NO: 168193 - DNA, 453 bp, Homo sapiens
tgagccatctttgaattttggaagtacataatttgtttggtttcacaagctcacagctggagagcaatttgtctctggatgaatcataccttgagtctcacccatctctggggctatgatgatccctttaatgtattttgcatgtaagaaggacatgatttgggggtgggggcagaagctgaataatatagattgaatgtttgcatcccccccaccaaattcataagttaaaatcctcatccctaatatgatggtattaagaggtaagggsctttggtaggagagtaagtcacaagggcagagcccttacaaatgggatttgagctatagagaaagcttcaatctcgggaaatacaagatgagataccagaaagctctctctccccttccatcatgtgaagacacagcaaaaagacagccatctatgaaccaataagtagtccctcactagac

SEQ ID NO: 168194 - DNA, 408 bp, Homo sapiens
acatggatgtttaaaaaatctatttaacaatttaagtctttggatatccataaggaaatgattgactaatgctattttaaaaggcttgtatgaaagaagtctacaagcatttggtagtctgtaccagaacagcccatctaaacaacccctctaattgatatgttctttctactatctaagaaaatacttcctggtcaaaatgtaatttctttcatatctgtctcctctgatgagacttcaacctcaatacatatgaattggggccaaaatatatacaagacactacattagttakttaagcttacattcttgtcaagagtgtcttttagtgagtattttatcataaaaagtgagaagtgccataagagaattgcaggtaaaacactgtaggtgtttggaggcagaaaa

SEQ ID NO: 168195 - DNA, 571 bp, Homo sapiens
gaaatgaaccaaaaaatgtttggttgaaatgaggttgtggggatctcaaaaaacagtctggggagtttgaattttacacacaggctaaagggtacaattaaatgtgtttaagaatagtagacttttccctgtcctttgaaaaataactctggtagctatttccagaatgggctggaagacagagaaaataagtgaggcccgcaaattaggtattgtggaatccacagagaggtctgaatcgaggtgctgatggtgaagaggacgtaactgctatgagttgtggcagttgaatcagcaggattgagccctgtttagatgagtgtccaggaacagaaaggagtttagtaaatctgaaagctgtatcactaagagggtgctgggactcctcaataraaacagaagtattagaagattcaggattgacagaaatactgaaatcattgtgggacttaataagtttgaatttatcttatagaacacccaagtaggaacatgtccagtaagatgttgtaaagggagaatggtctatcagagacagaaaataactaccatatgcagggtttgttatgag

SEQ ID NO: 168196 - DNA, 571 bp, Homo sapiens
gaaatgaaccaaaaaatgtttggttgaaatgaggttgtggggatctcaaaaaacagtctggggagtttgaattttacacacaggctaaagggtacaattaaatgtgtttaagaatagtagacttttccctgtcctttgaaaaataactctggtagctatttccagaatgggctggaagacagagaaaataagtgaggcccgcaaattaggtattgtggaatccacagagaggtctgaatcgaggtgctgatggtgaagaggacgtaactgctatgagttgtggcagttgaatcagcaggattgagccctgtttagatgagtgtccaggaacagaaaggagtttagtaaatctgaaagctgtatcactaagagggtgctgggactcctcaataaaaacagaagtattagaagattcaggattgacagaaatactgaaatcattgtgggacttaataagtttgaatttatcttatagaacacccaagtagraacatgtccagtaagatgttgtaaagggagaatggtctatcagagacagaaaataactaccatatgcagggtttgttatgag

SEQ ID NO: 168197 - DNA, 491 bp, Homo sapiens
ttcattttcttacatataaccatctttgaaccatctggaattgttttggtgttgagaggtaggaatccagcttctccttgtaaatatttatygaatgaatgaatgagacattctgcagccctaagtaaagctgatggcctcctaagggattagattagatgggtaataaaattgtttgttcactctacaaatatttttaaactgcatgccagcatggcagaatgcaatggtgaataaaatcagatagagctcccactctgtggctattacagttgatgggacaggcagacattagccagataccacaaatggatgtaaaacttacaaaggcgatatgtgccctgaaaaagcatatagttaaggaatctaccctagttgtcactggttaaggaagttccttgggaagtaccctcaggaccagcacctgtgagagggtgaagctggcaggcctggccagacagagtgactgcactccagttgcaacagaggtc

SEQ ID NO: 168198 - DNA, 575 bp, Homo sapiens
aagcttccatgacagctgttttcttcaggagctgctgcctgcaaagagaacaattcactgagcctgagagagagcaagagttctctgagagtttcccaaattattygtcattggcagagcgcctccatggaaggtgcaggggacccagaggcaaaaatgatgtggagccaagaggctggcacttctgtcactccaggcaagcaggcaagcctcaagcccagtccccagacccccaagtgccctactgcgggtcccaggagtagactccctgctgtccttagagagctcctgatggtcctcgcaacttctgagtcactccttctcccacatcatctgcctgtgtttcctgtttcctgggtacaggagtccgtggagaaagagaagggaccaggcttctctgggaggaggaactgcccatttgtgcagtgaaaggcaaggcctcttgcagagggtgaaggaggtggctttgactttgggaagctaagcagctgaccctggccctgttgtatcttggaaggacatcaaaaaaatgagcttagatggcaaagacaatatttaggtgagctacccaaaat

SEQ ID NO: 168199 - DNA, 575 bp, Homo sapiens
aagcttccatgacagctgttttcttcaggagctgctgcctgcaaagagaacaattcactgagcctgagagagagcaagagttctctgagagtttcccaaattatttgtcattggcagagcgcctccatggaaggtgcaggggacccagaggcaaaaatgatgtggagccaagaggctggcacttctgtcactccaggcaagcaggcaagcctcaagcccagtccccagacccccaagtgccctactgcgggtcccaggagtagactccctgctgtccttagagagctcctgatggtcctcgcmacttctgagtcactccttctcccacatcatctgcctgtgtttcctgtttcctgggtacaggagtccgtggagaaagagaagggaccaggcttctctgggaggaggaactgcccatttgtgcagtgaaaggcaaggcctcttgcagagggtgaaggaggtggctttgactttgggaagctaagcagctgaccctggccctgttgtatcttggaaggacatcaaaaaaatgagcttagatggcaaagacaatatttaggtgagctacccaaaat

SEQ ID NO: 168200 - DNA, 575 bp, Homo sapiens
aagcttccatgacagctgttttcttcaggagctgctgcctgcaaagagaacaattcactgagcctgagagagagcaagagttctctgagagtttcccaaattatttgtcattggcagagcgcctccatggaaggtgcaggggacccagaggcaaaaatgatgtggagccaagaggctggcacttctgtcactccaggcaagcaggcaagcctcaagcccagtccccagacccccaagtgccctactgcgggtcccaggagtagactccctgctgtccttagagagctcctgatggtcctcgcaacttctgagtcactccttctcccacatcatctgcctgtgtttcctgtttcctgggtacaggagtccrtggagaaagagaagggaccaggcttctctgggaggaggaactgcccatttgtgcagtgaaaggcaaggcctcttgcagagggtgaaggaggtggctttgactttgggaagctaagcagctgaccctggccctgttgtatcttggaaggacatcaaaaaaatgagcttagatggcaaagacaatatttaggtgagctacccaaaat

SEQ ID NO: 168201 - DNA, 575 bp, Homo sapiens
aagcttccatgacagctgttttcttcaggagctgctgcctgcaaagagaacaattcactgagcctgagagagagcaagagttctctgagagtttcccaaattatttgtcattggcagagcgcctccatggaaggtgcaggggacccagaggcaaaaatgatgtggagccaagaggctggcacttctgtcactccaggcaagcaggcaagcctcaagcccagtccccagacccccaagtgccctactgcgggtcccaggagtagactccctgctgtccttagagagctcctgatggtcctcgcaacttctgagtcactccttctcccacatcatctgcctgtgtttcctgtttcctgggtacaggagtccgtggagaaagagaagggaccaggcttctctgggaggaggaactgcccatttgtgcagtgaaaggcaaggcctcttgcagagggtraaggaggtggctttgactttgggaagctaagcagctgaccctggccctgttgtatcttggaaggacatcaaaaaaatgagcttagatggcaaagacaatatttaggtgagctacccaaaat

SEQ ID NO: 168202 - DNA, 381 bp, Homo sapiens
ctcgctgccatcatgtgaagaaggatgtgtttgcttccccttctgccatgattttaagtttcctgaggcttcccccagccatcctgaactgtgagtcaattaaacctctttcctttgtaagttacacagtcttgggtatttctttattagcagcataagaatggattaatacaggaggggaagcagagtctattgacttgacaagggccatcttgtcaaccaccyaccagcctgccatgtgactttgtacccatggtgtacttctctgatctcaggcctgccatctgcagagggatgtactaatttgcaaaatacaccagggactgcttgttcctgggaaaccacagtgaaatgggaaaatttccagtgaaataaatataa

SEQ ID NO: 168203 - DNA, 580 bp, Homo sapiens
aagtccgtgtcctcacctgtctgtaagcatgtcggaacccttgccatccgcttagaaatccatttccacctgttcgtgtgtggaggagtgggaatggattcatgtatgatagcatgtagggaacattctcccaacacctaacacttgccagctggctccctgagggctgtaagttttattccaacccctcaatgggggacgggagacacattcttgaaacagctcattgatggttcagaatattcctaatagcaggtaaatgatgccaatggtaggtgctggggcaagacaggaacaggaggtgggggtggcctggtggggtccagtggaactctctggagactgtgagtgggaccctgaaggctgggaggacattccagaaaggtgggagcagggagagcacaggttccaaaggcaggaaggggatggcgtctgtggtgggtatggggagagcaggacaggtcttcaactggagtgggatgttcatgcaggagcggtgagcccagagaaaatcagagagatgggggtggcccttcaacaacgggtggaggaatgaggacrttccccgcaggcattagga

SEQ ID NO: 168204 - DNA, 545 bp, Homo sapiens
ccagaccagcctgggcaacatggcgaaaccccgtctctactaaaagtacaaaaattatctgggcctggtgtcatgcatctgtagtcccagctacactaggggctgaggaaggaagatcgtttgaacccaggaggttgaggctgcagtgagctgtgattccgccactgcacttcagtctgggtgacaaagtgagaccctgtctcaaagaaaaaaaaaaaaaaagaagaaaaaggcaatggaattggggaaggggrcagacagggtgctgtgctctgagttgctttttggagctcacgatacttacagtgctttggtggaggtaaagttaaaaaaaaacaaaaacagccgttactaatttaaaatgtgccgttcccctcatcccaccccctggaaccagaggagaggaattattgaatatgtgacatcggaggagaaagattactgtgcatattaagcaaggagaagagtgattgctgaatacatgatgtaaaaggagatagtcaccacaaattaaacacaaaaaattcagtggaaaataattattg

SEQ ID NO: 168205 - DNA, 400 bp, Homo sapiens
ggttgtaattggctgctgatagatcatcttgtagatataccatattttattttattttattttattttatttttgccaaacccctactggtagatatttagattgtttctagtttggactatattatgtaatatttcaagggactttttttacattgttagcatayctttttttgtttgtttgttttttgtttttaagatagggtctgattctgttgcccaggctgaagtgcagtggtgcaatcatggctcactgcagcctccatctcctgggccaaaccaatcctcctgcctcagcctcccgagtagctgggaccacaggaacacatcactatgcccagagaatttttaaatttttttgttagtgttggtgtgccttaactacacaattactcacataa

SEQ ID NO: 168206 - DNA, 503 bp, Homo sapiens
aacaaaattgtaagcctattaaaatccatttttctggtaagacggtgcctcagtgaaattatcattttggaggctgtcaaccaaggtgagcttcttatgcaatgtctcatgtctgtgcccaagtcagaacgtactgccttcatcagaggacaatggggacctgctcgtgtaaatcccattgttggggatcaaggaggggttcctcagtgtcgagagcagctccagggaaaccacatcccacttaagtcagaggagagttggtgagggctgcagagcaagtgatgacaagcactttccacagtcagtccccgtccagagagatggctggctagaatcataatgctgattcaaggaggatatttagattttctcacttacttgatggaggactgaggtgaggactatgaatggtcagaatgtcacttattcmatactaaagggcacattactctttttggatcagttaagcacccattgtagcttattctgtgaacatttaccct

SEQ ID NO: 168207 - DNA, 277 bp, Homo sapiens
agaagaaatctacgtatgaagggatgttgtctggaacaactccctgcacccaggagctytcaacctgggcactcctgacccttggcttgtggggagctgccctgtcccttgtagggtgtttagtggcacccctggcttcctcccactggatgttagcagcagccactcccaagtgtgccagccacagttgtctccagacattgtccagtgtcccttggcaagggagggtgggtgaaacaactctgagtgagaactgccacccttgttccaggattgg

SEQ ID NO: 168208 - DNA, 518 bp, Homo sapiens
ctggctccaccgcacatctgaacctccgcatctcacttcttccactagtaccatctactctaagggcagagrtaatgcctttaaaccctaagatgagtagtgaagctctgcagagagcagatgtcacatacagctaagcgtcagaaggtgatattgagaacacacaattttggagatattggctgtagataaataatgatcattgttgatagtcccagaatttccatgcttgaactggcaattctgagaaacatgtgtctttggttcctgggtcttcttttctacactgccatttgattcagatcaaaaagcataagctgccactggcctccttccttcccttcatgctagatgagcataatctccactcttgttttcgtttccccatctttgacacatcacatgctccaccttgtttgcagtgacaagcagtgtggaagggaacgctggcttccctgatcaaagaggcaaggctggttctgcagcaaagacattccaggaatagaggttcaaagatt

SEQ ID NO: 168209 - DNA, 493 bp, Homo sapiens
actctaagtattgcaaacctaaaaagctgggccttataaataaaattggtacttgcaagacatggaagaaaatgatgaacaccccatctcatggatttagagcttcgaaagrcccaaagaaccaagattatggttccagatctggctaagcatcataaccatcaagaataccacagattaattttacagatggcccagacccaactcaaggcactgaatatgtctaggtttccattgaaaattacttttcatactaagaacctggaagatcccatattgaataagaagagaccaccagttgatgctaaggctgagatgacagagatgtcagaactttctgataaaggaaaaacgcaggatcataaaaatacttccatgagcagttgtaaacatgcttgaagcacacataaacaaaaacacagaaagcctcagcgaaaaaagagaaggcttaaagagaaactaagtagaatctcagaactgaaaaacacaacca

SEQ ID NO: 168210 - DNA, 526 bp, Homo sapiens
aagaaaaagtttttgtcatcatgaagttttagctatttcaatttgcatatccttcaatgaaatattgaattacttccataaagctttggcaagtcttttgttagatttagttcttgatacatgtatatttctgttgctatggatgatgtatttaaattaaattamattacatttatatttaagttcgtgttttaatttttttctttcttcctgatttgttataactttattaacatgtgtctcgtgtcctgttttcctgggacctggttggcagattcacgtcttccttcatttcaggattttttttccaatacagcctttaaacagtttgtcctatttgttttattcttttcctcgtctcacaaacattaattatgtgtttgtgagtactctgtttgatttacacatctatcatttttttcttactattcactgagtgcattcctcggtattactaaacctgttcttcatattcctgacaatattatcagcaggttagattctgtaacagctacttgtaatgtgg

SEQ ID NO: 168211 - DNA, 526 bp, Homo sapiens
aagaaaaagtttttgtcatcatgaagttttagctatttcaatttgcatatccttcaatgaaatattgaattacttccataaagctttggcaagtcttttgttagatttagttcttgatacatgtatatttctgttgctatggatgatgtatttaaattaaattacattacatttatatttaagttcgtgttttaatttttttctttcttcctgatttgttataactttattaacatgtgtctcrtgtcctgttttcctgggacctggttggcagattcacgtcttccttcatttcaggattttttttccaatacagcctttaaacagtttgtcctatttgttttattcttttcctcgtctcacaaacattaattatgtgtttgtgagtactctgtttgatttacacatctatcatttttttcttactattcactgagtgcattcctcggtattactaaacctgttcttcatattcctgacaatattatcagcaggttagattctgtaacagctacttgtaatgtgg

SEQ ID NO: 168212 - DNA, 526 bp, Homo sapiens
aagaaaaagtttttgtcatcatgaagttttagctatttcaatttgcatatccttcaatgaaatattgaattacttccataaagctttggcaagtcttttgttagatttagttcttgatacatgtatatttctgttgctatggatgatgtatttaaattaaattacattacatttatatttaagttcgtgttttaatttttttctttcttcctgatttgttataactttattaacatgtgtctcgtgtcctgttttcctgggacctggttggcagattcacgtcttccttcatttcaggattttttttccaatacagcctttaaacagtttgtyctatttgttttattcttttcctcgtctcacaaacattaattatgtgtttgtgagtactctgtttgatttacacatctatcatttttttcttactattcactgagtgcattcctcggtattactaaacctgttcttcatattcctgacaatattatcagcaggttagattctgtaacagctacttgtaatgtgg

SEQ ID NO: 168213 - DNA, 419 bp, Homo sapiens
catgatcagtccagttttctgcctggggacaaatttctgaacctggtgcaaaagctaaaatccaagcaaagcatgttagttatgctgaatggaggatgcaagaatcagaatagaggcagacaccggacacagtagtgagaagatggaactacacaagggaatggtgaaaggcctgtgtgaaggtcattatgagtccttggttgaaagctgggatatacaagatatcccraggctaccagagagcagttgctatgggactgaaaaagtaatggtgatactatgagtctagcaatgttggaagatattggagttctggcacagcctcaatgcagtgaccttgtcaatattttgctaatatactgatcatcaagcagtaacatcagcaagtaaatgccttaagataaggaacatagtttgaa

SEQ ID NO: 168214 - DNA, 320 bp, Homo sapiens
gtttccttttccatggttagtagcagtatagctaatctcttttgtaaytcatgtattaattgcctaattcatggaatgggcctgtcccttcttcagcatcaccaacacctccctttcgctatcagaggggacacggctcagggatgctcctctagactgcatcctccttgccccagccagctctcacacacatatacacggtgttaggtaggtcagaagtttcttgaagggcccatctattgtttacaaaactctgcaccttacaaaagaattgtagataattccatgcgcttttggtgcttcttttaatttagtcacta

SEQ ID NO: 168215 - DNA, 560 bp, Homo sapiens
gaattctggattgttggggtttttttttaagatataactagacatggatgtttcatttgctgtatataaatttaattggccctgctttctcactaagacttttgttttaattagcaaactcctcttctttktaaatcaaggccaaggccacaatataaatttgcataataaatgcaagcagtttgaacttgatccctgaagatgtgagttctctgtgcacagaaaccagttgagctcccagctggagtttgtaggattaattttcaatgttcaagaagtattatggccagtgtgtctctcctgcaggaactatttttgtacctttaacaatttcaagattagtgcttttatttttcttttaatctttagatcaatggccagttgcacaaaaatgtaattcctttgagaagaaagtctgtgagcaaagagaaatggctttcaaccctaacgcatcacaatgagacaaggaccctgtagatggccccacctggggttctctgtatatgtgccaagtgccttgtgctgctcaaggcgggagtcagcacttgtatgacccactg

SEQ ID NO: 168216 - DNA, 486 bp, Homo sapiens
actgctaaaatgaacaaagaacatttagatctgtgacaacttacaaatggagtgaagcatgacttctctatgaccaatttattatttctggaggaatatgaagaaatatttagagcatgaatgtaagcacatgctaccctccatttacctgctttgtaggatatattcctatgaatattactaaccacagaaaggttatatgaaaatgaaaagcattaagcaggcccacaacaaatggaggttattttttcacaaacttacctatagtaactaatttaagttacttcaaatttcttttctttttttttgagacagagtcttgctctgttgcccaggctggagtgcagtggcrcaatctcggctcactgcaacctccgcctcctgggttcaagcaattctcctgcctcagcctctcgagtagctgggattacaggtgcgcgccacgatgcgcagctaattttttgtatttttagtagagaaggggtt

SEQ ID NO: 168217 - DNA, 524 bp, Homo sapiens
attggttattgccagccaatgaaagacaactttgagtagaaagaaaccagcactggaaaaccatctaatttcagccaaggaatcatttcaagacttgaatttagacttgaaagaagaaaagcacagtttcagcaaagctcaattaatgtataaaaaatccaatttggattgaattgtaggcctgtctcagcactaaggtaagatgcttatctggccaaggcgccacagcccagagacaacagcttatgccagctcctccccctctttccactctttctaccagcccctccctctcctccaacagaagttcctggtttttcccacaccttttgtgattcttgtccacttctcaatgtcccatttcatttacgagtggcctaatataccgatggcctttgtcttggtacaggtgtctttgctgaatcttttcctgcattgtattcttttactatgrcagctatgacaaatttggtggcttaaaacagaaatttattatttcttagttctaggaaccagaagtccaa

SEQ ID NO: 168218 - DNA, 519 bp, Homo sapiens
ctcaatttgcatgaatgtctgttcccaactagacaaggctgtggctggaagactccccgtgagccagggaattgaagctgcctctgcaagctgaattcgtaattgccatgagaaggcaacagcatcaaatcctccagcgtgccaattctttaggcgacggacgaattgacaactcctcaccttacataggcaccaactgactgttggtctttgcccagctctgggtttgtacctgcccttctgcccmcagcgatggtgtcattttgaccttgatctgggaattgctgttcttgtcagcctgttggctccctctgttgagggagacagctcttttgagtgtccaggagatggaagtacaaaggtggacaaatatctacactcggaaggcagacaatagtaccccccaatttctgtttgcacataggtgagagcaagaaaaaaaggagaatacattgtaaagagttttagttcagacacaatatgaaagcacttgattctaatgttatttttttaaaattc

SEQ ID NO: 168219 - DNA, 619 bp, Homo sapiens
gcacataaagtactttgaatctttctcctagctcccccaaattgtgacatctcatataactgtaatgctatattttaaacacaaaattggccttgatatcatactgttaactagaacatagaccttgttctgtttcaacagacttagacaaattatttttttacaaacctacaaggcaattcagtggagaaaaatagtattgtcaacaacgttgcaagaaaaattgagtatccatatacaaaaaaaaaataaacttgtacaacatagtgtcgtgccacataaagacattttggtcagccatggattgcatayacaatggtggtctcataagaatctaatggagctgaaaagtttccacaacctagtgactgtagccatcataacatcagtgtgcatcacatacctcacaggtttgtggtgatgctcgtgtaaacaaacctactgcactaccagttgtttaaaaatctagcacatacaattatgtacagtgcataatacttgataatggtaatacaactaactggtttatgtatttactatactatatttttttattattgtagactgcactccttctccttatgacaggaaaataactgtaaaataatttcaggcaggc

SEQ ID NO: 168220 - DNA, 548 bp, Homo sapiens
tgcagatccaagcgtccctgtgctcttggtgggctggaagcaggcaggaaccctgctcccccgggygcagctgccactgcccaaaccatggctgcagacctaggcctcctgctccacagagcaggcaagagcacggccactccctgggcacagctgcagccacccaaaccatggctttccttctgcccttgtaggcttgaaagtgcttgctcccactgcctagtttttctctgctgttggcacctgctccagtcttggagcaaagtcacggctgagcccaggcaccatggggaggcagtccaattcctgagaggaagtgggcaggtccccagtgaggttccaccttcaggccatggagggcctgaaggctgggggctgggtggccagtcctatagagtggagtgggaacttgcggtgtcttttctgggcttccccatggccactcgttgaacaataggtgcacacttcctcccctccaaggcccataaaagtcccagactcagccagagctgatcagacaatgggaagaccaactgcagagagaagct

SEQ ID NO: 168221 - DNA, 548 bp, Homo sapiens
tgcagatccaagcgtccctgtgctcttggtgggctggaagcaggcaggaaccctgctcccccgggcgcagctgccactgcccaaaccatggctgcagacctaggcctcctgctccacagagcaggcaagagcacggccactccctgggcacagctgcagccacccaaaccatggctttccttctgcccttgtaggcttgaaagtgcttgctcccactgcctagtttttctctgctgttggcacctgctccagtcttggagcaaagtcacggctgagcccaggcaccatggggaggcagtccaattcctgagaggaagtgggcaggtccccagtgaggttccaccttcaggccatggagggyctgaaggctgggggctgggtggccagtcctatagagtggagtgggaacttgcggtgtcttttctgggcttccccatggccactcgttgaacaataggtgcacacttcctcccctccaaggcccataaaagtcccagactcagccagagctgatcagacaatgggaagaccaactgcagagagaagct

SEQ ID NO: 168222 - DNA, 444 bp, Homo sapiens
tatattgacattaatgcaactgtattcagacataggtattttaggcagaaataagggtaaatgtaatcataagagtgggtccaataggtggtcttagaagaagagaaaggtatatatatatatatatctgcatgtgcatgcactaaggaaagattttgtgatggcacagtgagagagtggccaactaaaaaccaggaagagagccctygccaaaacctgaccatgccagcaccttgtcctggactttcagtcttcagagctgtgggaaaaaaaattctcttttatctacccagtgtatggtattttattatggtagcccaagcagactaggacaaccacattttgtttagccgtttataacttaataagcattgaatggtttccgtgtttgactattatgtctaatactgcttatccctttatgtacaatttagcatgacatat

SEQ ID NO: 168223 - DNA, 444 bp, Homo sapiens
tatattgacattaatgcaactgtattcagacataggtattttaggcagaaataagggtaaatgtaatcataagagtgggtccaataggtggtcttagaagaagagaaaggtatatatatatatatatctgcatgtgcatgcactaaggaaagattttgtgatggcacagtgagagagtggccaactaaaaaccaggaagagagcccttgccaaaacctgaccatgccagcaccttgtcctggactttcagtcttcagagctgtgggaaaaaaaattctcttttatctacccagtgtatggtattttattatggtagcccaagcagactaggacaaccacattttgtttagccgtttataacttaataagcattgaatggtttccrtgtttgactattatgtctaatactgcttatccctttatgtacaatttagcatgacatat

SEQ ID NO: 168224 - DNA, 514 bp, Homo sapiens
tttctttctttactgagaacttctttagcatctattacatataataactagacttttatggattaaaaaattctaggatatatttcttaaccccaggaaagaaggtaagtagaagaaatagaaagtctataagaaaccatagaatacactttcctaagtgttaaactagaaataatgatgaagtaatataaaattttactgtgaaaattcagtgcacctatctttaaaccagaacactacataatacagcaaatgttgaattcgaatttaaaaagttatctgtgagtcaytgctctttcttcataatctctcgaaactaaatctgataaattacttgaaaaaacattaactgctgtatttcccacatctttggtccttcataatgaaaaattagagctacattattaaagtagttgatgtcagatttgccataaaacttaattatttattgtagcatagagtgtagtatatcattacaggggcttcaaaatacattaagtgtatcacttacaat

SEQ ID NO: 168225 - DNA, 634 bp, Homo sapiens
attcaacctttaaaggaatcctgtcatttgtgayaaaatgggcaaagaaagaaaaatactgcaagatctcacttatacgtggaatgtaaaatgttgaacttgtaaaaagagtagaatgctggtttccatggatgtggggaggagagcttggggagctattagtcaaaataaatttctgtgagtagaaatcatgttctcatcacaaataaatgataagtatataaggtaatgtatatattaattagcttgatttagccaccccacaatatatacatatttcaaaatatcatgctgtgtaccataatataaataatgttgatttgtcaattaaaaatatataaataaaattaaattttattttgtcaattaaattttaatttgccaattaaaaatagtaaaataatgggaccaaggtctgaagagacatctcaccaaagaagatatagataaagcaataaacatacaaaaaatgttcaatatcatacgtcatcagggaattgcaaattaaaacaacaattatataccactactcacctactgtaatggccaaaatataaaaaacactaaatgctcacaagagtgtagagcaacaagccttctcattcattgctggtggtaatgaaatatggtatgg

SEQ ID NO: 168226 - DNA, 634 bp, Homo sapiens
attcaacctttaaaggaatcctgtcatttgtgataaaatgggcaaagaaagaaaaatactgcaagatctcacttatacgtggaatgtaaaatgttgaacttgtaaaaagagtagaatgctggtttccatggatgtggggaggagagcttggggagctattagtcaaaataaatttctgtgagtagaaatcatgttctcatcacaaataaatgataagtatataaggtaatgtatatattaattagcttgatttagccaccccacaatatatacatatttcaaaatatcatgctgtgtaccataatataaataatgttgatttgtcaattaaaaatatataaataaaattaaattttattttgtcaattaaattttaatttgccaattaaaaatagtaaaataatgggaccaaggtctgaagagacatctcaccaaagaagatatagakaaagcaataaacatacaaaaaatgttcaatatcatacgtcatcagggaattgcaaattaaaacaacaattatataccactactcacctactgtaatggccaaaatataaaaaacactaaatgctcacaagagtgtagagcaacaagccttctcattcattgctggtggtaatgaaatatggtatgg

SEQ ID NO: 168227 - DNA, 513 bp, Homo sapiens
tcatagttaaattattatcagcttctgtgtgcctttgatgtcaattctcccccactgctctgacttggagttaacattttgtttctttcagctggaactttaatttatttttatggatattggtaaaatgtgtttttttaaatatctgcagtgttttcctggtgcagtagtagcrtattttccccctaccggttctgtgtggttgaaatggaagggtggctttttcatttaattcagtctttcatactaacaaaaacactcttatttgttcttcatttatctttgttgtgatcccaggctccaggggtcaggctttgagttgtcaggtggtaatttgttggagcaattttagagaacacgcatgaattgatactgttgtgtctggtgtctggtggcccagcttgatggatcctgaagcacaagctcatttcctgataactccatcattcctattttctctcaacattatagaagggtacctaatgacagaatatatccctcttgcgttttgtg

SEQ ID NO: 168228 - DNA, 534 bp, Homo sapiens
ctatttgaggaaatagaaacaatgtttatatatttaaaacatatttaataaaaatttctgccttaacttcttgtggaggtgtttgtattagtcttctagagctgctgtaacaaactatcacaatttcattggctcatgacagaaatttattctcttacaattccagaagttccaggtccaaaacttatattgtcagcaaagctgcagtccctccgaatgctttaggaaggaattattccttgtaccttccagtttccagtggctmcaaatttttcttatacctgcaccacttcagtatcttccatcttcacctgtgtgatggaaagatcttcaccatctttcatctcccctgtgtctatgttttatcttctgtctctagaaaaaatacttgtcaatggatttggagaccaaccaggataatgcatgataacctcatctcaagacctttaacgtaattacattttcaaagacactttatccaaataagttcacattgaatagtttccatagtttgcctcaacatatatatatata

SEQ ID NO: 168229 - DNA, 403 bp, Homo sapiens
agcagccacatgagcttctcctcatcagctggatttggaatcaagaaattaggcagttaagtcaccttctactagggtaaccttttaaaaactaaatttttcaggaacttttttaaagctatctccaccaatcrtgttatacctgggcatatacttaggtttcgttctctcctcaaatatttagattttttaaatataaattttacgtgttttgtaagggtttcagattaaacattttgttttgttttagggaaaagaaataaatcctagtttggaatggagaagtgagacaagaaggaagggaagccacaaaggatgtatactatgataaagcccactacccctgtgggtgattgaagtttaaaaccttgaggaaactctgagaaacaatgtaaaacccatt

SEQ ID NO: 168230 - DNA, 412 bp, Homo sapiens
agaagaccaagggagcagccacatgagcttctcctcatcagctggatttggaatcaagaaattaggcagttaagtcaccttctactagggtaaccttttaaaaactaaatttttcaggaacttttttaaagctatctccaccaatcatgttatacctgggcatatacttaggtttcgttctctcctcaaatatttagattttttaaatataaattttaygtgttttgtaagggtttcagattaaacattttgttttgttttagggaaaagaaataaatcctagtttggaatggagaagtgagacaagaaggaagggaagccacaaaggatgtatactatgataaagcccactacccctgtgggtgattgaagtttaaaaccttgaggaaactctgagaaacaatgtaaaacc

SEQ ID NO: 168231 - DNA, 411 bp, Homo sapiens
agaagaccaagggagcagccacatgagcttctcctcatcagctggatttggaatcaagaaattaggcagttaagtcaccttctactagggtaaccttttaaaaactaaatttttcaggaacttttttaaagctatctccaccaatcatgttatacctgggcatatacttaggtttcgttctctcctcaaatatttagattttttaaatataaattttacgtgttttgtaagggtttcagrttaaacattttgttttgttttagggaaaagaaataaatcctagtttggaatggagaagtgagacaagaaggaagggaagccacaaaggatgtatactatgataaagcccactacccctgtgggtgattgaagtttaaaaccttgaggaaactctgagaaacaatgtaaaac

SEQ ID NO: 168232 - DNA, 587 bp, Homo sapiens
cagccataaagtagatggtcctactcaatccttaatagtaggccagttgaaactattaaggttatgcaatttgaccaargtcatacatctctagtcagtggcacaaataaaaaatactaattgtcaagtacgttatttactccacaccaattattctaaaggtcttcctctcttggaaatttttcttttgctaaagaagacctatcatgtttgcccaactgtacagaatttaaatttttgttcttattttgatgacaatgttaataccgtaaaggttttttttcaaaaatacttttgaaaagttcatgttactctttgagtggggctaagattctcaatctagagatcattataaattttttatcaaactatacatttcctctaagaaagcctttaacttcaacaataatctgaggtttggtagtgctctgtaataaaaccacataatgtagacttttaatctcttaatttccaactttaaatagacactatttttaatatcttgaagtaatgcttgtctaaatatatattcttaaacattttaattacaatctatccaattttgtcacactagtcttataatttct

SEQ ID NO: 168233 - DNA, 518 bp, Homo sapiens
ttatgtaggtcaaatgattatgctaaataagcatatgggatatatttcatgttttcttttctgattctaattgagaaaaaaggtaagtacttaaggtgttaataatttaagggtattaacagttgatgaaaaccagtatgaaagcaaaggaggagctcgaatcttttgcattcaagtattttgatgaaaattggtaatttarccccaacactgtttcgcacatatctcagcccaaatagacaagtattttgatgaaaattgagaatttagcctcaacactgtttcccccttttcccaacccaaataaacatatacatacttcatagactctatatcccaataaaaccactacagaggaaaaaaattaagtgaccaaatgtataaacatggcatttttaaacactaaggtagtttactgagtgaatgacatgaaacattaccatcgacctaaggagatgttctattaagagcaatatatgcttacaagaggcagaaaacaagacaaaacttataaaata

SEQ ID NO: 168234 - DNA, 525 bp, Homo sapiens
acaaccttcttcacctggtggcagaaagaagtgtcaagcaaaagggggaaaatcctcttatgaaaccatcagatctcgtgaaacccactcactatcatgagaacaccagcataggggtaaccacccccatggttcaattacctcccactgggtccctcccatgacatttggggattatgggagctacaattcaagataagtgtgtccccaaccaactatcatcttgaattatagttcccataatccccatgtgttgtaggaaggacccagtgggagataacttaatcatgggggcggttttccccatactcttctcatgttagtgaataagtctcacaagttctgctggttttataaggggtttctcctttcccttggctcgcatttttctcttgcctgccaccatgtaagaggtgtcttttgtcttccaccatgagtrtgaggtcgccccagcctcttttccttataaattacctcttttctttataaacctctcttctttataaattacccagtcttgggcat

SEQ ID NO: 168235 - DNA, 568 bp, Homo sapiens
ttatgtatatttcaaagtaactagaggagaggactttaaatgatactaacatgtaaaaatgataaacactcaaggtggtgaatactccaaatagcctgacttgatcattatacatgctgtgagtttaacactcaaatgtaccccataaatatgtaaattattatgtataaataaaaggaggcgaaaagcaaaaaaaaatttaaaaattaaaaaatatttgaggatgattctatatattctcaacaaattactcttctaaatcttctgatacaatattatctctgagcaagtctacattatctggaaaatgaatgttataaaaaagtataaacatttatttgtaagaaaagaaatattaagttttttaggattgaaaccaatttcatctagcaaaattgcattttctagtactatgagagaagaccccaaataaaataccttattatttgatgytaatgaggcatactaaataaagtgacagggtaaagaaaaaaccactgggtcagatacactttcctttagatgtgtaagaaaaggttttaaaatctcactatgaatgagagtggga

SEQ ID NO: 168236 - DNA, 571 bp, Homo sapiens
ttttgtcttttattagatctcctaactcactgttgtttcaatatatgagggctgctaatttctgtatacaaattttttagtcagtcaccttattgaattctgatcttaaaaaaattgtcttaagattttcacaaatatattacttgaaaattgtaataatttaacctcttcctttctcatatttaaacctcaaaattcttttttcattttctatgtttggtatcctcagaataatgttagacaatattgtaatggtaagcattcttgtcttgttactcaggtaatcttatatcttaaaacaccttctaacttcctaatattattagcttctccctacttgctrtatctttttaatcttgaaaaactctctgtggatgtcatgctgacttgcagccactgctctctcacctttcttttaaatgtcttggaaaagttatctacagttgacccttgaacaacatgggtttggactccatgggttcacttacacgtggattcttttctgcctctgctaacttagagacagcaagaccaacccctcctcttcttcctcctcctcagcctacttaat

SEQ ID NO: 168237 - DNA, 309 bp, Homo sapiens
aactccagcagaactgcagcagaggggcctgactgttagaaggaaaactaacaaacagaaagcaacagcatcagcatcaacaaaaaggacaaccacacaaaaactccatccgaagatcaccaacagcaaaggtcaaaggtaaataaatccacaaagatgaggaaaaaccagygcaaaaaggctggaaattccaaaaaccagaatgcttcttctcttctaaaggatcacaaatcatcaccagcaagggaacaaatcttgatggagaatgagtttgatgaactgacagaagtaggcttcagaaggtgggta

SEQ ID NO: 168238 - DNA, 598 bp, Homo sapiens
ctatcctgactgatacaagaagcacctaattttgccacatttagcagctcaggaaaacttttttgaagaatgagtttaggttactggtttctgaattacagctggaattcagctatctctcttttacttattttattcatatttggctacaattcagaccaggcaatttcccaaatattattcttgaagtagagtatcttaataattactaattyattattctataactatagcctcccattgtgcaactaatataagcttatggaatagtgatgctcatgcaaagtagccaagttacttatctgtgacggctttttaagttttacaggcagggtgaacatccaagtttgccctctgggaaaatcagaactaaaaagacttcctttgtgctttgtcaatggctagtctgtcaattccataccgtactccggcagtatggggcagtttcaatcttctccttacatttccttaaaagattttctctactcatacatattctggttctttcaggaaagtcattttgaagaaatccatctcattctctaagtagtaaagatctaacatgtcatgtgaacaacttttggctgaagaatttcat

SEQ ID NO: 168239 - DNA, 435 bp, Homo sapiens
agaaaatggcaagatatgtaacaaggtatatgtatatattacttttatacaggggggaaataaattaaaatgcacctgagtgtgtgtgtgtgtgtgttttcttgtctatgcttaaagaaacagtgccaagacataaattaataaaagtggttatctgtagatgggggtagggtaaataggtataggaatgagaccttagaaaacacctctttatattgytttatatgtattatccatacactaaaaaaatgtaaaaacattctttctctactaacactgtcatgaatatttacaaacatttactaaagaatgcaatatactatagtaaattattggaaagaaattcagttttctcagatagttaacagtgctgacacactgcataaccagtatgaccagcttaacattccaggccagtgactcaggtgttcaata

SEQ ID NO: 168240 - DNA, 435 bp, Homo sapiens
agaaaatggcaagatatgtaacaaggtatatgtatatattacttttatacaggggggaaataaattaaaatgcacctgagtgtgtgtgtgtgtgtgttttcttgtctatgcttaaagaaacagtgccaagacataaattaataaaagtggttatctgtagatgggggtagggtaaataggtataggaatgagaccttagaaaacacctctttatattgctttrtatgtattatccatacactaaaaaaatgtaaaaacattctttctctactaacactgtcatgaatatttacaaacatttactaaagaatgcaatatactatagtaaattattggaaagaaattcagttttctcagatagttaacagtgctgacacactgcataaccagtatgaccagcttaacattccaggccagtgactcaggtgttcaata

SEQ ID NO: 168241 - DNA, 402 bp, Homo sapiens
ttatacaaccccagtacagcttagagatccaacatgttgtaygggtgatagagaaaaagacaaaacaaacatacaaacacaaccactaaacttgagaatcaaagaattcaaatattctgatagtttacaactttcccaaataccaaatacagcacattaatccaggtatagaatacaagatagaagcactgaatcaatactttcacatgaattaacgtgaactgattccaaaatagaataaaatatagtacactccaaggaaaagaagcccttcatgctactcaacagatattcattttctactttttattttacaataaatctgtatgtcaataaaactgtattaacagtaagtcttcaacaagtatttagtaaaaagcctaatataatgttgatttgtct

SEQ ID NO: 168242 - DNA, 555 bp, Homo sapiens
gatgctgtggcacaatgataagccacatacagatagatagatcttgacatcaggtagcttagagtcgaggttcacacttaattatttgagtctccagagtgggttgcattgcatgggacatgacaaccaagatcayagagactaggatcacgagctcaaacaccgtgagggcctaagcatgtaactgaaatatggcaaaagtctagctataacacagtagaaagtatcaggggcagaagtgggagtatagaaactcgagtgcctaacgtaaaagacttccctaagacttccaagtgtaaaaccacgtttctaaaatctacaacagtatgatttctaaaatcaaaacagaatgttttgtctcttatatgctaaagataaagattggagcaaaaaatcagcaaatcaatatgatttctttgaatagcatgcttaaaattatccatggcaagagttaaaaagttttgcaaagtttaagttgtggcactatacctgtgactgttacaagcccatcacgtgagtatttctacaaacctctgacaataataggatgggaag

SEQ ID NO: 168243 - DNA, 536 bp, Homo sapiens
caacttgtaatactaacttgacaatcttttggtgaggtaccttggggatggatcctccaacttcaaaccatcagatgcctgcagctccagctgagatctgacgccaacctcatgaaaatcctagaatcagaactgtcaaaccaaactgctcctgaattcctgaaatggtaaaagataataagagcaactgtgattattattttaagccacacattttgaaataatatgttaactagaagtagataattaacacaatcataaatttattatgtattcattaaaaatgattttgttgacaataaatgtatattaaaaytttcttcaattattttacattttccccactgcctatgatttcagactttgaaacaattagaacatgcttataaaagaaaataaaacaaactagaataaagtttccatcatcaagagtataattgaatttttttggaatctcaagattactaaaattttaatgtcaagagtttgtttgtttgtttgtttaagctcactttatgaagagcaaatgagcagtc

SEQ ID NO: 168244 - DNA, 601 bp, Homo sapiens
gttctctggcattgtccaggccttcttgytgtataactgaaagactggcagctagtatttatcttttccctctgaggctcagagggtagcagctttacacataagggcagtaatgatcataattctcactgcattgcatttgcacaaaatagtagagttaggctatttctctctgccttaaaatctgttgctcatgtttcttctttactaataaatatattttgtggctttttttctccccagaatagggcacttttgtttgcattaacagtttgttcatgaagatattctttctcctcaatgattttcttaatggcatataggaactcatctgctgcctcttgggtcgcagaaactgtttcttctgttatcttgatattttttaagccaaaccactatctaaaattatcaaaccatcctttgctggcattaaattctccatctttagatctttcaccttccttatattttaagttgtcctataatgacttcactttttctcgaatcatattagagtttatgtgtatgcttttcttatagaaatcctacatccacataaaaactgcatttttaatatgaggtaaaaggtattttgcaaatg

SEQ ID NO: 168245 - DNA, 519 bp, Homo sapiens
tcttactgacgttttgtcagtacaggtggatctttattttttattttatttatttatttaatttctttttttttttttttttttttgagacggagttttgctcttgtccaggctgtagtacagtggcaagatcttggctcactgcaacctctgcctcccaggttcaagtgattctcctgcctcatcctsctgagtagctgagattacaggcatgcaccaccatgcccggctaattttgtatttttagtagagatggggtttttccatgttggtcagggtggtctcgaactcctgacctcaggtgatccacccgccttggcctcccaaagtgctgggattacaggtgtgagccactgtgtgtggctggatctttatttttcaaaatgtaaatgggtcagtttataaatcaccatggtatagatgtcaacacccattatcattcttctattcttttccataaaatacgtaaaaatagcacgaacccagcactagagactaggcagaggggaaacatatggc

SEQ ID NO: 168246 - DNA, 519 bp, Homo sapiens
tcttactgacgttttgtcagtacaggtggatctttattttttattttatttatttatttaatttctttttttttttttttttttttgagacggagttttgctcttgtccaggctgtagtacagtggcaagatcttggctcactgcaacctctgcctcccaggttcaagtgattctcctgcctcatcctgctgagtagctgagattacaggcatgcaccaccatgccyggctaattttgtatttttagtagagatggggtttttccatgttggtcagggtggtctcgaactcctgacctcaggtgatccacccgccttggcctcccaaagtgctgggattacaggtgtgagccactgtgtgtggctggatctttatttttcaaaatgtaaatgggtcagtttataaatcaccatggtatagatgtcaacacccattatcattcttctattcttttccataaaatacgtaaaaatagcacgaacccagcactagagactaggcagaggggaaacatatggc

SEQ ID NO: 168247 - DNA, 511 bp, Homo sapiens
tcagtcagcaccccttaaatatcttctaagtcttcgtggaaaattttaagatggagtctcactctgtcgcccaggctggagtgcagtggtgcgatctcggctcactgcargctctgcctcccgggttcacgccattctcctgcctcagcatcccaagtagctgggactacaggcgcccgccaccatgcccagctaattttttgtatttttagtagagacggggtttcactgtgttagccaggatggtcttgatttcctgacctcatgattcgcctgcctcggcctcccaaagtgctgggattacaggcttgagccaccgcgcccagcctgtggaacattttaatatatcttatctgttacttattaccttttattccaaatggctaatctatattctaggatttttcaagtatttgtacttctctcctccttaacatcttgccacatattcctccagcaattttcatatactttgctctaaaaagtcctagctttttccttcagtatgtaa

SEQ ID NO: 168248 - DNA, 511 bp, Homo sapiens
tcagtcagcaccccttaaatatcttctaagtcttcgtggaaaattttaagatggagtctcactctgtcgcccaggctggagtgcagtggtgcgatctcggctcactgcaagctctgcctcccgggttcacgccattctcctgcctcagcatcccaagtakctgggactacaggcgcccgccaccatgcccagctaattttttgtatttttagtagagacggggtttcactgtgttagccaggatggtcttgatttcctgacctcatgattcgcctgcctcggcctcccaaagtgctgggattacaggcttgagccaccgcgcccagcctgtggaacattttaatatatcttatctgttacttattaccttttattccaaatggctaatctatattctaggatttttcaagtatttgtacttctctcctccttaacatcttgccacatattcctccagcaattttcatatactttgctctaaaaagtcctagctttttccttcagtatgtaa

SEQ ID NO: 168249 - DNA, 401 bp, Homo sapiens
tctactcattcttcacagaaccaccagtcataaaattgtattccaaacaatagtatcaaacrgctattcattgactatcttatgctaggcatagtgataggtgctgcagattcaggggttaaagaggactactcctgtggtccccgttctttggtgctctttttctcacttccaaatatcctgtcctattgagccactattactgcagagttacgttttgctttacattacttagttgttgacatatctgccctcgaggaaactagttggagaataatagtatttagtaatcacttcatccccatggtctaatataacacatgacacataaagggtacttaatgttagttgaattaacagatgaaggaatgcatatgtgcagaggtgtgcttgtttttttt

SEQ ID NO: 168250 - DNA, 401 bp, Homo sapiens
tctactcattcttcacagaaccaccagtcataaaattgtattccaaacaatagtatcaaacggctattcrttgactatcttatgctaggcatagtgataggtgctgcagattcaggggttaaagaggactactcctgtggtccccgttctttggtgctctttttctcacttccaaatatcctgtcctattgagccactattactgcagagttacgttttgctttacattacttagttgttgacatatctgccctcgaggaaactagttggagaataatagtatttagtaatcacttcatccccatggtctaatataacacatgacacataaagggtacttaatgttagttgaattaacagatgaaggaatgcatatgtgcagaggtgtgcttgtttttttt

SEQ ID NO: 168251 - DNA, 401 bp, Homo sapiens
tctactcattcttcacagaaccaccagtcataaaattgtattccaaacaatagtatcaaacggctattcattgactatcttatgctaggcatagtgataggtgctgcagattcaggggttaaagaggactactcctgtggtccccgttctttggtgctctttttctcacttccaaatatcctgtcctattgagccactattactgcagagttacgttttgctttacattacttagttgttgacatatctgccctsgaggaaactagttggagaataatagtatttagtaatcacttcatccccatggtctaatataacacatgacacataaagggtacttaatgttagttgaattaacagatgaaggaatgcatatgtgcagaggtgtgcttgtttttttt

SEQ ID NO: 168252 - DNA, 401 bp, Homo sapiens
tctactcattcttcacagaaccaccagtcataaaattgtattccaaacaatagtatcaaacggctattcattgactatcttatgctaggcatagtgataggtgctgcagattcaggggttaaagaggactactcctgtggtccccgttctttggtgctctttttctcacttccaaatatcctgtcctattgagccactattactgcagagttacgttttgctttacattacttagttgttgacatatctgccctcgaggaaactagktggagaataatagtatttagtaatcacttcatccccatggtctaatataacacatgacacataaagggtacttaatgttagttgaattaacagatgaaggaatgcatatgtgcagaggtgtgcttgtttttttt

SEQ ID NO: 168253 - DNA, 643 bp, Homo sapiens
aataaaagaaagttgtataaaggaagaagaaaatccttgatatttatatcagtttagtttgcttctcctctaaagtatttattgaaggccaatgataagtctaacaatgcttttgcacatagcaggtatttaaaatacattatttcttgtctcattgaatttctttctctagccctacaggacacacaataatcataagacttagtaattaattcacagccctgcatccagttttcatgtaaagattaacacttcagtaaaagtacccctttatacgtggtctgtaaacctggcttctgtttattcttcctccatctcttctaccatgttttcctttcacttacttctagtcatcctggactcctttctattcctagaacttaccaagttcattcctctcagaatacttacattgtctttcctacttgtctgaactgctcatccactgggttatacatatctttttccagtcattcccatagttgctaatatggtttggctgtatcctcacccaaatctcatcttgaattgtaactcccacaattcccacgtcatgggaggaacccagtgggagatgattgaattatgggggtgggtctttcctgcactgttttcrtgttagtgaatgagtcttacaagatct

SEQ ID NO: 168254 - DNA, 430 bp, Homo sapiens
ccaggaagggaaagtgggttaggtaaacatctagtcaatctttgcagggatgaagtaagcttggmcagctgagttctaaagatgggccgggtgttctggggaactagtcagcaggtactagaaagtcaagtaaacattcattaaagaacccttcgaggttcccaaagtcatgacggaccttggtcttgggtggtgttccccaacctctttcatgtcatggcacacataggaaaggatcattcttgtgctgtatattagactctctggatgaagttattcaaggccagaggtgatacatgaattaggaggccccatgcactccaggtggccacctggccactgtgaaggctgaggatcttatggcatttgccatttaagatgtccagggttaatggctggtaacctgtttgcaacatactggtgtgctgca

SEQ ID NO: 168255 - DNA, 430 bp, Homo sapiens
ccaggaagggaaagtgggttaggtaaacatctagtcaatctttgcagggatgaagtaagcttggacagctgagttctaaagatgggccgggtgttctggggaactagtcagcaggtactagaaagtcaagtaaacattcattaaagaacccttcgaggttcccaaagtcatgacggaccttggtcttgggtggtgttccccaacctctttcatgtcatggcacacataggaaaggatcattcttgtgctgtatattagactctctggatgragttattcaaggccagaggtgatacatgaattaggaggccccatgcactccaggtggccacctggccactgtgaaggctgaggatcttatggcatttgccatttaagatgtccagggttaatggctggtaacctgtttgcaacatactggtgtgctgca

SEQ ID NO: 168256 - DNA, 331 bp, Homo sapiens
agttttgggagggtttatatcttctgttgataggcctgctggcattggctcatgtgtttggggttttaaaaactcttggattgtgaattcatcttaacatggcatttaaaccgtgggaatcctggatctccaagtttgagggcatctctctggtgctacttttgccaggaattttaggaatgtctaaaaactgtttctacactaatttaccacacagargtctccagtgccatagagggagtacaactttgaaccccaaagctggtgaatgcaggcctggagtttcaaaaattttcccccactcagagctcactccaaggaatgcaagctt

SEQ ID NO: 168257 - DNA, 404 bp, Homo sapiens
tttgtgtgtgttggtctaaaaatgaaaccccaccgaatggcattaccggcttccacaagcacagaaacgtcactgtttattgtggaggctgtgagaagaatgtgcaaagcacattggccttcaatggaggtgaaggtgggactaggagagagtcaggggtcctttaacatgggtctccatgctccccttatgcttccattatctgcctcttacctaattcctaagtggtcagtattgaagtgccatgcaattgccttagaaacttctgatgccagaaaattcactctcaaaaggagaataaaagattaatagaagttcctaaacattttcaagggaaacttgagctgayacaaaatgcaaaaaggtctgcagaattttaacacatttctgatacaggttagaat

SEQ ID NO: 168258 - DNA, 583 bp, Homo sapiens
aataagaaattcattattagtgaatatgaagaacttttctgggaaggtgcaatgaacrgaatatgtgtgtgtcttcccctcaaattcttatgttgaaatctgcacctccacggtggtggtattaggggatggggcttttgttagatgaaggtggaaagccttccccatgaaggtggaaccctgatgaatggaattatttcccttataaaagaggccttagagagctagccagccccttctgccatgttaaggacacagctagaaggtgccatctatgaaccaggaaatgggtcctcaccagaccctgaaattgctggcaacttgatcttggacatccagtctccagagccgtgaaaaataaatttctattgtttagtagccaccagtctatggtattttgttatagcagctcaaatggactaagatagagggcagggatttttgtgaattttcttcactctacatctccaacatctaagaaaaagccagacacattcttggtgttcaataaatatttgttgaattaataaataaattatagtggacatttgtagttgttgcctttctgcattcattcctatct

SEQ ID NO: 168259 - DNA, 583 bp, Homo sapiens
aataagaaattcattattagtgaatatgaagaacttttctgggaaggtgcaatgaacggaatatgtgtgtgtcttcccctcaaattcttatgttgaaatctgcacctccacggtggtggtattaggggatggggcttttgttagatgaaggtggaaagccttccccatgaaggtggaaccctgatgaatggaattatttcccttataaaagaggccttagagagctagccagccccttctgccatgttaaggacacagctagaaggtgccatctatgaaccaggaartgggtcctcaccagaccctgaaattgctggcaacttgatcttggacatccagtctccagagccgtgaaaaataaatttctattgtttagtagccaccagtctatggtattttgttatagcagctcaaatggactaagatagagggcagggatttttgtgaattttcttcactctacatctccaacatctaagaaaaagccagacacattcttggtgttcaataaatatttgttgaattaataaataaattatagtggacatttgtagttgttgcctttctgcattcattcctatct

SEQ ID NO: 168260 - DNA, 583 bp, Homo sapiens
aataagaaattcattattagtgaatatgaagaacttttctgggaaggtgcaatgaacggaatatgtgtgtgtcttcccctcaaattcttatgttgaaatctgcacctccacggtggtggtattaggggatggggcttttgttagatgaaggtggaaagccttccccatgaaggtggaaccctgatgaatggaattatttcccttataaaagaggccttagagagctagccagccccttctgccatgttaaggacacagctagaaggtgccatctatgaaccaggaaatgggtcctcaccagaccctgaaattgctggcaacttgatcttggacatccagtctccagagccgtgaaaaataaatttctattgtttagtagccaccagtctatggtattttgttatagcagctcaaatggactaagatagagggcagggatttttgtgaattttcttcactctacatctccaacatctaagaaaaagccagacacawtcttggtgttcaataaatatttgttgaattaataaataaattatagtggacatttgtagttgttgcctttctgcattcattcctatct

SEQ ID NO: 168261 - DNA, 583 bp, Homo sapiens
aataagaaattcattattagtgaatatgaagaacttttctgggaaggtgcaatgaacggaatatgtgtgtgtcttcccctcaaattcttatgttgaaatctgcacctccacggtggtggtattaggggatggggcttttgttagatgaaggtggaaagccttccccatgaaggtggaaccctgatgaatggaattatttcccttataaaagaggccttagagagctagccagccccttctgccatgttaaggacacagctagaaggtgccatctatgaaccaggaaatgggtcctcaccagaccctgaaattgctggcaacttgatcttggacatccagtctccagagccgtgaaaaataaatttctattgtttagtagccaccagtctatggtattttgttatagcagctcaaatggactaagatagagggcagggatttttgtgaattttcttcactctacatctccaacatctaagaaaaagccagacacattcttggtgttcaataaatatttgttgaattaataaataaattatagtggacatttgtagttgttgcctktctgcattcattcctatct

SEQ ID NO: 168262 - DNA, 538 bp, Homo sapiens
tcttaaattgaggaaaaataatactttgaataaacattgataactgaatttttaaaaaattctactcaaaagcacttacttgcataagccatatgtaagcatgttttcaaaagttaatcaaatattagtggttcatgctataccaagtcattcatatgacattatcatgctcagtataattattttttaatsaacagtttagggtcagcatatagaacttattttgcttgaaacaaaggcaaaaataaaacttaagactttttttaattcagactaagcaaaaagtgttacaaattctcataatgtcagacacttccatttttcttataagaaacattctggctacaaaacagcttttcgtatacaaacttatgaaaaccctaagatcacaaaatgcttatatcattgacaacttggatttgaaaaaaaaatacacttaaagcttacaaactcagtaaaagttccacgatatgtattacttactatgttaattcatctttcttcacttctattgcatcagtcatgaatgtccagatct

SEQ ID NO: 168263 - DNA, 538 bp, Homo sapiens
tcttaaattgaggaaaaataatactttgaataaacattgataactgaatttttaaaaaattctactcaaaagcacttacttgcataagccatatgtaagcatgttttcaaaagttaatcaaatattagtggttcatgctataccaagtcattcatatgacattatcatgctcagtataattattttttaatgaacagtttagggtcagcatatagaacttattttgcwtgaaacaaaggcaaaaataaaacttaagactttttttaattcagactaagcaaaaagtgttacaaattctcataatgtcagacacttccatttttcttataagaaacattctggctacaaaacagcttttcgtatacaaacttatgaaaaccctaagatcacaaaatgcttatatcattgacaacttggatttgaaaaaaaaatacacttaaagcttacaaactcagtaaaagttccacgatatgtattacttactatgttaattcatctttcttcacttctattgcatcagtcatgaatgtccagatct

SEQ ID NO: 168264 - DNA, 538 bp, Homo sapiens
tcttaaattgaggaaaaataatactttgaataaacattgataactgaatttttaaaaaattctactcaaaagcacttacttgcataagccatatgtaagcatgttttcaaaagttaatcaaatattagtggttcatgctataccaagtcattcatatgacattatcatgctcagtataattattttttaatgaacagtttagggtcagcatatagaacttattttgcttgaaacaaaggcaaaaataaaacttaagactttttttaattyagactaagcaaaaagtgttacaaattctcataatgtcagacacttccatttttcttataagaaacattctggctacaaaacagcttttcgtatacaaacttatgaaaaccctaagatcacaaaatgcttatatcattgacaacttggatttgaaaaaaaaatacacttaaagcttacaaactcagtaaaagttccacgatatgtattacttactatgttaattcatctttcttcacttctattgcatcagtcatgaatgtccagatct

SEQ ID NO: 168265 - DNA, 538 bp, Homo sapiens
tcttaaattgaggaaaaataatactttgaataaacattgataactgaatttttaaaaaattctactcaaaagcacttacttgcataagccatatgtaagcatgttttcaaaagttaatcaaatattagtggttcatgctataccaagtcattcatatgacattatcatgctcagtataattattttttaatgaacagtttagggtcagcatatagaacttattttgcttgaaacaaaggcaaaaataaaacttaagactttttttaattcagactaagcaaaaagtgttacaaattctcataatgtcagacacttccatttttcttataagaaacattctggctacaaaacakcttttcgtatacaaacttatgaaaaccctaagatcacaaaatgcttatatcattgacaacttggatttgaaaaaaaaatacacttaaagcttacaaactcagtaaaagttccacgatatgtattacttactatgttaattcatctttcttcacttctattgcatcagtcatgaatgtccagatct

SEQ ID NO: 168266 - DNA, 431 bp, Homo sapiens
tcatacaggggtgcaaagtctgctgaaagctgtgaagggagcaaaattattgaaaaaaactctctaagaccccaggctctaaactaagcacaagataatgatagcccaccagaacaactgcagataactacagcaacaacaaaaccaaactcagtttcactactgcctaaattgacttaatctcctacactaatgacctaacagaagaggcatgaccacttttgggcatgaatcttattaccttagtccctgctgtccttttacacacgatgtctggaatccaattaaaaagcacaagagactgttccagttaagtagacagaaattataaagaatagcatagrtataaaaaaataatttggctgggcgcaatggctcacgcctgtaatcccagcactttgggaagatgtggtgtggtgggcggattgctt

SEQ ID NO: 168267 - DNA, 536 bp, Homo sapiens
aactttctagctaatcaagggtacaaggtgtctatgtcgaaggcccagctttgcctacagcaggttaaatatctaggcctaatcttagccaaagggaccagggccctcagcaaggartgaatacagcctatactggcttatcctcgccctaagacattaaaacagttgagggagttccttggaattaccagcttttgccgactatggatccctggatacagcgagacagccaggcccctctaatcaaggaaacccagaggcaaatactcatctagttgagtgggaacagaggcagaaacaaccttcaaaaccttaaagcaggctctagtacaagctccagctttaagccttccacaggacagaatttctctttatatgtcagagagagagccgggatagctcttggagtcctcactcaaactcatggacaaccccacaaccagtggtatacctaagtaaggaaattgatgtagtagcaaaaggctggcctcactgtttaagggtagttgcagcagtggccgtcttagcatcagagg

SEQ ID NO: 168268 - DNA, 536 bp, Homo sapiens
aactttctagctaatcaagggtacaaggtgtctatgtcgaaggcccagctttgcctacagcaggttaaatatctaggcctaatcttagccaaagggaccagggccctcagcaaggaatgaatacagcctatactggcttatcctcgccctaagacattaaaacagttgagggagttccttggaattaccagcttttgccgactatggatccctggatacagcgagacagccaggcccctctaatcaaggaaacccagaggcaaatactcatctagttgagtgggaacagaggcagaaacarccttcaaaaccttaaagcaggctctagtacaagctccagctttaagccttccacaggacagaatttctctttatatgtcagagagagagccgggatagctcttggagtcctcactcaaactcatggacaaccccacaaccagtggtatacctaagtaaggaaattgatgtagtagcaaaaggctggcctcactgtttaagggtagttgcagcagtggccgtcttagcatcagagg

SEQ ID NO: 168269 - DNA, 534 bp, Homo sapiens
ctttctagctaatcaagggtacaaggtgtctatgtcgaaggcccagctttgcctacagcaggttaaatatctaggcctaatcttagccaaagggaccagggccctcagcaaggaatgaatacagcctatactggcttatcctcgccctaagacattaaaacagttgagggagttccttggaattaccagcttttgccgactatggatccctggatacagcgagacagccaggcccctctaatcaaggaaacccagaggcaaatactcatctagttgagtgggaacagaggcagaaacaaccttcaaaaccttaaagcaggctctagtacaagctccagctttaagccttccacaggacagaatttctctttatatgtcagagagagagccrggatagctcttggagtcctcactcaaactcatggacaaccccacaaccagtggtatacctaagtaaggaaattgatgtagtagcaaaaggctggcctcactgtttaagggtagttgcagcagtggccgtcttagcatcagagg

SEQ ID NO: 168270 - DNA, 536 bp, Homo sapiens
aactttctagctaatcaagggtacaaggtgtctatgtcgaaggcccagctttgcctacagcaggttaaatatctaggcctaatcttagccaaagggaccagggccctcagcaaggaatgaatacagcctatactggcttatcctcgccctaagacattaaaacagttgagggagttccttggaattaccagcttttgccgactatggatccctggatacagcgagacagccaggcccctctaatcaaggaaacccagaggcaaatactcatctagttgagtgggaacagaggcagaaacaaccttcaaaaccttaaagcaggctctagtacaagctccagctttaagccttccacaggacagaatttctctttatatgtcagagagagagccgggatagctcttggagtcctcactcaaactcatggacaaccccacaaccagtggyatacctaagtaaggaaattgatgtagtagcaaaaggctggcctcactgtttaagggtagttgcagcagtggccgtcttagcatcagagg

SEQ ID NO: 168271 - DNA, 549 bp, Homo sapiens
gggattacaggcgtgagccaccgcgcccggccattagtaagcattttgtttagcaggtactggatggaagcattttacatccaaaatcccatttcatcctcataagaactctgataggaacgattttctctgtttcacagaggagaaaactgaggcttggagcaaaaggagcttatggaaggtctcacagtcaaaagcagcaggtccaatttgagcccaggtctgtcggtggccaaacccacagctgcatcacggcaccacacagccccacaagccgagtgtggcrgcttggccctttcccggcctggctcccctgctggaccaaaacttgggtaggccaggggccttttatattcctacctcggccgaagaggcgaaatgtgtttactgatgggaaagaaatgcctccttaacacacaggtgatggaggggctcacttaggatgaaatgaggagccccacgacccagtggagagcgcaccagctgagggcgacgggattcccatccttttaagagcacttttcagccacttcagggcgcagagcagtg

SEQ ID NO: 168272 - DNA, 551 bp, Homo sapiens
agatcttatagcttggggctgctctggcaagaatcggaggagttgggcagcaggtgccccctgtagcgggggcaggggttctggacttgccatagtttcaaccctgcccactgttccttccccagcctastgcagcctcgatctcacaggcttaagggatcccctgctccagttgctatctgttgggaagtgtgtgtgagatttgggggagctgggagcacttcttttgccagcagacacactgccctgattcagaccaccccacagccactcccagttctctagccgcagagcctgccaggtgaggcctggggaggtggtgggaggctgaccctgagtagggttctgatttcccttttcctcatggccatcactacccctcagcccctgcagcagggacaggcatcttctcaggcagcaataccatctgtaccagccgtgagggtggtggaaggaagggtgggagtgtggatcctggctcccagagaagccactgaggctggggcaacttatccacatccctagtcctgccagattggcagaggtgatta

SEQ ID NO: 168273 - DNA, 555 bp, Homo sapiens
agcttggggctgctctggcaagaatcggaggagttgggcagcaggtgccccctgtagcgggggcaggggttctggacttgccatagtttcaaccctgcccactgttccttccccagcctagtgcagcctcgatctcacaggcttaagggatcccctkctccagttgctatctgttgggaagtgtgtgtgagatttgggggagctgggagcacttcttttgccagcagacacactgccctgattcagaccaccccacagccactcccagttctctagccgcagagcctgccaggtgaggcctggggaggtggtgggaggctgaccctgagtagggttctgatttcccttttcctcatggccatcactacccctcagcccctgcagcagggacaggcatcttctcaggcagcaataccatctgtaccagccgtgagggtggtggaaggaagggtgggagtgtggatcctggctcccagagaagccactgaggctggggcaacttatccacatccctagtcctgccagattggcagaggtgattacctaattgaggat

SEQ ID NO: 168274 - DNA, 623 bp, Homo sapiens
actaccgtgcagttgatggcattaaccaaatatcagccactgccagtagaagaagcagctcagctccacgaagaggtggcaaatagtggtgctttctattaacacctttgttataaaaagcaccaaagatgggaaaatgaaacaggaattaaaagaaattaaagaacrtgtaagcaaaaactcagttacatataagaaaacacagttccccctgagaaagagaaagagctggagtcctttaaaaattaactgcctgtttttctgtggctagggagcctcatctcttcccctttcccaggcattgtgaagaccgtttctctagctgtgcagctgcaaggtcactagacagataaactcaagttgtaaaacatgtttttccttgaaaagtaagaaatgatataatgcatgtctcaattaattaaataactgtctttttttctcacttctgtaatatgcttccccctgcacagatctaccttaaaaggtaacttaactctttgttcagggctcagtcctttggatattaatctgactgggccagtacacctaaataataaatatccttctcaaccccgttggtctctctgattccttatcaatcccgctacagtatggtgaaatca

SEQ ID NO: 168275 - DNA, 403 bp, Homo sapiens
agatctttccaaccagattttgctgacaccctcctcctacsagaatggagactcacaagccgtccttctgtccctccaggagcacctgggacaggggtttgttggcagggatggtctgcaggatgctgccatctgagctcacatagccgatggcccactgccccaggcgagtacagctgggccggaagatgtaactggagggagaggtaggtaggatggggtgagggagtggtcactgccatcccttttgtgaacttccagtcccctggcctgttgggaatccaggtgtctaggtcctcacccccagcttcccatcctctaggcaacggcatgtgctagacccctgcctgcctctctaggggatatatgctgtttttgcctgcttggctcttttatgataaaa

SEQ ID NO: 168276 - DNA, 474 bp, Homo sapiens
tctgggaagattgtcagctttcagaccatttgggaattaccctcaactcaagagagctgcttgtccaaggtcacgccccatgtgaatcaagggcagctgcccttcaatggcatccagtcactggttaatgccagcatagaaggcctagcctcctgaccccaatgctgaaggccattccagcttcaatattccctgtgggacagctgaggccgtgtggaggcgacacagcagctcaacttctccctctgcccagatgggcttccttcatcccacaggtgttgatggagagcatttccaataaacttcctgctcagtttccagagaccccaacctagaacagctattcagagactggtgtgtgtgcatgmgtgcgtgcttgtgcacgcctgtgctgtttgcatggggtgggggacagagtggaggacccaaggaggactgcgtgtacacagtgggtggcaggatctttatttaaag

SEQ ID NO: 168277 - DNA, 424 bp, Homo sapiens
gaatactttaaaaagtgatattttcttttgtatatagatagctttsttcacctccagacccaaaactttgttcctaaagatgtggcagggtgaggacaagcacaattctgaaactcaagcagaggtagaaagagccaggagcaggtgacaggagacaggataatggacctgggctccagtgttttcattagaaccaaacaaacataaatgatgtattccaaatgattttaaacattaacagaacagacaggtgtttcaattaaataagcaacagaacaggtaagttaattattagcttgggaaagacttttaatattttgagccataccaacctccaacaggtgatttataagcaacttgactgcccctgaaaaaattacaagaataatttttataaaatgaccattatggttttcaaagaagt

SEQ ID NO: 168278 - DNA, 532 bp, Homo sapiens
gagcacattcacatgaacccaagtaacaaatatcttgggattctgactatttccaagccgaagtaattatttcctctttcaccttgcttcttcagcctcctttccattgaccgaatacacatcccacatataggtacaagaacaaaagataaaacaaataatccaagtggccaaacactacagcaacagaaccaaatttgacaccactaactcacaacagtgaatctccacagatttcagagtcaccagcagagttcttgccttattctcccattatgaagccccactttcytaacgaaccacagggaaccattgcttcatgccatgcctcctaataattgacaaacccaagctgcgatggaaggcaagggagaaagcttataaaagagaatccccaatgggcaaaacttgctgccccagacatggtttgcttttgcaaacaattagaaagattggattacagtagggagatgcaattttgcagaaagttagtgagctaaacacttcatgtgtgagagacaccaacacacct

SEQ ID NO: 168279 - DNA, 583 bp, Homo sapiens
ttctgcttattccctgaagagaattaggaagaggaatgaaagaaaccctgactcgataatctattgttttagcctccccgacatgcattttgccctttcctgctacagcatgatgattttccctttgaaaattactcattctggttaagaaagaactcatcttccagcttaaggcacataaaatgcccagactgagaaaacgaatattttctattcccctggctaagagatggattgagagtcggacacatagtccaagctgaacagtgtaaatcatatgagatttttgttaaaattattgagaatgagacactctttctgaagttatgcaagatggaaaggatgtaattctagaattaataatgagaatcttgacataaggaaagaaaagcctgtctgagaatgaactaaaataaaagtgaataaaaagataagcaaaagatacagaaacagatttctgatgaaactcaaacacctaggtccaacaatgcccaaarccaattacccttgactttcagttatatcagcattgaatgactcttctctttattttctcaagtgaatttgagcaaagataaaatca

SEQ ID NO: 168280 - DNA, 438 bp, Homo sapiens
ttaaatgattaacccagacttggaaatggcagtgttgttctatgggctcatcttgtgacttaaaatatagccatctcttagaaatgttagccaccagacaaatgcctccaaaacaataccttacaacccatcactatgtcaggacactattctaaatatgatgctgatggaatttgtttacgaagtgcatagaccaaacttgatcttacttgcagtgctcatcctatctccaagatagaaaatagatataacatttataaaaagtaatttatttctaaagcactctcatctgcatcaatacttgactctccacatttataggaaaaaggatcagtatacattatctctgtagtatagatggagaaacatggagaaactaaggcacagagaggttccccccsccaaaggtcactcatttagttaattaggagttcctat

SEQ ID NO: 168281 - DNA, 689 bp, Homo sapiens
atctttttatctgtataatggtaatgattatgtcagcttcttttatttgtggttagtatttgcatagcccttaacaggtgttcaataaatgaattagtgtcatttgattatatgatcaaagttctttggtgctgtgggagaagagaaaatgaagtgcctaatgactaatgttgagaaagttgaataggtgaggcctacagaaaaatgtcattcaactggagtgttaaatgatcattaagaatttagagaacggatggcaaaatcaaggacaataataaaaaggaaacttacatgctcatttatttctcactgttctaagtattgtacctgtgatagcycatttgaacctttcagaagtgctacgtggtaggcagtttaattaagttcctagtttgcagatgagaagaatgggcacaaagaagtaacttctccaaggtcacacagctaagaagaagcacaacggaggttggatctaggcgcttaggctccagagtccatgctcctaggcactctactctgctacctgaagaggaaccatccagagcagggcagtgggagaacctagcagactgtccatcatgcttgaaatacatgaggagggtaccatggtagcatatatgagggaaggaacttgatgagtgaggatgacgattgcctagaggtgagactgaagagggtagtgagggttt

SEQ ID NO: 168282 - DNA, 563 bp, Homo sapiens
caaaatggcatgatggatgtgaaagtgctttatgaactttgcacagattcagtttaattcaattcagaagcatttcttgggcatcttctatgtgaaaaggactgcaataagccctgaacaagatcaatgggatctagcgaagctttcaagaattattatcactagcatgttagttttaagtcatatttatggcagaatagagttgtgttttatgtgtaatatatacaatttatagtacatttggactccttgtttcataaatatttactgtaagtatatgttcactttctaggacataaggcataattttacacttttaaatcattgtagctttctgttattatgacacactaatcatcatttctgtgatttgttgacaaatccttcttgaaaatatgtgtcaattataatattatttccataagaatcacactctatcgtatgggtttttaggaatatatcacactctaatttggagccttcytatattttaagttgacttttcagatcgaggcactaataggtaaaccaaagtgtgatatctgagacaaataaaaggaagc

SEQ ID NO: 168283 - DNA, 515 bp, Homo sapiens
aggcaatgaatacaatgaattagtaaatatgtttggtagtggtacgtgctackgaaaggaaaggaaggcatgggttgtgattatagagagtttgggcagggatggtgtttttaagaagatcacacgtaagtaaagacccgaagaagtgagaggataaatctcatggggatttggggaatgagcactccaggcacagagaagagcaaccgcaagccctgacattgaaatgcgcctgaggggtccgagggattataaggaggtcggagtttctgcagctgagtgagccaggggaccatgtaggagatggagtgagagaggaaatgggagctgggtgtagcaggtctctgtaggtctttgaaaggaatttggtgtttactctgagatgggagccattggagcattttgggcagaggagtgatatgatctgatgtgttctaacagtgtcactctggctgctgtgttgagaataggcattcaagggtgagacagggagaccagtaagtgaacaattatga

SEQ ID NO: 168284 - DNA, 515 bp, Homo sapiens
aggcaatgaatacaatgaattagtaaatatgtttggtagtggtacgtgctacggaaaggaaaggaaggcatgggttgtgattatagagagtttgggcagggatggtgtttttaagaagatcacacgtaagtaaagaccygaagaagtgagaggataaatctcatggggatttggggaatgagcactccaggcacagagaagagcaaccgcaagccctgacattgaaatgcgcctgaggggtccgagggattataaggaggtcggagtttctgcagctgagtgagccaggggaccatgtaggagatggagtgagagaggaaatgggagctgggtgtagcaggtctctgtaggtctttgaaaggaatttggtgtttactctgagatgggagccattggagcattttgggcagaggagtgatatgatctgatgtgttctaacagtgtcactctggctgctgtgttgagaataggcattcaagggtgagacagggagaccagtaagtgaacaattatga

SEQ ID NO: 168285 - DNA, 496 bp, Homo sapiens
cctcctttgtggacaacaagtcttctgctccccttcatgccctttgaggaactgtcctggtgtagctgcagatgccactccttgcagatgccacaaaacgggtacaggtttacctagttctggtcaaaaagagtgtggcattcgcctcactttagggattmgttcaggggcaggcatgcgacccaatccaggccaatgagaaagacatctgaaattggtgcagagttggtaaaacaaacaaaaaaaatacagtcaagttgtattcttttatgcgtgagttgttcagctagctgttaaactagaaggatgtgagctgagaactgcacatcaccatttcacctgtaaaaacacacaactctaggaaaacagagctgacagatggagagaccaagtcctgctggcttcatggactgtgtggatgacattccttaactttcaattagggaagccaatccatttctattgcttattattgtcattgttgtttagttcttat

SEQ ID NO: 168286 - DNA, 602 bp, Homo sapiens
tggaaatgcagaaataacccaccttctgtgttggttttgctgggagctgtagaccagagctattcctattcgcccatctttccagatcccacatcatttggcatgaaaaatctgtataagaattatggagacagatataatgtttagttcaattccctggaagctaaggtataagacagagatrtccacactcttgctgctttaacctcactaaacattgacaacttctaggattgaagcatcagtaagctctgggaaggcttatatccttggtgagtaactactttcattttctaggagtcaatacaggccagccaaaatacaatcttcttccatttcaaagataaatgcctctgcgtggaacagtgaaagtcctcaatttactctgggggaaaaaaaattctgtaaagttttgagtatttggagccccactaaatcatctcaaaaaattctcctttctagtttaggggatatgttaaacagagaaaagacagataggaggaaacatttattgaaggttctgcaagttgggtgtggtccttaatgcccacaataattctacaaaggaggtattgtttgcctttcccatttcagaggaagaa

SEQ ID NO: 168287 - DNA, 556 bp, Homo sapiens
tgtgttttcctaagcagagagtaaatatttatttataatagagaaggttatgtcacattatcaatgacttgatcayaatattgctttaaatgataaattattccaacccctacacataatctctgtattatgtaacaatctgtgtatttccattttaaagaatttaataacaattgcttaataatgagtctgttttatacaaatttgtgttagatgcaaactttcaaaaacaaatctactttgcaaagacaggtaaacttagagagatcaggtcataaatccagcatgaaactatatttaaatgtatcccaaagttggaaacatgtgggtatcgttttttcagagtgataaatggattttctcaaatgcagaacttgaagtaaaagtttccctgaactttttgcttctctgttcagttctctggatggctgaccttgagcaatgtaacctgattgtcaatgagaataatttctatcagactatttttagtcaaggaaactgattttcaattttaagaagtttcttcctattaaaagctttaccaaagactggagcc

SEQ ID NO: 168288 - DNA, 533 bp, Homo sapiens
atacttggagcaacagcctatgtggggcatcctgatattttaaaagaattctgtgaagattcgaaatggatatttcaaataaggcagtgaggacatcataactggaaatcataactttgttggacttctttacatttaccttatggtttgatattgatatttttgtgaattatgtatgaggaagaggtggcagtacaatctgtgtagagtttggatcttctaagggttttaatttggctgtaatcttttgtccccagttaaatgtctcagtcaaagaatgatgtatctacacctctttaaagtttattgatgtgaagcacatataacaatgcctgatgcatagtagacacttactaaatattagctattgtttattgcacctaatgaaataaatggtttctgtgttgatatcaagaaagacaactacatcctaacaaagstgcctcaaaggcgatgaagcccagcatcaagtaaagaccttacctctttaaaacactttaaaattttagaaggattgatccttaaaagagaag

SEQ ID NO: 168289 - DNA, 520 bp, Homo sapiens
tcagcattgaaagttaaaagacagtgatattgacagctttaacgtatttaaagaagtacaggttcggtattccttatccaaaattccaaattattgggaccagaagtgtttgggttttgggggggaggagttgcctctaaaatagggcaagtctcagacccttyacagtcctaaatgtaaacagacaactccaaaatggcaaaaagaaataggtaacccaatatgaaaatagataaaagacttcaacgagcatttcacaaaaaaagagtatacaaataagcgtatgaaaatttgtcaacatcattactcatctggaaaatctaagtcacaatgtgatatcactcatccaccagaatagctaataaaaatattgatgataacaattattcaattgttcatgagaatgtggaacagatggagttccatacagtcctggaaaaggagaaaaaaaatatgtatataacacatacacaaacatatgtattagaactgtttgtcactatgtaagctgaatatatgc

SEQ ID NO: 168290 - DNA, 620 bp, Homo sapiens
gtttgctggtaaagtgtgatttacaagaacaggtggcagctagtggtcctccttcactgaccactgctgtaatagaagacacaaaatataaatgtatgaatagttttgaggagacaaaaatacagttgattttttttaatttccttagtaataaggcacaaaggatatctgactactcaggatacagtgaacaagcatgagccgaatacagtgggttaattgataaacactcccattaaaaatgttaggtgatkagttgataaaggagggaagaagcagggaatcattagcaattctgaaagccagagtgtgaacttgttctgttctgagagtcaattttgcgtagtaagataagcactgaatcaagaggcctggaccgcagtaaaaacccattagcacctggcggtgtggctttagacacaccacttctttgacctgtaaaataaatgaatgcgttaggctggattatcagccacttttctgatccggtacatctgaacaatataatgcactcctatcattaacagtggctcagttcaagggagtcaaaaagcaggtagaaatcttaacctccagagtaagcattgtccttctgaaaaaaaaaaaaaaaaggttattag

SEQ ID NO: 168291 - DNA, 620 bp, Homo sapiens
gtttgctggtaaagtgtgatttacaagaacaggtggcagctagtggtcctccttcactgaccactgctgtaatagaagacacaaaatataaatgtatgaatagttttgaggagacaaaaatacagttgattttttttaatttccttagtaataaggcacaaaggatatctgactactcaggatacagtgaacaagcatgagccgaatacagtgggttaattgataaacactcccattaaaaatgttaggtgattagttgataaaggagggaagaagcagggaatcattagcaattctgaaagccagagtgtgaacttgttctgttctgagagtcaattttgcrtagtaagataagcactgaatcaagaggcctggaccgcagtaaaaacccattagcacctggcggtgtggctttagacacaccacttctttgacctgtaaaataaatgaatgcgttaggctggattatcagccacttttctgatccggtacatctgaacaatataatgcactcctatcattaacagtggctcagttcaagggagtcaaaaagcaggtagaaatcttaacctccagagtaagcattgtccttctgaaaaaaaaaaaaaaaaggttattag

SEQ ID NO: 168292 - DNA, 588 bp, Homo sapiens
caggcttgtgattcatcaaggtacaatgtactaagtaataagatgaaggtaaatgccggtaatttggcaatgtaaggtgcccatcatactcagataggaaatgcttttcagagaaatcgtgctaagctaagttttgaaagtgtcatcctagttttccataaatggagataagtggaatgtagatgagataagacacccgtactgaaaggaaccttgaaatgacatataatgaatttgggttttatcctgaatgcaataagaaaccactgaratttttaaacaaaagagaggcaaaaatcaagtatgcattttcaagaaatccctttcttgactttgtggaggatagataaaaaggagactggctggagacaggaaaacgagaaaggaaactgttgagataacataagctaggagatacacaggtttctcttaagtctcatggctggaagacagcatggtaccattggctaaagctaggattctggccaacaggcttgggctcagatgtacctaaccacttacatgatatttgattgttcacaattttacgttgaacagtctcattcagttaaaagaaaaataaaccca

SEQ ID NO: 168293 - DNA, 588 bp, Homo sapiens
caggcttgtgattcatcaaggtacaatgtactaagtaataagatgaaggtaaatgccggtaatttggcaatgtaaggtgcccatcatactcagataggaaatgcttttcagagaaatcgtgctaagctaagttttgaaagtgtcatcctagttttccataaatggagataagtggaatgtagatgagataagacacccgtactgaaaggaaccttgaaatgacatataatgaatttgggttttatcctgaatgcaataagaaaccactgagatttttaaacaaaagagaggcaaaaatcaagtatgcattttcaagaaatccctttcttgactttgtggaggatagataaaaaggagactggctggagacaggaaaacgagaaaggaaactgttgagataacataagctaggaratacacaggtttctcttaagtctcatggctggaagacagcatggtaccattggctaaagctaggattctggccaacaggcttgggctcagatgtacctaaccacttacatgatatttgattgttcacaattttacgttgaacagtctcattcagttaaaagaaaaataaaccca

SEQ ID NO: 168294 - DNA, 617 bp, Homo sapiens
cttttttgacctacagtaacttaatttgggggcttagtgaacgttatcttcatagctgttttctgaagagtgtttttaagattcaatcaycataattaaatcatcaatcattaaacagaagtcactcatatgattaaaaaatcagattttctcctactcccaaagaccaataaagaatacagatcatctcctgttttgcaatattttaacactatcattcattcttgttgaatatttttttcatataagaccaataatacctattttcccccaaaagatccctgcagattttttcttccttagtcagattctgttataactatttcttactagtcagatacagtagaaattgtgaccgtgaggacaaacacattaagggaatggaggttaatgctcttccattcaacagcattctgtatattgttctggttcatttcttctgggtatagagtgttgcaccattatctcctaagccacagaggaaggaacagtattttagcgtatgccacaggaaaaacaaatgaaaaggtgactaattcatttacacacacaaacacacacactcacacacacacaggtttaagatattctcttaatcaatgtatttccaattaaga

SEQ ID NO: 168295 - DNA, 614 bp, Homo sapiens
tgggtgagtttaaatattttgagcatatatttggatacttgttttggattcaataaaattattttcagtggtataaagcaatgtttaatatatgctttatttggaattttggatatattttattatgtacattttattttggtaaaattccaaataaggcatatacaaaatatacatattttggaatttaggatatattttattatgtacattttattttggtataaatttagaatataggcaagacaattccctataatcatgcaaaaatgttttctgaaattatattaattgtggttcaatttaaaaacccttttactccatagcaatattatccaagtcttttcyatgttaaaaatgtctgtttttctgtgttttatatatgttataatttatcttttttatattgacatttttgcatagaaagtgcttatattcacaattcatacttcaaaatgcttttacattaattcaagataaataagcaaagtttcgtttcaagatgtatagtgcacatggaaagtattttattttaggaactttgaaaaagtaacacttttctgattttttctttcaaatttggcatttgtgaatgtgccactgttgacctccta

SEQ ID NO: 168296 - DNA, 473 bp, Homo sapiens
ggacataacaacaacaacaacaaaactacagaccaatatccctgataaacatagatgcaaaaatcctcagcaaaatactagctaagtaaatccaacagcatatcaaaaagataatccaccatgatcaagtgggtttcataccaggggtgtagggatggtttaacatacacaagtcagtaagtgtgatatgtyacataaacagaattaaaaacaaaaattttatgatcatcttactagatgcagaaaaagcccttgacaaaattaatatttcttcattaaaaccctcagcaaatttggcatagaagagacatacctcaaggtaataaaagccatttatgagaaaaacccacggctaacattattctgaatgggaaaagttgaaagcattccccctgagaagtggaagagacaaggatggccactttcaccacttctgtttaacatagtaggggccataattcttgtcaagtatg

SEQ ID NO: 168297 - DNA, 459 bp, Homo sapiens
tatgctgttggtgggaatgtgaactagtataactataaagaacagtttgaaggtttctcaaaaaactaaaaatcaagctaccatataatccagcaatcccactgctgggcaaatacacaaaagaaagtagctgcattgctcacagtagtcaagattttgaagcaaccttcatgtctatcaacagattaatggattwaaaaaatggtacatatacacaaaatggattactatttagccataaaaaagaatgagatcctgtcatttgcaacaacatggatggaactggagaccattatgttaagtgaaataagccaggcacagaaagacaaacattttatgtgctcacttgtgttacctaaaaattaaaacaattaaactcatggacctagagagtagaacgatagtttccaaggctggaaagagtagtagggggaatgtaggtgaggtgtagatggttaa

SEQ ID NO: 168298 - DNA, 459 bp, Homo sapiens
tatgctgttggtgggaatgtgaactagtataactataaagaacagtttgaaggtttctcaaaaaactaaaaatcaagctaccatataatccagcaatcccactgctgggcaaatacacaaaagaaagtagctgcattgctcacagtagtcaagattttgaagcaaccttcatgtctatcaacagattaatggattaaaaaaatggtacatatacacaaaatggattactatttarccataaaaaagaatgagatcctgtcatttgcaacaacatggatggaactggagaccattatgttaagtgaaataagccaggcacagaaagacaaacattttatgtgctcacttgtgttacctaaaaattaaaacaattaaactcatggacctagagagtagaacgatagtttccaaggctggaaagagtagtagggggaatgtaggtgaggtgtagatggttaa

SEQ ID NO: 168299 - DNA, 519 bp, Homo sapiens
tatttaaaataaactttctcaaacctcctcacataaatataaactgcaagggtgctccaatatagttcaaatakaaatcattcatttttttctttagctaaaagaaaaactgtgaaacattgctgaacttaaaggtcacatgttgatcaacccttccaaacgatacaaaggtaggtggagacactcacttcttcatgaaggagactgaaagttacaaaggcataaaatatatttagatcccctgagattctctgttgaaagcaattagaaatcagtcacactttatgtaaaccaggcatttaattatcaggtacagaagatacaaattaggcaaagcaaaaaaggagagttgcaagaacttaatttagtaggaatccttgtgaggagattaatgagatgtaagggaacatcgatctcattacgtttgtagatctgaggccatagactttctaagcagctttcaatcttgtggattggattttgaaaacattttttaactacagaaagatatactagtaa

SEQ ID NO: 168300 - DNA, 519 bp, Homo sapiens
tatttaaaataaactttctcaaacctcctcacataaatataaactgcaagggtgctccaatatagttcaaatagaaatcattcatttttttctttagctaaaagaaaaactgtgaaacattgctgaacttaaaggtcacatgttgatcaacccttccaaacgatacaaaggtaggtggagacactcacttcttcatgaaggagactgaaagttacaaaggcataaaatatatttagatcccctgagattctctgttgaaagcaattagaaatcagtcacactttatgtaaaccaggcatttaattatcaggtacagaagatacaaattaggcaaagcaaaaaaggagagttgcragaacttaatttagtaggaatccttgtgaggagattaatgagatgtaagggaacatcgatctcattacgtttgtagatctgaggccatagactttctaagcagctttcaatcttgtggattggattttgaaaacattttttaactacagaaagatatactagtaa

SEQ ID NO: 168301 - DNA, 504 bp, Homo sapiens
agtgagaaatacatttcctgaactaaaaaatttattggaggctctcaacagcagaataaatcaggcagaagaaggatcagtgagctcaaagataggctatttaaaatcaatcagtcagatgagaaaaagaataaaaaggaataaagaccacctacaagatgtagataattatccccctcaaaatctaagaattgttggtgttctagaggaagttgaacaagagtaaaaggtagaaagcttattcaaacaaataacaaaaaacttaccaaaacttgagaaaaatgtgaatatttaggtacatgaaggtccaaaaacacaaaagtagatttgactcaagtaagaccaccccaaggcatataataattaacttctcaaaggtcaagaacagagaagtatcctaaaagcatcaagagaaaagaagcaaataatatatagagaagctccaatttgtctggccacacacatstcaatggaaattatacagaccaggagagaagggaacag

SEQ ID NO: 168302 - DNA, 405 bp, Homo sapiens
gtatgtcttctttcgagaaatgtcttttcaaatcttttgcccattttttgattaaattattagatttcttttcctatacaattgtttgaactccttatatattatggttataaatctcttgtcatatgggtagtttgcaaatattttctcccaatctgtgggttttctgttcactttgttgattgtttcctttgctatgtagaagatttttaacttgatagtatcccatttgtccattttttgctctggttgcctgtgcttgtagggtattactcaatattttttttgcccagaacaatgtcctggagcatttccccaatgytttcttgtagtagtttcaagcttgaggccttagatttaagtctttaatccattttgatttgatttttgtatatggtaagagat

SEQ ID NO: 168303 - DNA, 491 bp, Homo sapiens
tttctattcactccacaactggtcactggtgcctagttagtttctttggtgaggtcatgttttcttgggtggtcttgatacatgtggatgctcrttctgcagttatgaggaagatttgacctaataaagatttatcaggaggataaggtgcttgtggactactgcatgagtacagggatgccccaaatacaccagtgagtttagagtgatttttaactggtgtcctccatataaggagaagactactgctttagtagatactagggagaatgtactttaacccatggaaatccagaaagacactctggtcaataggcagccattgatggttatggggaacaaacaatccaggtaaaagaattttaaaacatctaggtattgagaaagatgcccttactccatatataatgtttatttcccccattccagacaatattttaggcatggatattctgttaggaaagactttgaaaacttcagtaggagaattc

SEQ ID NO: 168304 - DNA, 597 bp, Homo sapiens
cagctggttatgtctcagaccttcttgtgaaacttgtgaaccatgaggaagttagataagcatctttatgaggggttatttatgctacagtattttttcttgatcttgctgtgaaaatgccttggtatgtaggagtcaaacattagtcattatgttrgtttcatttcaagatggcattactcttgccatgcaacaggctgttttcctataataattttttatttaatattttgaatataaaatagagtcacatagttagaagtcaaatgacataaaaaggctaatagtgacatgtgtttctttttcttatcactgttccttattcattcagcttccaattctttgctcttccacagataagtacgttacttagatcttttgtgcatattttcacagtttaaaaaatttaaataaaagcaagtataaaattatattttaattgtatatcctcttttaaaacaaaatgtagcattctaaatatgatgtcttgcacatttttttcttcatgccgcaatgtatcttatagatcttttttatagtaatacctagagggctttctcatctatttttatgtcttgtttattccattgtgtaaat

SEQ ID NO: 168305 - DNA, 597 bp, Homo sapiens
cagctggttatgtctcagaccttcttgtgaaacttgtgaaccatgaggaagttagataagcatctttatgaggggttatttatgctacagtattttttcttgatcttgctgtgaaaatgccttggtatgtaggagtcaaacattagtcattatgttagtttcayttcaagatggcattactcttgccatgcaacaggctgttttcctataataattttttatttaatattttgaatataaaatagagtcacatagttagaagtcaaatgacataaaaaggctaatagtgacatgtgtttctttttcttatcactgttccttattcattcagcttccaattctttgctcttccacagataagtacgttacttagatcttttgtgcatattttcacagtttaaaaaatttaaataaaagcaagtataaaattatattttaattgtatatcctcttttaaaacaaaatgtagcattctaaatatgatgtcttgcacatttttttcttcatgccgcaatgtatcttatagatcttttttatagtaatacctagagggctttctcatctatttttatgtcttgtttattccattgtgtaaat

SEQ ID NO: 168306 - DNA, 604 bp, Homo sapiens
tagtagccccacatggcctgggatttcacagtcacacaaaggctgatggtgggtaaaagatcagatggcactgttaacccacaagttggtaaatctgcccacagataaaatcaagttgactgtatttgcttttcatcagtctctttttagttactaaaatttgctagctaaacattggccagtttcaacctgcttaatttatgaaaattgataagatcacagaccattattcagtggcttcagtagtgcaattttcttttcccatattcattcaagttgtttgaataycgtgttattcttgtcctcatcttccttttcattttttttctattgctttgttgaaaaaccaaagcaaaagcttttagttagctgatcttattctgtagagttgacagtctcataaggttagaattgttttattacaaaagcaaacatttgagaccccagatatacagctaagaatgtttgagagagtaggtgacttcaaagatgaataactagatatatgtctacagttttcaggttttatgaaatgaagtggaacctttttttaaagcattctttaaaatgtttttttttcttttccctgatgataggatcagta

SEQ ID NO: 168307 - DNA, 604 bp, Homo sapiens
tagtagccccacatggcctgggatttcacagtcacacaaaggctgatggtgggtaaaagatcagatggcactgttaacccacaagttggtaaatctgcccacagataaaatcaagttgactgtatttgcttttcatcagtctctttttagttactaaaatttgctagctaaacattggccagtttcaacctgcttaatttatgaaaattgataagatcacagaccattattcagtggcttcagtagtgcaattttcttttcccatattcattcaagttgtttgaatatcgtgttattcttgtcctcatcttccttttcattttttttctattgctttgttgaaaaaccaaagcaaaagcttttagttagctgatcttattctgtagagttgacwgtctcataaggttagaattgttttattacaaaagcaaacatttgagaccccagatatacagctaagaatgtttgagagagtaggtgacttcaaagatgaataactagatatatgtctacagttttcaggttttatgaaatgaagtggaacctttttttaaagcattctttaaaatgtttttttttcttttccctgatgataggatcagta

SEQ ID NO: 168308 - DNA, 424 bp, Homo sapiens
tgttaactgtttctagcaaaaagcaacctttaaatccagaaaacttttcccaagttaatgcatcaccagaaagtgaaaaagtttcccttttccctggtgatcacagtcgattaatcgcagactcctggcgtccactggcccacccagtgtttgtagggtcccacgtaagcagagcagaaatcactaccgctgatcaaggagagatgaacagcatcactaaacagtgttcagagacttagcaaatcattagcaatctcctcagccrtgcagctaatctcatcactcaaatttcttggttgttctgtttttctctgccagataacactttatcagactgaaatggaacttccctctgatcaggaatagggcattcaacaaactatatacatacctttgatagcttcctttttggaaagtgagggag

SEQ ID NO: 168309 - DNA, 480 bp, Homo sapiens
aaactcagtgcttttcaccaccatcctgggtagacacttagacccttttaagcctcaattacttctttggggagtttttggtgttatgsgtttcacagacaattttattattataaaagggcacatcgtgatgccttttcaaagttctctgttgatttcataagcgaaagacaacttggccatgtgaaaagttggtggatcacaactttcccagaggactctgggtattgtcttaggtgtttatagggaagtccaaaaggactttaatagttatttgtttgcagttgcattctttcaacccctaactctgcctacatgcctgtagaaattcttgttttacctctttgtcatcacttttttttttttttttggccagaatgtacttaggtataataaaatttttctttgttttacttaaaatgtagtgaatttttaaacctgtggttgcaaatccttttttagctcaaagaatttttcttc

SEQ ID NO: 168310 - DNA, 552 bp, Homo sapiens
attctaaaggcatatgtataaggaygaacaagtcaattatccttttgggtttcagttaacttgattcacacattgctctggataatgttgtaaaaacaaaggaaagcagtatttgttcttcacatactgtggatttctgttcattcccattgttatggataaaatgtcctatgcacttaaagcatcagcacacagtatataaagcaacaaaactcgaaagaggtaaattttgatattggctttatcacctttgacctttgactcattaactgttactcagttcctctatctgctaacataaatatatattttttatttatctgttagcatatatatatatatattacaggaatatccaacttttctgggaaaattattatttgagactactctgaagcttaaaaatgctgttaaacaagtattttcatttatcaggaatatggttttaagtccttgcgcaaggaacagaggtaaatatacatttaaatattcctcctaggtattgtgaaaaagagtattatttcaattctgcaaagcagaaaaagtgctcta

SEQ ID NO: 168311 - DNA, 552 bp, Homo sapiens
attctaaaggcatatgtataaggatraacaagtcaattatccttttgggtttcagttaacttgattcacacattgctctggataatgttgtaaaaacaaaggaaagcagtatttgttcttcacatactgtggatttctgttcattcccattgttatggataaaatgtcctatgcacttaaagcatcagcacacagtatataaagcaacaaaactcgaaagaggtaaattttgatattggctttatcacctttgacctttgactcattaactgttactcagttcctctatctgctaacataaatatatattttttatttatctgttagcatatatatatatatattacaggaatatccaacttttctgggaaaattattatttgagactactctgaagcttaaaaatgctgttaaacaagtattttcatttatcaggaatatggttttaagtccttgcgcaaggaacagaggtaaatatacatttaaatattcctcctaggtattgtgaaaaagagtattatttcaattctgcaaagcagaaaaagtgctcta

SEQ ID NO: 168312 - DNA, 552 bp, Homo sapiens
attctaaaggcatatgtataaggatgaacaagtcaattatccttttgggtttcagttaacttgattcacacattgctctggataatgwtgtaaaaacaaaggaaagcagtatttgttcttcacatactgtggatttctgttcattcccattgttatggataaaatgtcctatgcacttaaagcatcagcacacagtatataaagcaacaaaactcgaaagaggtaaattttgatattggctttatcacctttgacctttgactcattaactgttactcagttcctctatctgctaacataaatatatattttttatttatctgttagcatatatatatatatattacaggaatatccaacttttctgggaaaattattatttgagactactctgaagcttaaaaatgctgttaaacaagtattttcatttatcaggaatatggttttaagtccttgcgcaaggaacagaggtaaatatacatttaaatattcctcctaggtattgtgaaaaagagtattatttcaattctgcaaagcagaaaaagtgctcta

SEQ ID NO: 168313 - DNA, 611 bp, Homo sapiens
aatgaattattttttttattgtgtaaaagcattataattcaataaaaggattaaccatatgaaaggtaaaacaagtttacagtcagagagaaaaacacacacactcatatacaaaactgtcaaagcagcaaaaagatccttttaagctagtcagagttaaaaatatattaaccaaattagagtgcataaaacactttattgacaagggtgtggataatccagccattcctaaacacttacttggtgtgtagcatgatgggtattatttccacagcacgtcagtctgtcttacatggcatctgatttccaagaagaggaagcagcttgtcmccctaaagtcctcagcccagaaagggactgttgtgcttctgccatattctgttggttaaagcagtttcagggccagcccagattcaagagatgaggaaatatactccacttgtgcatggagggttagcaaataatctgcagccatctttagtcttctctcttcatttctttttctattatatttatttctatttttttctattgaacaactttcataatgtccgcctctgggcaaagagactgagagactagagatttgggattagagggacacagttttc

SEQ ID NO: 168314 - DNA, 603 bp, Homo sapiens
ctgctcactgtgttctcagctgggctggctgattcactgcattcagctgagtgttgggcagagctggaaggttcaggcaggccttacccacctgtctggcacctcagtgtccccccctttgtgtagccagcttggacttctcacagctggttactgggtaggcaggcttcttgcatsgtgactggcttctaagaagtaggaaacagaaggcttaaagtctaggcttggaacaagtccaacttcaccactgttacatttcactgttgaaagcaaggtatgaggccagtcgaaatacaagggaggagaaaaaaggccctacctttggtcatggggtgcagcatgtacacaaagaaaggtaaggaattgatggccgccgtcttggttgactggctaccacccagtgtgtttctgcaacaataaacctcgccaaccaaggtatcttgagcacatctctattccttgcaattctacagtgtctgtctaagccattagctcccttagctggtcatccttcctcatgaccaacacctattcactggagccctaatacatgcaaacattctggggaggatccaccagccagaaaaagatcatgctctagtt

SEQ ID NO: 168315 - DNA, 562 bp, Homo sapiens
ttgtagctgccattgcctctctctttcggaaaatgagagttgctaagaggtgagatcaggtgagcagggacctgttcttgactcttgctgagacagtgcctggtgtctgttcatgctgggacccagggtggcttccataggtacacaggtccacatgcgagaactggtggcaggatgggtaaggaaggccaactgtgtgtgtgcatgtttatgtgtgtgtgtgtgagattcacactagaaagctgctttgccacctgccacaggtgaggctgtgactcctccttgccctccatgtcactgaagccgtggttgcagaggtccctcggggcttgtgaactgctgcaagcacttcaagtctggggaccgtytgtttcctgcctgctgtttatgacccagaacattgcctctagaactaggctgcacttcagtcccgctgggagcatgcttgccactcatatcttccctgcgctatttgcagtttttgtttgtcttaaatataaacttttcttggttctttaagttttaaagaaaagaaactcttctctttcttgaaggagaaaag

SEQ ID NO: 168316 - DNA, 562 bp, Homo sapiens
ttgtagctgccattgcctctctctttcggaaaatgagagttgctaagaggtgagatcaggtgagcagggacctgttcttgactcttgctgagacagtgcctggtgtctgttcatgctgggacccagggtggcttccataggtacacaggtccacatgcgagaactggtggcaggatgggtaaggaaggccaactgtgtgtgtgcatgtttatgtgtgtgtgtgtgagattcacactagaaagctgctttgccacctgccacaggtgaggctgtgactcctccttgccctccatgtcactgaagccgtggttgcagaggtccctcggggcttgtgaactgctgcaagcacttcaagtctggggaccgtctgtttcctgcctgctgtttatgacccagaacattgyctctagaactaggctgcacttcagtcccgctgggagcatgcttgccactcatatcttccctgcgctatttgcagtttttgtttgtcttaaatataaacttttcttggttctttaagttttaaagaaaagaaactcttctctttcttgaaggagaaaag

SEQ ID NO: 168317 - DNA, 519 bp, Homo sapiens
ttggaaccctgctccctgcatctctggttgctctggctccagctgtagctcaaaggggcccagctatagcctgggctgctggttcagagggtgcaagctstaaatttggtggtttctctgtggtgttaagcctgcaggtgcacagagtgcaagagtgaataagacttgggagcctctgcttatatttcagaggatgtatggaaaagcctgagtgcccaagcagaaggctactgcactagcagagccctcacggagaacatctactagagtagtgcagaggggaaatgtggccccacacaggatccccactggggcactgtctagtggagctgtgagagtcaggccaccatcctccagaccccagaatggtagatccaccaccagctttcaccctgcacatggaaaagccggaggtattcaactacagcctgtgagagtggctgtaggggctgaacattgcaaagacactgggacagagctgcccaaggccttgggaatccaccaacactatcatgaccc

SEQ ID NO: 168318 - DNA, 572 bp, Homo sapiens
cttacgggtgattttgacaagagctgtcttagagaagggggcagggaaaaatcttggttagaatgaatttattaaaggagaaaagggagctggggactggtgacagtgagcagaccccacgtgacaatctctgtggcagaatattaggtgaagaaagagccgtttgattgctgtcaccacgwttgtttaccgacaggagtaagacagtggagggggatgagaatttgcaaacaatttgaaattaccaatttgaattgacttgttttcaagatattgcttcataaaattgcatctgaaatgcatgtgtaccctacatattgcgtgaaagaaatactcttctatgggtttaattatagatccgttatggcctaaaacaatatcacctcaagctctttcaaaattaatgattctgtacagaaacaggtattaattttcaaattctctatgtaattaaggtcatcattgcaatttcaataacataattttcatttgcttttaatacacttcaacatttttcatttttcattctttgaaattagataaccttttaaagtacaccctccaatgtactc

SEQ ID NO: 168319 - DNA, 627 bp, Homo sapiens
tgtgaggacagtaccaagggagatggtgctaaacctattaatgagtaactgcccccatcatccaatcacctcccacctggccccacctcccaacaccgagaatacagttcaacattagatttgggcagagacagatccacaccatatcatcccggatacctttccttgctctgaagtttcaggttttggagcatttcggattttgaagttttggatttgggatgctcaacctacaccagctgtgactggttgcagaaatggataatgtaattttgatgactatttcttccttattttgttatatgttttttgtgtatatgtgtatgtagrtatatgtgaaacaaatctttgttttcagactcaacagcaaatttaatgtctgaactcaatgtagttaatccagctttcttttgattagtgttagcgtaattaaaagacttacttttaatctacctgtatcttcgtatttaaagtggatttcttcaacctatggaaaaactgacagcttagcatgtaaatttcaatgttatactcatgtgaattgccgtaagatgggaataaatgtgattgaagcaatgctgtaaaaataaaataaagtggatttttaaaaacaagatatagttggat

SEQ ID NO: 168320 - DNA, 417 bp, Homo sapiens
tgaattccagaaggaactactgagatgcaaagaagcacagcagcttttgcacacatgcgtgggattagatggaaaacaagtggattgagggtctgccaatgaaagctacccatactgaagtccactggctctggttgagacccagaagagtcatgcatcagaataaaggtggacaggaaataccctggcctttgtagggactgagcctgcaccgacgacctcaattgcagcctgtatggaggacccctgaccatcccccagaagtagactcccatctcttctgcagcaagataacatgctgctaggcctcaattcattgctaaatattttktaacaagtatctcacatttaacaaaaaaagatcagtcatatggcagcaaaatacaatgtaatatgaccaaaacatgaaagactgtg

SEQ ID NO: 168321 - DNA, 587 bp, Homo sapiens
agaataataaaataaaaaataccaagtatgagaaatagaagataaccaacagctttaatttttaagtctttgtttcctacatctcattactttcctgatatgggaagaaatggaattttgtggtcctattttctcagccttctttatagtttttttttgagggacaatattcaaaatatttaacaaccagtatgccacgggcactggacaatcagatggaatgaggccataaacaaccagcacagctactctgtgtgcgttggtgaccatcatgcttggttttaccacctgtgtttgtatctctaaatgatatactcagtttggagtgtttttacattttkcttttttcatttaatattatagttttgagacttatttatgctgagggatgtagctacagttcattttcactgctgtatagtattccaccatgggaccacaacttattttctttatactttctcctatggccatttcatagccaaaaaaaacaaaaaacaaaacaaaacaaaaaccccacaaaaaacaaaaacaccccaaactggaaagccttttttcctggaactgttaaaataatgttgctgaga

SEQ ID NO: 168322 - DNA, 286 bp, Homo sapiens
tttaatacctaatgtaatgtcaaggctatgtatggcagctgttatgctgtattggtttttgattatattattttttattgytttattcttcacatattttccatctgtagttgtttgaatcagtagatgcagaacctcaggctacagggggttgactgtaatatcacaaccaggatactgacattgatacaatgtaccaatgttatccagagattcctggtgttacttgcaccctgtgtgtaggtgtctctatctgtgtctattacgttgcatacaatttgatcac

SEQ ID NO: 168323 - DNA, 286 bp, Homo sapiens
tttaatacctaatgtaatgtcaaggctatgtatggcagctgttatgctgtattggtttttgattatattattttttattgctttattcttcamatattttccatctgtagttgtttgaatcagtagatgcagaacctcaggctacagggggttgactgtaatatcacaaccaggatactgacattgatacaatgtaccaatgttatccagagattcctggtgttacttgcaccctgtgtgtaggtgtctctatctgtgtctattacgttgcatacaatttgatcac

SEQ ID NO: 168324 - DNA, 583 bp, Homo sapiens
tacctaatgtaatgtcaaggctatgtatggcagctgttatgctgtattggtttttgattatattattttttattgctttattcttcamatattttccatctgtagttgtttgaatcagtagatgcagaacctcaggctacagggggttgactgtaatatcacaaccaggatactgacattgatacaatgtaccaatgttatccagagattcctggtgttacttgtactctttgtataggtgtctctatctgtgtctattacgttgcatacaatttgatcacctgtgcatgttcatgtattcaccaccatagttgtaatactgaacagttctaacactacaagtcccctttgtactgtcctcttataattgcagccacctctctcttgcccctctaccacctctttcatctctaagtcctgacaaccactgatctgttctccattcctgaaattttgccatttcaaaatgttttgtcaatagaattataccgtaaagttttgggactgtttctccccgcaagcataattccctggagattcatccaagttgttatttgctatccagtgtattttaatcttagac

SEQ ID NO: 168325 - DNA, 583 bp, Homo sapiens
tacctaatgtaatgtcaaggctatgtatggcagctgttatgctgtattggtttttgattatattattttttattgctttattcttcacatattttccatctgtagttgtttgaatcagtagrtgcagaacctcaggctacagggggttgactgtaatatcacaaccaggatactgacattgatacaatgtaccaatgttatccagagattcctggtgttacttgtactctttgtataggtgtctctatctgtgtctattacgttgcatacaatttgatcacctgtgcatgttcatgtattcaccaccatagttgtaatactgaacagttctaacactacaagtcccctttgtactgtcctcttataattgcagccacctctctcttgcccctctaccacctctttcatctctaagtcctgacaaccactgatctgttctccattcctgaaattttgccatttcaaaatgttttgtcaatagaattataccgtaaagttttgggactgtttctccccgcaagcataattccctggagattcatccaagttgttatttgctatccagtgtattttaatcttagac

SEQ ID NO: 168326 - DNA, 569 bp, Homo sapiens
acctaatgtaatgtcaaggctatgtatggcagctgttatgctgtattggtttttgattatattattttttattgctttattcttcacatattttccatctgtagttgtttgaatcagtagatgcagaacctcaggctacagggggttgactgtaatatcacaaccaggatactgacattgatacaatgtaccaatgttatccagagattcctggtgttacttgyactctttgtataggtgtctctatctgtgtctattacgttgcatacaatttgatcacctgtgcatgttcatgtattcaccaccatagttgtaatactgaacagttctaacactacaagtcccctttgtactgtcctcttataattgcagccacctctctcttgcccctctaccacctctttcatctctaagtcctgacaaccactgatctgttctccattcctgaaattttgccatttcaaaatgttttgtcaatagaattataccgtaaagttttgggactgtttctccccgcaagcataattccctggagattcatccaagttgttatttgctatccagtgtat

SEQ ID NO: 168327 - DNA, 569 bp, Homo sapiens
acctaatgtaatgtcaaggctatgtatggcagctgttatgctgtattggtttttgattatattattttttattgctttattcttcacatattttccatctgtagttgtttgaatcagtagatgcagaacctcaggctacagggggttgactgtaatatcacaaccaggatactgacattgatacaatgtaccaatgttatccagagattcctggtgttacttgtactctktgtataggtgtctctatctgtgtctattacgttgcatacaatttgatcacctgtgcatgttcatgtattcaccaccatagttgtaatactgaacagttctaacactacaagtcccctttgtactgtcctcttataattgcagccacctctctcttgcccctctaccacctctttcatctctaagtcctgacaaccactgatctgttctccattcctgaaattttgccatttcaaaatgttttgtcaatagaattataccgtaaagttttgggactgtttctccccgcaagcataattccctggagattcatccaagttgttatttgctatccagtgtat

SEQ ID NO: 168328 - DNA, 569 bp, Homo sapiens
acctaatgtaatgtcaaggctatgtatggcagctgttatgctgtattggtttttgattatattattttttattgctttattcttcacatattttccatctgtagttgtttgaatcagtagatgcagaacctcaggctacagggggttgactgtaatatcacaaccaggatactgacattgatacaatgtaccaatgttatccagagattcctggtgttacttgtactctttgtrtaggtgtctctatctgtgtctattacgttgcatacaatttgatcacctgtgcatgttcatgtattcaccaccatagttgtaatactgaacagttctaacactacaagtcccctttgtactgtcctcttataattgcagccacctctctcttgcccctctaccacctctttcatctctaagtcctgacaaccactgatctgttctccattcctgaaattttgccatttcaaaatgttttgtcaatagaattataccgtaaagttttgggactgtttctccccgcaagcataattccctggagattcatccaagttgttatttgctatccagtgtat

SEQ ID NO: 168329 - DNA, 569 bp, Homo sapiens
acctaatgtaatgtcaaggctatgtatggcagctgttatgctgtattggtttttgattatattattttttattgctttattcttcacatattttccatctgtagttgtttgaatcagtagatgcagaacctcaggctacagggggttgactgtaatatcacaaccaggatactgacattgatacaatgtaccaatgttatccagagattcctggtgttacttgtactctttgtataggtgtctctatctgtgtctattacgttgcatacaatttgatcacctgtgcakgttcatgtattcaccaccatagttgtaatactgaacagttctaacactacaagtcccctttgtactgtcctcttataattgcagccacctctctcttgcccctctaccacctctttcatctctaagtcctgacaaccactgatctgttctccattcctgaaattttgccatttcaaaatgttttgtcaatagaattataccgtaaagttttgggactgtttctccccgcaagcataattccctggagattcatccaagttgttatttgctatccagtgtat

SEQ ID NO: 168330 - DNA, 614 bp, Homo sapiens
agcggtttgacttaactctctaacagtgagcagggctgctggctctgatcacagaaagtgaccaatgccaattagtaatcttgtgccaattagcacaagggctgctttcactgcagtaataaaagttcccaygtggccagaaactttttgagggctatctctgagccttacattaatcttaaaaggaaggttccttatgcattctggcactactatgtctgaattgtgtgtgacctagagcaagttattaacttctctgtgcctccatttcctcatttgccaaaatagagacaataacatacctaagttatagggttgtaaagagcattaaattaggtaatatttgtaatgcaagttacccattctcaataaacactagttgttgtgaatgtaaaaaaattacctggaaacggtttgatcctttgagactgaaatgaccttactttatgggttattttgccccctggtgaggtgatacccttctggattaggtttattccactccagctaggggaaatgtgaactctgactggttctgtgggaaccctaggatcgtctgcttgctgctttcccgctttctacccccagagccttaaatcagcacagctttaaag

SEQ ID NO: 168331 - DNA, 490 bp, Homo sapiens
aagattcgactaaatggatttgatgttcatcttgttttcttttttaagggtgtcatttactctttctggccgtgaaacaccctttgatatcagtagcagatctgagcacgaagtcagctgtctacccagagaggaaaagaaaygaagccttactcaatctttccatgaattttcttcttttttctttttcattatttttcctaaactctttcaggggcttcaaggttcaggccatgtcactctacctaatccatcagaaaagggccagtcaggtgttcctgttgtctgccaacacaatattgcttttcagcctccatttaagggctactcctcttccctgctcactctccctcatcaaggtgggcgagcccctgctccttggtaatttcctcacccttccgggctcacactaagataaagggaggcagccccagccatctcaaagctacacattaaacaaagcaacataatgagctgcattttgttgagg

SEQ ID NO: 168332 - DNA, 490 bp, Homo sapiens
aagattcgactaaatggatttgatgttcatcttgttttcttttttaagggtgtcatttactctttctggccgtgaaacaccctttgatatcagtagcagatctgagcacgaagtcagctgtctacccagagaggaaaagaaacgaagccttactcaatctttccatgaattttcttcttttttctttttcattatttttcctaaactctttcagggrcttcaaggttcaggccatgtcactctacctaatccatcagaaaagggccagtcaggtgttcctgttgtctgccaacacaatattgcttttcagcctccatttaagggctactcctcttccctgctcactctccctcatcaaggtgggcgagcccctgctccttggtaatttcctcacccttccgggctcacactaagataaagggaggcagccccagccatctcaaagctacacattaaacaaagcaacataatgagctgcattttgttgagg

SEQ ID NO: 168333 - DNA, 594 bp, Homo sapiens
attacagaaagaacattttttcttaaacgttgtcatattctaaattaaataaccctatcacaccaaaaaagtatatgttgaaatttattggcatgacctaacaattaaagtaagagactaagaaatactgattttcatttccatctttcccactaatatatgcatacacacaaacccacacacacacaggcatatacatatatatttcattaagttatttaatccacaattttatactttcccttgaagtgaacacaaagcatttgacttccacatggtagagttagtgagtgagttacacgtcacttcatatctcactagtcttcttctgcttcttataatgtaatctgtgaatgggccatgcacagtggctcacgcctgtaatcctaacagtttgggaggtcaagacaggaggattgcttgagtccaggagttcaagaccagcttaggcaatgtagcaagaccccatctctataaaaaagtacaaaaattagctgggtgtggtrgctcatgtctgtagtcccagctactcagggggctgaggtgggaggaatgtttgagcccaggaggcagaggttgcaatgagccaagatt

SEQ ID NO: 168334 - DNA, 574 bp, Homo sapiens
tatggagagagagagagaggactttcttcatatacatatatatatctttctctatctctgcatctctgagtcaaaaaaaggagaaggaggaggaagaaaagaaagaagaaaactgtgagattcttaaggcaaggaggcaaagtttttccctttcccttggtttctggagctagtcctatwtagttgcttctcttcacagccactaacttttaataaaggctgttgcacagaaagccaacttgtgttagttgcatgaagatacctagagcccaaggcaataaaatgcatcatagtcttctttgcctagttgaggccagcatggttgtggcaacattgcaacatgggcaattattcatctcagattccaggaagcagaagtaagcagtaaagcaagcagaggtccaaggtgagctgagaataggtggtaggaacaggcagcagtggttagaagtggctacagcatccatttacttaggaacgaaggtgagaaaaatgtggttaaccccaagggaatgtacccccttatacatgaatgtttgtttaagttatagtaaagacaaggacaaagaatgta

SEQ ID NO: 168335 - DNA, 581 bp, Homo sapiens
gttgcatgaagatacctagagcccaaggcaataaaatgcatcatagtcttctttgcctagttgaggccagcatggttgtggcaacattgcaacatgggcaattattcatctcagattccaggaagcagaagtaagcagtaaagcaagcagaggtccaaggtgagctgagaataggtggtaggaacaggcagcagtggttagaagtggctacagcatccatttacttaggaacgaaggtgagaaaaatgtggttaaccccaagggaatgtacccccttatacatgaatgtttgtttaagttatagtaaagacaaggacaaagaatgtagatcagttttaaaagttttaaatgttggatcatatttattatcaccatacatttcatgcattacagttttggatggtgcaattctcgttagttcctccaaggctgtggtaaaatgtgagacctttttttttttttttttttttttttttttttggcagagatgaaaacttatcaaaaaaraaaaaaatcgagagtactttcccaacacctgtaaacttttgcagctatttcctttctttttttttttttttttg

SEQ ID NO: 168336 - DNA, 506 bp, Homo sapiens
caaacagtaacctctctggagggaaacaaagcagttcaatagaaataaacagctgtacataaaagactgagttaagggtaatttaaaaaaatcctgagaaagtgataagctcagtgaatatccttttgaaagagaggcagagatacagaaacctcggactgaaatagtatcttgtggctttacaaagctttttatccaaggacccatccactttacgagaacaaatttgttaatttaccacacatgcttttgactctggttaagtgctatgttatggcaaccttttatagacagaagagttggaatcagaaggatgacccgcgcacaggatcagtaatcagcagtgctcagaamagggccatgaacccttctctcaaattccactgcttcagtccctctcctactttcccatcttgctgaatgagcaccaatgggtaacacagttgaaagcaaagtcaccataatactaagtatttagcacctttcttccagggtgcttggcagac

SEQ ID NO: 168337 - DNA, 531 bp, Homo sapiens
gggtagtatttttctttttgtacctttgtcagtttggggctttatctgtttctttttttttctttttttttttttttttttttttgagatggagtctcactctgtcgcccaggttggagtgcagtggcgcaatgttggctcactgcaactgcaacctccgcctcctgggttccagcaattctcttgccttaractcctgagtagctgagattacaggcatccgccaccacgcccagctaatttttgtatttttagtagagacagggtttcgccatgttggccaggctgatctcgaactcctgacctcaggcctcggcctcccaaagtgctgggattacaggcatgagctaccgcacctggcctttttctgtgctccaggagagtttaagtacatagtagtgaaattatctgacctttaaatgtttggtagaattatcctgtgaaaatactgaacctttagtttctagtgacagtcacacatctttttactagagcttcactgttgcttattaataatgtggtcctgtgagt

SEQ ID NO: 168338 - DNA, 541 bp, Homo sapiens
catagtttgcaaatattttctcccattctgtaggttgtttgtttactctgctgatagtttcttttgccatgcagaagctctttagtttaattaagtcacacctgtcaactttttttttgttgcaattgcttttgttttttgtttgtttatttgtttttgttgttgttgttgttgtttgagatggagtctcgctctgtcacccaggttggagtacagtggtgcgatcttggctcactgcaacctccgccttcctgggttcaagmgattctcctgcctcagcctcctgaatagctaggattacaggcacatgccaccacacccagctaattgttctctatgtttactagagatggggtttcaccatgttggccaggctgatctcgaactcctgacctcaagtgatctacccgccttagcctcccaaagtgctgtgattacaggcatgagccacagtgcccagcctgcaatcatttttgtagtctttgtcatgagatctttgccaaggcctatgtccagaatggtatttcctagattttcttct

SEQ ID NO: 168339 - DNA, 528 bp, Homo sapiens
catagtttgcaaatattttctcccattctgtaggttgtttgtttactctgctgatagtttcttttgccatgcagaagctctttagtttaattaagtcacacctgtcaactttttttttgttgcaattgcttttgttttttgtttgtttatttgtttttgttgttgttgttgttgtttgagatggagtctcgctctgtcacccaggttggagtacagtggtgcgatcttggctcactgcaacctccgccttcctgggttcaagcgattctcctgcctcagcctcctgaatagctaggattacaggcacatgccaccacacccagctaattgttctctatgtttactagagatggggtttcaccatgttggccaggctgatctcgaactcctgacctcaagtgatctacccgccttagcctcccaaagtgctgtgattacaggcrtgagccacagtgcccagcctgcaatcatttttgtagtctttgtcatgagatctttgccaaggcctatgtccagaatggtatttcc

SEQ ID NO: 168340 - DNA, 545 bp, Homo sapiens
cttacctgctgccatgtaagatgtgccatttctcctccttgccttctgccacgatagtgaggcctccycagccacgtggaactgtgagtccattaaacctctttttctttacaaattacccagtctcaggtatgtctttatcagtagtgtgaaaatgaactaatacaagtatatttatcttttcctctctcttattttctcagcaggtctttctcctggaaagacaatggtgaaaccaaaattccttcggacattcccagcaatgcttgtaagtctagtgggtaaattgtctgcttatttttcagcacatgtaactagtgttccttcattcctcctccccacatgtattgagcagtattgagtgagaccttgaagcttggcaaaagagataagaggatacataaatagttctataggagtgggcaggaggagcttgtatctcagctgggaggcaaagaggaatggcaactggcttccagggacaaatactgattgcaaattttctagctctgacttgagtcagaacaaatgacgacatgaaatca

SEQ ID NO: 168341 - DNA, 524 bp, Homo sapiens
aattatgtggacagatatttactgtaataaaactatgattccaaaatttacaagcaatttttgattaatgtgaagttccctggaaattaaactcttacattactgccaaacagactactttgttagccttttcagtatgtataatctctttagatgctaactaaagagattccaggcccttctctcacataaaaatgctttctatttmccaattttggtgagtttttaaagaataataatagctaccacttattgcacaccttttggaagtcaagtattgaactaggcataatacaaattggttaatttgtcagagtaacccaataagccccattttacagatgaggaaacttcagttctgagctgccctaggtcacccagttagcaagctgcagagccctaacttgaacatgaatcccttcagctccagaatccatgcttttacagtgtatctccattgcttcttcattttggctagtaatacagtatttctttctttctgaatttctttgtcaatgtcacca

SEQ ID NO: 168342 - DNA, 577 bp, Homo sapiens
ggaagcaggctgttggaagcattaaaactaatttgactgaagctaggtgctgcataggccagcagccagattggcttgaatggctttagcaaatcaagaaatgaaagcaagctgaatggaagagatgtttatccttcttttgtgtttgtttctttgtagatagatcatatattttattggactatcaaggtaacaagatgaattacagactcgcaactggagtttggcagactgtgccatgacacagctttgtctataagacacattgcattgttttcaaacttgttgcccaggagtcatttttcaagggtgaattattgccaagtcactgagtttggtgtcactgaggagattattatgggtttttgagtggttaagtatggacttctgcatttttttttaaataacaaaatgaataagccacagtttggtcctttgctttaatagtgtttttaggaactctctcttttgagataaactgatgtctcttggactgtagattttcrtctagggttttgaaatttcactaaatatatctgagtgaaatgccagattttactgctttttctgaggtttc

SEQ ID NO: 168343 - DNA, 436 bp, Homo sapiens
atcattctaggccagtggtcctcagactctagcagcattaaaatcctcctgtagggcatttaaaatacagatcactgactccacctacttctgactcaaactgtctgggctgaggctgaagaatttgcatttctaacaagttctcagctgatgcagctggtctgggaccacattttgagaaccactcttccaggtactcaacacaggcgatcatggtgggagtggacatttcccattccagccacaaggagtatttttgcatacttattccagtagagactgcaggttgtcaccaaatatctactatctctttcttctttaccaacagaacaccaattttattaacaatatatccagccttaaaaacactacattttccagacttctttcagctagaagggtccmtgtgacacagtttttatgaataaaatgtaag

SEQ ID NO: 168344 - DNA, 514 bp, Homo sapiens
ggagttagcaagagctgttagtgcgaccttgagccsgtccttcaggcaggacactccctttaggtctgatgctgaggaggaggaggctcctccgctgcaggctcctcctgtgatccgtcagaaggtagaacataagcagctgatgggaccctaggggaaagcccagggaccccgtccacagtggtggaacacgcctcttattatgcttataaccccagtgagttgtgggaattaggtaaatagtgccggcagcgtctgagggagctgatagcattttttgttccgcctctgagatggagaagctgacttctatcacaactcacccctcccttcgtcagcagctgcagctgtgccaacggttggcacaagagcaaggtggccacacattaatcaagtggctaatgacagtcatatggactgttttcaatgatgccagagagatactacaaactgtgagtaaatggcaatcacatactaatttggtgcagatactcttggagataggtatgcggca

SEQ ID NO: 168345 - DNA, 514 bp, Homo sapiens
ggagttagcaagagctgttagtgcgaccttgagccggtccttcaggcaggacactccctttaggtctgatgctgaggaggaggaggctcctccgctgcaggctcctcctgtgatccgtcagaaggtagaacataagcagctgatgggaccctaggggaaagcccagggaccccgtccacagtggtggaacacgcctcttattatgcttataaccccartgagttgtgggaattaggtaaatagtgccggcagcgtctgagggagctgatagcattttttgttccgcctctgagatggagaagctgacttctatcacaactcacccctcccttcgtcagcagctgcagctgtgccaacggttggcacaagagcaaggtggccacacattaatcaagtggctaatgacagtcatatggactgttttcaatgatgccagagagatactacaaactgtgagtaaatggcaatcacatactaatttggtgcagatactcttggagataggtatgcggca

SEQ ID NO: 168346 - DNA, 583 bp, Homo sapiens
tttcctgctgataaaaggcatcttgtgtcttgttcatccttagcaaattgccaattagcaaagaagagagggcagatgaagtaccagccaatttgaaattggtgtggacttccatcaaggtatattaattcaytttacctagatgattcgaaattagttgcttttttcttttaatcctaaaaggataattttcttcatgttcttcttgtcatgtcagccaaatcctatagtgtcaactttcagtaaatgtatcttagatataactatggaccaatctagatctttctctctctatcatctatacagtttagagattttaaaactcttaccacttagtttgaaattttattttaatttataaaatgatatattcttatgtaaaaaattcagacaataaagatgtatttaaagtaaaaggcaaaagttgtctgttttaacttcatccccattttttcactcccttgaggaaaccacaatgaactgcttcgtctgttcaaacatacacttatatgccaagactttcctctcacagaatatgcagtatgtttccttttttaaagaaaaaacccctcaatattgtagc

SEQ ID NO: 168347 - DNA, 583 bp, Homo sapiens
tttcctgctgataaaaggcatcttgtgtcttgttcatccttagcaaattgccaattagcaaagaagagagggcagatgaagtaccagccaatttgaaattggtgtggacttccatcaaggtatattaattcactttacctagatgattcgaaattagttgcttttttcttttaatcctaaaaggataattttcttcatgttcttcttgtcatgtcagccaaatcctatagtgtcaactttcagtaaatgtatcttagawataactatggaccaatctagatctttctctctctatcatctatacagtttagagattttaaaactcttaccacttagtttgaaattttattttaatttataaaatgatatattcttatgtaaaaaattcagacaataaagatgtatttaaagtaaaaggcaaaagttgtctgttttaacttcatccccattttttcactcccttgaggaaaccacaatgaactgcttcgtctgttcaaacatacacttatatgccaagactttcctctcacagaatatgcagtatgtttccttttttaaagaaaaaacccctcaatattgtagc

SEQ ID NO: 168348 - DNA, 580 bp, Homo sapiens
tgagacctcttaacatcaaaagaacacaatgattaaaagaaagaaagaaagaaaaatacttcaaaaaacccatataaatctttaggatatggtctcactcttgcctttccagagagaacaggtaacaatgacctgtcctggcctctgccagcttgtatatatgactaggtatttgcctgaaaactaactccaataataagaatcttatgcaaagaccacaaatcattttcaatcattacaatacyttttttagatttatccattaaaatgatgttatttgtaaataatcttctactataattcatttaattgatctttctaaacagctgtgatcaaagttctcaagagtggatcgaaattagagcatcaaaagagctcaacttgtgtgtgtgtgtgtgtgtgtgtgtgtgtgtattgacaaaaccttcattatatcaacacttagatgtactgttgtcattttcaattcgtgagttctaatcaaatgctttattctttcccacaaacttttagtttccccttcctgatggtgaacagaactctcattcagtaatcactgaagccagaaacacaggactca

SEQ ID NO: 168349 - DNA, 548 bp, Homo sapiens
atttaaaaatcagtgtatgtacagctaaccaagttaagattcatggtaattataaatgtacttgaaactcataattaaacaaacccaggagaaattaagcatcatgaaactcaccctgagtgattaagytacaaacccatccaaagtgcaatttggtgtttctataataatttgactccatggaacagatttttaatttgttaaagcacagagtaatttgcatatgtcctgctaaaaagcagacctctaaaacattcttaattaaattcattttgtgatatatttgagagtaaaaacacaatccttacccatataattaacagctcttcatgaaatacacaacaaagcactctagaaacaaatgcagatacataagtgaaatagaggcttaatgttatggtaaaataatcagcctatataaggaagtttctcatgtattcaaagaaaattaactcttccagaccaagcaggcagtatagaatgaatttcatggatttcagagcccaggagacctggtaatttacatcatctaatagagtagttgactt

SEQ ID NO: 168350 - DNA, 523 bp, Homo sapiens
ttggatcttgattagagtcagatccaaatactgcagaagctggcaacctagaaattccagtggaaacagacaaaaaacttctccaacaagagcctggttttcaactcaaaggaccaggaaagggacagcctggcaagagagaaaatatatttgacaataaccactctattccagcccaacactacagaaaacagccccacwcacacccaccagcaaaagccaactggagacctagacctgtaccatgctgcaatgaagcacacatctccccttcctccagggaggtgttagggaaggatgaatcaggaaatgggacttttgtccctgctgccttccccatcccgtagtaccagtggaaaccacatggggagcctggactccaacccacaccagtagcaatgaggttccccacactctccaggttggagtgggatcagagaaggttcactggagagtcaagacttttcatccctgctcaacggtaaagaacactgcccacccaccaccacggtattagtggcga

SEQ ID NO: 168351 - DNA, 514 bp, Homo sapiens
tagcccatatttccgtctctgccatcatgacagaaagccagtgttgtccagcaggcggcacaaggaagcactaaagtctctagagaatggtgagtaatctccaactgaacagaggctgacagcaaccactttaaaaggctaatctaaatgtatgagccttcaccctttgcctgttctctgaatgttgattccagaagatgtgcagcagagatgtgccacctgcacttcctagatggatgtggaaaggtcaaagcatttgtggcagaaaacagtaactctcgggatgaagccgatttagaaattacaagatgtcctctaacacyctttccttttagccagatgaacaccctggtttgtttttctaaaccccagttaatactttgtagccttcaaagtgccttgggggagttattcaagttccctatcaagggacttcccctaagagtgagtgggaagatcgttctggaagaagcacagaagctagtttgcagaaatttaaggtgagtttagaaga

SEQ ID NO: 168352 - DNA, 474 bp, Homo sapiens
aggttgaggacagagctgggacatggaggatggaaggacagaaagatggaaagaacctgttggttttcagaaaccagtaccccaaaatacgacatgctgaactgaagaacaagactcaaggtctctctgaccttccaccgtttcttccaaagaaactgaagttccattatctgcctaagatccagacctatcaaggagaacagttttcttcccctccctgtaagaccaaaatgtaaccacctgaatggaccctttttcaagatgatgactatctccaaggatcacttaatttccaaagagaactatttacaasttaatttctgttccccattcaatcattctcctgaataatcatttattcccatcaatagacttcctcttctccatgttcccataacctgttttatcagaatccaaggcccctttctttctgaaacctcaagttggcacataagcttctctaccttattggga

SEQ ID NO: 168353 - DNA, 421 bp, Homo sapiens
ctcggggggttggggggctgggagagggacagcattaggagaaatacctaatgtagttgatgggttgatgggtgtagcaaaccaccatgrcacgtgtatacctatgtagcaaacctgcacgttctgcacatgtatcccagtacttaaagtgtaaaaaaaaaaaagaagaagaagtagtttaggaagaaggtaatgaattaaaattaggaaagaggtaatcgtcaaaccgtacacagacttgcaagaaccaaacatttctacttctatttcagtgtgcaactgcaaagagtctgggtggggtgggggaagcaaccctgtaaatgaaaagagaaaagtgtgacatttgcttaaccagaagtggcttaaattgggaagattaaagtttaaagaacattttgtttaatctcattataatgaagtc

SEQ ID NO: 168354 - DNA, 586 bp, Homo sapiens
cagtacttgccagttataatatgcagaattaaactgactcacatttacttaaccctaaatacaacataaagcatatgtatcctgatatcttctaggaagcyggcatgatgtaataaccagaagagtggtgttagaatcagaacgccaaacactgccatcaagcagtgtctatcatgttctaggcaccataccaagccacaggggaacagggaagtgcctcagtaaacttcaacttatttccaaaaactaatatatatttcatagagttattgggagagttaagtaagattagatgcccagaaatatgggcataaacctggctcagagcaggtacatacatgtaggattaaatccataatctttcagtattatccctgcattttaatgctgcttctaattccatactgcttaaacacctgtctaaattctacacaaccttcagtcttctaactctctgatgaaaacagttcacaatgacatctaccttcctgaaatatctcgtttgctattctttttttgtattatatgcttctttaattttcaaatggttcgtgagtttttttcaaaatgtctacaacatgcagag

SEQ ID NO: 168355 - DNA, 551 bp, Homo sapiens
ctctcttccattacaacttttcagtgcttgagcctgcccacatcarccacagcggggcctgtctccaagtccagaggtccagcaggctgagctaaataatgatgaattagatcctcatgcaaaccacagccaggagcttagtgactacaataaagacttggagaggttttctggggagcacatcctcccataagcctatttctctctttgaaggagagcaggtttaaggctttctctgcttctaggctctacatagttttctaaatgccaactatgcaagttacttgcattttccaataaatccagatgaaagaatagagaaaaactttaaaagtgttttatctgatggtctccatcttattccattcaggttgctataacagaataccatagactgggtggcttataaacaacaaaagtttatttctcacagttctggagcctgggaagtccaaatattagcagagtcagtgtctgttaagggctcgtttcctcttcattgacttccatcttctccctgcatgctcacatggtggaaggagctagagatc

SEQ ID NO: 168356 - DNA, 426 bp, Homo sapiens
gctatcatttccagattgcaacagaaagtcttattatcagtaactaatatcaaacactatgctacttccaaccaagcatagtttggcaaccacctctgtatcaatagtatattttcatcctcttttatcagattcttccctttctatttctaaataatgcttaagtcatatttttagcaaaaaatgagtcaggaatcttatttttttattttttctggatgaagctcacaagcttcatgttgagtgaaagaagccagattcagaagagtgcatcctgtattattccaytgatatcaagttcaaaactaatctgacctgtcagaagtcaggagagtggttcccctggtagaggcagtaaaggggaagggtggaaaggagcactggaaagggacaagggttgtagggacaagggtggttttgtgggtg

SEQ ID NO: 168357 - DNA, 611 bp, Homo sapiens
tcctgttttaaaaagttttctcaggcaaggaaaacttgcttgagatgagactggttaacacacatatgcatatgcactaaagtcttcatttccctatacaaatgtgtgcactcttcrtattttagctcagacaactatgaaagtatttgccagtggttgtaggacagggccgctgatacgtgggaaaatattttaacgatgttgactctggtttcttgtaccgatttttgcattgtaaaaatgctcatacaatcaggccaccatgattcctgcaaatatttttgaatgtagtacataaccaaataaataaaatgttaagggtctacaaagtatatataatatcactaaaaaatattatttgttgccaaagaagaacttaatgtgtcagtggacaccagcctctatcaggtagagtcttactctgccactttttagacgatgatcttggaccaattacataaaactgcctttcattaaatatccttagtataaaaggagacaagaatagcatgggcctcattgaattcttctattaaaagggaaaaggcctgcagattggttagccctagctaccttgcaggcaaagcatacatttttctctgttatacaag

SEQ ID NO: 168358 - DNA, 611 bp, Homo sapiens
tcctgttttaaaaagttttctcaggcaaggaaaacttgcttgagatgagactggttaacacacatatgcatatgcactaaagtcttcatttccctatacaaatgtgtgcactcttcgtattttagctcagacaactatgaaagtatttgccagtggttgtaggacagggccgctgatacgtgggaaaatattttaacgatgttgactctggtttcttgtaccgatttttgcattgtaaaaatgctcatacaatcaggccaccatgattcctgcaaatatttttgaatgtagtacataaccaaataaataaaatgttaagggtctacaaagtatatataatatyactaaaaaatattatttgttgccaaagaagaacttaatgtgtcagtggacaccagcctctatcaggtagagtcttactctgccactttttagacgatgatcttggaccaattacataaaactgcctttcattaaatatccttagtataaaaggagacaagaatagcatgggcctcattgaattcttctattaaaagggaaaaggcctgcagattggttagccctagctaccttgcaggcaaagcatacatttttctctgttatacaag

SEQ ID NO: 168359 - DNA, 489 bp, Homo sapiens
attattttatttgtgatagatggcaatcttaattgatgatctgaggaagtgagtttcttgttaagttccttactaatagcatataacttgctcatgctttttgtttgtttgcttgtttttgttttattcaccctgccaatctctgacttctacctcgtctatttaggccatttacatttacagtaattattgatgtgttagaacttatatctgccattttataatttgttttctttgtgtcctctctttctcgtccctgcatttcttcttttgctttcttgcttgttatttgaatttttgtttggattccacctggctgatatatgtacagtattttttagtttatcactttgtacagttttcatacttattaaaatacacaaatgtaacagccttatctactggaaatcaacatttcatcacttcaagtgaagtatggaaaacttayttctctttaggtcattttaccttctctatcattaaatatca

SEQ ID NO: 168360 - DNA, 531 bp, Homo sapiens
tcagcaaagatctattttaatcattgttattattacacatttttttaaaattataatttcacagagactttggcttaacagaaaacatttccaaagacttataatatcatgtcagtctggctattctgtacyattcaaataacaacttgtgcacatttcaatatttttatttttctgtctatattttatccaatgaaatgtattttaggaatgtaattgaaaatcacagtttttagctgaaaccattccccttgagaactggaacaagacgaggatgcccactctcaccactcctgttcaacatagtactcgaaatcctggccagagcaatcaggcaagagaaagaaataaaagtcatccaaactgaaaaagaagtcaaactatctctcttcgctaacaatatgattctatacttagaaaaccctaaagactttgccaaaaggctcggaatagaaaactcagaaatacaaccacacacctacaaccatccgatctgtgaaaaagccaacaaaaacaagcaatgggaaaagg

SEQ ID NO: 168361 - DNA, 425 bp, Homo sapiens
gaattcatatttgatttctaccatttctgtataagtttgattgccagaaatcctttcttttagctctgacactattacatttataattgagtagctgcaacactgttttatgtgagatgtacccggttttagtttgccgtctcagcagatattgctgattcagagataaacaggattttggatgtcatcaggtcaaatcttttttttaaaaataartagtgaacaaacaaagactaagtcacagtgaattgagaaactttccctaaagtcactcagttaactgaaatatgtttatgttaaaaaattcccaaatcccgcatgcataactgattgaataaatcatatgcttattcaaagagcatttattgaaaaccaaatgcttatcaagctaatgtgctgggaactggggataaaaaggtgaacag

SEQ ID NO: 168362 - DNA, 411 bp, Homo sapiens
tgggatgtaaattagtataacctttatggaaaacagaatggagatttctcaaagaactaaaaatagaactaccatttgacccaggaatcttattgctgtgtatatacccaaaagaaaataaatccttctatcaaaaagacataygcagtcatatgttcattgttgtgctaatcacaagagtaaagacatggaatcaacccaggtccccatcaatggtggactgaataaagaaaatgtggttcatgtacaccatggaatactccacagctataaggaagaataaaatcatctacttggcagcaacatggatgcaactggaggccatcaccctaagtgaatgcagaaacagaaaaccaaatactacatgttttcacttgtaagtgggagctaaaccttgggtacacatggaca

SEQ ID NO: 168363 - DNA, 579 bp, Homo sapiens
ttttttcttgaacaaatcaatagagtttcatctacctgatgtaaatatattgaamtgacaaatacttttttctctatttgtagaatctaccagaagccatttactttttctagcaaaaacagaggtaaaccttccttctcttgcctcttgtcaactcttttgctttctttcatgatgtagttttagaaattataattgcttggacgtacaacaaaataaaatgctgatctattatattgaaaactgattgaacatcatgaatcttgatatgtctggcagataattagagattaatcattttatcatcaccaccttggtgaaatttctaagagatttcatttttggaatcactccctacaaaatgaagtgcaagttgttgtgccatgactaccactatattgctcctatcattataaatcactgtcaaaacctcactcaatgaggttatttggatgttagaggcacatttgagtgtgttgctctgacccacttactgaataacaaaaatgactgccagcaggactaagggagtgcctcagtgagaaccttggcaaatcctcttaccaaaaacaaatgtaa

SEQ ID NO: 168364 - DNA, 611 bp, Homo sapiens
atattaactggcacataaagaatcagtgaacttgaagatagatcaacaatgtgtacaaagttttctatactttctgtagaatagaaagtatatgaattggatgggagtggtggcttactcctctaatcccagcatgttgggaggccaaggtgggcggatcacctgaggtcagacgttggagaagagcctggccaacttgacaaaaccccatctctactaaaaatacaacaattagctgtgcatggtggtgtgtgcctgtaatcctagatactcgggaggttgaggtaggagaattacttgaaccctggagggggaggttgcagtgggcygagattgtcccactgcactccagcctgggagacagtgcaagactccatcacacacacaaaaaagtacatgaacaaaataaatccaaaagctcagagatctgtggccataagtatcaacatatacataataggtttctcagaattagtgaagagagaggaataagcagaagatatatttgaggaaattatggatcaaaactccccaaatttgatgaaatattaatctatatttcccagaagttcaagtaactcccagtataataaacacaaagagaaccacca

SEQ ID NO: 168365 - DNA, 593 bp, Homo sapiens
ctctggcctgccttatatgtgatgcttatctacaattttagtcattccctcattacatatttttagtgctgaaaggtggcaagtataatatcaggctctactgcctaaccaatcttgatcgatttctatagactcagctgtgattgttctgggaagaacaaaaatgtatcattaaaagttacagggaggcatttataaaataataagttcctgagatcgtatagtcagggggtagctttcttgtgtgacagcagtgttatgatttctstatcttaagcaaagcaaatattttgcagtataaagcctaaaagttgtgtacattggcaaaaagaaagaaaaaaaacaatggccacaacatgagaaagaaagagaagagagaaccagcagaaagagaatttttttaaaaaagcacttctttggtaactgaaatagataattttcagtgcctgattgatccaaggggaacttcttatgttcaatatgcatagaccttctataccagtggctcttttgttgtctagatggcattggcaacatctcgaaaaagtctgggttattacaatctggggaagggtgctgccagaatctagtga

SEQ ID NO: 168366 - DNA, 548 bp, Homo sapiens
agctattgcaaaccctatgacaaaagttcccaaatatttttcagttcatagtgcctttagtctcttggcaactatttttttacagtgccagtaggaatttaaaatctaaaatctatgtgtcttagtttgttcatgttgctgtaacaaaaataccataaactggatggcttataaacacataaatttatttctcacagttatggtgtctgggaagtccaagatcaaggtgaggaaagattcaaagtctggcgagggycagcttcttagttcatagatgctcatctttttaccaagtccttacatggtgaaagagacaaaggagctctcagggacctccttcataaggacactaatcctatgtctgaaaactccacctttatgacctaattatcttcagtggcgctccatcttaatgatattgctttgggggttaggattttaacaaatgccttttgaggggacacaatttccatagtactgtgttatatacacggttgtacagtctgtacacagaccgtacagtataatctttaacacaggtactatgc

SEQ ID NO: 168367 - DNA, 599 bp, Homo sapiens
acttgctgttcagactagtgtagagtctatttttcagtcttttcaatgtttccaaaagctttttagggtgaattcttcttgcccaatctggttakaatgaattctgtatttgcaaaggatatggactgatacagggtgagcccatcattatattctttaaacagacgagaaaggtgcattttgaaaagataataaatttctctcactaactcataggtggcagaaccacaattttgagacaggtaatattccttcagaactaatggttaatgtcaccattctgctatatatccaactacttgggaggaaagtgagacttagtgaagtttattagtgaagttgaaatcattcaccttcactggagtggttatgaggttttgaagccaggtgtgtctaattataaaactcatcattttataatattctaaccttcctattagttatttgacaataatggggcaaattctttcaatttaacattggtgattaacatacaaacatctgcctatgcctactgctttaatgattttgtacttgaactacatgacttagtaatagttctcaaggcttgcttcagtatgatcctgatgggaggggac

SEQ ID NO: 168368 - DNA, 599 bp, Homo sapiens
aatgaccaggcatggtaaaaatagttaagtcagaccttttcctgaaaaacataaaattcctctgacttagactctgagactgccagcagaccatctgaacattccctagatattaaggctgtctttctcacttccttgtgatcagatttgcatgctgtctcataagtctcccaggcttcacccattctcttcccattttctccactgtgatggttaattttaggtgtggacttgactagatagggtgacttctagatagtcgatgaagcattatttctgagtatgtctatgaggatgtttttggaaaagaatgatgtgtgattcagtgaacatggtaggaaagatctgccttcagtgcaggtaggcaccatctaatcacctggaggtccagatgtaacaaaaaggcaaaggaaaggtgaattatttctctctcttctaaaatgggatgcccttctcctcctgctttggaaattggaactccaaattctccagctgttggactgtgggacttgcrccagtggccttttggggttcatgagccttcagttgtaaactgagaattgcatcattgatttatttggttctcaggccttttaacc

SEQ ID NO: 168369 - DNA, 609 bp, Homo sapiens
catactcattacaagcctcttcagactttctatttctccatgatttagcctttgtaggtcgttgaattctaggaaktttttcatttcctctagattttctagtttttattgttagataattattcatatttgtctctcaagatcctctttatttctgtggcactaactgtgatgcctcctctttcatgtctgattttattcatttgagtcttctcttttagtctagctaaagttttgtcaattttatttattttaaaaattgactcttaattatgagttttgttgatttttcctattgtttctgtagtctctattttatttatttatgctcccatctttattatttgattccctctgatatctttgcatttagtttgttctctttttctacttccttgagatacaaagttaggttgtttatttgaaatatttcttcattttagtatagatatttattgccaaaattgttatgcttagtactgcttttgctgcatcccataagttttaacatattgagttttaatttttgtttctcaaaatattttatgatttcccttttgatttcttctttgccacagagattgttcaaatatatgttgtataattttc

SEQ ID NO: 168370 - DNA, 466 bp, Homo sapiens
tcatggtatatatatgccacatattttcttcatgcaatacaccattgatgagcatctaggttaattacatgtctttgttattgtaaatagcacagtgattaacatacaagtgcatgtgtcttttgggtatgacgatctatatttctttgaatatatacccagaaatgatattgatggatcaagtggtagctctkttttaggttcttggagaaatcttcaaactgctctccacagtgactgaactaatttacattctcaccaacaatgtataggcattccctttctcagcagccttgccagcatctgttatttgttgacattttaataatatccattctgtctggtgtgagatagtatttattgtggttttgattttcatttctctgatggttactgttgataagtattgttttcataagtttgttggttgcttatatgtcttcttttgagaagtgtctgttcatgt

SEQ ID NO: 168371 - DNA, 522 bp, Homo sapiens
  misc_feature (1)...(522): n = A,T,C or G
cttaattacagatactttcctatgaaaagctttctgaatttgacaggaacaaatacagaaggcaattgttcttacattagagttgcctttttttcacttttttcaatcctattgacaaaagtaatatataaaaatacttcagaaaggatttacaatagtcagtgccgatcaaaaatgtgtgygatgtacgatggaaaagcagtatatccttgaggcatgacttttagttgggattcactatctgctctgtaataacagagaaggcaagggttggctagctctaggtaagttttagagaatgaacaaaaaagaccttcagattgcttctaagtgatgcaatggatttcccaggatatgtaagaaagcaaggaatactagcagatgatttatctgggattgaaaatgataggtctgactgtaccctgccctccagaactgtatctgtctgtaaaatggaaatctacttgtcctacctaccacattgtgtcctcatgannnnnnnnnnnnnnnnnnnnnnnnnnn

SEQ ID NO: 168372 - DNA, 457 bp, Homo sapiens
aacaataacaactccacccctctgaggacctggaccatttggtattctaggttttggctgaataggttggatcagaaattgatcagatcttttataaaactataactccaacaatccccaaagcctagaaattcatatgctgcatgccacagcaaagccctaagatccatttctaatttcctaaraagagcctgggtcacagagtcacaccaaaaggagtagaaaccaaggcccatcttcaggcagatctacaaaaccacaggattagacacaataaacatgcagctacaacagagatccttctcctctgaaatcctatctgtcagaaagtcctcaccaaagtctcttggttaaacaacagaagcacgtgcattatatccaggaaactgctacaaaacaatcgtatattacctggaaggatcaaaaatgacatcagaggaagagattttttccctct

SEQ ID NO: 168373 - DNA, 579 bp, Homo sapiens
acctttttattaaggtgctcaaagtacttgattaaatcagcacacttattctaaaaaaataccaactctaaacaacaaaacgaaaacaatttcaaataataatatcctgcacaccagacactttgaagaatatagtagacttttttttttttttttgctttcaacaaaggcatgctaagtttaagaaaacaggacatatatatttttcaactttggctctagtcataattggaaacaaagtacacttttacttatatatttgttagaagaatgaacaaaaagataattaccatagaagaactgcatagcaatatggaaaataagcaatgaagaaattcagagactggagacaacaaattggtttgggataattaagaaaggctaaacagcaatgaagcttgaactgaatctataaatatggtaaaactgagattagtagagaggaataagcagggttttctaggaagatgaaaagacatagataaaagtgtggtagtgsggagccccaaaatttcaatgtaaaaccatcagatttgtttcttggtaatgtaatagatcaatgtagatattcctgattgg

SEQ ID NO: 168374 - DNA, 522 bp, Homo sapiens
cagcccaccacagctcaatgaggcctgcctgcctccatagactccacctctgggggcaggacatagctgaacaaaaggcagcagaaacttctgcagacttaaatgtccctgtctgacagctttgaaaagagcagtggttctcccaccatggagtttgagatctgagaatggacagactgcctcctcaagtgggtccccgacccctcagtagtctaaatgggaaacacytcccagaagggccgactgacacctcatacagcaggtgcccctctgagacgaagcttacagaggaaggattaggcagcaacatttgtcgttctgcaatatttgctgttctgcagcctctactggtgataccaaggcaaacagggactggggtggacctccactaaactccaacagacctgcagctatgggtcctgactgttagaaggaaaaccaacaaacagaaagaaagagcatcagcatcaacaaaaaggacatccacaccaaaacctcatctattggtcaccatcattaaag

SEQ ID NO: 168375 - DNA, 569 bp, Homo sapiens
aagcttacagaggaaggattaggcagcaacatttgtcgttctgcaatatttgctgttctgcagcctctactggtgataccaaggcaaacagggactggggtggacctccactaaactccaacagacctgcagctatgggtcctgactgttagaaggaaaaccaacaaacagaaagaaagagcatcagcatcaacaaaaaggacatccacaccaaaacctcatctattggtcaccatcattaaagaccaaaggtaggtagataaaactacaaagatggggagaaaccagagcagaaaagctgaaaatttaaaaaaccagagcacctcttctcctccaaagatcgcagctcctcgcaagcaacrgaacaaagatgggcggagaatgactttgtcaagttgacagaagtaggcttcagaagatcagtaataacaaactcctccgagctaaaggaggatgttcaaacccatcacaaagaagctaaaaaccttgaaaaaatgttagatgaatggctaactagaataaacagtgtagagaaggccttaaatgacctgatggagctgaaacaatgg

SEQ ID NO: 168376 - DNA, 626 bp, Homo sapiens
atttaaaatagctatgttgagaaaattcaaagaaattcaagataacacagataaggaattcagaatgctacccaataaatttatcaaagagattgaaataattaaaaagaagcaggaatcctggagctgaaaaatgtaactggcatactgaagaacacattagagttctttaatggcagaatcgatcaagctggaggaagaattagctctaagacaggctatttgaaaatacacagtcagaggaggcaaaagaataaaaaacaatatattgcctataggatctagaaaatagcctccaatgggtaaatctaagagttattgtccttaaaagaaggtagagaaaaaggtatgggtagaacatttattcaaaaggacaataacagagaagttctcaagcctaaagaaagatatcaatatccaagtacaagaaggttatacaacaccaagcagattcaacccaaagaagggttaaactctcaaggcatttagttatcaaactctcaaaagtcaatgataaagaaaggattctaaaagcagccagagaaaakaaacaaaaagagctccaacaggtctggcagccaactctttcagtggaaacttacaggctgggagagagtggtatgaca

SEQ ID NO: 168377 - DNA, 418 bp, Homo sapiens
ttgcaaccagaaataagtttaagaatatttatagaaaccctaatatacctagcaccaaaaagtaaaatgtacatcaaatattgaaagattactaggcattaacaggagcagaaaaacattaaccataacgaggattttagccaattaaaagtgacccagaattgacagtatttacacaagtgttcaaacatgcataaatggacattaaaaacatgtattataactgtctgctgtctgsagaaaagtcagggacatgtattaaaaagacccaaatcaagctgcagtaggatgaaaaactacattgagacggagaatacgctgaaaagggttgacagcagattagacattacagctgaaaatataagtgaactcagtccataacaataaagaaaaaattagaataaaaaaatgagaattc

SEQ ID NO: 168378 - DNA, 618 bp, Homo sapiens
aatgtcataaagcttttcccttatattttcttttacaagtttaatggattcagatcttacattcaaatctccatttgagttgatgtttgtatataagggttgaatttgttgttgttgttgttgttgttgtttrtgaatcctcagcttttccaatgtcatttgttgaggagactactctttctctattgtgtattcttggcatctttgttgaaggccagctaactatataggtgtggatttatttccgggctctctcttctgtcctattggtttatatgtctgtctttatgccagtatcattctgttttaatttttgttgctttgtaatgtattttgaaattaagaagtataatgcctccagctttgcttttctttctcaaaacttctttggctgttcatggcattttgcgggaggggaggaggttccatgtgaattttacaattacttttcaaattatgtaaaaaaaaaaagtcattgagatttttgatagggattgcagtaaatccgtagactgattaggaaagtctgaacgttttatcactattaagtgttcaatctatgaacataatggtttttttatctatttgtatttctttaatgtctttcataattgattt

SEQ ID NO: 168379 - DNA, 572 bp, Homo sapiens
ctttttctcagcaaggaacatccctgagaaagagaatgtgtccctaaggggaggactctgaaatggctgctttggcgatggctgtcatagcggacagatgaaataagcccctgtctcccatagcactcccaagcttattaggacaaggaaattcctgcctaataaattttggtcagactggttgtctgctctcaaattctgtctcctgataagatgttatcaatgacaatgcatgcccgaaacttcattagtaattttaatttcgcccyggtcctttggtcctgtgatctcgccctgcctccatttgccttgtgatattttattaccttgtgaagcatgtgatctctgtgacccacaccctatttgtacactccctcccctttttaaaatcactaataaaaacttgctggttttacggctcggggggcatcacggaacctgctgacgtgtgatgtctcccccggacacgcagctttaaaatttcactcttttgtactctgtccctttatttctcagactggccaaagcttagggaaaatagaaaagaacctacgtgaaatatcaggagtgaa

SEQ ID NO: 168380 - DNA, 618 bp, Homo sapiens
aatgtcataaagcttttcccttatattttcttttacaagtttaatggattcagatcttacattcaaatctccatttgagttgatgtttgtatataagggttgaatttgttgttgttgttgttgttgttgtttgtgaatcctcagcttttccaatgtcatttgttgaggagactactctttctctattgtgtattcttggcatctttgttgaaggccagctaactatataggtgtggatttatttccgggctctctcttctgtyctattggtttatatgtctgtctttatgccagtatcattctgttttaatttttgttgctttgtaatgtattttgaaattaagaagtataatgcctccagctttgcttttctttctcaaaacttctttggctgttcatggcattttgcgggaggggaggaggttccatgtgaattttacaattacttttcaaattatgtaaaaaaaaaaagtcattgagatttttgatagggattgcagtaaatccgtagactgattaggaaagtctgaacgttttatcactattaagtgttcaatctatgaacataatggtttttttatctatttgtatttctttaatgtctttcataattgattt

SEQ ID NO: 168381 - DNA, 618 bp, Homo sapiens
aatgtcataaagcttttcccttatattttcttttacaagtttaatggattcagatcttacattcaaatctccatttgagttgatgtttgtatataagggttgaatttgttgttgttgttgttgttgttgtttgtgaatcctcagcttttccaatgtcatttgttgaggagactactctttctctattgtgtattcttggcatctttgttgaaggccagctaactatataggtgtggatttatttccgggctctctcttctgtcctattggtttatatgtctgtctttatgccagtatcattctgttttaatttttgttgctttgtaatgtattttgaaattaagaagtataatgcctccagctttgcttttctttctcaaaacttctttggctgttcatggcattttgcgggasgggaggaggttccatgtgaattttacaattacttttcaaattatgtaaaaaaaaaaagtcattgagatttttgatagggattgcagtaaatccgtagactgattaggaaagtctgaacgttttatcactattaagtgttcaatctatgaacataatggtttttttatctatttgtatttctttaatgtctttcataattgattt

SEQ ID NO: 168382 - DNA, 618 bp, Homo sapiens
aatgtcataaagcttttcccttatattttcttttacaagtttaatggattcagatcttacattcaaatctccatttgagttgatgtttgtatataagggttgaatttgttgttgttgttgttgttgttgtttgtgaatcctcagcttttccaatgtcatttgttgaggagactactctttctctattgtgtattcttggcatctttgttgaaggccagctaactatataggtgtggatttatttccgggctctctcttctgtcctattggtttatatgtctgtctttatgccagtatcattctgttttaatttttgttgctttgtaatgtattttgaaattaagaagtataatgcctccagctttgcttttctttctcaaaacttctttggctgttcatggcattttgcgggaggggaggaggttccatrtgaattttacaattacttttcaaattatgtaaaaaaaaaaagtcattgagatttttgatagggattgcagtaaatccgtagactgattaggaaagtctgaacgttttatcactattaagtgttcaatctatgaacataatggtttttttatctatttgtatttctttaatgtctttcataattgattt

SEQ ID NO: 168383 - DNA, 527 bp, Homo sapiens
ctgacacattttaaaatagcagaaaagtgcatttacctaaagtcttaatatttgtagatgatatggatatggtttggctgtgtctccacccaaatctcatcttaaattataactccgacaattcccacatcttgtgggaggaatcaggcgggaggtgatggaattatgggggcgggtctttcctgtggtgttctcgtgatagtaaatgaatctcagaagatacgatggttttaaaaatgggagtttccctgtacaagctytctttggctgctgccatccatgtaagatgtgacttgcttctcctcgccttccaccatgattgtgaggcctccccagccatgtggaactgtaagcccaataaacctctttcttttgtaaattgcccagtcccagatatgtttttatcagcagtgcgaaagcagactaatacagatatatttaggtgtgtttgaattttaactttcaatctataaagacacattaaatagatgctatttgaatattaaacaaattggtaagtgctgtta

SEQ ID NO: 168384 - DNA, 589 bp, Homo sapiens
ttttggatgctaaagttccatgctgacttcaatggatgacagataatttaaaggcaatgcatataattaacaggattaacatctgaaactgtgtttatcagttagttgaaacattaattgcattgatttgaagtaaaaatctgacaccgtaagacattcacaaggtagtaattttggattctgtgtcaaggtaatattattctaaacatcccaaatggaaggttgtctctctagagcawgtatggaggaaccaaaaaggaaaaaagaaaaatatatagagctgatatcaaaaataattttgtcaaccacattaacaattgaaacatgaaaatacacaaagatatgttcctatcaaattgtcaaagtggtgtttatgaaacaaactcaatattagcaattataatagaatcagacatttttctttttttttggtgtgaagatggttattaccattatgaaaacaactagaaacacttaattatacagttacttatactgctatttgtttttatcataaaattatttttaaaacttgacttaataattaagtggtaatttatctgaaggaaataatcttatattcacaaca

SEQ ID NO: 168385 - DNA, 589 bp, Homo sapiens
ttttggatgctaaagttccatgctgacttcaatggatgacagataatttaaaggcaatgcatataattaacaggattaacatctgaaactgtgtttatcagttagttgaaacattaattgcattgatttgaagtaaaaatctgacaccgtaagacattcacaaggtagtaattttggattctgtgtcaaggtaatattattctaaacatcccaaatggaaggttgtctctctagagcaartatggaggaaccaaaaaggaaaaaagaaaaatatatagagctgatatcaaaaataattttgtcaaccacattaacaattgaaacatgaaaatacacaaagatatgttcctatcaaattgtcaaagtggtgtttatgaaacaaactcaatattagcaattataatagaatcagacatttttctttttttttggtgtgaagatggttattaccattatgaaaacaactagaaacacttaattatacagttacttatactgctatttgtttttatcataaaattatttttaaaacttgacttaataattaagtggtaatttatctgaaggaaataatcttatattcacaaca

SEQ ID NO: 168386 - DNA, 594 bp, Homo sapiens
ccaattatttctaatttatttaaaaaaatatttatttgtggtcaytatttgccaaagattgttctttacagcaaccagttagataactgcatcataactaaatgcctagaccattgcaataatcataacggcttttactgtattcagtattttgcaagccagtcaaagaccattcttgattgcatttggcaagactctgcattggaaatgagagaaacccacttcaagctatattattagcaacaacaacaaatagctgggagattcttgtttcccaaagggaatgtgctagtaatccatttatcgtctttcatctctaaatccatgattttgcctgcctccctaaaaatggaccctgaccctttcaaaagtttttccttgccagctggcatgatgctttgtcagtagagggcgctggagggacactgcaggagtaaaggtgttttgcttgcaggactcctgtgtctgctttctgtgctcctgggctgtgcagtcatcccagtgtccgggtactgcagatgggtgtctcctccactcatgaactctacagcccatgaagcttctctgccttcaggttgccgcagcacccaggcg

SEQ ID NO: 168387 - DNA, 594 bp, Homo sapiens
ccaattatttctaatttatttaaaaaaatatttatttgtggtcactatttgccaaagattgttctttacagcaaccagttagataactgcatcataactaaatgcctagaccattgcaataatcataacggcttttactgtattcagtattttgcaagccagtcaaagaccattcttgattgcatttggcaagactctgcattggaaatgagagaaacccacttcaagctatattattagcaacaacaacaaatagctgggagattcttgtttcccaaagggaatgtgctagtaatccatttatcgtctttcatctctaaatccatgattttgcytgcctccctaaaaatggaccctgaccctttcaaaagtttttccttgccagctggcatgatgctttgtcagtagagggcgctggagggacactgcaggagtaaaggtgttttgcttgcaggactcctgtgtctgctttctgtgctcctgggctgtgcagtcatcccagtgtccgggtactgcagatgggtgtctcctccactcatgaactctacagcccatgaagcttctctgccttcaggttgccgcagcacccaggcg

SEQ ID NO: 168388 - DNA, 605 bp, Homo sapiens
ctggctctttgtctactatggtttagcaatgagacagttttgcttgatagcatctcagatactctccataatgtttggggtctgacacctgctcctaggctgggtatcgtgttcttggccccccacccacttgaacctagcctgatccaagcaatggacatatgcccttgagtaacctkgtgggggagagtttatactgcatacattttgagaatttatatttttgtccttttatatttattagtttctaacttctcaacttaaatgttggactattaatattaagacttctaatacagtcatttgaggacatacatttctttgtcagtactgacttggtaatatttcccaagttttgacaataatattgtaattattcagtttgaaacacttactaattacagttatttagaatttggctcatggcttattttaaagtttttaaattataaacataaaaattagttactttttgtttttcatttcaaaattaattatgctgtggccagataaaaagttttgtaatttccatgatgtaatatgttaaaatttgcattatgccagaattataacctgccttgtaaaatattcagttgaaaagaagt

SEQ ID NO: 168389 - DNA, 605 bp, Homo sapiens
ctggctctttgtctactatggtttagcaatgagacagttttgcttgatagcatctcagatactctccataatgtttggggtctgacacctgctcctaggctgggtatcgtgttcttggccccccacccacttgaacctagcctgatccaagcaatggacatatgcccttgagtaacctggtgggggasagtttatactgcatacattttgagaatttatatttttgtccttttatatttattagtttctaacttctcaacttaaatgttggactattaatattaagacttctaatacagtcatttgaggacatacatttctttgtcagtactgacttggtaatatttcccaagttttgacaataatattgtaattattcagtttgaaacacttactaattacagttatttagaatttggctcatggcttattttaaagtttttaaattataaacataaaaattagttactttttgtttttcatttcaaaattaattatgctgtggccagataaaaagttttgtaatttccatgatgtaatatgttaaaatttgcattatgccagaattataacctgccttgtaaaatattcagttgaaaagaagt

SEQ ID NO: 168390 - DNA, 459 bp, Homo sapiens
ttctcttgttgccacaatcttgaaagactgtgttgagataaagccttcatcatttgaatttgtaggtgattacagtaattaaagcatgtttgctgacccatgctggaaatgggcatgaacaaaaaataagtctttgttgtgtggaatttggaagattattctcttgcataaaacactaggtcatcatttgttatataagagctttaatgcaaataccttatctggtcatctttttcagaaaccaractttctgtgatacttctttgggaaccacaaataatactcttcaaagcaagcaattctaagcattccatatacactagctataaaaaaaatagtaacgcagttgcctaagatattgtaatgaaacagttatataataggattttttaaattgttaattttgacatttattcttgttcagcatttaattcactgatttatgacactaaaagcatg

SEQ ID NO: 168391 - DNA, 573 bp, Homo sapiens
caaaagattaactatttcattggcacccaaccaactactaaatagctccctgtggctttgtttcaaatatgaatacattatctcctttcacacagccctagtcttcttttgttctatgttcactaaaatatkcaaaccagcaaaaatacataagtcatcaaaaatacactcaaaggaccaggatattaaatagtttttaagtgtaagcctcagtagaataaatgcatttctccgcacaacaagctgctgtgtcattaacttaataatttgctgcatttaaaactcagcttaacatttttttctttctccgtcctcctcttgctattttctctcatttggcaaatgccaatataacattaaaatcagtttggaacggtaactgaaaatactagcacactaaattctttatttcctgcaggaaagcatgcagtgaaatgcaaacagtatttgcacttcacgtaatcaaatgattgctttgctctataggcgggcattaagtagctattgtgtctgacagtgggcatgggtatatattcttggtgcacttaatttacgtttttttgagacagagtc

SEQ ID NO: 168392 - DNA, 639 bp, Homo sapiens
aatattttcttgtttgcttatttgcctttgcttatttacatttaatgaattaaggtttcacctcacttcaccatatccagacacctctccacttatttttctaacagtttatatgtcatgcaatatagcatktttatgttaataatgtatctttcatataatgacattaagtgttatgccaagaaaagtcttggtattatgtgtgtgtgggtgtgtgtgtttaatgttgtctaatgtacatctatgccattaaagtcagcgatatattttgagaatcaattatgctcagcaactgagtatatttgaaggaagcaatgtactgtaaatattgaggttttatgtgtaagatatctataatacctttcaggcagttcagggttaatgtgtgcctgggtccctcagagtaagtcacatgtattaacacattggcctctggcacagttttttgaacatcacccaatagttggattactatggctcattgtcgtctatggcacaaaataagattagactatgattagaacaaatcacactcaaatgaatacaagctgtcgaaataatgttttcaagatcaaatgcaacaactatgaccaaggacaataggtcttcaatggtttccatattttcattaaattatat

SEQ ID NO: 168393 - DNA, 561 bp, Homo sapiens
tgcagttccaacataacaggaatgaaacagcatgaatatttaagtggatggttcttgcttctgaatcagttctatatccatacacatatctcttttatttaatcttgaatccatttgctaatagcacccctctataactgctatatctctaattatcacaaaatattatccagttgtagcaattaatagatatgtaatgacaaacttttatgatgtaaagcaaagcaatttttacaaataaaactatatttttagaaaattcatatatgctaaaatgtytcctttttgggttcatcaaaacaaatatttaaaaaaaacctacaaattaagtacacagaatcaaaattcatgtttctaaagctcatatttcaaatgtattatttttgcataatttaattagaaatattggaaatatacatttgcatttaaagatgattaatttctcattaaaataagaatacctcagtcctcaaaattgtaatttacttttctctttccctctttctcattctctctctctctatatatatgtgtatgtatgtataactagatagagataaa

SEQ ID NO: 168394 - DNA, 561 bp, Homo sapiens
tgcagttccaacataacaggaatgaaacagcatgaatatttaagtggatggttcttgcttctgaatcagttctatatccatacacatatctcttttatttaatcttgaatccatttgctaatagcacccctctataactgctatatctctaattatcacaaaatattatccagttgtagcaattaatagatatgtaatgacaaacttttatgatgtaaagcaaagcaatttttacaaataaaactatatttttagaaaattcatatatgctaaaatgtctcctttttgggttcatcaaaacaaatatttaaaaaaaacctrcaaattaagtacacagaatcaaaattcatgtttctaaagctcatatttcaaatgtattatttttgcataatttaattagaaatattggaaatatacatttgcatttaaagatgattaatttctcattaaaataagaatacctcagtcctcaaaattgtaatttacttttctctttccctctttctcattctctctctctctatatatatgtgtatgtatgtataactagatagagataaa

SEQ ID NO: 168395 - DNA, 482 bp, Homo sapiens
caaaagaggttattctgcctactgtactgtacaaagtatgaatctctctaggcttgttttttcttctattaaaggaccattataagaagcacttaccacatagggttttgatgaggaaaaaaaaaaagacatgtgaaaataacttaggrccaaagctggaacaattttggcacaattaccagcaccctggataatttttgtagttttagtagagacgggggtttcaccatgttggccaggctggtctcaaactcccggcctcaagtgatctgcctaccttggcctcccaaagttctgggattacaggcatgagctaccgtgcctggccagtaatgtgtgtttttaacatcatgatctataggaaatcagactattcatatgtctatgtcttcagtgttctgtgagagaaaataaactttatataatttgagctactgtattatggggatataactagtattacttacccaccttcttctatc

SEQ ID NO: 168396 - DNA, 489 bp, Homo sapiens
ttggcaggacaaaagaggttattctgcctactgtactgtacaaagtatgaatctctctaggcttgttttttcttctattaaaggaccattataagaagcacttaccacatagggttttgatgaggaaaaaaaaaaagacatgtgaaaataacttaggaccaaagctggaacaattttggcacaattaccagcaccctggataatttttgtagttttagtagagacgggggtttcaccatgttggccaggctggtctcaaactcycggcctcaagtgatctgcctaccttggcctcccaaagttctgggattacaggcatgagctaccgtgcctggccagtaatgtgtgtttttaacatcatgatctataggaaatcagactattcatatgtctatgtcttcagtgttctgtgagagaaaataaactttatataatttgagctactgtattatggggatataactagtattacttacccaccttcttcta

SEQ ID NO: 168397 - DNA, 489 bp, Homo sapiens
ttggcaggacaaaagaggttattctgcctactgtactgtacaaagtatgaatctctctaggcttgttttttcttctattaaaggaccattataagaagcacttaccacatagggttttgatgaggaaaaaaaaaaagacatgtgaaaataacttaggaccaaagctggaacaattttggcacaattaccagcaccctggataatttttgtagttttagtagagacgggggtttcaccatgttggccaggctggtctcaaactccyggcctcaagtgatctgcctaccttggcctcccaaagttctgggattacaggcatgagctaccgtgcctggccagtaatgtgtgtttttaacatcatgatctataggaaatcagactattcatatgtctatgtcttcagtgttctgtgagagaaaataaactttatataatttgagctactgtattatggggatataactagtattacttacccaccttcttcta

SEQ ID NO: 168398 - DNA, 482 bp, Homo sapiens
caaaagaggttattctgcctactgtactgtacaaagtatgaatctctctaggcttgttttttcttctattaaaggaccattataagaagcacttaccacatagggttttgatgaggaaaaaaaaaaagacatgtgaaaataacttaggaccaaagctggaacaattttggcacaattaccagcaccctggataatttttgtagttttagtagagacgggggtttcaccatgttggccaggctggtctcaaactcccggcctcaagtgatctgcctaccttggcctcccaaagttctgggattacaggcatgagctaccgtgcctggccagtaatgtgtgtttttaacatcatgatctataggaaatcagactattcatatgtctatgtcttcagtgttmtgtgagagaaaataaactttatataatttgagctactgtattatggggatataactagtattacttacccaccttcttctatc

SEQ ID NO: 168399 - DNA, 561 bp, Homo sapiens
tgcagttccaacataacaggaatgaaacagcatgaatatttaagtggatggttcttgcttctgaatcagttctatatccatacacatatctcttttatttaatcttgaatccatttgctaatagcacccctctataactgctatatctctaattatcacaaaatattatccagttgtagcaattaatagatatgtaatgacaaacttttatgatgtaaagcaaagcaatttttacaaataaaactatatttttagaaaattcatatatgctaaaatgtctcctttttgggttcatcaaaacaaatatttaaaaaaaacctacaaattaagtacacagaatcaaaattcatgtttctaaagctcatatttcaaatgtattatttttgcataatttaattagaaatattggaaatatacatttgcatttaaagatgattaatttctcattaaaataagaatacctcagtcctcaaaattgtaatttacttttctctttccctctttctcattctctctctctmtatatatatgtgtatgtatgtataactagatagagataaa

SEQ ID NO: 168400 - DNA, 545 bp, Homo sapiens
agatgtaatatcattcgcattttcacttatgaattgtgaaatatgtcagcaagataattaaaataccagttggttcttattcctcttttaacaagactttccacagtaaaaattataaaatgagcatatagttacyaaaacgttagaaataaaaaaaagttctttaagtataaatttaagtaaatttaaaaatacttctataaatgtattttaagtttattgaataaattggtaaacagctgtgtctatattaaaacacagatgaaaaaaattggaatcaatgctcttcacatgttcctttgtaataactgcagccactttccttatatcccattcatttagttaatgtcctcatttttcagctttgctaagtttcagtaattcacattaacaaatacttattgcaactaggatgtggtaagataacagtgctggctgctacagcattaaggataaacaaggcagatgtgtatcctgttctaatggaatttacagtttgttaggagaagaaagatacaataaatattttcacaaaagttgttgaa

SEQ ID NO: 168401 - DNA, 563 bp, Homo sapiens
tttgaatttcagataaacatcaaatcattttttagtataagtataggatatttacaggggatatacttatactgaaagcatatcttgagtaatcaagtaaattcaaaattagtaagrcatcatatacttgatctggaaaccctaacaatttgtcaacatttgtttggtacataaggacagatctgacttacttatgctcacttagagaaaagacagactgtcatgaattctcatatcacaggctctagaaaccatagaaacaaaaaagaaggatagacataaaaaggacaaaaggaacacaacagagacacatattaatatgtatatgtaaacttattgaataaatgtttgtttttcattgctattttaaggggctgttcaaaagggtacaatgttcaacactgcttgattataaaatcctacaaaggatgtttcagataatttaaactcactacaatgttacaagacatagggaaaacctatactgttggctactgcaattgtcagaataaaactaagaaaattcagggtccaaaagtagtagaaaccattcatatgataat

SEQ ID NO: 168402 - DNA, 396 bp, Homo sapiens
aaacattaaggtgaattgggtattaaaaaactgaatgtcattcttctgaaattttagttttagagtgtgcttaaaaccacagtcttatgctttaaataggatcttgtatttcatcataggtatccttgtttaatgctcaataaatttggaagaatgaattctgaatgaactaacacctagggaagccttgctgttattgtcagaatcatttacttgtctttgatattctgctaaatgacgagttaatgggtgcagcacaccagcatggcacatgtatacrtatgtaactaacctgcacattgtgcacttgtaccctaaaacttaaaatataataataataaaataaaaaataaaaaacaaaatcagtggcataaccaaattgtataaaaatcttaa

SEQ ID NO: 168403 - DNA, 542 bp, Homo sapiens
  misc_feature (1)...(542): n = A,T,C or G
nnnnnnnnnnttactataaatgactgtgttttgtcagtggcaaagcatatgccaatatgttaccaatctcatcactttgattaattttaatattgtgatttatttattcatttttatttctatttatttatttttttgataytgagtctcactgtgtcacccaggctggaatgcagtggcacaatctcggctcactgcatcctccgcctcccgggttcatgccattagcctgcctcagcctcccgagtagctgggactacaggcacccactaccacaccaggctaattttttgtattttttagtagagacatggtttcaccgtgttagccaggatggacttgatctcctgatcttgtgctccacacgcctcagcctcccaaagtgctgggattacatgcatgagccaccgcgcctggcctgttttagaattttttaacttttattttataattggagatacatgtgaagggttattacataggtaaactcatgtcacaggggatttttgtacaaattctttcatcacccaggtattaagccc

SEQ ID NO: 168404 - DNA, 542 bp, Homo sapiens
  misc_feature (1)...(542): n = A,T,C or G
nnnnnnnnnnttactataaatgactgtgttttgtcagtggcaaagcatatgccaatatgttaccaatctcatcactttgattaattttaatattgtgatttatttattcatttttatttctatttatttatttttttgatactgagtctcactgtgtcacccaggctggaatgcagtggcacaatctcggctcactgcatcctccgcctcccgggttcatgccattagcctgcctcagcctcccgagtagctgggactacaggcacccwctaccacaccaggctaattttttgtattttttagtagagacatggtttcaccgtgttagccaggatggacttgatctcctgatcttgtgctccacacgcctcagcctcccaaagtgctgggattacatgcatgagccaccgcgcctggcctgttttagaattttttaacttttattttataattggagatacatgtgaagggttattacataggtaaactcatgtcacaggggatttttgtacaaattctttcatcacccaggtattaagccc

SEQ ID NO: 168405 - DNA, 492 bp, Homo sapiens
tatacacttgttaaatggtcaggtcaagatttggagtcagtggtctgactcaagagttctcactgtcaaccattaccggtgctgacagttatcaaaatttcaaaagtaaagcatcaaattcgcaaaaaaacctttggatcccagagtacctacaactctgcacacattgactgaaaaaatgagaattgagaagtaaacatgtttggaatcatttttcctctttagaagacagagtcatttctaaagaatttaaaacatgttatgatactgaactgaaggtaattgaaacrtttcattactgatctgcaaaataaaaaacatacaatatattgctctgtctccaaaaaattaatgctcattaataaattagctgttcaatttagcctttttaaaatgaattattgtctctccaacaaaaactgaatgcaaaaatatgacaatttaactgcagagatgctttatttaaattggtgattcagtggtgtgatttta

SEQ ID NO: 168406 - DNA, 623 bp, Homo sapiens
agattttgaatattatagtgttcaggcaacttactatttaaaacctgccaagaaaacaagcattttttaaacgtctatggtttcaatctttcattttataatctgagggaaacaattttaataagaattgctgagtacattttaacattctctttaggcataaagaaatgaagagatacctgaaacaacactttaatatcttatgtttttccaaatatawtcagaaagcaaaatatttttaaagtctaagttgtatttgacatgggtgagatttacagtcatatgaagagaataattatagaggaatcactacataaaaataatgcagctggagagagaaacaaatataatggaagtaagacattctatggaatttcgagcatgacatcatttgggttgagtttttatcaagcaaaatattttcaagtttatattactgcagaataaatacccatacttcatattttatgatttatgtaggtttaaaaaaacttatatgcacataaaatcatatatatacacacataaatacatacagatatgcataaaatatgtgtctattcataatattttattattctgatgttccattttattatataccaagccctattacatttcct

SEQ ID NO: 168407 - DNA, 627 bp, Homo sapiens
acatatttttgccagtgtatgatccataatgttgaatggcaaattggtctgagtgcttctttttttctgtcaagaagcaaaaacattttaaaaataatattgcagggataatgtagagggaggggatttttattactacttctactttcactatcatcatgagatttctatcaaagtttagtcattaagggaaattaaaccatctcaattcttatccatgttgccaagtgagtttttcaactatacatataattttgttcttcatgttcttcctccatttctcttttcctttcaaattcattgctggagagaaagaaagagagaaaaagggaattgatattgcacatggatttatttgtccatttaagtacatctactttatgatagccagaggaatcatttatgcrtcaccaaatgaagatctcaaggagttgatctgtacttgttgaagcttaagtcattcaagaaatattattttaatgaacacagcattcatacttgtttgggttaacatatcatttttcagtccattaagatcaatcctagtaaaaagatgcaagatttagcaaatacaagtagagaatatctagttaaatttaaatttcaaatacacaaaaatacaacttt

SEQ ID NO: 168408 - DNA, 621 bp, Homo sapiens
atagagtagatggagtaaaaaaatgaaagaatactgaaatgcctccagaaaagtcactaaattgtttcagtatgtttctttgacaagccataggccatagaccacattttattacatgtgtcaattactaataatgttcagctgtagacactatatctggcacagataaaaaatgcgcaatattatttttcttaatgcatattgattcagtaaaccagatgttttattttggtaattattttggaaaaatatgaatttcttttttagtaaactacctaactataagaaatttaaaatattcagaaatgaatatttacaaagtcctgtcacttgagttgaaatgaacacttattttcctcytcccgatagtgtttcatttatatctttatatttttcttttgtagcttcattgatttttctcaactcacccttcatatcatccattctcttgtcaggtcactttatttactatcttttaatctaatcataaatccagtaaacaaaagttccaagtgatactcctttcaaggtactttagacataggataaatgcagttgatgatagattcaagaaggtataactacaaagaactgttgcaagtctataattgcagatatagc

SEQ ID NO: 168409 - DNA, 555 bp, Homo sapiens
aaccgctacaaaaacataccaaagtacacagaccaatgatgctataaagcaaccacataaacaaatctgcaaaataaccaggtaacaccatgattacaggattaaattcacacatatcaatactaagctgaattataaatgggctaaatgtcacaattaaaaaacacagtgtggcaagctggataaggaaccaagacccatttgtatgctgtcttcaagagatccatctcaaatgcaatgacacctgtrggctcacaataaagggatggagaaaaatctacaaagcaaaaaaaacaacaaaaaagcaggaattgcaaacctactttctgagagaacagactttaaaccaacaaagataataaaaaagacaaagaagagcattacataatgctaaagagttcaatttaacaagaagatctaactgtcacatatataagcacccaacacagaatcacccagatgcataaaataagtttttagagaactccaaagagacttagactcccacacaataatagtgggaaactgtaaccccactaacaatattagacagat

SEQ ID NO: 168410 - DNA, 578 bp, Homo sapiens
ggcacaatactaacttttacatggctaactaatgtaagcctcatagcaccttactccctaagttcccatttcttcygtcacctttttttaatgataaggaatgtttatacttactaggtaacttgtccggtgttcaaataactagtaagggagaaaaccaagaacatagatccttgtaatttgaaaattcactccaaaattatcaaattctctaaagtgcgaagcaatattgccagtgtgggtactgactcagctttataattttgccctatttttataataaacatcaatgaatattttaacatctgctattggctgtcacatgtacatatgtgtatatgcatgtatttatgttattttatacgataaccaagcattatgataatcattattcagggccattaatctcatcttacactgaaggaaactgaggcacaaattatgagatctcctctcaagatttcataacttatacggggcagagtcaagctcaaaacacaggtctgtttgaaatctaggatccatgccatggcttttcaccactttatagtagactagttaaccacacagtgactaat

SEQ ID NO: 168411 - DNA, 578 bp, Homo sapiens
ggcacaatactaacttttacatggctaactaatgtaagcctcatagcaccttactccctaagttcccatttcttctgtcacctttttttaatgataaggaatgtttatacttactaggtaacttgtccggtgttcaaataactagtaagggagaaaaccaagaacatagatccttgtaatytgaaaattcactccaaaattatcaaattctctaaagtgcgaagcaatattgccagtgtgggtactgactcagctttataattttgccctatttttataataaacatcaatgaatattttaacatctgctattggctgtcacatgtacatatgtgtatatgcatgtatttatgttattttatacgataaccaagcattatgataatcattattcagggccattaatctcatcttacactgaaggaaactgaggcacaaattatgagatctcctctcaagatttcataacttatacggggcagagtcaagctcaaaacacaggtctgtttgaaatctaggatccatgccatggcttttcaccactttatagtagactagttaaccacacagtgactaat

SEQ ID NO: 168412 - DNA, 578 bp, Homo sapiens
ggcacaatactaacttttacatggctaactaatgtaagcctcatagcaccttactccctaagttcccatttcttctgtcacctttttttaatgataaggaatgtttatacttactaggtaacttgtccggtgttcaaataactagtaagggagaaaaccaagaacatagatccttgtaatttgaaaattcactccaaaattatcaaattctctaaagtgcgaagcaatattgccagtgtgggtactgactcagctttataattttgccctatttttataataaacatcaatgaatattttaacatctgctattggctgtcacrtgtacatatgtgtatatgcatgtatttatgttattttatacgataaccaagcattatgataatcattattcagggccattaatctcatcttacactgaaggaaactgaggcacaaattatgagatctcctctcaagatttcataacttatacggggcagagtcaagctcaaaacacaggtctgtttgaaatctaggatccatgccatggcttttcaccactttatagtagactagttaaccacacagtgactaat

SEQ ID NO: 168413 - DNA, 578 bp, Homo sapiens
ggcacaatactaacttttacatggctaactaatgtaagcctcatagcaccttactccctaagttcccatttcttctgtcacctttttttaatgataaggaatgtttatacttactaggtaacttgtccggtgttcaaataactagtaagggagaaaaccaagaacatagatccttgtaatttgaaaattcactccaaaattatcaaattctctaaagtgcgaagcaatattgccagtgtgggtactgactcagctttataattttgccctatttttataataaacatcaatgaatattttaacatctgctattggctgtcacatgtacatatgtgtatatgcatgtatttatgttattttatacgataascaagcattatgataatcattattcagggccattaatctcatcttacactgaaggaaactgaggcacaaattatgagatctcctctcaagatttcataacttatacggggcagagtcaagctcaaaacacaggtctgtttgaaatctaggatccatgccatggcttttcaccactttatagtagactagttaaccacacagtgactaat

SEQ ID NO: 168414 - DNA, 454 bp, Homo sapiens
tgggctctgttgtttcaaatgcattcatttccttccactgagatctgtatttcatgctggaggctcatttttcctggaatgccctgaagtacgtgaattttcaagaagcccctagaaatctttcaagaattttatttccttttaacttcccggtgcttcctgttttcaagcagttttcaagcaggaatctcttaagtgagaaaaatgaartgtgtttgtttagaaaacattctccctatacaactttccttaagcaggatgagagaaatcctgacctgtgcactccacagggagcttcacagttcctgcttactgagcagatgatgttttatgagacaaaaataataattcttttttgccttcccttcttctttctctcttcctctggaaaacagaatcctatcaacatatgctccctactttttctgatgtctcatagagagttcctagcaac

SEQ ID NO: 168415 - DNA, 545 bp, Homo sapiens
agaatgcatgtctaggggtaagcctctaaaatggccgctctggggacgtctgtcttttatggttgtagataagggatgaaataagccctggtatcccgtagcgctcccaggcttattaggatgaggaaactcctgcctaataaattttggtcagaccagttgtctgctctcaaaccctgcctcctgataaggtgttatcaatgacaatgtgtgccgaaacttcattagcaattttaatttcgcccaggtcctgtgatctcgccctgcctccatttgccttgtgatattttattaccttgtgaarcatgtgatctctgtgatccacaccccattcgtacactccctccccttttaaaaatcactaataaaaacttgctggttttgaggcttggggggcatcacggaacctgctgacatgtgatgtctcccccggacgcccagctttaaaatttctctcttttgtactctttccctttatttctcagactggacgacacttagggaaaatagaaaaggacccacgtgaaatatcaggggctgaattc

SEQ ID NO: 168416 - DNA, 550 bp, Homo sapiens
agtatggacttgattatgtggttaaaattacatcaattattttactaattattatttagaatataatatttatttaaatcttgttttcttcctttcaaatatttgtttcctttcacacaackgctgagcattgaaaaattttgtaatctttgtttataaataaaaatggtgaagtcataagagcttattgccttacattcttctaaaattaattccttgcagcatactccaacttacaaaacatgaagaagatggtacttcacccattttatcctaaagtttactgtaagaataaaattccagattgaggtcaactgatttttcttcttagaagcagaccaaattggttaatctctctttaagtcattggccttaagacaaatgctgcagcgtatatattttgaatgacaatgtaaatattttatttttagtcagtaataactgtggctgccaggatttcaatgatgtctaaattgtttgacataccaggagaaatatatccatcctgatggcacagagattatccaatcaactgtcagggggtaaagat

SEQ ID NO: 168417 - DNA, 399 bp, Homo sapiens
ccttctgccttgacatccaggcattttcatacgtcttctgaaatctaggcagaagtttccaaacctcaattcttgtcttctgtgcacccgcaggcccaacaccatgtggaagctgccaaggcttggggcttgcaccctctgaagccatgggctgaactgtaccttggctccttttagtcatggctggaatggctggaatgcagggcaccaagtgatgcacacagtagggggggtcctggacccaacccaggaaaccatttttccctcctaggtctctgggcctgtgatgggaagggctgctgcgaagggctctgacatgccctggrgacatttttccgattgtcttggtgattagcatttggctcctcattgcttatgcaaatttctgcagctggattg

SEQ ID NO: 168418 - DNA, 483 bp, Homo sapiens
agaggtttacccttagtgacccttagaagggaatatcttgatgtgggaaagctgtttatgamttgtaatattgtgcagtgaaaatagtattcccctctgtaaaaatgcatacattgtatgatctttttataaagtgatacataggaatattattcataggaaaaatttctagaataatagatcccagtggattttaaacttcattctgaagaactgtgaggtgccaagaaggtgcttcgggactcaacttggcgggtgtttgcagaccaaactgttgcgttttcaggcatccacctcctaattgtatgttttacatattgataacctacataagattcatttaaagaagttttgcaagtttgaaaaatttgcaaatcacttacatatactgagtgtaaaagtaattatctctagatgtttttctctcttttttttttttatttaatcactgaagtcccaactgacctattaacaggaagccca

SEQ ID NO: 168419 - DNA, 474 bp, Homo sapiens
tcacataatgtttttgaagttcattcaaaacatgtttgtagcatgttatcagttttattttatggctgaataagattccattgtatgaatatgccatgtttgtttatccattcatctgttgaagaatatttgttttttttccaccttttggcttttgtgaatagtgctgctattaacattcctgtataagtatttgtttgaatatctgatttcaattcttttggatatatacctaggagcagaattgctgagtcatatcgtaattctatgtttaartaattgaagaaccaccagagtgttatccatagtggccgtaccattttacattcccagcagcaacgtatgatgaatccaatttctctacattcttgccaacacttatttttcatttaaaaaaattatagccattctcatgggtgtgaaatgctatctcattgtggctttaatttgcatttctctataaagactaataat

SEQ ID NO: 168420 - DNA, 428 bp, Homo sapiens
gacagcacgtaagccagctgaagccaagatggacaaggacctgcccaaggccaccagtgggtcygcttgctgtggtaggggttagtattctcaccattcacagagctccaactctgtgccagggcctcatttcactcaagacggctgcgttgcagggtgatgaggctacaggcctgcctgaccctaagcctgtgcccttaactcctttatgatgcaccttctctgtgccaagcacaggccttgccctggaggagctcccatcctggggggcaagttctcagatgaatgattcccaccaaggcaggggtgtgaaataggtgccctcagagaggcctggcaaagctccctgagggagcagggcttgggccctctcctccagggatccctgcaatgtggggtcaggcccaccaggcaggctgcctgagcac

SEQ ID NO: 168421 - DNA, 546 bp, Homo sapiens
ggaaaggggaggttcttagagagggcwgctgatggaaagagtaagggagggaagggagagagtacaaagatttccatgtgatgaagaaagctcctgaaggcagcttatgtgtggtacatttgaattcctaaggctcttgggcctctacccaatgaatcctgattccagcagcctgaaacacttccaactcattttccctttctgatctcacattctcccatgtttaccacggatggcactgcccaagatagaaatcctgagtgccatccaggacacttcccttgatctctcttccccagcatccagcagtcctggtcagttcaccccctaaacacctctcaatccatgtcttgcccctatcctcagggttccagtttatcctctcatctgtctgcatttcttcccaaggccctggattaccataagacgtatccttgggaggtcaggtagttgtcaggggcaggcccccagaggtcagctcccctctgagcagcaagactgcttgtctggatatctcagtccttaggcaaggggctgtaggcagat

SEQ ID NO: 168422 - DNA, 546 bp, Homo sapiens
ggaaaggggaggttcttagagagggctgctgatggaaagagtaagggagggaagggagagagtacaaagatttccatgtgatgaagaaagctcctgaaggcagcttatgtgtggtacatttgaattcctaaggctcttgggcctctacccaatgaatcctgattccagcagcctgaaacasttccaactcattttccctttctgatctcacattctcccatgtttaccacggatggcactgcccaagatagaaatcctgagtgccatccaggacacttcccttgatctctcttccccagcatccagcagtcctggtcagttcaccccctaaacacctctcaatccatgtcttgcccctatcctcagggttccagtttatcctctcatctgtctgcatttcttcccaaggccctggattaccataagacgtatccttgggaggtcaggtagttgtcaggggcaggcccccagaggtcagctcccctctgagcagcaagactgcttgtctggatatctcagtccttaggcaaggggctgtaggcagat

SEQ ID NO: 168423 - DNA, 534 bp, Homo sapiens
tggctgaaaatgagaaggacagtgttccacagtctgcaactgtagctctttttctctctgtcacaaggcatccctgtttatgggcagggcttcccttctctagcccttcattttcacctctgtagtaataatagacattattataatagaagttgtaacttattgcacatttatcaccatgatgaatactttacatgttaatatgarttttttgattcctgaccccatccttgtgagaaggcaatattcttattcccatttgcaagtgagggaagtgaggcccacagacattggggaaaccttcccaggctgacagcttggagcaatgctgggaagagggagttctggttccgaacttgcacactgacctatcacactcgggtctcagactagatgacaagtggcacgatcacctctccctctccctcctgaccctttcctccatgtctatttctgcagtgtcatgtctttccttctttgtttctccttttctttgccttcatttttattctcgtcttctccattcttctcctt

SEQ ID NO: 168424 - DNA, 615 bp, Homo sapiens
tttggtttcatgtagaagtcaaaattcgtctacaaatgaaagtagttcccaatccagttgtgaaataaaagcagggcctgtcacagtcattagtattaaattgtgttgttcttcctttatctttgtttaaatttccactaagtatcatccattcttatatcartgtattcagatgatgagacttcactgacacaaggaggaaaaaaattttaaacatgttgtcaataataagtcagagaatcttgagatgtaatcaagtatttgatatgaaaataattgtgctgtccttcataaatgtaactatcaagcactttcatgaggagttacctgggagttgttttcccacctgtgccaaatagaattgtgctaaataacttctttttctgccccatatcccgaagtaggcattttcagaagaacacgagagtaagagtaaagtccatattccagaacagagtaaaacctactggcccgcagagggatttacccaccacatcagtctcattaacacacagctctcgccaactgagctaaataattagggtcagctatagatagaattgccattaattgttttcagatttcaatctctgggcctttcattccagaatcact

SEQ ID NO: 168425 - DNA, 615 bp, Homo sapiens
tttggtttcatgtagaagtcaaaattcgtctacaaatgaaagtagttcccaatccagttgtgaaataaaagcagggcctgtcacagtcattagtattaaattgtgttgttcttcctttatctttgtttaaatttccactaagtatcatccattcttatatcagtgtattcagatgatgagacttcactgacacaaggaggaaaaaaattttaaacatgttgtcaataataagtcagagaatcttgagatgtaatcaagtatttgatatgaaaataattgtgctgtccttcataaatgtaactatcaagcactttcatgaggagttacctgggagttgttttcccacctgtgccaaatagaattgtgctaaataacttctttttctgccccatatcccgaagtaggcattttcagaagaacackagagtaagagtaaagtccatattccagaacagagtaaaacctactggcccgcagagggatttacccaccacatcagtctcattaacacacagctctcgccaactgagctaaataattagggtcagctatagatagaattgccattaattgttttcagatttcaatctctgggcctttcattccagaatcact

SEQ ID NO: 168426 - DNA, 568 bp, Homo sapiens
caaatcacatgcctagaattgtttttaatagcttattcctaatagattaacatggaaagcaacccaactattcaacagtagaattggcaaaaattaggatatggttttagaatggaatactatatagcaacaaaaatgatcgaaatacaaacacaatgttgaatgaaagaagccagacacaaaagaatgcatactgtatacttatatttttatgaagtgcaaaagcaggtaaaaatactatctggtgatatctcataattgacttgccaagtacaggactgagagacttgattgctgaaaatgttccatctctttattgggatggtgtaaatatgagggtatgcmtatgtttaaaaaaatctgcaaatgatacacttaaaatgtatgtactttttgtgtgtaagttatttgtccatttaaaaagttaaagaaaaaggaatttctcaaatggaaaaattttgtgggagtgaggttttaaggaatttttagtgttttttaacgtatgaatgtgagtaatataaaaacattttactaagtcaaagtcaatgtaataaatacaccaggatct

SEQ ID NO: 168427 - DNA, 487 bp, Homo sapiens
cctgcagtaagtgtgagtttgcctccagctgacctcatacgtcacgaaacatgttttagtacatgctgcttttttctttgggagcaaatataagcacatggtactagcccttccttttaaaaakcttattcaaatggaatatgagaagtttagggagtgcgaaaacaagtgtatttttttcaactatattaataaatatacattgaacatatatcagacaaaagaatacatttaggtttatactctgggaaaagtttttagtttgtttttattataagttgttccactgatactcaagttctttttttaataactatctcaactgatggaaactcaattacttaaaaaatgtttcaggttttattttccttattgtagtgaaacaaataattgggcatgggaatgaccacttacagttaaagaaataattattaaaatggaactaacagtatttaaacagctaaacaaaaaaggcttaaaggaaaaa

SEQ ID NO: 168428 - DNA, 555 bp, Homo sapiens
tcggttcttgtgctgaatactgatggagtaggtagtttatttcattaatgccccccatcaatgtgcttatggaataacatgtcaaagtaaaattaagaaggaaacttaagtcagtaatatcttctgtcaaaacctgaacacattaattacatttactttcctattgcttgaacctgacttactttcctattccataaactttttcaaaatgtaaaaaccaagaccattttgtttttgttgttgctgacattgtagttattaggagtttagaaaatattttagatacggggcttctttgccaaaacattattctgattctaagtgcccgtaagttggaagacaaagtaagactgtttctctaagacattattactgatgcatgcagattttatagtttttggggggaacaaaattatttacaaaaaatagtttaaggcatttttgtaaatcttaaacatctctaatttagtctaacctgckaatagcagaaagggggcaagctggcaaacatgctgacttgaattcacttccactactagagctttgtcctggcct

SEQ ID NO: 168429 - DNA, 523 bp, Homo sapiens
tctactgaagtcatgatcctagtactataagacccagcaatttcttttctaggtaatagactgtaaagactcatgctagactgtaaagactcatgcagctgtggacaagtaggcatgtgcaagagcattattaacagaagtctttgtaacagcaaaagcatggatccagatatccatctacagtggaatagacctgtaccctatggtctattcacacagcagattagctacacagcacaataagaaargaatgcagctaaatgtgtcaacatggatggatctcagacacataatagggagtggaaaaataagtaatgggaggttactatgtttatgtatatgctatgctatttcataataaaactttttttattgtgattacttctgacagagaggcaaggggatatgaccagcagggagaagcacaaattattttaaaagtgaaagataatgtttaattttttaagttgggtacgaggtacatgtagtttatattacattatgcttttataatttacatata

SEQ ID NO: 168430 - DNA, 523 bp, Homo sapiens
tctactgaagtcatgatcctagtactataagacccagcaatttcttttctaggtaatagactgtaaagactcatgctagactgtaaagactcatgcagctgtggacaagtaggcatgtgcaagagcattattaacagaagtctttgtaacagcaaaagcatggatccagatatccatctacagtggaatagacctgtaccctatggtctattcacacagcagattagctacacagcacaataagaaaggaatgcagctaaatgtgtcaacatggatggatctcagacacataatagggagtggaaaaataagtaatgggaggttactatgtwtatgtatatgctatgctatttcataataaaactttttttattgtgattacttctgacagagaggcaaggggatatgaccagcagggagaagcacaaattattttaaaagtgaaagataatgtttaattttttaagttgggtacgaggtacatgtagtttatattacattatgcttttataatttacatata

SEQ ID NO: 168431 - DNA, 615 bp, Homo sapiens
aacaatttttaaacttttcaataagtttaatcctatgtttagtttattcataatgttattcatatctgctggccatgacccataaacccatgacctgggatataacttccctttataatgagctgctgaacccatgataattataaacacatttttaaaaacacatggacatatacacacacctatgtattatatagtcaatcaagtaaagtacaaaattaaactgcgcatttgctatcacaggtaaaaccaatagttaattaaatgctcttttttctttttataaccagcattaacgagttgtgacattttccagcccaggcttaamaagattattggtcttaatagaacttaaactgggaaaaggaacctgtaaaacatgcttaccagtgctcacatacatcagggaactactgacttttatcagatatccatcagaccccacccagtatttctcccagggacaagaataagtttggttctttgttgttcaagatcctataaatgcctatagtggagtcttttcacctttattcagttctttacttcaacctccaggcgagccctattcacatataggtcttcactctggcacacctgggagacagaaacata

SEQ ID NO: 168432 - DNA, 587 bp, Homo sapiens
ctgagtggaagtgatgctcagtgaataatgaggctaatctgactgatgatcaagattgagtcatgcatgcatatgagcacccaacttgaaatgaggtatcactgtacgcattaatttataactacatatgaagaaaaggagmcaagtctcataaacccaagtgctggcctttcaaacacacacatttcattcagagactcaaatttgacaatgatacctgataaaggctcacatcagtcatatcacagcctccatcctgattacaaagtgcatactgtccatttctctgaataggatgccatgttatcaaaagatgataaatgtgcttgcaaacaggtagggctaaaaaaatgcttgcaatatttctttgtggttttgcaacaacaaacatcttgactgaatttcctatctgctgggaagtaaaaagcaaaaggctttaatgatcaggaaagttcaaatgtaaaatataaaaatgaaagaatctgggcattgggacagacattaggtcacatctagtacgaccacaatccagagctggaagttgctccaaaatattcctagcaaccaatcacatagcctgtattaga

SEQ ID NO: 168433 - DNA, 480 bp, Homo sapiens
ccacaatgctatattggaagaggatgggtggacgtatttgaaaattgaacttrcatatttacatcgtcacactctttcctgattgaatagtcccttttggatatatttttttttaactatttgaaacagggataaaattatatgtctcgttcctttcttgtgcttgatctacctcttccttttccctgccatgtacttcaatgaggattacaattgttgataagatttcttctaatcttgcagtaaaggcaaaaatggaaacacaactcttatcaggaaaaggaggaagcatgccagggttttatattgaatctaataagctacacacagacacacagacacacacacacacacatacacttgggtaaagccttcattaaattaccatacaccacagagattctaaataactgtatatgtgactttcataatgctaatgttgaactatcagttgaggtgcccaaaagcatgccagttcca

SEQ ID NO: 168434 - DNA, 550 bp, Homo sapiens
gaactcagttgtcattaaggctcttccaagacatctcatcaaccaggggagatcacaggagtggagactgtaagtcagcatcacaccgggacagactttgtcacaggttattacctattctttcgagggtccatttattttccctccaacatcatttactctctcctaagttgcttacatccctgttccactctcccctgtgaaaaggatctgtaagtttctagattccactgaaagttttccctccctrcaggatacatacatgtgcacatacataggtaaggaatccagttgttctaaaatttttatgtgatgcagggagcagttatatacataatatatctaggtcaaaacttttatcagccaaatagaaccagccaaatatcattcatcataatttcctcatgcacaacaaagaacagaatataatattttgttacttttatgtcattcctaatgtgaaatttatcatcactgattcacatacaaagatcctagaaccacaatattcaaataaggtttagctttttcccccacttctgaatttccc

SEQ ID NO: 168435 - DNA, 537 bp, Homo sapiens
catgttataaatggatttaaagggtgcacgtgaagttttgttacatggatatattgtgtgtaaactctgagcttttagtatgctcatcccctgaatgtaaacattgtactgaggcaagatttttgctccttacttcagttaaaatccgggttcttgtctcacaaccaggaaaaattaagcacgtgaccatactgaaaaggtgagagcagaatttattaaaaggaaagaaarttctcagcaaagaaagagagtgtcctgccaatggtctcccacctcacagattgaataccaggccactatataggagttgaagaggccaggatcctccccactgcataatgtatgaattcccagttgctccccacaactctcgcagtacacaagagggcccctagtctgttgtgggaatgcccagacaaggccctgggcagtttccctcatcctcacaaaagcgtctgatgtaaacacttgtggggtgggtcagagattttctgaggaccctcccttatctgcatcctgcatctatcagtaccaaaa

SEQ ID NO: 168436 - DNA, 616 bp, Homo sapiens
tgctttttgtatcattatcattaattctggtctaatctctgttattttttttcctgttagctttgagtttgattttttcttgtttttctagytccctgagatgcaacacttgaaacttaaatcttttcatctttttcatataggcatttaatgctatatacttttcttttattactgcttttgctgtatctgtaacatattttgatatgttgtttctctgttttcattcctttcaaattatattttgatttttcacatcatttattttttctttcttctttttttttgagacagggtcttgctttgttgcccatgctagagtacagtggcatcatctcagctcactgcaaactccaccccccatcatcgagtgattcttgtgcttcagccttccgagtagctgggattacaggtgtgtgccaccatgcccagctaatttttgtatttttagtagatatggtttcaccatattggccaggttgatctcaaactactgccctcaacttcaagtgatccaccctccttggcctcccaaattgctgggattacaagcatgagccactgcacctggctaattttatgtttttacccaaagaatgttcaggagcaaattgtg

SEQ ID NO: 168437 - DNA, 616 bp, Homo sapiens
tgctttttgtatcattatcattaattctggtctaatctctgttattttttttcctgttagctttgagtttgattttttcttgtttttctagttccctgagatgcaacacttgaaacttaaatcttttcatctttttcatataggcatttaatgctatatacttttcttttattactgcttttgctgtatctgtaacatattttgatatgttgtttctctgttttcattcctttcaaattatattttgatttttcacatcatttattttttctttcttctttttttttgagacagggtcttgctttgttgcccatgctagagtacagtggcatcatctcagctcactgcaaactccaccccccatcatcgagtgattcttgtgcttcagccttccgagtagctgggattacaggtgtgtgccaccatgcccagctaatttttgtatttttagtagatatggtttcaccatattggccaggttgatctcaaactmctgccctcaacttcaagtgatccaccctccttggcctcccaaattgctgggattacaagcatgagccactgcacctggctaattttatgtttttacccaaagaatgttcaggagcaaattgtg

SEQ ID NO: 168438 - DNA, 510 bp, Homo sapiens
aaccctggtttgagtggacaaagatgagcagaactggaccaccaagcttgtccttcaatactccagtgacaaatggaagcacctacattgataggaattgtaaggggagctcttggtkaattgcaccaaggtctctgccaggggaagaaagaggctgcaccagcttcacctcctaagaaggaaggaacatgatcttcactatcatacctttgtccccgggcttgtgacatgtcttttatctacaggctgtatgcaacagaggtccactgaaaatgccaatcctgtggctattacccacatggcctcagagtggaacctttttgctcagttcaaaagagatggctctgtgtcttgttgcactatgctgcaagagcactggcactctgcatagcatgtgggataggccctgtccttcacgtaagcctgggcttgtggatccatcatcagtgggggcacagctactctcaatagatcggaaatgtctgtcacagttgcagttgcaccaacccc

SEQ ID NO: 168439 - DNA, 466 bp, Homo sapiens
aaccatggctatattcatagcagtgggtgggtaagagatgtcccccctccacttttatcttcgtatgtgtgtgttggggtggcatgagtactggagcaacctggccgctagagtagggcaacactcctctgttacagagtgcagcatcatgcccatgtctctacagtgagggtcatggtatttttctgctcacaagtagagagctcttgagcaaaaaaaaattcttttgtcacaagaagcactttcccatgttgcatttaactttctcctaggggcagcatgccatgaaggctagtcttctaggaattctgttgctccccaggatcccaccagtaatctgtggttgtcacagtttctgtaagttctgagaaatgttttcaggagatctagctatttggaaayacaaggtctgagatcccctaggcaggatagtggccccaacaagtgcacaaccaatattgtaccc

SEQ ID NO: 168440 - DNA, 609 bp, Homo sapiens
caagtgcacaaccaatattgtacccattgccttagttctggttttaagtgaaggtgagcaaatcggttgagctgacagcctggtgccctgctctcaatatatccccaaatcattgctaacaatagtgcctgcgcttgcgaggttagaggggctatccaacagtatggcagtccatagtctgcttcagggatgagagggcaaacaaggatctccgcctaccctctccacaggactccaagttccttagagaactttctctgtcaactttttgcttccttcattattctgtgcctcgcttttcctccacgggttctccagttggttccagcactcttccttcagtattccacttgggccatgatagttcctctttaactttggttcttttttctgagaagaactggagtcctacatctctagtcagccatcttgaaaaaatggtattacaattttattaattgcccataaatcttgaacaaatttccagtctcatctatttggatttttaactgctaggattgaagtgttacaaggacttgtgtrtggaatcataaatctttgtttgattaaatcttacgcaattggtgaaagtccttgaactgttttgga

SEQ ID NO: 168441 - DNA, 587 bp, Homo sapiens
atttttgttttcagcttttattttcaattctgggatacatgtggaggtttgttacttgggtatattgcatgatgctgaggattggggcacaaataatcatgtcgctcaggcacttaatatagtactcaacagttagttttttaacccatatgcattcattccctctcctcacttgtagtctccartgtctattgttgctatctttatattcatgagtagccagtgtttagctcccacttagaaatgaaaacatgcagtatttggttttctgtttctgcattaattcatttaggataatggcctccaaccacaccttgttgctgcaaaggacatgattttcttcttttcatggctgtgtagtatttcatggtgtatatgtaccatattttctttatccaatccaccattgatgggcacccaagttgattccatgtctttgttattgtgactagtgccacaatgaacatatgagtccatgtgtcttggtagaatgacttgttttcttttggatatatacctaataatgggattgctgggttgaattgtagctttaagttctttgtggaatctccaaactgttttctaca

SEQ ID NO: 168442 - DNA, 587 bp, Homo sapiens
atttttgttttcagcttttattttcaattctgggatacatgtggaggtttgttacttgggtatattgcatgatgctgaggattggggcacaaataatcatgtcgctcaggcacttaatatagtactcaacagttagttttttaacccatatgcattcattccctctcctcacttgtagtctccaatgtctattgttgctatctttatattyatgagtagccagtgtttagctcccacttagaaatgaaaacatgcagtatttggttttctgtttctgcattaattcatttaggataatggcctccaaccacaccttgttgctgcaaaggacatgattttcttcttttcatggctgtgtagtatttcatggtgtatatgtaccatattttctttatccaatccaccattgatgggcacccaagttgattccatgtctttgttattgtgactagtgccacaatgaacatatgagtccatgtgtcttggtagaatgacttgttttcttttggatatatacctaataatgggattgctgggttgaattgtagctttaagttctttgtggaatctccaaactgttttctaca

SEQ ID NO: 168443 - DNA, 587 bp, Homo sapiens
atttttgttttcagcttttattttcaattctgggatacatgtggaggtttgttacttgggtatattgcatgatgctgaggattggggcacaaataatcatgtcgctcaggcacttaatatagtactcaacagttagttttttaacccatatgcattcattccctctcctcacttgtagtctccaatgtctattgttgctatctttatattcatgagtakccagtgtttagctcccacttagaaatgaaaacatgcagtatttggttttctgtttctgcattaattcatttaggataatggcctccaaccacaccttgttgctgcaaaggacatgattttcttcttttcatggctgtgtagtatttcatggtgtatatgtaccatattttctttatccaatccaccattgatgggcacccaagttgattccatgtctttgttattgtgactagtgccacaatgaacatatgagtccatgtgtcttggtagaatgacttgttttcttttggatatatacctaataatgggattgctgggttgaattgtagctttaagttctttgtggaatctccaaactgttttctaca

SEQ ID NO: 168444 - DNA, 587 bp, Homo sapiens
atttttgttttcagcttttattttcaattctgggatacatgtggaggtttgttacttgggtatattgcatgatgctgaggattggggcacaaataatcatgtcgctcaggcacttaatatagtactcaacagttagttttttaacccatatgcattcattccctctcctcacttgtagtctccaatgtctattgttgctatctttatattcatgagtagccagtgtttagctcccacttagaaatgaaaacatgcagtatttggttttctgtttctgcattaattcatttaggataatggcctccaaccacaccttgttgctgcaaaggacatgattttcttcttttcatggctgtgtagtatttcatggtgtatatgtaccatattttctttatccaatccaccattgatgggcacccaagttgattccatgtctttgttattgtgactagtgccacaatgaacatatgagtccatgtgtcttggtagaatgacttgttttcttttggatatatacctartaatgggattgctgggttgaattgtagctttaagttctttgtggaatctccaaactgttttctaca

SEQ ID NO: 168445 - DNA, 532 bp, Homo sapiens
acttagcttcctaactcattatgtgctttgaatcgttgtaccaccaactygtgtgagttgattctcccacagcagccagagtgaatctcttaaaaacttaaacctgattgtgttatttctttgctcccatcacatctgaaataaaatgcagctattgcctcatacctttattgttggtctaatgcataaagtgaaaaacaaaaaccattattggttttgggtatttgattttgttttatttttgtgtttttagtttgcagagaatttaccatgatgtttacatacatttatttatttatttatttatttatttatttatttatttgagatggagtcttgctccgtctccaggctggaatgcagtggtgcgatctcggctcactgaaacctccatctcccaggttcaaacgattctcctgccttagcctaccgagtagctgggaccacaggcgtgtgccaccatgcctggctgattttttgtattttaagtagaggcagggtttcactgtgttagccaggatgattttgatct

SEQ ID NO: 168446 - DNA, 622 bp, Homo sapiens
cgtaccttagagggcatcatattaaaaaaaaagtccataaaatcacacagagatgttatctgtgtgccaagaattattataaaggaattacttactcctcccaagggaaagagtgaaatgcaagagaatgagtccatttaaagattggcaggttgacttcactctaatggcaaggagaaattaaaatttcctgcttacatttgtagacacattttcagaatgtgtcttacttcaccaagtttgaaaggaccacagtagtagataaagctttatgggaggaaataattccttgattcagactttctcattcaatacaaagtgataattgcccttttttaaattcctgaaattacacaaaaggtgagtcaagcttttcaggtcaaatggtagttatattcatcatggagaccacaaatgatggaaaagatgtagaaaataaatcacaccttaaagaagatggtgacaaaactctgtcaggtaacagatttaacctgggataaagttttgcccattgccttactccaggtcagaatagtactgcaaagggagctttggttgagccctttaaaawtaatttataagaaactcctccagaattgctgggaattccacctttagatct

SEQ ID NO: 168447 - DNA, 288 bp, Homo sapiens
gaattaagcaatatgtacaacagttggggcacacattactaatgatgcatctactctttccagggcctmatatcccatggatgaacctcttcaccttttctgcccagggaatatggtgctactacagtcctgcaaaaaccaacggccagaccagcagctagccaaagagtggacaggacttcataaggtgctgctgaccactcatttctctgagaaacaggctggaatcaagccatggttaccacatattcagataaagacagctcctcctcaacccaatacctcata

SEQ ID NO: 168448 - DNA, 288 bp, Homo sapiens
gaattaagcaatatgtacaacagttggggcacacattactaatgatgcatctactctttccagggcctcatatcccatggatgaacctcttcaccttttctgcccagggaatatggtgctactacagtcctgcaaaaaccaacrgccagaccagcagctagccaaagagtggacaggacttcataaggtgctgctgaccactcatttctctgagaaacaggctggaatcaagccatggttaccacatattcagataaagacagctcctcctcaacccaatacctcata

SEQ ID NO: 168449 - DNA, 288 bp, Homo sapiens
gaattaagcaatatgtacaacagttggggcacacattactaatgatgcatctactctttccagggcctcatatcccatggatgaacctcttcaccttttctgcccagggaatatggtgctactacagtcctgcaaaaaccaacggccagaccagcagctagccaaagagtggacrggacttcataaggtgctgctgaccactcatttctctgagaaacaggctggaatcaagccatggttaccacatattcagataaagacagctcctcctcaacccaatacctcata

SEQ ID NO: 168450 - DNA, 599 bp, Homo sapiens
acatagcattccctctaagaactggaacaagacaaggatgcccactttcactactcctatttaacacagtactgaaagtcctagccagagcaatcaggtaagaaaaaataaataaataaaagacatccaaattggaaaagagaaggtcaaattgtctctatctgcagacaacatgatcttatatatagaaaaacctagattccaccaagaaacccttagaattgataaatgaattcagtaaagttgtgagatacacaatcaacatagaaaaatcagtagtatttttataaaccaataacgaatgagctgaaaaagaaataaagaaagcaatttcatttgcaatagctaaagaaatacctagaaagaaatttaaccacrtaggtaaaaaatttctacaaggaaaactttataaaacgttaatattaaaatgctaatattattttattatggatttccagtgaactcaattactcctaatagtttttgtatcagtcatttgcttgcattctgaatcataataaaataatattcagtagaatttttcttctatcaatatctgaatagatatttttctgaccaacttccttttgagaacagtt

SEQ ID NO: 168451 - DNA, 599 bp, Homo sapiens
acatagcattccctctaagaactggaacaagacaaggatgcccactttcactactcctatttaacacagtactgaaagtcctagccagagcaatcaggtaagaaaaaataaataaataaaagacatccaaattggaaaagagaaggtcaaattgtctctatctgcagacaacatgatcttatatatagaaaaacctagattccaccaagaaacccttagaattgataaatgaattcagtaaagttgtgagatacacaatcaacatagaaaaatcagtagtatttttataaaccaataacgaatgagctgaaaaagaaataaagaaagcaatttcatttgcaatagctaaagaaatacctagaaagaaatttaaccacakaggtaaaaaatttctacaaggaaaactttataaaacgttaatattaaaatgctaatattattttattatggatttccagtgaactcaattactcctaatagtttttgtatcagtcatttgcttgcattctgaatcataataaaataatattcagtagaatttttcttctatcaatatctgaatagatatttttctgaccaacttccttttgagaacagtt

SEQ ID NO: 168452 - DNA, 599 bp, Homo sapiens
acatagcattccctctaagaactggaacaagacaaggatgcccactttcactactcctatttaacacagtactgaaagtcctagccagagcaatcaggtaagaaaaaataaataaataaaagacatccaaattggaaaagagaaggtcaaattgtctctatctgcagacaacatgatcttatatatagaaaaacctagattccaccaagaaacccttagaattgataaatgaattcagtaaagttgtgagatacacaatcaacatagaaaaatcagtagtatttttataaaccaataacgaatgagctgaaaaagaaataaagaaagcaatttcatttgcaatagctaaagaaatacctagaaagaaatttaaccacataggtaaaaaatttctacaaggaaaactttataaaacgytaatattaaaatgctaatattattttattatggatttccagtgaactcaattactcctaatagtttttgtatcagtcatttgcttgcattctgaatcataataaaataatattcagtagaatttttcttctatcaatatctgaatagatatttttctgaccaacttccttttgagaacagtt

SEQ ID NO: 168453 - DNA, 582 bp, Homo sapiens
gggctagctaggcatgcttatcttatctcgagcctcttttttcttgcagttaagtacatatagatggagatcctgctttgctctgctccaaaagggcaaatccatattacatcaagtgacactttttgaaggtggataaatatatttaattctaatatgtacttaacagaaccatctggctgcctcattatgtccttctacctgatctctgtcaaaactgtatttgacatttccatttttatcttgattccttaggtatatttctcatatctaaagagcatggttgaaattgagagatgccatgtattggagacgacttcagggactgcaacactgctcagtcataaaaattcacctcatsattttataaagtgtaattacctgtttcctaaactcatttcttaatttattttactaataagggatggaaaacagcttttataattgcaacatcattgatttgtcagttccggtactaatataatctatacatatttctaaatgtatgggaggcaagcaaaaaggatcttggcccagtagaatgtttgagtaccattagttttctaatgataatttagaaca

SEQ ID NO: 168454 - DNA, 582 bp, Homo sapiens
gggctagctaggcatgcttatcttatctcgagcctcttttttcttgcagttaagtacatatagatggagatcctgctttgctctgctccaaaagggcaaatccatattacatcaagtgacactttttgaaggtggataaatatatttaattctaatatgtacttaacagaaccatctggctgcctcattatgtccttctacctgatctctgtcaaaactgtatttgacatttccatttttatcttgattccttaggtatatttctcatatctaaagagcatggttgaaattgagagatgccatgtattggagacgacttcagggactgcaacactgctcagtcataaaaattcacctcatgattttataaagtgtaattacctgtttcctaaactcatttcttaatttattttactaataagggatggaaaacagcttttataattgcaacatcattgatttrtcagttccggtactaatataatctatacatatttctaaatgtatgggaggcaagcaaaaaggatcttggcccagtagaatgtttgagtaccattagttttctaatgataatttagaaca

SEQ ID NO: 168455 - DNA, 537 bp, Homo sapiens
tttagcaaagttgctctaccacagtccagctgagcttacctaaagatatccatctatcacaacatgaatttaaaatgaaygtataatttttctgtttcaccaggagttaatgattgattattgtgcagcaaaacctgatagatatttttatttctcttccatccttcttcaacatcaaaattccttttaattcttatcatcattgtgttcccctccttgtgaatggatgcattgtaaatatatactaagattaccacaatattttgcataacagacccttttgctttgtcctctcatttgtcactctcctttatttctgctctttataccatgtaatacataacatgttattttgaaatatataatttagaaggtatttctattaaagtattttcattcagtgggtggtaaatggtgtctagggaaattgcaatgagttaaagtagagttccttgtataatgtattatatattatataactaattttactctccttaaaataaatattttcccaaaataatcaaatatcaattttga

SEQ ID NO: 168456 - DNA, 537 bp, Homo sapiens
tttagcaaagttgctctaccacagtccagctgagcttacctaaagatatccatctatcacaacatgaatttaaaatgaatgtataatttttctrtttcaccaggagttaatgattgattattgtgcagcaaaacctgatagatatttttatttctcttccatccttcttcaacatcaaaattccttttaattcttatcatcattgtgttcccctccttgtgaatggatgcattgtaaatatatactaagattaccacaatattttgcataacagacccttttgctttgtcctctcatttgtcactctcctttatttctgctctttataccatgtaatacataacatgttattttgaaatatataatttagaaggtatttctattaaagtattttcattcagtgggtggtaaatggtgtctagggaaattgcaatgagttaaagtagagttccttgtataatgtattatatattatataactaattttactctccttaaaataaatattttcccaaaataatcaaatatcaattttga

SEQ ID NO: 168457 - DNA, 568 bp, Homo sapiens
acccacacttgccacttctattcaacatagtactgaaagtcctagccagagaaatcatgcaagataaataaataaaagacatccaagtaggaaaagatcaaactacctctcttcmctgatgatgattctatagttagaaaatcctaaaatctccaccaaaggctactagaaatgataaatgattttaccaaggtttcaggacaccaaatcaatgtacaaaaatcagtagcatttctatgcactaataatgtccaggctgaaagtcaaattgaaaacacaatcctattacaatttttggtcaaaatgaaaatgaaatacctaggaatacagctaacaaaggaggtgaaagatctacaagaagaactacaaaatactgccaaaataaatggaaaaacattccatgtgcatggattggaagagtcaatatcattaaaatgaccctactacctaaagtatttgagaaatccaatgcttttcctatcacactatcaacatcattcttcaaagaattagaaaaaagtattttaaaattcatatggaaacaaatatgagccttaatagacaaagc

SEQ ID NO: 168458 - DNA, 555 bp, Homo sapiens
gggtgggcagctccacacactggcacaatcactgactccatgcaaggctgtggctagaccgggcataccacaagtgatttccactgtgagcaatgggtaacacagtggctcctgaaagctcagaggcaccagaaactgcagagacccaaagagggtgtaacagcatgtcacagccctgggaagcactgaggtctggactcccagaagggccacagctcttctctccttctcatcaccctcagcattgtgaacagcaggctgcatgtcagtctgtttgtgttatagccctttcaggccttccacccactctggcccacagctccttggmtggcctggccccagtactgcttcccattgtttggggtggccacccagcacagatggagagtgggagggctatagtgttacagcagctctggctcagggaatcttgaggtctgggtctccaaaaaggttgccacttgactcttgcagtttgagagcatgtcactgcccacagctcagcaagccaaccaagaagatgttacagttccatttgctccctttatttgttgg

SEQ ID NO: 168459 - DNA, 556 bp, Homo sapiens
gtgcacccatctccaagctgtcgtaagtgtgggttttcagtggctcatggatacactgtcttctgcataattggccttggccaaggaaagccccttttcctggacatagctgaggcccaagcttccaccatcattggaatagctgcagctaaggactgattatgtggccagcctccttgcaggataattttttgcaccgctcacactccagagttccctatggcatcaggctgaggccacaggtcagctgtaaccacacctttccttagtttcttcccctgtgtcatcctgcttgcctcatgtccttagagatgtacttaaaaatctatgtatcaggctgcacttttagggaamctaatgcattttttcaaaacagaaattgaagacatttttctttctaaatatacatggcaaaagattgtattaatatagtttggatatatgtcccctctaaatctcatgccgatttttaatccccattgttggaggtggggcctagtgggaggtgatgggatcatggaggcagatttctcatgaatggcttagtaccatcccc

SEQ ID NO: 168460 - DNA, 573 bp, Homo sapiens
tctccaagctgtcgtaagtgtgggttttcagtggctcatggatacactgtcttctgcataattggccttggccaaggaaagccccttttcctggacatagctgaggcccaagcttccaccatcattggaatagctgcagctaaggactgattatgtggccagcctccttgcaggataattttttgcaccgctcacactccagagttccctatggcatcaggctgaggccacaggtcagctgtaaccacacctttccttagtttcttcccctgtgtcatcctgcttgcctcatgtccttagagatgtacttaaaaatctatgtatcaggctgcacttttagggaacctaatgcattttttcaaaacagaaattgaagacatttttctttctaaatatacatggcaaaagattgtattaatatagtttggatatatgtcccctctaaatctcatgccgatttktaatccccattgttggaggtggggcctagtgggaggtgatgggatcatggaggcagatttctcatgaatggcttagtaccatccccttgttgctgtccttgtcatagtgaat

SEQ ID NO: 168461 - DNA, 595 bp, Homo sapiens
atctgtgcacccatctccaagctgtcgtaagtgtgggttttcagtggctcatggatacactgtcttctgcataattggccttggccaaggaaagccccttttcctggacatagctgaggcccaagcttccaccatcattggaatagctgcagctaaggactgattatgtggccagcctccttgcaggataattttttgcaccgctcacactccagagttccctatggcatcaggctgaggccacaggtcagctgtaaccacacctttccttagtttcttcccctgtgtcatcctgcttgcctcatgtccttagagatgtacttaaaaatctatgtatcaggctgcacttttagggaacctaatgcattttttcaaaacagaaattgaagacatttttctttctaaatatacatggcaaaagattgtattaatatagtttggatatatgtcccctctaaatctcatgccgatttttaatccccattgttggaggtggggcctagtgggaggtgatgggatcatggaggcagatttytcatgaatggcttagtaccatccccttgttgctgtccttgtcatagtgaataagttctca

SEQ ID NO: 168462 - DNA, 565 bp, Homo sapiens
atgatttaccatcagattactttgagactaacccgacctcttcatacacatttttcatatgtggcatamtttgttaaatattttgctttaaatacaaagaaaatgtatttatgaaaaattatgaatttttttccaactgacgttgttctaaagcaatttttaaaacttttatatagaattctttattcctttacaagttgactaagtattttgcttaaaaaagaaaaaatatttatacgtatatggatagatgcattcttcatgaggaaagaaaaattaatattcaagattcataggcatatcactgagctacgctacatgagtttctgtggagtatattctcctaaaattttgaccacctactgtttcttaagaaatgaggcccatgttatgttgtcactaaatagtcaattagatgcctgctttcagggacaattacacatttggtatgtttgcacatgtctaccaaatattttcaaaatgctttgaaacccaaacacatcctagaagaattggcactattctcaaacccgtcaagggtcctaaagttccaagtaacaatctg

SEQ ID NO: 168463 - DNA, 565 bp, Homo sapiens
atgatttaccatcagattactttgagactaacccgacctcttcatacacatttttcatatgtggcatactttgttaaatattttgctttaaatacaaagaaaatgtatttatgaaaaattatgaatttttttccaactgacgttgttctaaagcaatttttaaaacttttatatagaattctttattcytttacaagttgactaagtattttgcttaaaaaagaaaaaatatttatacgtatatggatagatgcattcttcatgaggaaagaaaaattaatattcaagattcataggcatatcactgagctacgctacatgagtttctgtggagtatattctcctaaaattttgaccacctactgtttcttaagaaatgaggcccatgttatgttgtcactaaatagtcaattagatgcctgctttcagggacaattacacatttggtatgtttgcacatgtctaccaaatattttcaaaatgctttgaaacccaaacacatcctagaagaattggcactattctcaaacccgtcaagggtcctaaagttccaagtaacaatctg

SEQ ID NO: 168464 - DNA, 344 bp, Homo sapiens
cagggctggaactgaagcagctgtgatgccaggcaccatgtcccaaggctgcacagaacttgggggtcatgggcccagcccaggaaaccatttttccctcctaggcctccagcctgtgatgsaggggcttccccaaaggtctctgacatgccctggagacattttccttattgccttggtggttagcatttggcttcttgtaacttatgcaaatttctgcagtcagcttgaatttatccccagaaaatgggtttttcttttctactgcatcattaggctgcaaattttccaaacttttatgttctatcacctcttgaatgctttactgcttataaatatcttcc

SEQ ID NO: 168465 - DNA, 606 bp, Homo sapiens
ttattccatccactattcactattttgaggttaattttttattataattaatgtaatgatgaatatcttcttacacatagactttttaattattttttttttagaataaaattccaggaattaattagctggcttaagtaacacatacattttattgcttagaatacattataaaactactttcaaaaataattatttcatcttgtaagggtatacaagtacattatcatttaatattttagtaaattaagtaaaaatttaggtctttrttttacttgatcatttcttttgataacagctaggtttgacactgttttacatcttgtccactgtttgttattcatattgagtgaattttttgttgttgctctggactggtgatagtttctaaatgaggatcttaatttcaatgaagatataagtaagatataaaaaagtgcacaaaattatatatcttttaataaaaactctttgtcaaaatggtttattatataatttttaccttactgacattctgaagtttaaaaccataacaaaatatatagttattcatttaaaaaatcccttctgtgttatttccaagtttaaaaattagtcttctttttc

SEQ ID NO: 168466 - DNA, 404 bp, Homo sapiens
ttgggtttgtatgtcaaaggaattctttttagagagtgatttaactggctagaaaataatctataaaagcctaaaaggtaaactcaaaaaaaaaatcacttctcagaatgtataactgtcattaagtgacatgtgactgtacataatgagatatctttggattgggacccaagtataaagatgaaattcattttacttttcatatacaccttatgcacatagcctgaaggtaattatatacactatttttaataattttgtgcacagaagaaagttttgtctgcgacacaaacacatagcctgaaggtaattayatacactatttttaataatcttgtgcacggaagaaagttttgtctgcaacccatcacctgaattcaggtataaaattttccactgtggcg

SEQ ID NO: 168467 - DNA, 560 bp, Homo sapiens
agagagagaggactatgcctttataacagtctgcaggtgtcattccttaggctttcctttaggggtgtggattggctagcttaaataaaacactaatgaagggggaaacccayttatacgactctggtgttgagcattaggttttatcatggtcagcagctgtgcaatgttttagttttgggttggtgacaagtgagctacatctcaaacaatcatatgggaaggggccaaaggagatggagtatgaccgggtttcaaataactttatgtcaggcctagaaatgggtgtcaaagcagcaactatattaaacacatttctgtcagaggtctatgtctctgattcctggaatgtgctctgtgctcttgtgagcctagtgacttactgcggctggatgtcatattaaaacattttacattctatactaccattgtcattattttgcttacctggagcccatcacagtatcagatttgctcctactacagttcatatgatgagtttgcttccccagtgagtttctctttattcctttgaactagatgtcctcatcaccccagga

SEQ ID NO: 168468 - DNA, 560 bp, Homo sapiens
agagagagaggactatgcctttataacagtctgcaggtgtcattccttaggctttcctttaggggtgtggattggctagcttaaataaaacactaatgaagggggaaacccatttatacgactctggtgttgagcattaggttttatcatggtcagcagctgtgcaatgttttagttttgggttggtgacaagtgagctacatctcaaacaatcatatgggaaggggccaaaggagatggagtatgaccgggtttcaaataactttatgtcaggcctagaaatggrtgtcaaagcagcaactatattaaacacatttctgtcagaggtctatgtctctgattcctggaatgtgctctgtgctcttgtgagcctagtgacttactgcggctggatgtcatattaaaacattttacattctatactaccattgtcattattttgcttacctggagcccatcacagtatcagatttgctcctactacagttcatatgatgagtttgcttccccagtgagtttctctttattcctttgaactagatgtcctcatcaccccagga

SEQ ID NO: 168469 - DNA, 560 bp, Homo sapiens
agagagagaggactatgcctttataacagtctgcaggtgtcattccttaggctttcctttaggggtgtggattggctagcttaaataaaacactaatgaagggggaaacccatttatacgactctggtgttgagcattaggttttatcatggtcagcagctgtgcaatgttttagttttgggttggtgacaagtgagctacatctcaaacaatcatatgggaaggggccaaaggagatggagtatgaccgggtttcaaataactttatgtcaggcctagaaatgggtgtcaaagcagcaactatattaaacacatttctgtcagaggtctatgtctctgattcctggaatgtgctctgtgctcttgtgagcctagtgacttactgcggctggatgtcatattaaaacattttacattctatactaccattgtcattattttgcttacctggagcccatcacagtatcagatttgctcctactacagttcatatgatgaktttgcttccccagtgagtttctctttattcctttgaactagatgtcctcatcaccccagga

SEQ ID NO: 168470 - DNA, 610 bp, Homo sapiens
ggttatcaaaaagtcaaaattctttatagagctaatttggtttacattataatacaacacatttctctaccttgaaaaatgggtcggcttaccatctcagtattaggaatatgcattttgaggtagcattggattggctgaattattggaagggctttgttttccaaaggctcatcaaggyaggagttgccttttgactaagcagttaatcaatactattacactggtgcaaaagtaattgcagattttgccaatcaaagtagtaataatatgttctgggcaccctgggtgatgcaaagatgataagacacaatccattcccttggggaaccaacaacataaatggatggtgatatagtttggatgtttgtccctgaccaaatctcatgttgaattgtaatccccagtgctggagttggggcctagtgggatgtggtggggtcatggtgggaatccctcatggcttggtgctgtcttcaagagagtaggttctcttgagatctgtttgtttaaaagtgtatggcacctcccctcctcctctctctcttgcttgctactgctttcaccatatgatgtgcctgttccccctttgccttctgccatggttgaa

SEQ ID NO: 168471 - DNA, 518 bp, Homo sapiens
gcccgtctgccgccatctggcttttcctcccatgttaaaactcaaagccagtaattccatgcagagggggaaataatgggcccttatttgcatggctattttttaagattctgttgtgaagagttttctcttggatcacacacatttcttgatttctatcaatacaatcaatatatttctctctaagggtgcatgtcttatcttgtttatcatccacgcttctttgcttctctttttctttttcccttgatgattctgtgtttattattttcccagtcttcttaggggtgagcgctgctgaagaagtccatgaaatgtttgtctatctagaattatgactttggaatcttcaccatgagaacataaaacccaattcactctttctggggcygttggtcaattgtgtggacttcacgcagggggttgacctgcttgtgccaagtcagattctagatgtgtaaaatgggggactcttcagaaggtgtgtgatctactctacttatttgctctgccatggt

SEQ ID NO: 168472 - DNA, 585 bp, Homo sapiens
agcagttaaatcttaaggagatggaatcggattgcctgggttcagagcttcacaggaccattcacaagctatatgactttagacaagccacttaatctctctaggactcaatttcattatcagtaaaaagcgttataaataactcctacctcaaagaattgtcctaaaaattccataggaaaatttataaaagtgcttatgctgcctaatagttctcacgcaataaatattagctattctaacaattactattatattctgaacttacctagatttcaatttagcatattagactgctgaagaagtcataattgtgatgaagatagttcaatcaccatgattttgactctttcccaacactgaattatttcctttaattgtctgaggataaagaatctataagctattacggagtatcttttaaagctatatctataaactgctatagaatatgaagaaaaacttagctgaaccaagtgaaacaaaatggtgsattaggaatccttcaccccctctccccatataaatcactcaactttccagctttgttgtaggtgtgcttatcaacttaaggtatacaggagt

SEQ ID NO: 168473 - DNA, 459 bp, Homo sapiens
aaagttatcttcagattaacacatgacaattgaatgctttctgtctgacaacatattaactacaaaatgatgtaacacaatgtctgtccttattgaatcttgtaggacacacaagtaggtatataagtcagtaagtcagtaaaggaaatggaaagaccaattgggcatacttatcttttgctctccaatcactgatccaaaatgaatatcttgtcatttatatattatttatccattgaagaagcaggamactgactacttattatactcctttgtctacattcccatgtcttttaaccacggtgaagtagaatgtgattgttcattcaaaggtcattccataccacctttattccctgataatagaaccttaattggaagggggtggcaaaatgcccatttctggaaaataaaccataattggcttattaatattgccaataatggcaatattatttc

SEQ ID NO: 168474 - DNA, 622 bp, Homo sapiens
cataaccacatgacaatgatttgccttgtattatgcagaaaggcagtggcagaccaggaacagaaaaaggtcctgagactactggtccaccaccatgttctctaaaccatagaacagaaggaataaaagcgagtaaaaacttgaataatcagatactaatttaatttgtcaaacacacgtatccattagattcaatcatgggctttcattctaccttgaagacattttctttatttttcagtaggaatcaaatttcctgttgaaaatttaataatcaattgggggttgggtagtgatttaacccatctataacaatgtaattccattcctctaaagctgatatactggccaatgttactaaaatttaaaacctctttttattcccggaagwttttggcctggtaaaagttactgagcattccaccatgaaaatagtcactaaaataatatttcatgaggtctaagtagagtctgttcttccaaaaatcaacagaatatgaagaaaggtacacacattggatatagccctttggatagctgccttctaattctaactctatggaaaggcagaaacaatttaccagatttgaaaacttttcagctattcagagaaatgaattat

SEQ ID NO: 168475 - DNA, 376 bp, Homo sapiens
agtgagtagaaatgcagaatgataggaaataaaacacccagtgataaacttttaaggaaggcaggttaatggggcaagtatgtggagggcaacctgcctggcttcaacaggtcattatgtatcctttcttcagaagagcttgtstttgcgttgctgcttctgaaaatagggtaacagtgatggaaaatgcagggcagcgctaaagaaagggtttaaggtagccatagttacatgagatgagttcactgagatttatgtcattattgtaacaaaccactgaaggaatttataatgatgagatcattataaaggattctaaatatgcagttaactggacattatgacatcatctctcacagtttattcaacttagaca

SEQ ID NO: 168476 - DNA, 545 bp, Homo sapiens
agctgtaacaaaataatatatctatggatacatcccactctgatgtgtggggacatcaacccttcctcctccaaatgctctggaagtcagtgagtatttcatgtgtccttgagaactagctcccatgtctattattttctgtytctggctgactactgctaatgtcaccaaagatgctactgtaccctcatgatccaaagcacaacccaccatgaagtcactgccacaaagactcatcctcttcagcttctgagtatggattttcttactactcagcctgttgggtccacttggggctaaatgtgatttagcaatcactccaattaggaaaagttcatgtcaccttgtgctgccctgtgttacacagacttttactctcaatattttatagatactttggcaaaatgacccttttttgttgtttgactcccaccatccctccctcccttccttcctttcacttccacttcattccttctccccaggaattaaacaagtaactaaaattatctccagtgaatttaaggtgaaaatgggacatttac

SEQ ID NO: 168477 - DNA, 545 bp, Homo sapiens
agctgtaacaaaataatatatctatggatacatcccactctgatgtgtggggacatcaacccttcctcctccaaatgctctggaagtcagtgagtatttcatgtgtccttgagaactagctcccatgtctattattttctgtttctggctgactactgctaatgtcaccaaagatgctactgtaccctcatgatccaaagcacaacccaccatgaagtcactgccacaaagactcatcctcttcagcttctgagtayggattttcttactactcagcctgttgggtccacttggggctaaatgtgatttagcaatcactccaattaggaaaagttcatgtcaccttgtgctgccctgtgttacacagacttttactctcaatattttatagatactttggcaaaatgacccttttttgttgtttgactcccaccatccctccctcccttccttcctttcacttccacttcattccttctccccaggaattaaacaagtaactaaaattatctccagtgaatttaaggtgaaaatgggacatttac

SEQ ID NO: 168478 - DNA, 528 bp, Homo sapiens
tcagctgggttataggacacatgtggctgagatggtaaaccatgtttttgggagggcaggggatgggggggcagcctggataagcctgtggctttcagagtcagatggacttagattcatatgataggtttgtgacctactaactgygtagctttagacttgttagttattaaccttccgagccacaggcccttctctgtaaaacagaggcattaaaatccactaaataaggccacacgggctgggtgctgtggttcatgtctgtaatcccagcactgtgggaggccgaggcaggaggatcacttgagcccaggagttcaagaccagctgggcaacatggcaaaatcttgtctccacaaaaaaaattagctggatgtggtggcgctcacctgtagtcccagctacttgggaggctgaggtggaaaaatcacctgagcctggggaggtcaaggctgcagtgagtcgagatcacaccactgcagtccagcctgggcaatcagagtgagatccggtctcaaaataaataaa

SEQ ID NO: 168479 - DNA, 528 bp, Homo sapiens
tcagctgggttataggacacatgtggctgagatggtaaaccatgtttttgggagggcaggggatgggggggcagcctggataagcctgtggctttcagagtcagatggacttagattcatatgataggtttgtgacctactaactgcgtagctttagacttgttagttattaaccttccgagccacaggcccttctctgtaaaacagrggcattaaaatccactaaataaggccacacgggctgggtgctgtggttcatgtctgtaatcccagcactgtgggaggccgaggcaggaggatcacttgagcccaggagttcaagaccagctgggcaacatggcaaaatcttgtctccacaaaaaaaattagctggatgtggtggcgctcacctgtagtcccagctacttgggaggctgaggtggaaaaatcacctgagcctggggaggtcaaggctgcagtgagtcgagatcacaccactgcagtccagcctgggcaatcagagtgagatccggtctcaaaataaataaa

SEQ ID NO: 168480 - DNA, 504 bp, Homo sapiens
gctatgtcctcacatgtaaaatggaaggatgaactagccaaatgtgtgaatccttttatgagggccttaatctcattaacaaaggagagaccctcatggcctcatcacctattaaagaccccatctcttagtactatcacactagtaacacctaattttggaggagacacattcaaactgtagcagcaagtgagggtagacctatcttagggcatagtttgggggacgaagagtgaatakaaataaggagtcagttttaaaagcatttgatttctagccaaacacagggtccagctacctattgacaattcctcttacatatttaataaatatctcaaatttaacctataccttcaaacaaacctaatcctaaattatatgattctccctataatatggaagactaatttcaaaatcagagaaaccttttgaaatttaacatatttaattgtattaaaaataaaacaacagaccaggcatcatgtctcatacctttaatcccag

SEQ ID NO: 168481 - DNA, 552 bp, Homo sapiens
taacaactcctttagtgccacattaccacgactcaaaataaaaaatctcttgcctaggttgctataatacttttctaacttgcttctttacatccagcctcaaacaccaattattttcccttactggaatattcaaatcacatgctattccagtgctaacaacttattaaattgcctcaaactatttttaaaataaagtctaaggttctttatatggaccacactttactcctttattgacactagacaatattccacgtggtagactctctctcaacctagatatgtgggtaaatatatacaataaagagtcctctcccctttcttgaggtacaatttaaccaagagaaataaatttgaatgtatatgttttgattttgttatgttgactattattaayacataagtctagggaaatctgattaataccctgtactcctcctcagcagttggcaccttgaaattatttgattatttgtaaatttttattttaaaatgtatcttgctggtagaccatatcttgatggagagagaagttttaacagtccaact

SEQ ID NO: 168482 - DNA, 661 bp, Homo sapiens
tcataaataatctaggtaaatgattaaaataaaagaattgggtaaatataatgggataaatacttgtagtcaaacttatcataatttagaatcataagatatattaagttgaacaaaagatatttcattatttgggtattttctaataaaagtctatttgtagaaagacattcattctaaaaataaatgtgtcctttttaaaaaggtgaacaattttgttctaattcaaaacacatttaaaggttatgtattaaacaaggtaaaaggaatcaagaaataagagatatgtaaagaaaattataagaataaagaggggctaattttttgttaagaaagtttaaagacaaataattttatataaaagaagaagcttgtgtggtaaatttagtcctagaataaaatgactggttatttaagaaagagggatgttcaggacaaaccagaaagttgaagcatatcatgaatggtcagtgtaagtcacagtaagaggatttagacaaaaaamaaaaacaaaaacaaaaacaaaaaaaaaacaacaaaaaaaaacccttttatatggtcaagttgtctattattaaaggaaaattataatggtctttctaaagattgggcttgatgtaaaaaatatatatgtgtatacactaaataattggttagaaca

SEQ ID NO: 168483 - DNA, 661 bp, Homo sapiens
tcataaataatctaggtaaatgattaaaataaaagaattgggtaaatataatgggataaatacttgtagtcaaacttatcataatttagaatcataagatatattaagttgaacaaaagatatttcattatttgggtattttctaataaaagtctatttgtagaaagacattcattctaaaaataaatgtgtcctttttaaaaaggtgaacaattttgttctaattcaaaacacatttaaaggttatgtattaaacaaggtaaaaggaatcaagaaataagagatatgtaaagaaaattataagaataaagaggggctaattttttgttaagaaagtttaaagacaaataattttatataaaagaagaagcttgtgtggtaaatttagtcctagaataaaatgactggttatttaagaaagagggatgttcaggacaaaccagaaagttgaagcatatcatgaatggtcagtgtaagtcacagtaagaggatttagacaaaaaacaaaaacaaaaacaaaaacaaaaaaaaaacaacaaaaaaaaacccttttatatgrtcaagttgtctattattaaaggaaaattataatggtctttctaaagattgggcttgatgtaaaaaatatatatgtgtatacactaaataattggttagaaca

SEQ ID NO: 168484 - DNA, 407 bp, Homo sapiens
gaattctgggacagaatccaaggctttattcctgaccttctttgaaactgactcagagagtaaggaccagacaacccagcaaccagggatatcctgacccattcacatctctgaaacactctattaccacctttgtaaaggctgagccacccagagggaagaaagggaatcctacctctaaaacaggaggaaatattcacctgtcagaagaggagaaggaattaatgtgggtgactcagatgttaaaagttccctttattcatgctccgatcacatgtgtctggagttctaggtactaagtgcaggtacaggaaccgtgaagcctcagaagagatggtaaatcatatgtgggagtcactgccctttgacaaartatcacggcacacacatgccctgttaccccgcca

SEQ ID NO: 168485 - DNA, 419 bp, Homo sapiens
aattcaaggtgggcaggtcatttgaggccaggagttcaagaccaggctgggcaacatggtgaaaccctgtctccactaaaaatacaaaaattagctgggtgtggtggtgcatgcctgtaatcccagctactcgggaggctgaggcatgagaattgcttgagcctgggaggtggaggttgcagtgagctgagattccaccactgtactccagactaggagacagagtaacacgctgtctcaaaataaaaataagaaaaagaaaaagaaaaaggaaagaaaagaaaagaaatagaggaaaaaaaatttttgaaaaaagaaaaatatyactaaaattgactcaatagaaaatatgaatatacccacagtaaaaaagaaattgaatttgtagtttaaaaccttcccacaaaaataaagctcaa

SEQ ID NO: 168486 - DNA, 585 bp, Homo sapiens
taatagggttttacacatagacatcacaccatctgcaaacagggacaatttgactttttcctttccaatttggatgctctatttctttctcttgccttattgctttggctaagacttagatcttggaggaaaagctttccaatttttcccattcagtatcattttagccatgggtttgtcatatgacctttattgtgtggagatgccttccttctatgcctaatttgttgagcatttatcatggagagatgttgaattttattaaatgctttttctgtatctattcaaatggtaatgtggtttttgccctaaattctgttaatgtgatgtatcatatatattaatttgcatatgttgaaccatccttgcctccttgggatgaatcccatttgrtcatggtgaatgatctttttaatatgctgttgaatttgtttttctagtatttcatatccatattcaccacagatattgacctgcagattttttgttgtgtccctgtctggttttggtataagggtaatgttggccttgaagaatgaatttggaaaaattccctcctctccaatttttagaatagtttgcaaa

SEQ ID NO: 168487 - DNA, 445 bp, Homo sapiens
tgagggccaaaaggaaatcttctgccttgaagtaaaagatccagtcttggttgttgctgactaaagagaaattggaccccgaataaccagcagtgatatgcagggaatgcgctgtgggctcttgtggctatagtgaaagactccttatgtctgagagaaacaaagcaaaaagtaaaggagactttgttttccacattaggtaccatctcagccacagtaggatagagcaacaagcaggcttttggrgtgcctgagttcagacccattctcctggatagcatttctggacctgccttgggccagagaggactgcacagccatgaagatgagttccaggcctggcagcttttagcacaagatgacagaagagaccttggacttcaattgaacatcagcagtcatctggcaaaacttccatggaccagcgctggtggtggacataggg

SEQ ID NO: 168488 - DNA, 380 bp, Homo sapiens
ccagggatgccaggatggttcaacgtatacamatcaatcaatgtgacacactatgtcaacagaataaagtaaaaaaccatagaattattttagttaatgctgaaaaagcatttaataatgttcagtatcccttcatgagaaccctcaaaaaactggggctaaaaagaacatactttaacataataaaaaccctatatgacatacccacagctagtttcacactgaatgaggaaaaactgagagcctctttccttaactcttgaaaattacaaggatgcccactttcaccactgtcattaaacatagcactggaggtcctagctagagtaatcaaacaagggaaagatgtaaagggcatccaaattggaaatgaagaattc

SEQ ID NO: 168489 - DNA, 568 bp, Homo sapiens
gagttcatatcagtgattgagcctgaaaatattattcttttrtagtaaattatttggtatcatataagtaataataattcactttaggaatatctttccatataaaggaaatatatctctacatataaaaagtaagaataatcattctaaaaaatcattgtgtttcccacatggaggttcacaaaaacctttattttcatatatatacatatatgaatatatatatacacatacacacacacacacatataagcttgctttggtgacttgtagagagggggaaggggagaagaaaatatatgtgaaacaagcataaatatagattcttttacttagtaacaattcacccactaataagataaaagtcagtatcagtatcaacacacgctactcagcaaacttgcaagtagtcacgtacattttagtggtcacattcattaattaattccagaaacatttaacgagcattcgctacatgtaggttactccccttgatgctgccgacataaataagtaaatattcattcttgacatcaaatgtttatgttcaaaataggaaaaacagagc

SEQ ID NO: 168490 - DNA, 343 bp, Homo sapiens
ataaaaaccatacaatcatttcaattgatgctgaaaaggcatttcataaaattcaacatctcttaatgataaaaatcatcaaaaaaaagaactagaaatagagagaacatagctcaacataataaaagccttatatgacaggcccacaggtagtatcatactgaayggggataaactaaaagcctttcctctaagatctggaacatgacaaatatggccactgtcaccactgttattcaacgtagtactggaattcctagctagagcaattacacaagagaagatataaagggcatccaaattggaaaataagaagttaaaatatccttgttggctgatgata

SEQ ID NO: 168491 - DNA, 343 bp, Homo sapiens
ataaaaaccatacaatcatttcaattgatgctgaaaaggcatttcataaaattcaacatctcttaatgataaaaatcatcaaaaaaaagaactagaaatagagagaacatagctcaacataataaaagccttatatgacaggcccacaggtagtatcatactgaatggggakaaactaaaagcctttcctctaagatctggaacatgacaaatatggccactgtcaccactgttattcaacgtagtactggaattcctagctagagcaattacacaagagaagatataaagggcatccaaattggaaaataagaagttaaaatatccttgttggctgatgata

SEQ ID NO: 168492 - DNA, 604 bp, Homo sapiens
ttggcaactcaaaattatcacttaaaaatcaattttttttttactgtatcaccttgtttcttacccatagtatcttttcttatttctgttaaaggcatctccagccatccaatgttcgaaagtgaaaattttgtatttgtctctgagtcctcacactcttacactcctgctattcagctagcatttccatcttactgatatttaactcaaagttattgttttaatctagcttttctttttctgatttaatgaaattgctttctctcctttatctcccacttgggctattatatctgttcactggtttctggtactaggccctccctacgccagtatatcttctattgtcttgttttcagtttcctyattgtgcttctcttactttatagctaaaaaccctttgtatggctacagaaaaaaatccaaactgactaaacagacattaaaaaaactaacaaattttagctcaaattaccattttaggttattcttcaagttcctcttcaattttcattattaattcatgcaacaattcctttttaggtcaaacactttcttgacattctacctgttattacttgaaacgcactttctactcattctt

SEQ ID NO: 168493 - DNA, 604 bp, Homo sapiens
ttggcaactcaaaattatcacttaaaaatcaattttttttttactgtatcaccttgtttcttacccatagtatcttttcttatttctgttaaaggcatctccagccatccaatgttcgaaagtgaaaattttgtatttgtctctgagtcctcacactcttacactcctgctattcagctagcatttccatcttactgatatttaactcaaagttattgttttaatctagcttttctttttctgatttaatgaaattgctttctctcctttatctcccacttgggctattatatctgttcactggtttctggtactaggccctccctacgccagtatatcttctattgtcttgttttcagtttcctcattgtgcttctcttactttatagctaaaaaccctttgtatggctacagaaaaaaatccaaactgactaaacagacattaaaaaaactaacaaattttagctcaaattaccattttaggttattcttcaagttcctcttcaattttcattattaattcaygcaacaattcctttttaggtcaaacactttcttgacattctacctgttattacttgaaacgcactttctactcattctt

SEQ ID NO: 168494 - DNA, 603 bp, Homo sapiens
catttcaattattatgttttggatatgttttctctaaagagcattttgttgaaatatttttaaaatttatggtttttttttttttttggacagagtctcgctctgttgcccaggctggagtgcagtggcgaaatcttggctcactgcaagctctgcctcccaggttcatgccattctcctgcctcagccacccgaggtagctgggactacaggcacctgccaccatgcttggctaattttttgtatttttagtagagacgggtctcagtatgtgagccaggatggtctcgatctcctgacctcgtgatcctcccgcctcggcctcccaaagttctgggattacaggtgtgagccactgcacccggctaaaatttatgttttaacatgaatggtaatatayaacaaatttattcttgaattttgctttctacaataaatctgcatatcttagctgatgaaatttttagccttttgttgattttccaaaattttattatatgaaagagtgatcacaatttttttcatttattttgtattgatgtgcacatatttgtgtaaatgtacctacacactagtgtatatgtctgagtgttgtatgtggtg

SEQ ID NO: 168495 - DNA, 498 bp, Homo sapiens
gcttttagatattaggtcccctgaagtccaaaaatgacatatttggcctatttgatataaaaatcatacaagaagcattttcaaatrtgaaatagcatttggctttccttgggctgtatttgtataaatatgttatcagtatgtattccataattatgggaaacttctataattctgatatgattgagtgtacattattaataattataattgtcgtgtaaaattgttgtatgctacagaagtaacaaattcctagtctattgtaggttttttagtggctctcctaagacttttgtctcagacaattttgtcgtgctttgattcttttcagaaggcagtttataatcagatgtaggactctgatgggtactcttaaatgcagatctctgataactttaaaaattgtgctattagaatagaggagaaaacaaaacttctaggactgtcgtgaagaggggatgtgttaaacattgctaacctttttgccttcagagtcaa

SEQ ID NO: 168496 - DNA, 552 bp, Homo sapiens
cagcctttttccatcttctttagccaacaccttgagattaagatgttataaaacccaaagggaggaactgaaaccaccactgcaaaattataagtgagacaatgaaagaaacctgatctaaccaaccccatcttgcttctaacctccacgttattctcattcattcctggccgtaggccgaattaactttgggaggaacttagtttatagtttataatttgaaacaaagatgataataaccctttcccaatacaaacccctttctttcctgggaactagactgcstttgtaggactaataaattagtcaaaagattagaaattatggtttaggagtcatgcagctgaaatctgctagattctgacccttcccaaattgctcctaggataacattgccactgtaaaatctaagatcagggcttaagatattttgcaggccttgcatctgatggatcatctggtatcacccacattgataaactagctcatctgttcttgccgcccccacctgggaactgactcagcataagaagacagcttcaattccctatg

SEQ ID NO: 168497 - DNA, 552 bp, Homo sapiens
cagcctttttccatcttctttagccaacaccttgagattaagatgttataaaacccaaagggaggaactgaaaccaccactgcaaaattataagtgagacaatgaaagaaacctgatctaaccaaccccatcttgcttctaacctccacgttattctcattcattcctggccgtaggccgaattaactttgggaggaacttagtttatagtttataatttgaaacaaagatgataataaccctttcccaatacaaacccctttctttcctgggaactagactgcgtttgtaggactaataaattagtcaaaagattagaaattatggtttaggagtcatgcagctgaaatctgctagattctgacccttcccaaattgctcctaggataacattgccactgtaaaatctaagatcagggcttaagatattttgcaggccttgcatctgatggatcatctggtatcacccacattgataaactagctcatctgttcttgcygcccccacctgggaactgactcagcataagaagacagcttcaattccctatg

SEQ ID NO: 168498 - DNA, 364 bp, Homo sapiens
ctaggggtcaccccatcctcttgatactacaaattctgccacccacaacttctggattttcactctgtttctcaatgcaccccctatgtggccctgcatagcacagtgtcttcctcttcctggctgagcatatgtgattaataaactgctctccatcccatctgtccagtgtcaggtatcttgtgtttgctcattcctcttcaccagtagggacttcttccttcrccactggggagcaaaggaggtgattaaaacagaaggaaataaaaaatgaaggaggtaagaaaggcagttgttagtattattaccataaaatgtaccatttaaaagaaaatgtgactgtttttgcccaatgaattgagaa

SEQ ID NO: 168499 - DNA, 610 bp, Homo sapiens
caaagagacatatataaataaataaatgaataaataataacaagtgtcttattgggcaagaggaaaaggtaagattggaccaacagacatatctaaaattaattaaatgtatttaatacttttacattgaagaaatatttacacttgattttatttatttaaaccaggagtgggaaaactgtggccatggaccaggtctggcccaccatttctctttataagtaaatatttattgaaccacagctatgactggcataatttctaaggctgcctttgtgctccaacgcagagttgagtagttatgacagaaaccatatgtgcccaaagtaaaaaatcgtactatctgatcctttatagaaaaagattgcctgcctctaatctagcccattacattacagtgtctttggtaaacaggatttgaatatctattattatttayatatttggatccaatatttgtgaatcaaagcccctcttttctatacgctattgacatgatagaaaacctgaggtttcgtggtcaggaatggagacatatgtttcattttactaaaccgtcgtctgaataatggcattccaaaaatatatccaccaataatcatagatgaat

SEQ ID NO: 168500 - DNA, 636 bp, Homo sapiens
cacatgttataaaattgcataagattaacacacacaaatgagtctctataagactgagaaaataagattgctggattttgtcaaattatgtgacgttgtgtcaacgtcagtttcctgggtgtgatactataatttggcaagatattaacattggtataaacagggtaaagaatacatggtatatctctattatttcttacaaccagatgtgactctcaggtgtctcaaaatgaaaaattgagttaaaaattatgcaatatattttattttttagaagtggagctgcagttagggtaaactagcacagtgtattcaaggtctatatattwcagactctttactagtgtttaatctgattttaccacacaatatcagggaatactacttcatatataataaagaatctaaatccttatactgtaaagtagacatctgtgaatttctgcgtctggtaaagaggagtgagtttctatcacactaattcttctacaaatattgatcacaaattttggaaaaaaaagtaaaaataaaaacaaagttctctggattagaacaaaaacaggcatattttggactacatataaaatttggaacaagttcatttttgtagtcacagtagtggtggcataggcagct

SEQ ID NO: 168501 - DNA, 636 bp, Homo sapiens
cacatgttataaaattgcataagattaacacacacaaatgagtctctataagactgagaaaataagattgctggattttgtcaaattatgtgacgttgtgtcaacgtcagtttcctgggtgtgatactataatttggcaagatattaacattggtataaacagggtaaagaatacatggtatatctctattatttcttacaaccagatgtgactctcaggtgtctcaaaatgaaaaattgagttaaaaattatgcaatatattttattttttagaagtggagctgcagttagggtaaactagcacagtgtattcaaggtctatatatttcagactctttactagtgtttaatctgattttaccacacaatatcagggaatactacttcatatataataaagaatctaaatccttatactgtaaagtagacatctgtgaatttctgcgtctggtaaagaggagtgagtttctatcacactaattcttctacaaatattgatcacaaattttggaaaaaaaagtaaaaataaaaacaaagttctctggattagaacaaaaacaggcatattttggacyacatataaaatttggaacaagttcatttttgtagtcacagtagtggtggcataggcagct

SEQ ID NO: 168502 - DNA, 545 bp, Homo sapiens
aacttgacaatagatttctactaaaatcttacaactaatgtcatacttaatggtcaaatattcattactttcccctaatattaaaaagtcaagaatatgaaccctgagcatttgattcacaatgtactaaaagtcctagatgttgcaataaggttaagggaacaaaggcataaagaatagattttaaaaattgaatttttttttgcatatcatacgattgcttacatagaaaatctttggagatctttaagaagtactttacagacacatctcaaaataagacatacatgtggccaaaaaaaaaaaaaaacctatgaaaaaatgctcaacatcactgatcattagagaaatgcaaataaaaaccacattgagataccatctcacaccactcagaatggcgattattaaaatgtcaaaaaaagaagaaaaacaggtgctggcaaagctgtggaraaaaaagaacgtttttaccttggtgggagtgtaaattggttcaaccattgtggaagacagtgtggtgattcttcaaagatctacatgcagaa

SEQ ID NO: 168503 - DNA, 354 bp, Homo sapiens
gttgtttaaatgtgtgtaacacctcccccttcactctctctcctgctctggccatgtgaatactgtgcttgcctccccttcaccttctgccatgattgtaagtttcctgaggccatccaagccatgtgtcctgaacagcctgtggaactttgagycaatgaaacctcttttcttcatgtactactcagtctcaggtagttctttatagtaatgcgagactggaccaatacacaggttaaattgctgacagggcatatggaaatgttctcctctatcacttaaagataaatgaaaacaagagaaggaagcaactcccaaatagtaaggagaatgtgaggaaagtgaacagcaaaa

SEQ ID NO: 168504 - DNA, 431 bp, Homo sapiens
ttgtttaaatgtgtgtaacacctcccccttcactctctctcctgctctggccatgtgaatactgtgcttgcctccccttcaccttctgccatgattgtaagtttcctgaggccatccaagccatgtgtcctgaacagcctgtggaactttgagccaatgaaacctcttttcttcatrtactactcagtctcaggtagttctttatagtaatgcgagactggaccaatacacaggttaaattgctgacagggcatatggaaatgttctcctctatcacttaaagataaatgaaaacaagagaaggaagcaactcccaaatagtaaggagaatgtgaggaaagtgaacagcaaaattgagatgttgcgttaccagtaacaacaataaagaatagccacaggctcagaagagacttgaatcagaaattagaggt

SEQ ID NO: 168505 - DNA, 605 bp, Homo sapiens
ttgctgtgaacataaagtggctctaaaaattaaagttaattaattaaaaaacaaaaacaaatgtaatggaaaaatttcatgtgttttccattgagttgaaaaaaaaaagccttaaaaaactaacaaaacatccagcaacaattaaaataataaaaggaaacatgctcttccattactaacagcaccaaaattatggacaaagttttttggaaataaataagtcataggtttaattaccttaagagtagaattaagattgttgttatttgcagactattatcatttacctatatcaatcaatagaaaaactattacacctgatgagttcaatgacattagcagacacaaratcaacttataaatgtaatagtatatctgttcataattaattaccatttatggaatataataacaaaatgagactgctatattagcaaaacctatcaagttcctacaagttaatacaaaaataaatgtgtaaatatctatgcagaaaagatttaaactgtcaaaaatttcatagaaaatgctcataataaaagaagagtcaattcaaacacttagataaaattaatattatatagattaattatactaggttaatt

SEQ ID NO: 168506 - DNA, 458 bp, Homo sapiens
aacactcactgacttacgtggagcaacttacagtacttcaagctccattcatggtaagtgccctatataggtataccatttttaatctattgtacagtatttttactgcaccttttgtgtgtttttatatgatcaggtacacacatacttaccattgtcttgcarttgcctacagtattcagcacagtagtaggctatacaggtttgtagcctgtaagcaatcggttataccatgtagcctaggtgttagtaggctataccatctaggtttgcataagtgcactctatgattttcccatagtgacaaaataacctacagactcatttctcagaatgttttcctgttattaagcaatgcatgacagtatttcaatatggtgtgtctctctcctgcaagactaaaatcctgatgactcatcatttttatcttgttacctattatattacaaattcttagc

SEQ ID NO: 168507 - DNA, 592 bp, Homo sapiens
atgtagaaaaccttaaggattagacagaattgttagaactaataattgaattcagcaaggttacaagatataaaatcaaaatacaaaatcagttatttttctgtacactagcrataatccaaaaataaattcagaaaacgatttcatttaaaatagcatcggagagaacaaaatacctaggaataagctaaatctagaaggcaaaagatttgtatattgaaaactacaggagggagattaagcaagatggctaaatcgaaccctctagtgatcgtccccccaacccccatcttgcaggaacaccaaattgaataactatccaaacaagaaagcaccttcacaagaaccaaaagtccggtgagtgatcacggtacctgcttttaacatcatgtcaagtaatgaagagttaaagagggcaggaaaggcagtcttgaattgctgacctcaccactctcccatctccctgcagtcactgcatggtgcagagagagattctgtgcacctggcaggcagagagtccagagagtccaatgcaggactttgcattggaactcagtgtttcctgtcacagcagaaagcaatacagggcaga

SEQ ID NO: 168508 - DNA, 566 bp, Homo sapiens
ggcatgaacaaaaggcacataggccaatggtacagagtaaacaacccagaaacaaatctacacgtctacagtgaactcattwttcaacagaggtgctaagaacatacattgggaaacgagtcttttcaataaatggtgctgggaaaactggatatccatacgcagaagaatgaaactagccccctctctctttctatatataaaaatcaattgaaaataaagtattaggctggtgcaaaagtagtggcaggttttaccatcattttcaatggcaaaaaccgcaattacttttgcacccatctaataacttaaatttaagatcttaaactatgaaatagtgaaaagaaaacattgggaaaaatctccatgacattccaccggacaaagatttcttgagtaacacctagcaagcacaggcaaccaaagcaaaatggacaagtgggatcacaacaagttaaaaagcttctacgcagcaaaagaaacaacaaaataaagagaccacccacggaaggaagaaaatattttcaaactacccatctgactagagactaataaccagagcatat

SEQ ID NO: 168509 - DNA, 566 bp, Homo sapiens
ggcatgaacaaaaggcacataggccaatggtacagagtaaacaacccagaaacaaatctacacgtctacagtgaactcattattcaacagaggtgctaagaacatacattgggaaacgagtcttttcaataaatggtgctgggaaaactgratatccatacgcagaagaatgaaactagccccctctctctttctatatataaaaatcaattgaaaataaagtattaggctggtgcaaaagtagtggcaggttttaccatcattttcaatggcaaaaaccgcaattacttttgcacccatctaataacttaaatttaagatcttaaactatgaaatagtgaaaagaaaacattgggaaaaatctccatgacattccaccggacaaagatttcttgagtaacacctagcaagcacaggcaaccaaagcaaaatggacaagtgggatcacaacaagttaaaaagcttctacgcagcaaaagaaacaacaaaataaagagaccacccacggaaggaagaaaatattttcaaactacccatctgactagagactaataaccagagcatat

SEQ ID NO: 168510 - DNA, 566 bp, Homo sapiens
ggcatgaacaaaaggcacataggccaatggtacagagtaaacaacccagaaacaaatctacacgtctacagtgaactcattattcaacagaggtgctaagaacatacattgggaaacgagtcttttcaataaatggtgctgggaaaactggatatccatacgcagaagaatgaaactagccccctctctctttctatatataaaaatcaattgaaaataaagtattaggctggtgcaaaagtagtggcaggttttaccatcattttcaatggcaaaaaccgcaattacttttgcacccatctaataacttaaatttaagatcttaaactatgaaatagtgaaaagaaaacattgggaaaaatctccatgacattccacyggacaaagatttcttgagtaacacctagcaagcacaggcaaccaaagcaaaatggacaagtgggatcacaacaagttaaaaagcttctacgcagcaaaagaaacaacaaaataaagagaccacccacggaaggaagaaaatattttcaaactacccatctgactagagactaataaccagagcatat

SEQ ID NO: 168511 - DNA, 553 bp, Homo sapiens
acagacacacatgaggaatgggttttggagtagaaagtttaatagaaaaagaagaaaagagagagaraaaaagcttcctcatgttgagaaagcccaaaagacggcctccaagcagaaaaaaggactggctggtgctttatagtccagtttgaggaggcggtatctgattttcatagggctcatagattggtttgatcagttatgatgcccacatagagcacagggaaggctggtcaccccactctaatcttattatgcaaatgggcattccagtttatctgcaccatcttgtctgcttcttattgtacccgtgactgaccaagagaagaaaacagagctgccatcttgaacatgattgacacaactgctggtatctgcgtctgcagcttgattttacaggtggctcttcattagaaaggaaaatactttggggctgcttttcattaaaaagaattcttaccaaggactcctatacctttactatctgcctaagtaatttcttcttaactcctatatcatccccaactctggagtggtaaacctaactgctgtt

SEQ ID NO: 168512 - DNA, 553 bp, Homo sapiens
acagacacacatgaggaatgggttttggagtagaaagtttaatagaaaaagaagaaaagagagagaaaaaaagcttcctcatgttgagaaagcccaaaagacggcctccaagcagaaaaaaggactggctggtgctttatagtccagtttgaggaggcggtatctgattttcatagggctcatagattggtttgatcagttatgatgcccacatagagcacagggaaggctggtcaccccactctaatcttattaygcaaatgggcattccagtttatctgcaccatcttgtctgcttcttattgtacccgtgactgaccaagagaagaaaacagagctgccatcttgaacatgattgacacaactgctggtatctgcgtctgcagcttgattttacaggtggctcttcattagaaaggaaaatactttggggctgcttttcattaaaaagaattcttaccaaggactcctatacctttactatctgcctaagtaatttcttcttaactcctatatcatccccaactctggagtggtaaacctaactgctgtt

SEQ ID NO: 168513 - DNA, 553 bp, Homo sapiens
acagacacacatgaggaatgggttttggagtagaaagtttaatagaaaaagaagaaaagagagagaaaaaaagcttcctcatgttgagaaagcccaaaagacggcctccaagcagaaaaaaggactggctggtgctttatagtccagtttgaggaggcggtatctgattttcatagggctcatagattggtttgatcagttatgatgcccacatagagcacagggaaggctggtcaccccactctaatcttattatgcaaatgggcattccagtttatctgcaccatcttgtctgcttcttattgtacccgtgactgaccaagagaagaaaacagagctgccatcttgaacatgattgacacaactgctggtatctgcgtctgcagcttgattttacaggtggctcttcattagaaaggaaaatactttggggctgcttttcattaaaaagaattcttaccaaggactcmtatacctttactatctgcctaagtaatttcttcttaactcctatatcatccccaactctggagtggtaaacctaactgctgtt

SEQ ID NO: 168514 - DNA, 553 bp, Homo sapiens
acagacacacatgaggaatgggttttggagtagaaagtttaatagaaaaagaagaaaagagagagaaaaaaagcttcctcatgttgagaaagcccaaaagacggcctccaagcagaaaaaaggactggctggtgctttatagtccagtttgaggaggcggtatctgattttcatagggctcatagattggtttgatcagttatgatgcccacatagagcacagggaaggctggtcaccccactctaatcttattatgcaaatgggcattccagtttatctgcaccatcttgtctgcttcttattgtacccgtgactgaccaagagaagaaaacagagctgccatcttgaacatgattgacacaactgctggtatctgcgtctgcagcttgattttacaggtggctcttcattagaaaggaaaatactttggggctgcttttcattaaaaagaattcttaccaaggactcctataccyttactatctgcctaagtaatttcttcttaactcctatatcatccccaactctggagtggtaaacctaactgctgtt

SEQ ID NO: 168515 - DNA, 602 bp, Homo sapiens
atacacggagagaatagacatagtgatcatagayaggaaagaaggaaaatttagtgagaggatagctggaaaagagccttgtgattaaaggaggtttgctccttacttaccactccgatgtttctatcttcggttttgatctggacccaggagagaacccaatatgaaacaactctgttgtctgcagtctttactctggcttttggtctcagtcaagaaggaattcaggacacagaacacatgaggggtgggttttggagtggaaagtttaatagaaaaagaagaaaagagagagaaaaagcttcctcatgttgagaaagcccaaaagagggcctccaagcagaaaaaaaggaccagctgacataaatgcgccaagttttatagtccaatttgaggaggtggtgtctgatttacatagggctcattgatttattggatcagctgtggtatctacatggtgcacggggaaggctggtcaccccaccctaatcttattatgcaaatggcattccagtttattggcaccatcttgtctgctccttcttctcctttttttttttttttttttttttgtggtggagtctggctgacaaagagaaggg

SEQ ID NO: 168516 - DNA, 569 bp, Homo sapiens
ctttggtacggatggagaaatctcaggggacttagaagtgtctgaccattgtatttcagccccaatcaatcataaattgaggaattcatctttaacacctatcttgcaagggttacggaggtggttgtgttctgtggccaaataaccgacgaaaaatctgggttgattgttttctttttaactatataacttttctgatcctttaaagtctattgtgtgatcaatgaataacaataaccatggttaatatttaggagggtgctatagaatacagatttctcaaacatatttgaacagaatttattttatttgctaataatttctaaattttatgtgtgtgtgtgtgtgtgtgtgtgtktaataatacgtgagaaagattactttctacaaacagaaatattattttggcttgcttcatgagagtacaagttctctcttgctctcatgactccctcatttaacttcaaaagattttaatttgcaaatctgtaaagtgagagatttgaaatatatgagctttaagattctagatttaaagcattatgattctataaggctaatgtaaatac

SEQ ID NO: 168517 - DNA, 569 bp, Homo sapiens
ctttggtacggatggagaaatctcaggggacttagaagtgtctgaccattgtatttcagccccaatcaatcataaattgaggaattcatctttaacacctatcttgcaagggttacggaggtggttgtgttctgtggccaaataaccgacgaaaaatctgggttgattgttttctttttaactatataacttttctgatcctttaaagtctattgtgtgatcaatgaataacaataaccatggttaatatttaggagggtgctatagaatacagatttctcaaacatatttgaacagaatttattttatttgctaataatttctaaattttatgtgtgtgtgtgtgtgtgtgtgtgtttaataatacgtgagaaagattactttctacaaacagaaatattattttggcttgcttcatgagagtacaagttctctcttgctmtcatgactccctcatttaacttcaaaagattttaatttgcaaatctgtaaagtgagagatttgaaatatatgagctttaagattctagatttaaagcattatgattctataaggctaatgtaaatac

SEQ ID NO: 168518 - DNA, 503 bp, Homo sapiens
ccaccttttcctctttctcaaatgtaccactgtcttttttttaagtttaatttagaaatgaatatagacacaatcaaacaggttacattctttgttttgcatgtgatatatatttttatgtatggcatttgttcattttcattgctgtgtataattccaagtttattaatttctctatttcatattggcagatgcattctaatttttttgtacttcatattttcctgatgcctcaatatctgcaccaacaggctgacgaacactctgtccaggctgccaggcatatcagtgtgataaagtmcatctctgccacaaacttcccttcctcccatctcctgactgttacctactgacattcaaatgcaccagtaaattccccacatgccttttgcttttgtacttcccccgactcccaatacagttactcaaccataggcccttactctatctctgggctcctcagatacttggttgacctcctcttccttcatgaccccttgtgt

SEQ ID NO: 168519 - DNA, 412 bp, Homo sapiens
tattctttggatgtgtttttgctttcatattcttagatgcctttgagggtttgactgtggtagaaggtggattcagtcaactggctttgtttcgtatttttgatttgtcartgtgctatatcagctttgggaactccttgtccatttttttgctcatcttcaaatgctctggtattttgttgttgttgttgtttctttactataaatgccagattcctaaaggtttcctgaaatatgtctctatagaaattcttgtgggtagtatccagcaaagcccactcctcctgggtgaggatcgcagccatatcttcaaaagccattgagtcctgcaggtcacagggcaatagtggctgtggcagagccacttgggtctcacagaccaaagaagaagaaacagcgtgttatgcgtgcg

SEQ ID NO: 168520 - DNA, 624 bp, Homo sapiens
atctctgtttttctataattattcatttgacagggttatgatttcctggatggtattgatgctagtagatgttctttagtgtctgggcattgaagagttagggatttattgtaatcttcaccatcagagcgtatttgtatcagtccatcttgggaaagctttcaagatatttaaaaggacttgtgtgttgtgatctaagctgtatttgctttagggagcaccctgaacccagtaacgctgtggttcttgcagactcrtagaggtcccaccttgatgatcttgaaccaggtgcagaacaattctctggattaccagttggagactcctgttctcttccctttctttttcccaaacatacagagtctctccctccctattctgagccacctaaagctgggggtagagtgacacaagcacccctggggctaccactactatgactgtgctggatcagacataaagccagggtagctctgggttctgcccaaggcctgctgtaaccactccctggctactgtctatgttcactcaaggccctggggctttaaaatcagtgttggcaaagccagccaggcctgtgttttttcctttagagtggtgacgtcccctaggtcccagctgaat

SEQ ID NO: 168521 - DNA, 574 bp, Homo sapiens
caggtgccgtccatcacccctttctttgactcagaaagggaactccctgaccccttgcgcttcccaagtgaggcaatgcctcgccctgctttggctcgcgcacggtgcacgcacccactgacctgcgcccactatctggcactccctagtgagatgaacccggtacctcagatggaaatgcagaaatcacccgtcttctgcatcgctcacgctgggagctgtagaccggagctgttcctattcagccatcttcaggtaatagcagctctatgtcaacatattatattttcaatttatgatgrgtttatcaggatataaccccatcgtaagttaaggagcagctgtacaataaagaagacctgaacaaatgtggagacataccatattgttagattggaagactcaacatagtaaattctccccaaataaatatacaagtttaatataatttgtatcaaaatcccagcaaaatcttttgtagatagacaagattattataatattatatggagaagcaaaggaagtagaataactaaaaacaattttgaaaaagaaaatgaggaatcagtctacc

SEQ ID NO: 168522 - DNA, 616 bp, Homo sapiens
atttaagtctgtgctgactcttctatttcacatataatgatttatatatttgtctgatattttcattaaagttattagcatgaaaaatgatattctgtaagccagcaaaatgcttagcagtgtcagatattaaataggcagtagagtttaaacaaaatacaagcaggaatcaggaatctgagattatattatagctatcatcaatgtcatggattaaaaataatgcaaacaatttgatagtacacaagcctcaaatttcatgctatttgatggagatagagaggagctatctcttaaagaaaacataacgcattaactcagtaactcctaaaatttgataataaaatcagaagtgaagaaatgaagaaagacattaaagataagaaagaagaataagtgaagagtagagaaggagtttgtaatttctctgccttctttttcccccaaatttttgacactaagaagtaggtttgtagatttctcatgctgatgtgccatttacaatgcaggttattctgctacygtacatatttgtatttggtgaattatctcatatgtgtgtggtaaataggaaaccagttacaaggcttttcaggaatgtctgtgttgttacagc

SEQ ID NO: 168523 - DNA, 472 bp, Homo sapiens
gttactgatttgaggtctttctaactttttgatgtgggcatttagtgctataaatttccctcttaacagtgctttagttgtataccagagatgctggtacattctttgctctcattagtacaaacaaacttcttgatttctgccttaatttcattattttcccaggagtccttcaggagcagattgctcaatttccatgtagttttgtggttttcmgtgaatttcttaatctggagttctattttgattgtgctgtggtctgagggattgttatgatttcagttcttttgcatttgctgaggagtgttttacttcttattatgtgaccaattttggagtaagtatcatttggccatgagaagaatgtgtattttgttgtttgggggtggacagctctgcagatatttatcaggtctccttgatccagagctcagttcaggtcctgattatcttcgttaattttctgtctcaa

SEQ ID NO: 168524 - DNA, 602 bp, Homo sapiens
catcagacactgactgtgtcggtgccttgctctgggatttctcagccttgaaaactatgagaaatgagtatctgttactcataagcacctattctatggtattctgatatagcagcatgaacagaataagacatataccttctacgactatttgagggattggagataatgtcaattacaaacatattacagttgtctagaaatagctgactctctttaattggtagctttgcttgttattctaggacttggctttaccttctgattttcagataaacatagatttattcacgcactcggcaaacatgtaatcatactatttgcttaagtgttagaaatacaaagtgagagaaaaaggcgggggttggaaagaactctactacaccagattacagagtctggcatcagtagacaattataggtacaaggaaatgcagtgaggtgtgagtgtttgatatagtttggatgtgtcctcccaatctcatattgagagttaatatccattgttggagttggggtcttgtgggaagtgactggatcaygggggcagatttctcaacaatggtttagcaccatccacttggtgctgtcctttcaatagc

SEQ ID NO: 168525 - DNA, 602 bp, Homo sapiens
catcagacactgactgtgtcggtgccttgctctgggatttctcagccttgaaaactatgagaaatgagtatctgttactcataagcacctattctatggtattctgatatagcagcatgaacagaataagacatataccttctacgactatttgagggattggagataatgtcaattacaaacatattacagttgtctagaaatagctgactctctttaattggtagctttgcttgttattctaggacttggctttaccttctgattttcagataaacatagatttattcacgcactcggcaaacatgtaatcatactatttgcttaagtgttagaaatacaaagtgagagaaaaaggcgggggttggaaagaactctactacaccagattacagagtctggcatcagtagacaattataggtacaaggaaatgcagtgaggtgtgagtgtttgatatagtttggatgtgtcctcccaatctcatattgagagttaatatccattgttggagttggggtcttgtgggaagtgactggatcatgggggcagatttytcaacaatggtttagcaccatccacttggtgctgtcctttcaatagc

SEQ ID NO: 168526 - DNA, 487 bp, Homo sapiens
catcattcttgcagaagttctctacagagcattattgagtaaaattgtaggaaaaacttcartaatgagaaggtttataaacggaaccctaaaagttcaataaatggtcaccagatagacaaggctgaagatggtgctacgagctgagaaaacagagggagcaaaggcacagacgtattcaacagcatagtgcactcagggagctacagtggttcagaatgactaaattacagcatgctaactgtgcgtgttaaggtctatggctagagaggcagagagagaccagacagtgtaaaccatattaaaactttggaatgtatccagtcgttcagaggcttccacagtggggtgtatccacccccagtgctgtggaatacagtgctgaaatgttggaagtaaatatttaaatgtctaaccacattatagtaataccatcgttttgatttgtgtgcatcttatatttgtgtggtaatacatgttgacagtt

SEQ ID NO: 168527 - DNA, 539 bp, Homo sapiens
aaggctgaagatggtgctacgagctgagaaaacagagggagcaaaggcacagacgtattcaacagcatagtgcactcagggagctacagtggttcagaatgactaaattacagcatgctaactgtgcgtgttaaggtctatggctagagaggcagagagagaccagacagtgtaaaccatattaaaactttggaatgtatccagtcgttcagaggcttccacagyggggtgtatccacccccagtgctgtggaatacagtgctgaaatgttggaagtaaatatttaaatgtctaaccacattatagtaataccatcgttttgatttgtgtgcatcttatatttgtgtggtaatacatgttgacagtttttaagatatatatatgtatatatatatgcatatgttgatgttttttctttattgaagaggtacattatatatctataaaatttgaagacaactgctaaattattaagcagggccacaaagtaataagatttttgtattaaaaagttttcatggtagggggaagtgggcagc

SEQ ID NO: 168528 - DNA, 539 bp, Homo sapiens
aaggctgaagatggtgctacgagctgagaaaacagagggagcaaaggcacagacgtattcaacagcatagtgcactcagggagctacagtggttcagaatgactaaattacagcatgctaactgtgcgtgttaaggtctatggctagagaggcagagagagaccagacagtgtaaaccatattaaaactttggaatgtatccagtcgttcagaggcttccacagtggggtgtatccacccccagtgctgtggaatacagtgctgaaatgttggaagtaaatatttaaatgtctaacyacattatagtaataccatcgttttgatttgtgtgcatcttatatttgtgtggtaatacatgttgacagtttttaagatatatatatgtatatatatatgcatatgttgatgttttttctttattgaagaggtacattatatatctataaaatttgaagacaactgctaaattattaagcagggccacaaagtaataagatttttgtattaaaaagttttcatggtagggggaagtgggcagc

SEQ ID NO: 168529 - DNA, 559 bp, Homo sapiens
atcttttatgattactttttaaaaatacttcgaaatctctgagtacaatttataatgttgagttcctatctttctatctagcatttatttctacaaaatattttcttaactgtttacataggaagaataatataaaactctcttccatatcaagattataattaatttctgtatgctgagactaaaatatacaatatgactaggatataaaagagatgggaaacatttatgcctactgcatcacaaccattttgacaagagatggagaaacgattcagtgtgtcttattgtctacttctcctctgggggacttttgacctagaggttagaatatttattcctgtctcccttcctatgccttaaaagactacaagtgaaacaaatactgctgtggcatccattttctctgtagagattatagaaccggtgatcagtcttttgcattctcaaaagctacagattgagagggctattaataaatccttttttttaagctagaagaaagttggagcytagtgatccaaccacagacaacttaagatccagaaaggatttgtaa

SEQ ID NO: 168530 - DNA, 435 bp, Homo sapiens
tttccaacagtcacttagctagtgggttacaaggctacagtttgaacacagctcgcaaacccattgctttttaaaaaccagtaataccactacttattcactttatcatggtatttaaatttcaagcatgaccaaataaacacatgcttatgcttacaaacataaatgctactgaaacaaaagtttcagaaaacattattcatactgcatttcaatatattatacttttgaaatcctagtcacaatcccctaaactgattttgtaaccaactaactcacaagtcgcagttagaaaatagtcttagattacatgacacacatgcttttttcattaaaaaccccatttaaatsaaatgacccttaaagtccattccggttctaaaactggacatttaatacagtaagtaaacatgaagatgctttagaaaatttaaa

SEQ ID NO: 168531 - DNA, 521 bp, Homo sapiens
cgggcggatcatgaggtcaggagttcgagaacatacaggccaatatagtgaaaccccatctctactaaaaatacaaaaattagccrggtgtggtggcatgcacctgaatcccagctacttgagaggctgaggcaggagaatcgcatgaacccgggaggtggaggttgcagtgagctgagattgtgccactgcactccagcctggtgacagagtgagactccgtctcaaaattaaaaaaaaaatatcttatatgcatgtgactttcccccacatctattttaagtacattgagcagtgctttaaaaatattttcttatatggcaatttcaatttagcttattgaaaatgtattgagcacctactaaagttgtgaggagaaagaaaagcagtgttcatggtagagccaagggcttactatgccatcctggggtgcagtgtagcatctcagcaggttgatggcagactagcgcaagatttcttttttcagttataatctgaatgttgttgggtatgttctgcct

SEQ ID NO: 168532 - DNA, 566 bp, Homo sapiens
aaccaccattctactccctgattttatgagttatatttttttagattctacatatgaatgagaccatgcagtatttgtctttctttgcctggcttatctcatttggcgtaatgtcttccaggttcattcatgttcaggattttctttatttttagaccaaacaatattccattgtgtgtgtgtgtgtgtgtgtgtgtgtgtgtgtataaagtaatataatataaatgtaatatatatgatgtaatatatatataaagatgaaatcttatacattcatctgccaaaggacacttaagacacttagattgtttctatatcttggctatygtgaataacactgcaatgaacatgagagtagagatagctctgtgagatactgttttcatttcctttgactatacctgtagtgggattgctggatcatatggtagttctgcttttaatttttttaggaaccttcatactgttttccgtgatagttacactacatgccttctatattttaaaacctaaacttaagcagagtttcgtgtgttatgcattcattgtcccacaaatataagtca

SEQ ID NO: 168533 - DNA, 630 bp, Homo sapiens
tgggtaaggcctgaatagatgatgctataacagtgtgatgaccttgtggatcaattcagttgagttgtaatgtattgccatttaaatgtatgtatagccaggttccatggcacacgcctataatactggctatttgggaggctgagatgggaagatcacttgaggccaggagttcaagactagcctagacaacatagtgagacccycatccctacaaaaacaaggaaacaataaaataaatgtatgtataaaattattgttgctatccatgtactcgaaaaagttcccaaagcatcaagtagtataatgagagatgactgagctggtaatcaggaggttggatcttaatctctatttttaccattttccggatccagtccattggaccccattgaggactcactgattctttcatttattcaatgagcttgattgtctcctctgtgtgagacaagacttctaggtgctagggatatagcaatagacaagaaagaccaagtctttgacctcatagaacttacattctagtgaagaagacaaatagtaaataaacatatagtttcactgttggataaggtattatgaagtgagggaggaaagcagggttcagttactttctctacaaaatga

SEQ ID NO: 168534 - DNA, 630 bp, Homo sapiens
tgggtaaggcctgaatagatgatgctataacagtgtgatgaccttgtggatcaattcagttgagttgtaatgtattgccatttaaatgtatgtatagccaggttccatggcacacgcctataatactggctatttgggaggctgagatgggaagatcacttgaggccaggagttcaagactagcctagacaacatagtgagaccctcatccctacaaaaacaaggaaacaataaaataaatgtatgtataaaattattgttgctatccatgtactcgaaaaagttcccaaagcatcaagtagtataatgagagatgactgagctggtaatcaggaggttggatcttaatctctatttttaccattttccggatccagtccattggaccccattgaggactcactgattctttcatttattcaatgagcttgattgtctcctctgtgtgagacaagacttctaggtgctagggatatagcaatagayaagaaagaccaagtctttgacctcatagaacttacattctagtgaagaagacaaatagtaaataaacatatagtttcactgttggataaggtattatgaagtgagggaggaaagcagggttcagttactttctctacaaaatga

SEQ ID NO: 168535 - DNA, 580 bp, Homo sapiens
gaaacattgcctacattttttttttttaacaattaagcagtgcttgttaatcagattttgttgacagctttccaggactgtaattgaggttgcataaccttgccttcatcgataaatgcaattgagatacagtgtctacatgagaaatatttgatcacaatttggaagggaggtatctatttaacaaattcaaaaatattgacccgtatgctgacattagagagacagctcaatttcctctgtactgttttactcacaccaagcatggcatctatttaaaagaatcttttatgagcccactacctgcatgktagtcaacacagagtagattactgatgacgatgaagaagtgaaagatatattcaaggggaatctagctagctagaaacctggatttgaattcaaaagctttaaaaatactgacaatatggagataccgacactttattcattcacacaataaatatttactgggcaccagcttcatattgtgagctatactaggtttgagaaacacaatggtgagccaaacagcaacagaccctgccctctaagaatggaatgaacagagtgtttggaa

SEQ ID NO: 168536 - DNA, 490 bp, Homo sapiens
ccacatgctctcactcataagtgggagctgaacattgagaacacatggacacagagaggggaacaacacacaccagggcctgttggagggtggggattgaggggagggaacttagaggatgggtcaataggtgcagcaaaccaccatgaacacgtatacctatgtaacaaacctgcacgttctgcacatgtattcccgtgttttctttagaagaaataaagagtaaaaaaaaagaaagtcgctaagatttgctgccataacactatggaaaatacatataagcttatattagaatcttggggcaattgatttaatcagaaataggctgtccaaaacaatcccaatttgccataaatgtgctgatacagtcattcccattttargacacagcagaggtttcagtttgcttctgacttgaattatttttcttgttatttccaactttgcatatcatactcttcttcccttaccagtctttttgtctaataac

SEQ ID NO: 168537 - DNA, 490 bp, Homo sapiens
ccacatgctctcactcataagtgggagctgaacattgagaacacatggacacagagaggggaacaacacacaccagggcctgttggagggtggggattgaggggagggaacttagaggatgggtcaataggtgcagcaaaccaccatgaacacgtatacctatgtaacaaacctgcacgttctgcacatgtattcccgtgttttctttagaagaaataaagagtaaaaaaaaagaaagtcgctaagatttgctgccataacactatggaaaatacatataagcttatattagaatcttggggcaattgatttaatcagaaataggctgtccaaaacaatcccaatttgccataaatgtgctgatacagtcattcccattttaggacacagcagaggtttcagtttgcttctgacttgaattatttttcttgttatttccaactttgcataycatactcttcttcccttaccagtctttttgtctaataac

SEQ ID NO: 168538 - DNA, 462 bp, Homo sapiens
aaaacaaaaataacaacacgcaaaaaatatggagttgagtcattttatgtttcagatggctatttaataccattatcttttagaaagcaagtgataaagtttccaattatatccttgtataaacacaaagactgaataataaaacatacttgattcgattcttaccttttagataactatacccaagtaatacaaattaattacaaagtataaacttagcaggaggtctcacatatagagtccttgaacatattcattttaatgcttgtcattgacataaatttattttaaatgctaaaccaaatgtgcaaataatatgaaataaagagaaatatatgatattttgaataaaattaagattcagaatgatgtcattctataatgtaaagtatytctagctttcagagaatatttaaatacattgacaaggtgaattttatcaaatataagtctaaagcccca

SEQ ID NO: 168539 - DNA, 581 bp, Homo sapiens
tctctctaatttcctacaacattcttctgggtctttgctttatagctgtagtcaaggcctcaataatggtctaggctatgtaaggggaatggacaaacacaggtataattggggccctattcttaatgtagttttattgaagagagagattttaccttcctttgtgagaaggagcttttgatggatagacattgtatatttttacccctgtgcttattataggtataaaaaatttcatattaccttcttaatttcttcctattatttcaattacaccaatacttggacttgctatagatcaagttattagctgtatcttttgtgattatttattctcagagcttgctgatactaagcatgttttagttttaaacagaagagacgttacacgtataatttggtatcccacaataagaatatcaaatttttaaagaactggacttgrtatttaaattccttactggcagcatgtattacctatacttatatggaacgtactctatctttgcagaaaactttaaaagatgtcttgctatcaggtattttgaaataatttatttatggatttacttaaagagcac

SEQ ID NO: 168540 - DNA, 631 bp, Homo sapiens
tatcacatcctttatttgtttttaaagtgcaagtaacctttcctcctaggacatttatctttatgttaaacttaaattcatcttattgaaaattcaagtgattctttgggctctgtcccagtggatctggagaccagctggtcatgaggattttaacttttttcaagtgtatttatccctcaagcctctgtaaatggaaaacgttgactgcaaggaacaaagcctagcagtgctttgcatagcatcctatactgcgttggtttatgtatcagcaataggatgatgygagggtttgggcaatgctgaggcatgtagtcatgagctgaggtgatattcttaaggccaaggacacagtaaaccattccttggttgtcctgagaagaaaagagggcagtatttctaaagagtagggattctgaagatgttgaatacattgccctaaaggtgtgctgatctggagaaaagtggggtggttaggaagtaaatgtggcaatagtggctaaaattataaagttacctggcaggacaatatcatctctattggacagaaaaggaaatagattcattcagcttttgacttgcttgctcaaggttacacacaaataaaaaggccagatcttgaattcagggt

SEQ ID NO: 168541 - DNA, 593 bp, Homo sapiens
ctaaagtccaaagtctcatctaaatatcacctaaatcagatataggggagactgtaggtatgattcatcctgaggtaaaatttctctccagctataaacctgtaaaatgagacaagttaatgtgctttcaaaatacaatggtggacaggcctaggatagacattcccactgcaaatggagaaaccagaaggaagaaagaggtgacaggtcccaagcaagaccaaagcctagcaaggcaaattctatcagatcttaaggcctgagactactcctctttggactgatgctctaccctccaggctgtctggggcggcagagtcatccccaagtctatgtaggttggcctcacccttcagatcagtattgggcaggaaactgcagaagtgacacwcatttctaattgtgtaaattagtacaatctttctaaagatcaactttgtgatacaaatcaaaagtcataaactgttacatatcccttgatgcagtaattcaagtgatagctgtttatcataatgatattgttatacaggcacaacagattttaatacaagaatgcttatcacaatttgtatattataatgaaaaagtggaat

SEQ ID NO: 168542 - DNA, 593 bp, Homo sapiens
ctaaagtccaaagtctcatctaaatatcacctaaatcagatataggggagactgtaggtatgattcatcctgaggtaaaatttctctccagctataaacctgtaaaatgagacaagttaatgtgctttcaaaatacaatggtggacaggcctaggatagacattcccactgcaaatggagaaaccagaaggaagaaagaggtgacaggtcccaagcaagaccaaagcctagcaaggcaaattctatcagatcttaaggcctgagactactcctctttggactgatgctctaccctccaggctgtctggggcggcagagtcatccccaagtctatgtaggttggcctcacccttcagatcagtattgggcaggaaactgcagaagtgacacacatttctaattgtgtaaattagtacaatctttctaaagatcaactttgtgatacaaatcaaaagtcataaactgttacatatcccttgatgcagtaattcaagtgatagctgtttatcataatgatattgttatacakgcacaacagattttaatacaagaatgcttatcacaatttgtatattataatgaaaaagtggaat

SEQ ID NO: 168543 - DNA, 429 bp, Homo sapiens
agagttcctcatttggaacatttcagctaccacagtggtaatgtccttgtacatacacttttttggctgctttctatgccttgttttacttttccactgtcctttctgtgtctcctgacatcttcacccacataaatgaccagcacttgaatccctgtctctaggtctttttccaaggamatccaacctaaaacaccaattcaagcagaattttattgaaaaacaatatttattgaaaactgactgaaaatatgtccataagcaatattatttattactgaggttggtgtgatcacaaatgagtattttcttccttttgcttatctgcattatctttagtgattctggaaaggaaaataataataaaagttgtgtcagacaggcaaaatcaaccaatactttttcctcagtttactctttctcaatccc

SEQ ID NO: 168544 - DNA, 618 bp, Homo sapiens
agccagtgaagctcgcatttattcagtatagattaaatgacaaaggtcttgagtaaacaccactagagggtaattgacccagttgctractccccagagtagagagaaattatgcaccagcagttgatcaaaggttggtcttgggaccacatgagtaaacaagctatttagataaactcctctgcattcctttgtacctactgtgaactatttacacaaggtaaggattagactgctttcagccataacactgtcctaagacttttgcaaaatcttcgagccttccaagaagatttgtgtctatattctataacttcattttaaagtttttcccaccagcctgactgtactcctacgcttacaatgtcccttttacatgaaaataaatcctttgagttcctcattgtccttatataatatagttttgtctaaatccttctcctttgataaaattggaaatgttttaagtttaaaactttttatgtttcaagtttaccaagtctcacccaacagaaatgaattttttctatttttctcctctcctttgagaagtcactttctatttttctataatattaacatatatcaagtattgctagtggctgattgtcccctgat

SEQ ID NO: 168545 - DNA, 537 bp, Homo sapiens
atagattattttcattttcttcctatcttttatttttcctatatattctataattatcataaattactttaaaattcttacaaatatgatttacggtaaatatacagataaaagaaactaaaacaaaagactaatggtgattttcctctgtatggtaaaatgataattttatttattaataattttttgtgtatttaaaaatttaaagcaactaaaaaggtttataagactgaaataaactgtcctttaactacgttttgacagccctcaagttgcaaataaaattgccttcygttcccccctgctcttccctacataattttgctacctgaaattatgttcttagcaactactcatgatacacgcttgcagtcacactaaatttgggatcccagtcatttgtctaacacacacagacacacagaaacaaaagaaaaccagttatttattttagggtccacatttttggaatatggaccaaaaatatggacgctaaaataaacaaatggtttgctttcataacattgttaaacatcc

SEQ ID NO: 168546 - DNA, 537 bp, Homo sapiens
atagattattttcattttcttcctatcttttatttttcctatatattctataattatcataaattactttaaaattcttacaaatatgatttacggtaaatatacagataaaagaaactaaaacaaaagactaatggtgattttcctctgtatggtaaaatgataattttatttattaataattttttgtgtatttaaaaatttaaagcaactaaaaaggtttataagactgaaataaactgtcctttaactacgttttgacagccctcaagttgcaaataaaattgccttctgttcccccctgctcttccctacataattttgctacctgaaattatgttcttagcaactactcatgatacacgcttgcagtcacactaaatttgggatcccagtcatttgtctaacacacrcagacacacagaaacaaaagaaaaccagttatttattttagggtccacatttttggaatatggaccaaaaatatggacgctaaaataaacaaatggtttgctttcataacattgttaaacatcc

SEQ ID NO: 168547 - DNA, 492 bp, Homo sapiens
caagcttcaatcaacttagagatttattttgccaaggttgaggatgcacctgggaaaaagagacacaaggcacagtaggatctgcggcctgcactttttccaaagagaattttgagagcttcartatttaaagagaaaaaagtgggcaggatggggaaggaggaaagaaaaaaagagagataaagagtatggtcacattcttgtgaggctttcattagcgctcacggaatccacatgttgcatatgaaaatgagggagtagaggagcagtcagttatgtatttgctcagtaaaactgcactttacataagataaagtaaacacagagtagaggaagaagtcaaatatgcatttgccttagggtggaggggacaatttctagtctcctcttgtcccacactcataaagataagctgttaatttacattttcagggtgagggatgccacccggggagatatgcggccttttatcttgtaactgtttaggaacaa

SEQ ID NO: 168548 - DNA, 550 bp, Homo sapiens
gaattccattctgggtgaaacaagatagcaactgatgacgagggaaaacgggagtttccctaagagacactggcttaagtcacatagctatcactgaggcagccagcatgaggaacccattataagtgccctcagaagacacattgtgaaaatgaatatctaatttcccttgggacaagcatctaattttctgtaacattgtgccttctcacagatgaaaagggttgctctcagttacttggatcagtgttctcagatgctctaggaaaagcactttaaatggttactatgaccaggacaagatttttgagccagtgtgttgtctgcattttttttgtgtgtgactacaaagagtgtttagcaacgttgtagttataaagaataagcattattacatgttaattttaaaagaaagaaaatcaagttgctatytatgtacatacatatatttttataacaaatgtgaaaaaatacatgaggaaaagcacactaggaaatcatcagctggtagtcttaaatgatgctagcaatgcttagtgaatacttagtg

SEQ ID NO: 168549 - DNA, 621 bp, Homo sapiens
cacgggggttgcctagggaaatgagcttcagtaatactgcataatgcagtctcttatctcctgtctaaattatgcttttgataatcattgagttggatcaccyttcccttcatcctcaggtacaaggacaatttttctcttagtatccagactccagtcctcaagtctgcaaaaccatgagaacaataacactttaccatcagaacaataacacttctttaccatcagagacattctccattgtacacagagtacagatcaattccaggtatgtaattggtactgagtagtttctacaagctaaagatacaaaatattttgagatctacagataactgaaaaaaaaatgaagccacctatttgagaacaaagactacagaatctacagatacattttttaaaaacaaagcatcacagttggcactgtttcatattttactatctatatgaaaccaccaaacgaatttcaacaaattggcttgtgccaactctagttatttatctccatttggcaaatacttcactaaagcaaaagagctcaatgtaacttacacttccccttcccttctgccaccaccttaatcacatggtgagctgttctttaagaatagttcaaggaaa

SEQ ID NO: 168550 - DNA, 549 bp, Homo sapiens
aattaagaaggaaatggcaaaatttcttgaaacaaatgataagggaaaaacaacataccaaaacctatgggatacagcaaaacagtaagtagaagtaaatgtatagctataaatgtctatatcaaaaaagaggaaaaacttcaaacaaaaagtccaatgatgcatctcaaagaactagaaaacccaaaattagtagaagaaaataataaaggtcagaccagaaatgaatgaaattaaaataaaataaattacaaaagatcaataaaacaaaaaaattgtttttttgaaaagttaaacaaaattggcaatcctttagccagaccaagaaaaaaagagtgaaaattcaaataaataaaattagaagtgaaaaaggagacattacaactgatacgacagaaattagaaggatcattagtggctactgtgagcaactacatgccaatacactgaaaaatctagaagatattgacatattcttagatacatacaacstatcaagatagaatctcaagaaatccaaaacctgaatagaccaacaacaagtaacat

SEQ ID NO: 168551 - DNA, 617 bp, Homo sapiens
tctgctgtacattggtaatagagtattgaattagacaacgagcttccttgcccttctgcattgtaggtattgaaattataagtgcaagaacgttcatgaaggagattttcagggtgctatagtatcattaaatagaaccgaagtagtgatggagagggaaggtttgcatgaagaaacagcattaaactgaatatgaagtagatacatggggcttgggcactagaaattgcaaaagatgaaggttatgataagcacaaagaaattccagtggaggtactagcccttggcttcaagagtagaaacagaaggataaagagacctgtatggttgaatcttaggaaggaagagaaagcaaggtaacagtagagcgtcatgacaacacayagataattaggggccggatcatgtaggaattaggtgataaaggtttaggttttatttaaattgtaatggaaatttattgaagatttatatataaaaaactaaaaatgtaaaaatttaccttataaatatttttcagaattttggagaacaatctgaaatgatcacaacaatccaaaaaaagaatggttgtgatttgggctagtgtgatggaactgtgaataaagacaagtgga

SEQ ID NO: 168552 - DNA, 361 bp, Homo sapiens
gaactcaggaggcggagcttgcagtgatccgaaattgcacccctgtactccagcctgggtgacaaagccagactccctttccaaaaaaaaaaaaaaaaaaaaaaaaaaaaacaataactcagaaatctgaagcatgaaaaggatttgatgtgccattactggcttgaagataatggggaatatatggcaaggaatggcagtcggccactaggagctcagggcagtttccagctgacagccagcaagaaaatgggtacctcagtacaacaatatctaggaacttaattcttccaacaagaagcrtaaacttgaaagtggatttttcaccagagaatttagatcagaaatcagtccacacaac

SEQ ID NO: 168553 - DNA, 576 bp, Homo sapiens
gcctttttgcctccaaatgaccatattacctctccaacaagggtttggaactgggctaaggctgagataactgaaaagaaagaaatagaatatraagaataatgttcattgagctataggagtacgttgtaacccaatgcaaggaagctaaaaatcatgacaaaaaaatggaggacctgacagacaaactagacagtatagagaagaacataattgatctgatatagatgaaaaatacattacaagaatttcataatgcaatcacaaatattaacagcagaatagactaagtggagaaaagaaactcagaacttgaagactgactttctgaaacaagacagacaagaatagagaaaaaagaataaaagggaattaacaaaacctctgagaaatatgggattatgtaaaaggacctaatctatgactgatgggtgtacttgaaaaagatggggagaaaggaacaacttggaaaagatatttcagtatattattcatgagaacttccccaaccttactagagaggcccacactcaaattcagaaaatgcagataattctggtaagatacttcagaaaa

SEQ ID NO: 168554 - DNA, 470 bp, Homo sapiens
gaggacctgacagacaaactagacagtatagagaagaacataattgatctgatatagatgaaaaatacattacaagaatttcataatgcaatcacaaatattaacagcagaatagactaagtggagaaaagaaactcagaacttgaagactgactttctgaaacaagacagacaagaatagagaaaaaagaataaaagggaattaacaaaacctctgagaaatatgggattatgtaaaaggacctaatctatgactgatgggtgtacttgaaaaagatggggagaaaggaacaacttggaaaagatatttcagtatattattcatgagaacttccccaaccttactagagaggcccacactcaaattcagaaaatgcagataattctggtaagatacttcagaaaaggattatcatcartaaacatgattattagattctccaaggttgaagtaaaagaaaaaaatatta

SEQ ID NO: 168555 - DNA, 428 bp, Homo sapiens
ctatattatagataatatgcctaatttcctccactttgtctctacacaggtcaagactgtgcaccccagaagtatgaaagaagcaaaagtgctctttgttctcttcttatattcgttattcaaactcactttctacatacagatggcagaaagcatctggttaatgggacctctatgtagtttttaaaaggttccaagagtcttttcaaaaaggggtagtagcagggtgcccagctttctgtaaaaaaagaaaacaacaacaaaaatgagtggtataaagaatccagagaaggaagaggaaccagaggaacrcactgaaagtacaaagcagtggttattcagtcactacagagacagttctgcaaaagtgataatgtggtaattatttaagactgtgctaagtggacttgacaggtaattactaatga

SEQ ID NO: 168556 - DNA, 536 bp, Homo sapiens
aattctttgaatctacgtatgaagtgctgttaaaatttttgaagggccatgtataaaaccaatcagacatgacagagcaaaaacactaaaccattttatgaaataacaccaacctctcagattcacctctgagtagcacacaagtgaagcagaccagaattgcttgcaaatattttgaaaactaaattgatattcaaamcatagcccatgaaagtgagcgagaatgtgcattctcatcctaacaggttgactgcttgctaaagtagaagatttaaataggaacccacatctcacaacttaatacccacaatgttcaggacataattcaaaatagttttgctaacaagaccagaaaaatcttagttttcaatgaggaaagaaaatcaacaattaccaacaccgagatagcataatgttggaattatctgacatatattttaaatcaggtatcataaaaatgttccaacaaacaattatgaacattcctaaaacaaatggaaaaatataaagtccaaacaaagaaatagacaaaataa

SEQ ID NO: 168557 - DNA, 276 bp, Homo sapiens
caagtagttctttccactcacgtgttgaaaaccctttagtagactatgatggatgacaggtctctaaaaagattagtcctagttcattcctatcaatctcattgtcgatgctctgtccccacacaccaygctacatcatctcatccttgttatttcttgaccaagccaagctcactccacagcatgactttgtacttgctgcacagctatgttctccttcctatctgcatgcttttgccactcatatggttaggtctctgcacaaatgtcagttcc

SEQ ID NO: 168558 - DNA, 642 bp, Homo sapiens
tccacctggcttggcacaaaccccccacccaggctcaagaatgccacccaggagagtagggaacagcctacccagcgtagcaccactagcatctcccagcgatctgaagatgtgaccactcagcttgctgccaacaccactgctggcacccaatagaatgtgccacctgagtacctggagactggctcaccaagccattcatagctacagctatcattctcccagagacctgaagatgggacccccaggttgctgccaacaccactgctggcaaccaatagcatatgccacctgagcacctgggaactggctcaccaagcccatcatagccacagctatcattagcgagtgctrcctgtgacctagaaggttgttcaaccacagctactaccatcgcccatgcccaggggcccaagaacctgcccacctatccaactgaccatggtcactctggccatctgggatcctaagaattaacctccctgaatccactaatacaggagcctgcatacactacctggggtcccaaagagaggtacatttggcccaccactgtcaccactggggcttgagaaatggcccacctggcatccctaagtccagtaaagccttaccagagactccactaacaaccatatccaa

SEQ ID NO: 168559 - DNA, 642 bp, Homo sapiens
tccacctggcttggcacaaaccccccacccaggctcaagaatgccacccaggagagtagggaacagcctacccagcgtagcaccactagcatctcccagcgatctgaagatgtgaccactcagcttgctgccaacaccactgctggcacccaatagaatgtgccacctgagtacctggagactggctcaccaagccattcatagctacagctatcattctcccagagacctgaagatgggacccccaggttgctgccaacaccactgctggcaaccaatagcatatgccacctgagcacctgggaactggctcaccaagcccatcatagccacagctatcattagcgagtgctacctgtgacctagaaggttgttyaaccacagctactaccatcgcccatgcccaggggcccaagaacctgcccacctatccaactgaccatggtcactctggccatctgggatcctaagaattaacctccctgaatccactaatacaggagcctgcatacactacctggggtcccaaagagaggtacatttggcccaccactgtcaccactggggcttgagaaatggcccacctggcatccctaagtccagtaaagccttaccagagactccactaacaaccatatccaa

SEQ ID NO: 168560 - DNA, 642 bp, Homo sapiens
tccacctggcttggcacaaaccccccacccaggctcaagaatgccacccaggagagtagggaacagcctacccagcgtagcaccactagcatctcccagcgatctgaagatgtgaccactcagcttgctgccaacaccactgctggcacccaatagaatgtgccacctgagtacctggagactggctcaccaagccattcatagctacagctatcattctcccagagacctgaagatgggacccccaggttgctgccaacaccactgctggcaaccaatagcatatgccacctgagcacctgggaactggctcaccaagcccatcatagccacagctatcattagcgagtgctacctgtgacctagaaggttgttcaaccacagctactaccatcgcccatgcccaggggcccaagaacctgcccacctatccaactgaccatggtcactctggccatctgggatcctaagaattaacctccctgaatccactaatacaggagcctgcatacactacctggggtcccaaagagaggtacatttggcccaccactgtcaycactggggcttgagaaatggcccacctggcatccctaagtccagtaaagccttaccagagactccactaacaaccatatccaa

SEQ ID NO: 168561 - DNA, 370 bp, Homo sapiens
acttcaccaaaatagctcaatctgatgaataaatatagtaaagttgcaggatacaagacctatatataaaaatcagtatcatttctacacaccattaatgaactacctgagaaagaaatcaagaagataatcagccagctaagaataaatcaagaagacatttacaatagctacaaaaaatgagaaataaattgaatcaaggtgataaaagacctctacaaaagcaaaactacataatgctgatgaaaaaatttgaagaacacacaaacaaatggaaaggcatctcatgcttacggaytggaaaaatcaatattgttaaaagaaaaatactatccaaagcaatctaaaaatttgatgcaatgcctttcta

SEQ ID NO: 168562 - DNA, 530 bp, Homo sapiens
ttaagtcataaaaggcttactgtgtttggttttgagtcacttgatagatatctttgatttttttaaataagaaaaagtgagttcaacattgctaggaagggtttttttattatttgttttaaagatctctatgatcagaagtcagcgtggttgacagctggtactaagaatatatcaaggatactattsagtcctctattctctccaatgggtcatgcttctcctatgggtacttactcgtcaccagaaatcactctttttgaaaccctgctaaccatatattctgctctttctgtttgtttcctttcttgttggaaagatttttgctaaacataatgtagaacatcattgccctctttgggaagattaaaatcccctcaaactggcttctgtaagattcttttatttgcttctggtcctccttcctccttttgtcatcttcagtcattcatccagtttccttgaattatctgttatgttgcccatctaagccctaagcattatctcacatactttttttttttttgtgg

SEQ ID NO: 168563 - DNA, 636 bp, Homo sapiens
gggctctcacctctgaacaaaccacggatccccagaaacaaagagcagggctgctttgcaacatgcctttggctgagccagtcaatttcccagtgggccagaggctgcaaggctcctttgtcactgggagacctgcatgcctgtcaagaaattctccccaaggacaccacccagccccaccaccaccccagggaggtgaaggtgcctgactcctagcagccccaagctgtgccctcaaggcacctgccaagacaaaatatctttacaagctcatgccttagacaagcatttattgagcatctactgtgtgcttgctccagtgccaggcactgaggcaccacggtctgtgctcccttacagagagtgcaggggagaaaacaggaaaatgactacacagygtgagagaagtttggtttggggatgcatagggagttaggagagtgcctaggaggggaacacaacacagaacaggggtcccggggcttcctggaggagctcctgactaggtaagacctaaaggctgaggggcagccggccagaccgaggccgtgggggaggaggggagggagtgtgcttcacgctgcgcgtagccctggagtgcggagcaagcaggagctgaatggtgcctgggtagca

SEQ ID NO: 168564 - DNA, 613 bp, Homo sapiens
gtagcattattcacaatagccaaaaaggtggaaacaatccaagtgtccatcaacagatgaatagattgacaaaatgtggtacatgcacacaataaaatattattcagtcataaaaaggaatgaagttctgacatatgctaccatacggatgaaccttggaaacactgtgccaagtaaaataagccagacacgaaagggtaaatattgcatgactccacttatacaaaatatctagaataggcaaattcatagaaaagaggttactggctgggcatggtggctcatgcatgtaatcccgacactttgggaggctgaagcgggtggatcaccagaggtcaggagttcaagaccagcctggccaacatggcgaaaccccatctctactaaaaatacaaaaaytagctgggcatggtggtgggtgcttgtagtcccaactatttgggaggctgagacagaagaattgcttgaatccgggaggcagaggttgcagtgagccgagatcatgccattgcactcaagactcggcaacaagcgagaatccatctcaaaaaaaaaaaaaataagtaaagaggttactagatgctgggcttagtgggtggcgtatgaggagcta

SEQ ID NO: 168565 - DNA, 607 bp, Homo sapiens
atttgacttgtagagccaataaaaaccccttgggcaactgaccttgtttattcctgtgagccagccagtgatctctgactgctgtccagaagaaacacgagggatgggtcatgtgaaaatctggawcagtattctaattctgggcatgtattggaattggctagcaaccccatatcagcttggttccaacagttggccagttcatggaaagccttctaatttagtttacttgggataattttacttaccttgctttactgttgtggaatatattgctgttgtactctttgtataggaatgcaggataagcttactgaatactttcttaaattgaacacttattaatcttccagatatcaccttttgttggactcaagagttatgaatggccctcaccatactgatgctttctgactgagctcctcactaccctgaacacaagagggaggaatatcatcgcccctattcagcctggagaagttacaaaagatggatcttcgtccctctgcaacccttaggattaatggttctcctataaaagggatggggggaaaatgtcagaggcatttgaacaagagcaactccatcttaaagaggagctgggtaa

SEQ ID NO: 168566 - DNA, 631 bp, Homo sapiens
aaactgggcctcagttttctgcctttaaaacaatggttcttaaccattttagggtaaagagtctggtaacattcagatttcgcttggtacttgggaaccttccttacagggacacatgatattgtactgcttactatccgacccattttggaaaactgaagagaaaaataaaaaataaaaagaattatattgctgagaagcccatccatgagcacagattgactccttcagtcacatgagagccatggggtctcaaaacaagtatattctgtgatcctaaggaatagcttttgctatgagattawgccagacatcaagagcgctcccttgagggctcaaccatggtccaatctctctttatggctggccacccaaacacttccccaatgtagtaagaatgtaactcttacccatccaggtgtggagcaggctttgtggtactatgtaataaacatcaacacaaagatgatgtcaaacacgatgtgttcaggtgaagagagcagaaaggtttaaacacagcatgtagagaacaaagaagtaaagataaaaagataggggaaaaagttaaacatgatatatatctaaccttaaaaaccccaaaacagcaatagtagccatcttactaatttaa

SEQ ID NO: 168567 - DNA, 430 bp, Homo sapiens
agcctcaagtcttctaagtttgccccaagtgagamtcttatctcctatagacaaaggactgaaattgcagaaaatcagacacaagctcttataatgagaatggctaacctgcaaggaaaggtgcatgctcagcctcatcagatgtctactgttaaagtgagagcattgactggaaaagaataggactctgcaacttggaatggagatgtgtaagaggaccctcactacactgagcttgtaaactctgatgagttttttttgccagaggaaacagcctccccaccctcagtggtggcaacatcccctcccccaccaacatggccatcaacctttccacctttatctgaggagttaaaccctgcactgactgagccaacagtgatggcctcctctgaggcagttaccaggcaagacaatgctgattctcctc

SEQ ID NO: 168568 - DNA, 433 bp, Homo sapiens
cttctaagtttgccccaagtgagactcttatctcctatagacaaaggactgaaattgcagaaaatcagacacaagctcttataatgagaatggctracctgcaaggaaaggtgcatgctcagcctcatcagatgtctactgttaaagtgagagcattgactggaaaagaataggactctgcaacttggaatggagatgtgtaagaggaccctcactacactgagcttgtaaactctgatgagttttttttgccagaggaaacagcctccccaccctcagtggtggcaacatcccctcccccaccaacatggccatcaacctttccacctttatctgaggagttaaaccctgcactgactgagccaacagtgatggcctcctctgaggcagttaccaggcaagacaatgctgattctcctcaggacccaccccc

SEQ ID NO: 168569 - DNA, 565 bp, Homo sapiens
actttggacaaatgtgttctgtaggcatgttttcttttgtgtcttctctctcccttattccagtccctttcttcaattctggtgttatagcagaaataattaacatttatggtatgtgcctggtaccaccaactctcaaaataaccctaagggatattattattattcctattttacgataagcaaasttgggctcatgtactaactttcccaaggtcatagtactaataaatggcagcactgatatgagaacccagtgttacctgaattcaaagctcatcctcctaattatcctggtacccaacctcaagtcatgtagttggcatcccattccctgcaaagcctttctctcagttatctatcagctagttaattaaatgaagtcattatgggctgggcacacaaaagatattcaaagtgctgatgactgcagtatcaactgatagagttagctacattaaccatggtgtttaaatagggacttctctaagactaaaaatacctttagggctgaaagccatgaaactcttcctatgagaagatgagtggcgttgatagatggagt

SEQ ID NO: 168570 - DNA, 581 bp, Homo sapiens
agaacaagaaaaacatggctaacttatgtaatgtttctgccactgaagcatagtctggatctatttatgaggaaacgtgagacagatccacattgggaaacattttacaaaataactggtctgtgatattcaaaagtatcaaggtcttaagagtcaaggaaagattggtctaaaaagacatgacaactaagtgcaacccacgatgtagaactgatcctgttgttataaaaggcattattgggaccaaattggtgaaacttgaatgtggtttgaggaytaagtaatggagatgcatcgttgttagtttcctgatttcagtgttgtatggtggttacacaggacaatgtccttgtttgtaggaaatatacactaaaatattcaggaggagaggagtgatgagaattgggtcagcaatttatgcttaaacggttccagaaacatgagttatttgtattgaacttgcaactttttctgtaactttgcatttatttcaaagtaaaatgataataaaaggaaactttaagctgcagtattgagactaccaataggggtagagagggactatttaagaggcaatgaca

SEQ ID NO: 168571 - DNA, 562 bp, Homo sapiens
cagttgaggcagggttgggctgagaactcatgcctgtgatgttcaatccaatcctatcccatgtgctaagctgttctctcagtcctagagaactatagcctccctcattrtcttctctgagatccattcaatattgtaaaaggtccatttctgttgaaagagagagtgtcaatatcagagcaggaataatgaatcctaccccaaagttcttaggcacagaaatacaattctcacgcatagacataaacgcaacgttaatgtgatagtttgtcttcagtacagcatatataatgctttctctaataaatttcactaatattaactggatgcgtggaagcaagaaccaaatcatacaaaagaatggtgagtcctaactatgaaaacagtagaagttctttacctaagatacccataattatggctttcaattgttttctgtttacttaaaatcattacataagcaaagcatcacacttttgcaatttgctcttgattcttgcctactactaggagcttaatttgctactttagagagagaaactttgcataaacagggtctctt

SEQ ID NO: 168572 - DNA, 620 bp, Homo sapiens
aagccagcattgacataactgaaggcagaaatagacaataataaataatagaagattttaataccccattttcagtaacaaataaatatgagacagaaaatcaataagaaagcaacagacttgaacaataccatagattgaaaaggcataaacaaaacatttcacccaatagcagcagaatagacattcttcttaagtgcatgtggatcttcctccagaatataaatcactgttargccccaaaacaagtattaacaaatataaaaagattgaaatcataacaagtatcttttctgaccacagtggaaagaaactagaaatcaacagcagaaggaaacctgaaaaattcacaagtatatgtaaattaaacatctaacccatgaacaaccaatgagtcaaagaagaaatcagatattagcaaatttcttgagacaaacaaaaacacaacataataaaagtcatgaaatgtagtaacaaaagcaattctaagaggaaagtgtatagttataaatgctaacatttaaaaagaagaaagatctcagataaactaactttacacctcacggaactagaaaaagaataacaaactatccccaaagttagcagaaggaagaaaataa

SEQ ID NO: 168573 - DNA, 466 bp, Homo sapiens
ttttcaagcagcaagaattcttgtttacagtttatatgtactgagtgaacttatctcttctttcctacctaagtctaggccaaaaaacgcttcaattttttttaattggatgttagcctgttgctttaaaaaaaataaactttacttttagagcagttttcggttcacagcaaacttgagcaaactacacagagatatcccatatactccccccacatacacataacatccctcatgatcaaaattccccaccacggttgyacatttgttataattggtgaacctacacattattatcacccaaagtccatagttcacattacggttcacactaggtgttgtacattctatgggtgtaaatgaatttataaggacgtgcatcaatcactgtagtatcatacagagcagtctcacctccctaaaagtcctctgtgctttgcctatacatccttctctccctcttttc

SEQ ID NO: 168574 - DNA, 375 bp, Homo sapiens
accacagaatcaagaacaatcaggaaaacatagcatcactaaatggacaaaataagaagacagtggctttttattgaaattgagatatatgaactaccagacaaagccattcaaaacattccatcyaacagctatagaatacattcctctccactggatatggaacatcctccaggtttgatcatatgttaggctacaaaactattcttgacaaatttaagaagatgaaatcatatcaagtatcttttctaaccataaccgtataaaactagaaatcaataagaggagcaatttctgaaaactcacaaatatgtggaaattaaacaacatactcctgaacaattttaatgaaaaaatgttaaagaaattttaaaa

SEQ ID NO: 168575 - DNA, 582 bp, Homo sapiens
ggtcatgggaatagcgtggaggaaatccgtccccgtgatccaatcatctcccacctggtccctcccccaacactgaggatgacaattcaacatgagatttggctggggacacagagccaaaccgtatcacttgatatgatcccacagaatactattcattttcattcagtcttttatttcttaacaaatggtggtaaagtatatataattgaccatcttaaccatttttaagtgtaaaattcaatggtatttatgatgtccatattattttgccaccatcactgccattcatctccagaaatcttttcatcttccaaaattgaaactatatacccatcctagcccactttttaattcacctatttgttgtctcgcctgagtgccttatgtattctggatattaaccccttatcggatgtatggtttgcaaatatcttctcccrctgtgtagattgtctcttcaccttattgtttcctttgttgtgcagcagcttttacatgtgatgcgatcccacttgtctatgtttgcttttgttgcctgtgatttaggtggttatatcaaaaaacaagtttgcctagaca

SEQ ID NO: 168576 - DNA, 582 bp, Homo sapiens
ggtcatgggaatagcgtggaggaaatccgtccccgtgatccaatcatctcccacctggtccctcccccaacactgaggatgacaattcaacatgagatttggctggggacacagagccaaaccgtatcacttgatatgatcccacagaatactattcattttcattcagtcttttatttcttaacaaatggtggtaaagtatatataattgaccatcttaaccatttttaagtgtaaaattcaatggtatttatgatgtccatattattttgccaccatcactgccattcatctccagaaatcttttcatcttccaaaattgaaactatatacccatcctagcccactttttaattcacctatttgttgtctcgcctgagtgccttatgtattctggatattaaccccttatcggatgtatggtttgcaaatatcttctcccgctgtgtagattgtctcttcamcttattgtttcctttgttgtgcagcagcttttacatgtgatgcgatcccacttgtctatgtttgcttttgttgcctgtgatttaggtggttatatcaaaaaacaagtttgcctagaca

SEQ ID NO: 168577 - DNA, 473 bp, Homo sapiens
gcttgggtggagaagccgttgtcttcagaaaccttgctatagttgaactgatagttactgttgtgacctgaagttcaccattaaaaggaaatagccaagcaaaatcataaaattattggttataaaaatgagtgttggcacatcttatgcaatatactaaattgaataatggtaccagaaaaaactatagatgggaatgaagattgtgtawcatctattatcatgtgtaatcaataaatgatttaattctcttgaagaaaaaaaaactagatgctttcccactaaaataaggaaaaatgcaagaatgtcccctctcgctactcctatttgccattgtactggagtcctaggtaatggaataagacaagaaaaagaaaaaaagggtatatagtttgataaggatgaaataaatctttgttcaggaagacatgtttgtctaggtagacaatctcaaagaaacaacaacaacaaaa

SEQ ID NO: 168578 - DNA, 486 bp, Homo sapiens
acagtaagtcaccagacagtggcagrataaccaggaagtgttcagttatacataataggcaagattaaaccacatttccaaaatctctcattatcccccttcctgacccttcatcagtcaataaaatagggctcatgaggacattcgggtcagttatacagtgaaggggaccaaaatatgtcacccaaatatacttctttggcatatttcaagatggctattccgaaaggctgcagacagaaatagtcttgcaaagctgccttttgtgctgcgagatttgcatctgtagagaaaatctacattggtgaaataaacacccaggctctctctgagtcccccttaaccagctctaggaaagattaactcacagtaaaaggagactaaaagtctgggacttttaaaggtctagcagagaaacttttaccactggctactaactgttctttctaatggctgggctgctacccgtgaggtttcatctgcata

SEQ ID NO: 168579 - DNA, 533 bp, Homo sapiens
aaaatttttcatgggattgacaagtcatccagttcagcctagatacagggaaatagygtgaggtaacactaaaaaagttgccaggtttcagaaaaccccttcagtctccagtgtgtttatgggcattgaatcacaaattgaaaaattctcccatttcatattcacaattaaggtacttctaaatctaaagttgcacagtttcaaaaagctttagttttcatctccaggctgtcaaagaaagtccaagatcttctaagataatcctttggaagctgagaaatagctataacttccaatgacagatttttattgtacccgaaatttcaagtttcattatgttcatctgtcgtgtactttctgggctaattgttctgctgtagcttagaacaaaaaatataatgcagaaactattcaataaaacctctcattttcacagttagggttcttaccattttttcttggttgctaatgttttcaatttggccatttgtttaaatttgcaatttgttagtaatttgcgtaacttaaacatc

SEQ ID NO: 168580 - DNA, 411 bp, Homo sapiens
atttccctaccctctggcaaggtacaatgaaaacaaattagagttctgtggtagagctccttggctgttccttgagcagacattttctcaagatcatggsgatttaactagatttttaatctttgttgtgtaagttccagaaatcataaaaatatctcttcagacgcaaagcaggcattttgtctctcttcaaagcccaagaagctttaaacctaggcagcaaaaacagcaaggcagcaaagatgacaataatgaggagataaaaggtaatggagaccaccctcaggattatttcctgccctctactggagctcaggaggattccttatcaaccagagaagcttttcccaagtcgcattcagagaaacatcacgtctgcctcttgtgtgggatggtgacagtaagtgtggg

SEQ ID NO: 168581 - DNA, 465 bp, Homo sapiens
tgggtgcagtgaaccaacatggcacatgtatacatatgtaacaaacctgcacattgtgcacaagtaccttagaacttaaagcataataaaaattaaattaaattaaaaaaagaaaaattttcaatgaaacaaatgcacttcctgaagttactaagcctacacaaatgaatgaatgaacgaatgtctttcctgtagttcttaagcccacawgaacaaatgaatgaatgaatcaatcaatcaacgtctttcctatagttgttaagcctacatttacgtaaaggggagttgctcttacactgacactgtcaaaaccctctacctcccttccactccctccctgccaggtaaaagctccacctaagatagaaggcaacccaggttccaaagtaattcctccctcacctgtgaatgaccagaattattatcctctaagtgcttctattgtcacttgaaaaaggtacctgc

SEQ ID NO: 168582 - DNA, 443 bp, Homo sapiens
aactgcaactgattagttgttcgaggctcaatgtggattaatttgagcattaaaaactcctttgaggatcagggagcagttttaagggggctaccacacatttgtgacttttacttccaggagccctactaggtttgcacaatgagggtcagggagaaatttcctaatgcttccaacaaggaacagggaaaaagtaaccattccgaaatacacccaggtcactctgttcttcttatggcctgtctcaaaasaaactgtattacccagagcccaacagactgagattatagcagagcctaaaccaccggggagtagggaaatatccaactccagcccctctatccttcccattgcacctaaagaggaaaaacccccaaaacccaaggagcacatgtggagatcatggcccaggggtagaggctcactgtgggactgggtcctaa

SEQ ID NO: 168583 - DNA, 343 bp, Homo sapiens
gaaagcaaagttttaactactttgtccccctagggctatcctagaatcctgattcaattttatttttaagaaatcgaattctcaaagcttcatctcctatggagtcaagtgagattggggtgataagggtgacccacataaagtcttactatcctcttttgtctagcagtttagtctttttttctttcttcagaattcctacgatgattttgttctcatgttcrcaaaactactgttagtagccttctttattttactactgtaattcccaagaaagaacggagggtaagttgaaatccctgggtgatggtagtcgggggggcctctgagacagtttggaaag

SEQ ID NO: 168584 - DNA, 536 bp, Homo sapiens
ataccaaaaaaaaaaaaaaaaaaaaaattagcacatggtggctcatgcttgtaatggccagctattaaggaggctgagcatgagaattgcttgaactcaggaggcagaggttgcagtgagccaagatcatgccattgcacttcagcctgggtgacagagtgagacactgtcaaaaaaaaaaaaaaatagagagagaaagagaggacagaacagaatgtctaaaaactgtgggggtaattataatataaaaggcataacatacatgtaatgggaaaatcagagaagaaagaaaagaacagaagacatatttgaagcaataataactgagattttccccaagttaatgacagatattgttatgagcttaattatgtcctcctgttcccccagcctcaacttatrtcaaagccctaactcccagtaacctcagaatgtggctgtatttagagataaagccattaaagaggtaatgaaggtcacatgagatcataagggtgaggtcccaatccaatatgactggtgttgttctaagagga

SEQ ID NO: 168585 - DNA, 619 bp, Homo sapiens
ccttcgtaaggaaatgaaaacccagagcaacaggtcaacttgtatatttcacttatggctttgatgaagrggtagccagacgtcgggacgtgagactggacgaaggacttgtgatctaatgcttataaatcagcagggatgtagcaggggctgtttgctcaggttcttcgctgtgctcccgtgttttcagagacaggttatttcttttctctaggtatggggaggccccctctcgcacaaggcctacttatggcctacatcgggggagaagagcaagggcaggtgacagtggccttcctgcctctgcagttttctcaaatgtcagagtgccatatttagggttagggtgtcctgaatccaatcaatcaggaatggcatgattgcatatatgttcgttttaatgggccgttgaaaagaaagcattccttcactctcgtgcttggcaagaggaaaatccaagacagctccgaaagaaaagccttactaactccaaaggtgaaagaagggtacgttccttgcactgcttctcttcttgagtgtagggaatagcacataatttggcatctcaaattttctgacacagcttctgtaacgaaaaagtgaatgacacaaccagagt

SEQ ID NO: 168586 - DNA, 513 bp, Homo sapiens
agagacagcaagaatgcccactgaaattagcaaaccatattggtggtttcaacaccacttatatcagatattgtactacctcttttcaaatgtaacgatacaaagtagaagttaaaagccaagcagactggatttattcatatcgatatctagggtcttattttcaaatgacctctctcatttcctacagaaaatgcaattgccaaaaatagattaccttctcaagaagtattgttggccattcatgcctatgtcaaaaattgtttgctttcatcttcrttaatcaggagagacattaattatttttcattacgtagccataatgcaagttaatttttctgaatttaaaaaacaaggaggtttccagaggttgcatgactttctcattctctctctctctctctctctctctctcacacacacacacacacacacacacatcaatatagatagattaggggtttgtgtgtgtgtgtgtgtgcttatcatatcacattgaaaactatcttaggg

SEQ ID NO: 168587 - DNA, 463 bp, Homo sapiens
gcatcattctgactggcatgagatctaagcatcttaatggctcacacaggatgtctgcaatagtcataggctgcaacatcagtgaaccacaaagtgcattctaataaatctatgtaattatctattgttatatgcactatttttagagtactatttgcttraaaaggaatgcaaatataccagcctttggcatgtgaagataattcttctaatccttataaacttctgtgctggtttcctagtgaaatcaacatgaaggtgaatcgaggacatgtctgctgcacaaatgagattaaaattctcagctgactttatgatacctttgtggctagaagagtccatggcatttcctaaatgcctaatatgctactgactaatcctgtgagaattaaaacccattaatttcccaatcaatagaaagcttttaaatttgaatattctttagacatatattattggcaag

SEQ ID NO: 168588 - DNA, 460 bp, Homo sapiens
tcattctgactggcatgagatctaagcatcttaatggctcacacaggatgtctgcaatagtcataggctgcaacatcagtgaaccacaaagtgcattctaataaatctatgtaattatctattgttatatgcactatttttagagtactatttgcttaaaaaggaatgcaaatataccagcctttggcaygtgaagataattcttctaatccttataaacttctgtgctggtttcctagtgaaatcaacatgaaggtgaatcgaggacatgtctgctgcacaaatgagattaaaattctcagctgactttatgatacctttgtggctagaagagtccatggcatttcctaaatgcctaatatgctactgactaatcctgtgagaattaaaacccattaatttcccaatcaatagaaagcttttaaatttgaatattctttagacatatattattggcaag

SEQ ID NO: 168589 - DNA, 442 bp, Homo sapiens
tgtgaggtatgttgacctgaccaaggttaaatatccatccccaaatgtaaattcacccctggtcctcttgtaaacgaatgctttgaattgagtttcatctaaattttattacttgtatttttaaaaatatacttgaccagttactctatatctttctattttgcccatttgaaataaaacttatttcccaaaacaatgcaacaaaaaaagaaataaaacacagaaatgaaaatggaatatttaagaccaaaattatgtacttgagacatctgtagcatactataacacaatcagaaaaaaaatgytaaaggatattattaactcctttggaccatcatgttatatcacatgaaaaactgtagtttagcttttcttctacttcagtttaaaaagtaatgggatgactttcataggccagtcactgtgcttgccacaagagcta

SEQ ID NO: 168590 - DNA, 467 bp, Homo sapiens
tgaagatcttcaaaaaaacaataatttcagttgtttmtaaatcaaatgttaaaccaattgttagtcttccaagaaagttacgtgtaccagaaaaattataaaatggtttaaaaatgtattaaactctttacttatttctaaagaatccacgtaacatgaactaactctacacaaagacaatgttaggattaagtaaaaagtgttagaacgtgccttccagactaaggtattaaaaaatccaacgtactgtatctgtagggagaacttaaaacttaaaacaataagaatgacaacaaaaagcacaatgattcagataggacaaaatgagattaaataattctaccccatgtgtccaagcaaggagataaactgtatactgtggtggatcatgtggcttcattactgtgtagtcaactagacagacttaaccccagaatagcatggtcaccctggaagaattttttttt

SEQ ID NO: 168591 - DNA, 569 bp, Homo sapiens
atcaatgccttttcttgaagtctgtttacagatataataggctaaataaatatatacatctgtttttgtatgaaaattataaatgaacacagttgattataactatttcctgatgtgctctccatcctaaagaaaacatttattcaaattcaacatcaaaccttatttgtgaaattaaatatcacagattaccaccaatgtttagataagaaattgacaaaattatttcacaaaaatagrggaatggcattcttttctactcacagaaagacagagggtgtaaactcatctgctctttatgggaactaaggcgtgaggataaattgttagtaacttcagacgtaagaaatcaatctctcaatcttgacaaacttacatatctaaagaagatattctgactttaaaaggtttgcttatcgccacatttatacagactgttgaggaagctaagaaaaatattaaagtaatgtaaaaatgccttccaaaaaatttccctcttaattagatttttttttttttttttgagatgaagttttgctctcgtcacccaggctggagtgcaacggtgc

SEQ ID NO: 168592 - DNA, 550 bp, Homo sapiens
caccttttttccagcaatcttcgtgagtattccaccccttggttaaagaaaacagtaaacgtagcagcctcaaaccgcttgagagtgactctctcttgagtawatcctcactccctttcttgagtgtgtacttttccctttgcaataaatctctgtactttcactattttctgaatcttcctcactattttctgactcttccttgaattccttcttactgtggtgtcaagagcttggacactggctagtgttgaggtctcactgacatctggcgactttccccagcccacctgtatcaatgttattatatacagtggtcagagaaggcatcagggataatgtgagggtgtgtccttgcccagaaaagggtgttccaggtgaaggccctgggaggagatggtgcttggtgtattcgaaaccaacaacaaggtgaccagtgtccctggtgtgaagacaggaagagggaggcattagaggggaccctaggagtcttttcagggcaaagtaaagagtttgacttctactccaaaggggtggaaatccatggaag

SEQ ID NO: 168593 - DNA, 550 bp, Homo sapiens
caccttttttccagcaatcttcgtgagtattccaccccttggttaaagaaaacagtaaacgtagcagcctcaaaccgcttgagagtgactctctcttgagtaaatcctcactccctttcttgagtgtgtacttttccctttgcaataaatctctgtactttcactattttctgaatcttcctcactattttctgactcttccttgaattccttcttactgtggtgtcaagagcttggacactggctagtgttgaggtctcactgacatctggcgacyttccccagcccacctgtatcaatgttattatatacagtggtcagagaaggcatcagggataatgtgagggtgtgtccttgcccagaaaagggtgttccaggtgaaggccctgggaggagatggtgcttggtgtattcgaaaccaacaacaaggtgaccagtgtccctggtgtgaagacaggaagagggaggcattagaggggaccctaggagtcttttcagggcaaagtaaagagtttgacttctactccaaaggggtggaaatccatggaag

SEQ ID NO: 168594 - DNA, 481 bp, Homo sapiens
ggtaaccattactttttcattgttcctatatttgtttctttagtgaaactattagcagttttactttttaccagatacatattcagttttaggcactgaacagaataatgaacaagacagatgttgtctaaatgttcacggagcttacattccacctagggagagagaaaatgcatgtctatgtaaatgacaatgatttatattctgaagggaatcaagagtcacactgaaggccagatgcagtggctcatgcctgtaatctcagcactttagraggcccaggtaggtggattgtttgtggagattcagaccagcctggtcgacatagcaaaactccatctctacaaaaaaataaaaaaaaatacaaaaaattagccagtgtattggcagatgcctgttctcccagctactgcagaggctgaggtagtaggatcacttgagccaaggagtttgaggctgcagtgagctatgttcatgtcac

SEQ ID NO: 168595 - DNA, 481 bp, Homo sapiens
ggtaaccattactttttcattgttcctatatttgtttctttagtgaaactattagcagttttactttttaccagatacatattcagttttaggcactgaacagaataatgaacaagacagatgttgtctaaatgttcacggagcttacattccacctagggagagagaaaatgcatgtctatgtaaatgacaatgatttatattctgaagggaatcaagagtcacactgaaggccagatgcagtggctcatgcctgtaatctcagcactttagaaggcccaggtaggtggattgtttgtggagattcagaccagcctggtcgacatagcaaaactccatctctacaaaaaaataaaawaaaatacaaaaaattagccagtgtattggcagatgcctgttctcccagctactgcagaggctgaggtagtaggatcacttgagccaaggagtttgaggctgcagtgagctatgttcatgtcac

SEQ ID NO: 168596 - DNA, 390 bp, Homo sapiens
agacaggaactagaaaagaataactaatattcccgctgtcaattaatattttacattaagtactagctaagggaatttgaaaaaagaaagaaaaaatttataaaacatgaaaaggaggagataaacatatagtacgattgaattttgatattattttaaactggaaaaccaaataaaatcaatttttaaaaaatctattttaaactaagaaagaattcaataggtgacaggaagtaaattatcataaaagactagtttttctattaaaaaacaaccaattttataaaagaaaayactctttttaaagcaatagaaacttaaaatataaggaaattaacatgaaatattcaagaccaaatttttaaagatataatactccctaaaaagtac

SEQ ID NO: 168597 - DNA, 379 bp, Homo sapiens
gtttttgaatatgagataatcttatgtagaaaaagggtttgagaagcatgcattattttaaatacataacagattcattttagccagcaytgtaaaaaatactcaatatatcattaagacacattttagaagagactatatttaggaattgattcctcagtgttaaaagaaagttagtggaaaggggagttcatttgaatctgtctatgctcccagttggggtcacataagcaggtcggttttaacagcttccagagaattcccagagggccctcacctcagaccaacaagaccatcttggcagacaattgcctattggctattgctaggctctgagcaaatgagtcaggaagcctgggagggcacaaagcactgaccc

SEQ ID NO: 168598 - DNA, 604 bp, Homo sapiens
ttatgagtttttacacgccttttattaaaagagaataaaaccttggaagaaawtggacactctgatactgtgtttattcttaaatgaaacatatatgtgagagatcttctcagatccgcaaataaaatgtcattgtttttaatggtaatttgtattgtagagctaatataatttacttaactagtgagagttattgatagtctacatttatatacttagacatgtttgaattttcaaacattatcaaaatgaaacaaaaagcattcctttacatttattttgtcatatttgaatgcatatttgtagaatacattcttagctagaatttctgaatgaaaagtttgtactttattttgagaaaaatttcaaaatatctatacaaaaatgttgcagcaatttaatatcctaccaatagacatgaaaacatgttttcaatatcctcaaaaacgctgttactaaaatgtgaaggtatgcccattcagaatggcgagctatcatactgcattgttttaacttggttcgaatatacttactggcacaaatgtattgtatttggactccttacgtatattttacctgcttttcaattgaaggattatttaaa

SEQ ID NO: 168599 - DNA, 604 bp, Homo sapiens
ttatgagtttttacacgccttttattaaaagagaataaaaccttggaagaaaatggacactctgatactgtgtttattcttaaatgaaacatatatgtgagagatcttctcagatccgcaaataaaatgtcattgtttttaatggtaatttgtattgtagagctaatataatttacttaactagtgagagttattgatagtctacatttatatacttagacatstttgaattttcaaacattatcaaaatgaaacaaaaagcattcctttacatttattttgtcatatttgaatgcatatttgtagaatacattcttagctagaatttctgaatgaaaagtttgtactttattttgagaaaaatttcaaaatatctatacaaaaatgttgcagcaatttaatatcctaccaatagacatgaaaacatgttttcaatatcctcaaaaacgctgttactaaaatgtgaaggtatgcccattcagaatggcgagctatcatactgcattgttttaacttggttcgaatatacttactggcacaaatgtattgtatttggactccttacgtatattttacctgcttttcaattgaaggattatttaaa

SEQ ID NO: 168600 - DNA, 604 bp, Homo sapiens
ttatgagtttttacacgccttttattaaaagagaataaaaccttggaagaaaatggacactctgatactgtgtttattcttaaatgaaacatatatgtgagagatcttctcagatccgcaaataaaatgtcattgtttttaatggtaatttgtattgtagagctaatataatttacttaactagtgagagttattgatagtctacatttatatacttagacatgtttgaattttcaaacwttatcaaaatgaaacaaaaagcattcctttacatttattttgtcatatttgaatgcatatttgtagaatacattcttagctagaatttctgaatgaaaagtttgtactttattttgagaaaaatttcaaaatatctatacaaaaatgttgcagcaatttaatatcctaccaatagacatgaaaacatgttttcaatatcctcaaaaacgctgttactaaaatgtgaaggtatgcccattcagaatggcgagctatcatactgcattgttttaacttggttcgaatatacttactggcacaaatgtattgtatttggactccttacgtatattttacctgcttttcaattgaaggattatttaaa

SEQ ID NO: 168601 - DNA, 604 bp, Homo sapiens
ttatgagtttttacacgccttttattaaaagagaataaaaccttggaagaaaatggacactctgatactgtgtttattcttaaatgaaacatatatgtgagagatcttctcagatccgcaaataaaatgtcattgtttttaatggtaatttgtattgtagagctaatataatttacttaactagtgagagttattgatagtctacatttatatacttagacatgtttgaattttcaaacattatcaaaatgaaacaaaaagcattcctttacatttattttgtcatatttgaatgcatatttgtagaatacattcttagctagaatttctgaatgaaaagtttgtactttattttgagaaaaatttcaaaatatctatacaaaaatgttgcagcaatttaatatcctaccaatagacatgaaaacatgttttcaatatcctcaaaaacgctgttactaaaatgtgaaggtatgcccattcagaatggcgagctatcatrctgcattgttttaacttggttcgaatatacttactggcacaaatgtattgtatttggactccttacgtatattttacctgcttttcaattgaaggattatttaaa

SEQ ID NO: 168602 - DNA, 423 bp, Homo sapiens
  misc_feature (1)...(423): n = A,T,C or G
nnnnnnnnnnnnnnnnnnnnncaaacaggaaagaacatttaaaatgctgagaattgatagaaggagaggartggggacacatggtggccctaacatgggtttggggtatatgggccttcattttactattatttttttcaacagcagacatattacatatgtgtacatattacatatgtgtacatatcacatgtagtcttgtttgcatgtatatttcataatgcataataaaaatattaaataccatatgctaatacatttgaaacaaaaccaaaagggtttttggaaaaacatgaaatgacaaaattagcacaaaacacagaaactagaatagacaaattaaagacattgaaatgatacccaaaaagacctccctccctcaagtctccaggctcagatattttccatgtgatttttccacac

SEQ ID NO: 168603 - DNA, 415 bp, Homo sapiens
  misc_feature (1)...(415): n = A,T,C or G
nnnnnnnnnnnnncaaacaggaaagaacatttaaaatgctgagaattgatagaaggagaggagtggggacacatggtggccctaacatgggtttggrgtatatgggccttcattttactattatttttttcaacagcagacatattacatatgtgtacatattacatatgtgtacatatcacatgtagtcttgtttgcatgtatatttcataatgcataataaaaatattaaataccatatgctaatacatttgaaacaaaaccaaaagggtttttggaaaaacatgaaatgacaaaattagcacaaaacacagaaactagaatagacaaattaaagacattgaaatgatacccaaaaagacctccctccctcaagtctccaggctcagatattttccatgtgatttttccacac

SEQ ID NO: 168604 - DNA, 424 bp, Homo sapiens
  misc_feature (1)...(424): n = A,T,C or G
nnnnnnnnnnnnnnnnnnnnnncaaacaggaaagaacatttaaaatgctgagaattgatagaaggagaggagtggggacacatggtggccctaacatgggtttggggtatatgrgccttcattttactattatttttttcaacagcagacatattacatatgtgtacatattacatatgtgtacatatcacatgtagtcttgtttgcatgtatatttcataatgcataataaaaatattaaataccatatgctaatacatttgaaacaaaaccaaaagggtttttggaaaaacatgaaatgacaaaattagcacaaaacacagaaactagaatagacaaattaaagacattgaaatgatacccaaaaagacctccctccctcaagtctccaggctcagatattttccatgtgatttttccacac

SEQ ID NO: 168605 - DNA, 613 bp, Homo sapiens
gaggggcaattctccaagggagacttggggggaagaataagtaggaaagattaagtggataaagaggtattgtaaagtagagaggataggagaggagagaactcatacctgatggtgtctccatacttgtaggaaagcagagggccaggggtcaaggccaagaggaaaaagattttaaatagcagtgaacattcaggtgaatgaagttagaaactcccaaaactttgtctagcaagaattggcactctgggaataggaactagaatagtaactgtcgagaggactgtagcttcccgaagtctgatggagaagatactctggcctatcctcatatggaaaataatgaacaatgctgatatacagaaagcattgatgagtttggcaaaaaaaaaaaaaaaaaaaaaargtaagtgactgaaaaccaagcaaaggtgagagtgaaagcccagaaaaataagcagaattctaatgccaccttatatcttaataacatttactctaaaagtaaatttgaatttttattttcacagccttgctgggtgaaaaaaacagggcctggtcaaggtggggaggccaatagaagagccccctccataaatctagaaccctaatg

SEQ ID NO: 168606 - DNA, 338 bp, Homo sapiens
ttgcctaccaccttcacatgtcaatcagagctgaccagcttcccagaaccttaacagtgccaacgaattttctcgaagaggatttcatgtcatgtctcttttttaatctccagccttctctttgttcttcggacataccagagatgatctggtctgtgtgtatkctttgaactgcaattctttctccccaaataaaatgttaaatttagagattcacttctacattttttttttttttttaatgagacagtctcactctgtcacccaggctggagtgcagtggcgcaatctcagctcactgcaacctcccagggttcaactgattctcctgcctcagc

SEQ ID NO: 168607 - DNA, 542 bp, Homo sapiens
cttcacatgtcaatcagagctgaccagcttcccagaaccttaacagtgccaacgaattttctcgaagaggatttcatgtcatgtctcttttttaatctccagccttctctttgttcttcggacataccagagatgatctggtctgtgtgtatgctttgaactgcaattctttctccccaaataaaatgttaaatttagagattcacttctacattttttttttttttttaatgagacagtctcactctgtcacccaggctggagtgcagtggcgcaatctcagctcactgcaacctcccagggytcaactgattctcctgcctcagcatctcaagtagctgagactacagacatgcaccaccatgccctgctaatttttatattttcggtagagacagggtttcattatgttagccaggctggtctcgaactcttgactcaagtgatccacctgcctcggcctcccaaagtgctgggattacaggcatgagccactgtgtccggcctacctctacatttttaatttgactttgacagatgcc

SEQ ID NO: 168608 - DNA, 532 bp, Homo sapiens
cagagctgaccagcttcccagaaccttaacagtgccaacgaattttctcgaagaggatttcatgtcatgtctcttttttaatctccagccttctctttgttcttcggacataccagagatgatctggtctgtgtgtatgctttgaactgcaattctttctccccaaataaaatgttaaatttagagattcacttctacattttttttttttttttaatgagacagtctcactctgtcacccaggctggagtgcagtggcgcaatctcagctcactgcaacctcccagggttcaactgattctcctgcctcagcatctcaagtagctgagactacagacatgcaccaccatgccctgctaatttttatattttcggtagagacagggtttcaytatgttagccaggctggtctcgaactcttgactcaagtgatccacctgcctcggcctcccaaagtgctgggattacaggcatgagccactgtgtccggcctacctctacatttttaatttgactttgacagatgccactc

SEQ ID NO: 168609 - DNA, 542 bp, Homo sapiens
cttcacatgtcaatcagagctgaccagcttcccagaaccttaacagtgccaacgaattttctcgaagaggatttcatgtcatgtctcttttttaatctccagccttctctttgttcttcggacataccagagatgatctggtctgtgtgtatgctttgaactgcaattctttctccccaaataaaatgttaaatttagagattcacttctacattttttttttttttttaatgagacagtctcactctgtcacccaggctggagtgcagtggcgcaatctcagctcactgcaacctcccagggttcaactgattctcctgcctcagcatctcaagtagctgagactacagacatgcaccaccatgccctgctaatttttatattttcggtagagacagggtttcattatgttagccaggctggtctcraactcttgactcaagtgatccacctgcctcggcctcccaaagtgctgggattacaggcatgagccactgtgtccggcctacctctacatttttaatttgactttgacagatgcc

SEQ ID NO: 168610 - DNA, 528 bp, Homo sapiens
taccaccttcacatgtcaatcagagctgaccagcttcccagaaccttaacagtgccaacgaattttctcgaagaggatttcatgtcatgtctcttttttaatctccagccttctctttgttcttcggacataccagagatgatctggtctgtgtgtatgctttgaactgcaattctttctccccaaataaaatgttaaatttagagattcacttctacattttttttttttttttaatgagacagtctcactctgtcacccaggctggagtgcagtggcgcaatctcagctcactgcaacctcccagggttcaactgattctcctgcctcagcatctcaagtagctgagactacagacatgcaccaccatgccctgctaatttttatattttcggtagagacagggtttcattatgttagccaggctggtctcgaactcttgactcaagtgatccrcctgcctcggcctcccaaagtgctgggattacaggcatgagccactgtgtccggcctacctctacattttta

SEQ ID NO: 168611 - DNA, 610 bp, Homo sapiens
gatctaggttgtgtgctccttataagaatctaatgcctgattatctgaagtggaaactatcccctccccctcaatcctggtctgtggaaaaattgccttccawgaaatcagtccctggtgccaaaaatgttagggaccaatgacttagggaattctatacctgtgagcctttcctgaggaatttaccagcagatgaacttcatccaaccaagagatgacagaacacgacagaaaaaaagaccgatggtgaacattttaatatacgcatataaaagtagacctacaaataaaatgtacatggggggatgaggaagactaaggtacaaattttatacaaatattatattgaaatatatatataaattatgcagttaaaatatatatatttaatatatatattatatatatttaagatccaaatgtttgccagataaacaatttggaaatattttccttgtggcatgtttattcatttcctggacagtgtttttcacagagcaaaagttttttaattttctgaattccagttcattaatttttcctcttgtagatcactcttttcatgtgttatctaagaaatgtgtgtaacccaaggttacaaagattttct

SEQ ID NO: 168612 - DNA, 393 bp, Homo sapiens
tggaaaaatcacatggaaaatatctgagcctggagacttgagggagggaggtctttttgggtatcatttcaatgtctttaatttgtctattctagtttctgtgttttgtgctaattttgtcatttcatgtttttccaaaaacccttttggttttgtttcaaatgtattagcatatggtatttaatatttttattatgcattatgaaatatacatgcaaacaagactacatgtgatatgtacacatatgtaatatgtacacatatgtaatatgtctgctgttgaaaaaaataatagtaaaatgaaggcccatataccccaaacccatgttagggccaccatgtgtccccaytcctctccttctatcaattctcagcattttaaatgttcttcct

SEQ ID NO: 168613 - DNA, 583 bp, Homo sapiens
gtcattagaatataaaaaatactcagaatacaatttaaaaaaaaacttgacatattaagaaccaggaaaatcacgactcgaatgaaaaaagacaagatgccaatacctgagacaacccagttgctggaattatctgacaagaattttaaagctaccatcataaaaatgatccaacaggcaattaatgctctggagacaaaacaaaactgctacagtatgaaatacttttgagagccttgaaacatgtaagtgtacatggatttacatgtatatatatgcatacatgcatgtgtatgtatatatgtatccacgtgtgcgtatgtatatatatgcacatatatgcatatatttcccagcttcatctgctcaaatagcctagaagcaaaracaccaagtagcaatgagcatagctggtagccatatcttggtttcaccaataaaaaggaccagcgctcctcaaagaaatggctgatttcagggctggggcatggaagagcaagaaaagtctgcaatatcttgttatgttagaaataagaagacggtaatgaaaataatgggggtatgtcatgaggacaggaattag

SEQ ID NO: 168614 - DNA, 319 bp, Homo sapiens
ttttgaacttgcaatgctattccactgacctatatgtctatctctgtgttggtactatactgtcttcattactgttgctttgtagtaagcttcgaaattgggatgtttaagtcctccaactttgtccttcgttttcaagattgttttggctattctgggtttcttgtgattacatatgaattttagaatcagcttgtcaatttctacaaagaagttagscaggattctgatagggattgcattaaatctataggtcagttggaaatatcaccctcttagtagtgttaagtcttctgatccataaacacaggatgttttg

SEQ ID NO: 168615 - DNA, 314 bp, Homo sapiens
ctggctcattttacctatgaataaataggtcagtttatgkcatactggagtatagatccacgtctctgttctcctagcccaacatgtcttctgccacactacgttgtctctgatagctgtatcctttgcaagaaggtccaacctacatttatgtgatatcaattatcctagcagcttctctgcaatgagcagcctggtgtctgttccttgacaatatgttgagtggtatttgccagaaagaagctttatcagaaaaaaaaaggcaagggatgtgctaattcaccagttaccataatccacattcccataatgta

SEQ ID NO: 168616 - DNA, 479 bp, Homo sapiens
tgatgtccctttgatgtaaatagagccctgaagtttctgggggaaaaatggagccttgtgagtaatggtagaaggcttaaaggagattaatgaactagtcccacccaggaattcttccccaaatgtacccagagtgaaaagttggcatccatgacctgttcaattgattcatttttcaccacgttgaagggcagtcttggaaaggggaataatgcttaataaccccaatggatttccaagctatttttgtacccccaagcacagccagggcctcttttctcacctattgccatcaataattatttgtcagaaagcttacaaggcagcagaatgtcccatgtacagacagctttcwtttctgcatctcaaaataatatctttagtattgtgagtggtcatcatggtgtaaggtgggactgttatttcagtcttcttccacatgaagactctctcctatatgtctctggtgtgtatggctg

SEQ ID NO: 168617 - DNA, 630 bp, Homo sapiens
agtgagcttgtcatattttaataacagaaaggaggccacaaactgagcgaatgaagataaactacataagaaataatgtcaaataggtgaaagaggagcacatgtatgtcaccgaaggccgtgggaaggtatggatttagtgtgagtgtaatgggaagtcattttaggcatttgactaaggagtgatttgacttgacaagacaagacaggatcaccttagctgctttgtggcaagcagaaagmaggtggggagaagagggcaaagggatagaggaacaagagtggaaaaaggggaacttagtaggaattattataaatttacaagggagatggtggtggtggtggtggattggtcaaagtagtagtaaatgagacaattagaaatggtcagattttggagatagttttgagttagaaatgcagaatttgctaatggattggttgtggtatttgataaagaaagatgaattaaggatgactctgagttgtttggcctgaaaaattagaagcatttagttgccatttactgattgatatagtgcagataatgtcaaggataagtttgggaggaagatcagatattggatatattgtatctgagatatctattagatattacgcctattaggt

SEQ ID NO: 168618 - DNA, 578 bp, Homo sapiens
gcaacaagagccaaactctgtcaaaaaaaaaaaggaggggtcagttataacccagatgagccccaaattctctgaggatgtatgaataaatcgttgcaatttttagccttcctttcatgtatggcaagaaatgaaagacatttattttcacatttgatctaatcctgccttatattttcttcytggtgcatagcagtgatgagcctcgttctccaggtttatttgacattgtcatttaaatttattcattacgcaattaattcaaagattaacccccatcattgctgtttctcctggttgcacctttcccacctcatcccccacaacccccacaagaaaccaatgcctgtttagagacatgggctgtattgctgaatctaaaggactctagtaatgcggacactctctgaaccgcattgtgtccaatggattctggcttcacttgctgaaggttcagcaaactgatttctcctttgctatttcattactactttgattcttgctgccatttgggttctctctgtgttctcatgaccttggccatgtgtgtactttgccccaccagatcaagcctcccc

SEQ ID NO: 168619 - DNA, 482 bp, Homo sapiens
atcaagccaactgattgctgggtaaatggcagtgawgacttgtgtgatttaaacgatctgaaattatgtcatgtgttgtgatatataacacatttatttttcattttgtgtttactatttcatgtctattacagtaatctaaaggatctgaaataataaccagaatgtgatatattacttccttcttttggctaatcagagccagcataatctcaaaattaaatgcattatatatggcatgcattctgaaaaatcagaattcaccttatactaactgttcaaagttttcgtgtgtatgcattcataaaatcaaaattaaaagtcaattttgcctatgtagaagtgggcagaatgcatataagagaacaaagcacggtcttattctctgtagtttagtgagaaagaatctaggaggacagaaaccttattacagagaagtgaagtattttatgtgtacctgtttctgttgtttctttttaaat

SEQ ID NO: 168620 - DNA, 501 bp, Homo sapiens
aagccccatcaagcatttctttctcctcctctcttcttctattctttgatatatagaaaatcccactaagggagactgctcttggaaaagagtagtgtccaaattcgaagcacaagcaaattccttgagggttgggttcagctggcagggaggtggaaaatatgatacagccacgcctgttgtgaggcaagaggctcaaacacccaacccttctccgagggtctgggtgcagctttatcccagaatccactttactacccagataagctaataccacaggctgcataagtagagggggaaaaacaagacacctcagaaatacaatgtactgtgaaagacagatagctatcattttaaaataaagtcaaagtagagattttcagcatgggcattttatttttgagatggggtctcactctgttgcccaggctggagtgcagtggtgtgatcttggctcaytgcaacctcaaactcctgggctcaagcgattcacctgcctca

SEQ ID NO: 168621 - DNA, 509 bp, Homo sapiens
accatgaatccaaggagacccatccactggtctgcctacctcaaaggatattcaaagcaacctatctcctgggtcacctttgcctgggaagtggatgacaaagcatggaccacagcaaacctagcgacstggagatgcaagaatgttcctacaatgtcttgctttctccttgtttagacacaaagtgttctccttctcccctacactccccaccccctgccactcccttcccaaactcagggaccactatcatctttgtgctctgagatgctttcctttctgacaacagcaatttgggagaggtaacttttatccttctttctgctgtgtaactttccccttcccatttctttatgtgccctctgagctcatctgaactttcatgttctcccagcatgcagacgtgcattccaaactatgtctcacagaccaaataagaggttaataagaagtggcaacagaaaggaaaaacgcaatccctggtaactgataagaatgacagtggcagc

SEQ ID NO: 168622 - DNA, 509 bp, Homo sapiens
accatgaatccaaggagacccatccactggtctgcctacctcaaaggatattcaaagcaacctatctcctgggtcacctttgcctgggaagtggatgacaaagcatggaccacagcaaacctagcgacctggagatgcaagaatgttcctacaatgtcttgctttctccttgtttagacacaaagtgttctccttctcccctacactccccaccccctgccactcccttcccaaactcagggaccactatcatctttgtgctctgagatgctttcctttctgacaacagcaatttgggagaggtaacttttatccttctttctgctgtgtaactttccccttcccatttctttatgtgccctctgagctcatctgaactttcatgttctcccagcatgcagacgtgcattccaaactatgtctcacagaccaaataagaggttaataagaagtggcaacagaaaggaaaaacrcaatccctggtaactgataagaatgacagtggcagc

SEQ ID NO: 168623 - DNA, 558 bp, Homo sapiens
ctaaagaaaaaaaatgttgaataaatttattgtccaactttaacacatcaccacatgaaagctgttttccttccttatatttcagagttttaagattaatagctttggtttttgttaaaatgttataatgtgttcatcttatattactttatatgatgtcttatgttagtattttaaattaataaacataaaatatatatttagcttatcttgttcattggtatcaattcatatattattcttatgtatactggggtatatatttaagtttctaattctyctgcatatgatgtagatatgacagagatgcaatttcatgttttttatattaaaatttaaaaattcccaggactaattttttgtaacttaaaggccagtgtgatagtaacccaggacaaattattgaataggagctaatttcccactttatctgcaatgttaccttatattttttaatctatgcacatgactttttcttgtctgtatttttacccttctcaatttgtctatctatgccccacatgccactttgcctttattaatacggttttaacatag

SEQ ID NO: 168624 - DNA, 541 bp, Homo sapiens
cttgtctggaagagtatttctcctttatttctaaaggatagtttcgcttaatacagtattcttgtttgggaggaggtattttttttttttggcattttgaatatatcatcccatgcttttctggcctgctgctggagaargtgggattgctggcagtggtggcactgggctccaagtgagtggctctgggaatctgggggggcgcatgcatgactctctctatgctgaggacagactctgtgcttggctgcatctcctgttccctgggcatagggctctgtataggcttgatgcaagggtcatgactacacctttggttgggatcacctggtgtggctatgctacagtcctctaggtggatttggtggaatgtcagcagggccccagggatgtgaagatgcataagctattgggccccaaacatgcgaagataaaggaactattaggccccagggcagagcgtactttggtggtggctacactctcaaaatggtgcagtgctgctgcagcctgtgttccagagaagaggagggaccccagt

SEQ ID NO: 168625 - DNA, 568 bp, Homo sapiens
gaattcctaggaaatctgagcatgacggacaacgtatgtacaacaagtgatcctaatggtcttcgagaaaacaaaaggactactatactcctcactttgttagagttgaaaaccataaagctagagtgatggcagctcctgcgaactctgatgaaaccacaaaggaagtcattsggtcaagaaatgcattacgagccaccatgggacactaccacccttctgcttagcagagctcagagtaagggtcccttcctgtgtgaaaggcactgactgctacagcctccaggagtccttctcactgcatatgtgtgataaatgtgagattcattattttgttctttgtagaaaattaagtatgaaataatttcttactcttttttcaagttgtttcaaggatgcttctcaataaattcttttttaaaaaattgacgatttccccaagagtttctccactggttgcaaaccgtatatttaattttcttggaagcattttgatatatgataagggcacaagtttgataccagagaaggcaagatattagtttgagttgtgtcacttactatattt

SEQ ID NO: 168626 - DNA, 568 bp, Homo sapiens
tatttacataactttttttaaagcctcacaactttagtggmcttttttttttcagcgactgctatctcttgtgtggactgttgtagataagaggacaactctaaacactttttgaattaatgagtaaacaaatgcttgggattagagggtcactgtagaaaatggtgttggctctgcttttcttctgttgacccttgcctctaaaggtcaagcctgcttgctagggatgccttgcactcttcatctgagagcttttatttctggctgcaggaatcactctgctgacatgcagggcaagtcaggagtgagtgtgggagagttaatgacacagaaatcagtccctccagtgacagacagggacttggtaaataaataacttgggttcctcacccaccattgagacatctgtgaggcaagttctacagtctcccagagtgccccaggtgcccacagtggtaacttacttgacaacacagcctctgctgctgcctctcctccatgctgcacctcctcactcccacagtgatgtttcccaggatcacctcccaaataaatgacttgctcctga

SEQ ID NO: 168627 - DNA, 450 bp, Homo sapiens
tggtctcactggcttaattaattcatttattcaatcactcatccaaccaataagcaaacaagcatgcactcacacctgggaaatgcaaaaatcagccccaataaacacatgttccatgctgaggagattaaaacctgaatcactgtgatggctttaaaaagaagccagagagagtcaagaacagcatctttgccagactgtttcttcctccctgtgaaatcttaaatcccataagccaagagagagtctcctgaccycttttgtcttcagctgaaacagagagtttagtgtatatgtgcagtagtaaaatttatctccacatcaggtggtaataagaaatacagcctatttccttaaggacattatatccatttcttcagtattctggtttcttaggtctctagaagtgatcctcaaattttagcatgcacaagtatcaactagagaggg

SEQ ID NO: 168628 - DNA, 615 bp, Homo sapiens
atgtgtctctttgtatagtttctttgtttttccatagcatatctatatctatataattatctcttattgcagtctacagatgtagtcattttacccgttcaagtaatatacaataatgtatcatattttaagcctatttacactttacagcctattactctttatttttttaaattatactttaagttctgggatacatgtgcaaaacatgcaggtttgttacataggtatatgcgtgccataatggtttcctgcacccatcaacccatcatctacattaggtatttttcctaatgctatccctcccttgcccccgacaccacaacaggacctgttgtgtgatgttcccctcactgtgcccatttgttctgmttgttcaactctcccttatgagtgagagcatgtggagtttggttttttgttcctgtgttagtttgttgagaatgatggtttccagtttcatccatgtccctgcaaaggacatgaactcatccttttttatggctgcacagtattccatggtgcatatgtgccacattttctttatctagtatatcatggatgggcattttggttggtcccaagtctttgctattgtgaatagtgctgcaataa

SEQ ID NO: 168629 - DNA, 575 bp, Homo sapiens
agtttcccattttgtacaacttagtaaattagttaaaagtttttcgtaaaaagtaatatatctcttttttactttataacttagtgaaaggtagtttcccccaaactcagtattttccccaactccagaagagccagacatgaccatcgtgaaaattctttcctaggattctcaccctgttgggctctcatgaggtggacagtgcctctattggctggcctattatataccccaccctctctgtgcatgcataaccttttcctcctgaggttatccaggctctgtcaagaagcttgctatgatgttgtcttttaaaaaacttttcttgctccttcccttggacttgtaaacctacgggcaaaccctaccattcctggaagagaccagctcctgatataactcttcttactctgtgggttcagayatagccaaccacatttagtcttctcagacaacataaaattcaatcactattcttcagactcaggaaactacagatcatgctctctgagagattccttcttcagtgactggaggtgaggaggaagtgttgaaaaaagcaggggagggggagg

SEQ ID NO: 168630 - DNA, 582 bp, Homo sapiens
catgacagtaattgcctccacagtcaaggccctcacctttatggcagattagcagtgtagggctaagcactcaggtttgaatccttgtcctactgcttactagctgtgtggctttaggtaagtaacctaacttttctggttctcagttcctcacctataaaatggcataatgatacaacatggatctgggctagtttttaaatgagttaatacatgtgagacacttaacacagtgtctgacacacaataaatgcctagtaaatattagctatgagggttgccacatttgtggctgattttcctgctcctcatcctctcctccacaatttatcaagccacagttactgaaacaatcttcaaacactggcttccacacaatatcctcttgcyggagactatacagcagtgtctcacttgttgcctttaggcctgttgccagactgctcatctggcaggcaacggctccctctgcctcccatcccaccgtcttactctggtcattccccaccatccagacttcctgctcactccccctcaggctctctccggaggcctcacatcactgagtattcctaggactcc

SEQ ID NO: 168631 - DNA, 568 bp, Homo sapiens
ttacctgggagacattggaacacaagaagattcagccttgattgtagcaagtgtgtgtgcacatgcctgtgagtttgcatgcttgtactcacacgtgcctacacagaccttgtgtttgtgtgatcatttaattttctctcagtataaacaaaggtgactgaactatttcagccataagatttatctcttgatagagtctggcaagacccttcacaacactttttaaaggagttgttccataacattattaggtgattgaaatgcaactgactacattaaaaaatacagttctccaccacataatgatgttttggtcaatggcgaaccacatatatgatgttggcctcataagactataatactgtaattttactgtactttttctatgtttagctatgtttagatacacaaatacttaacattgtattcatttcacatttcacatttcttatctgggagacattggaacayaagaaaattcaaccttgattgtagcaagagtgtgtgcacatgcctgtgagtttgcatgcttgtactcacacgtgcctacacagaccttgtgtttgtg

SEQ ID NO: 168632 - DNA, 614 bp, Homo sapiens
aggcatttttacattggaaaggtgttcttacttaggttatgtcctttaatcctttacaatgaagtaggcattatttcaactttgcagatgaggaaacagagactctatgggagaaagcagttwtccccaaagtatttattggactggaccaaatccagatcatatcttgagacgtatcccctgtaaataaaaaaggactactgtgcctgtgcctgtcagcacattataatttcttttagtctcactgcaaccctacaaggtagatactattatttaccaaagtgtcagtcaacacttggcaaaggagctttgccaaagaagctcctgatataaaatgaaatctattgtgaactctaacctattaactaattaatgcatttaataaattaatttatcaaatatttgttaaatacctacaaatgtactagatactctgctatgtgtccattagagcactatttcttttaatcaagtcatactatcttacctgaaacatacagatgtttaacctttaagtgaaaataaataacaaagagtttggcgatggcttttccctcctgtgagtattgggtgatatttagttttgacatgtagctaaaattctgtttgaatac

SEQ ID NO: 168633 - DNA, 612 bp, Homo sapiens
ggacttttgtttcttggatactcttccagtaggagaccaacatgtgactctcaaaataaccaacatacattctcaagggttcctcaaaattcctcaaggtttcttcstactcagcctcctaagcttttccaaatacagatgaacataattcaatcatgactcttctatatccacttttccttacaaaggaaagactcactaaattacaaaatatgcccagtagattctggtattaattactgtactttattaaaataaagagagtgaaaataaatattgcctatgggcagacttgaaattctgataaatccttccaacacaaaatacctaaactttttcaattaaatataataaaaagcctttcaaatgcacacttgagattaaaataaggtaaaagaaaattgcataggccaaaaattaaaaagaaaatagaaaacagagaaggagatgggaactatgtgggagcaactttttaggtccatgcagggtggagagtggcagctgagaagcttgcaaagaggtaggatcctccaaatgccacctgcttggtcaaaaagaaaactagaaaaaaagaaatcttcccacatcaaagggagacaacccacatcaaag

SEQ ID NO: 168634 - DNA, 539 bp, Homo sapiens
tactcctgctaaatgtgttttcataaggtgagtgggcatagaacaggatttctcaaccttgtctctattgatattttgggctggataattttgagaggctgacctgtgtgtggtaggatgtttactggcatccgtgggtttccactagctggcaggagcactgctccagttgaaacgaacgaacaaaaataccttcagacgttgccaaatgtccctgggaggcaaaatctcttctcattgagaaccactagcctagaatacaaaaatatttcattatttatatccgaacaagtcatctgaatgttctatggtttaaaaaatatatattgtgtgcataatatgtgccaggcaccatttttctaagtgctttgcaggtactaattcatttaactccccaaataacaacctcataatgtagttattatgtagtgsgtacatgggaaagagaaattagaaaccctactagtctgatggaataaaccctagttcctatccacaatgcttatccacctcctctttggctctgctagtgatttcca

SEQ ID NO: 168635 - DNA, 575 bp, Homo sapiens
ttttccacggtttggaataaaagaggcaaygattagaaatgtatccctcatgataggctctatagcatgataggctttatatactgtaaaggctagggttacacaacagactttaaattctcttgtaaaagtcatgctaaatagtattaagtggctaaacacagaagtacctgcagccactggcacttacgacctatagagaaaacatcaggtattatagaaactcagttgcaggggattaatgaaaaaactacttagttaagtgagtagactctttatctagctcattctctgatctatttgagtttaggaggtttggtttatggggaccctaggtaaggagcatactccaaacccttggtattatcctcccgtagtcataataatagtctccctagtgcactgtattctctcaaaggttttaaatgtttgcatgcagccatctctagaatatctaacggtctctcttcaagtggaatgacaagagctgaaagaaatgtgtgaccatgaggatactgtaacctatgaatgacatgctgagactggaaacccaaatgatgttaacagagagtggt

SEQ ID NO: 168636 - DNA, 575 bp, Homo sapiens
ttttccacggtttggaataaaagaggcaatgattagaaatgtatccctcatgataggctctatagcatgataggctttatatactgtaaaggctagggttacacaacagactttaaattctcttgtaaaagtcatgctaaatagtattaagtggctaaacacagaagtacctgcagccactggcacttacgacctatagagaaaacatcaggtatyatagaaactcagttgcaggggattaatgaaaaaactacttagttaagtgagtagactctttatctagctcattctctgatctatttgagtttaggaggtttggtttatggggaccctaggtaaggagcatactccaaacccttggtattatcctcccgtagtcataataatagtctccctagtgcactgtattctctcaaaggttttaaatgtttgcatgcagccatctctagaatatctaacggtctctcttcaagtggaatgacaagagctgaaagaaatgtgtgaccatgaggatactgtaacctatgaatgacatgctgagactggaaacccaaatgatgttaacagagagtggt

SEQ ID NO: 168637 - DNA, 575 bp, Homo sapiens
ttttccacggtttggaataaaagaggcaatgattagaaatgtatccctcatgataggctctatagcatgataggctttatatactgtaaaggctagggttacacaacagactttaaattctcttgtaaaagtcatgctaaatagtattaagtggctaaacacagaagtacctgcagccactggcacttacgacctatagagaaaacatcaggtattayagaaactcagttgcaggggattaatgaaaaaactacttagttaagtgagtagactctttatctagctcattctctgatctatttgagtttaggaggtttggtttatggggaccctaggtaaggagcatactccaaacccttggtattatcctcccgtagtcataataatagtctccctagtgcactgtattctctcaaaggttttaaatgtttgcatgcagccatctctagaatatctaacggtctctcttcaagtggaatgacaagagctgaaagaaatgtgtgaccatgaggatactgtaacctatgaatgacatgctgagactggaaacccaaatgatgttaacagagagtggt

SEQ ID NO: 168638 - DNA, 575 bp, Homo sapiens
ttttccacggtttggaataaaagaggcaatgattagaaatgtatccctcatgataggctctatagcatgataggctttatatactgtaaaggctagggttacacaacagactttaaattctcttgtaaaagtcatgctaaatagtattaagtggctaaacacagaagtacctgcagccactggcacttacgacctatagagaaaacatcaggtattatagaaactcagttgcaggggattaatgaaaaaactacttagttaagtgagtagactctttatctagctcattctctgatctatttgagtttaggaggtttggtttatggggaccctaggtaagragcatactccaaacccttggtattatcctcccgtagtcataataatagtctccctagtgcactgtattctctcaaaggttttaaatgtttgcatgcagccatctctagaatatctaacggtctctcttcaagtggaatgacaagagctgaaagaaatgtgtgaccatgaggatactgtaacctatgaatgacatgctgagactggaaacccaaatgatgttaacagagagtggt

SEQ ID NO: 168639 - DNA, 541 bp, Homo sapiens
tttaattatctaattttcaacaaaaaattgtgagacatgcaagaracaagaaaggatgatctatacatggagagaaaaaaggcagttaattgtccctaaggaagcccagacattggacttatgagacaaagacactaaaacgttttctctaaatattttcttagatacagtttcaaagagctaaagaaaaccatatatgaagtatgataacaatatctcaccaaatagagattattaatgaagagatagagattacaaaataaagaaacaaacattgtggaattaaaaagtataataatttaattcaaaaattcactagagaagaaacatagaaaaccctctccctctccctctccctctcccgatgccgagccgaagctggactgtactgctgccatctcggctcactgcaacctccctgcctgattctcctgcctcagcctgcccagtgcctgctattgcaggcacgcgacgccacgcctcactggtttttgtatttttttggtggagacggggtttcgctgtgttggccgggctggtc

SEQ ID NO: 168640 - DNA, 373 bp, Homo sapiens
gtagtttttttttttttttttttttttttgagacagcgtmccactttgtcccccaggctggagtgcagtggcatgatcttggctcacttcagtctccactttctgggcttacgcagtactcctgcctcagtcccccaaatagctgggactataggtgtgtgtgctaccacgcctggctaatttttgtattttttgtagagatggggtttcactatgttgccgaagctggtctcgaactccagagctcaagctatcagtctgcctcggcctcctaaagtgcttaggtttacaggcgtgagccactgcactggaccctgtagaattttttcattcagttctgctgtgaagactgaagtgctgaatccttaaatat

SEQ ID NO: 168641 - DNA, 587 bp, Homo sapiens
caaatgttaacgtttcacataaccatggtacattcatcaaaactaagaaattaacattggaataatactrttaactaaactccaggcttcatttggatttcgtgaatttttccactaataccctttttctgttccactgtccaatccaggataccacattgcatttagttatgtctctttagtctcccctaatctctgcagagactacttcttaaaggattcttgtggattatttgctcaagtgaatatttcttttatttatttatgcctcagcattcacatcgtgaatatttctaaaggaaggaaaggttgtaaaacttaggagcactagaatatatagctacagggcattgttgaactttagacaagatcataggatttgacatgttttctgggtcaaatgcagagtttatctagcgtcttctcttctgccatcagagcttcccaatcctttcatgttgtcatttgaagaggtgaatcctagcctaaccattaactgtttgtgacattttaatgggtaaatgtaaatatttctgtagtaaagacgtgttaggtacctaccctgtgtaatgaactgtatcgaattc

SEQ ID NO: 168642 - DNA, 609 bp, Homo sapiens
gggctcaaaaataaacagccagttcctctggctggcctccctccttgaatggaggcagggaacgttctgtacaaggaaaccttctcccaccaagctagaggccaatcctaaccaagtcaattgaagcatctgagataccttaaaacattaatagcttttaattacaggtgcccaagtggctcaactttaatatctctcaatcctgaggactcagcatgtcgaggacatcatattacaaaggtgtggcagtgcatcatattactttttaaaaataaaatcaaagactatttttttataaacctctaccttgaatatacatstctcccaaggtcacaggaatacatttccatattataagccccaagtaagcaaaaacttggaaacgaatgccaagtacaggaaaagttacacataaaattccctcctatatttaaggctgacagtgaaatatacacggctgaatcagcactctgaaaaattgaaaccacatggtgtccttacccccaggtaccattagcatataagaagaaaagccaaatttgcttttacaaaaagagaaattgaggcaaaacaccataaggaactgatagtagagttagaattatgacc

SEQ ID NO: 168643 - DNA, 613 bp, Homo sapiens
ttttttggctttagttattcattttatttttatttttataaagttccttatatattctgaatacaaattcttcattagacatgtattttgcacacatttacttctagtctctggctcatcttctcaatctcaacagtgtgtttcaaagagcaaaaatttttaattttgatgaagtccaattcgycattatttttcttttaaagattgtgcttttttgttgttgttgcatctaataactcattgcctaaccaaaagacaaaaatattttcctgtgttttattctataaattctgtagtttgtcacataggcttataagccattttaagttaatttttagataaggtatgtgagattcattgttttgcatatggttgttcagtttagctctgtttgctgaaaaggtttttttcatttaattgaatttgtatctctgttaaaattattttatcataagtatctagatctttgtctggattctctcccctgttccactgacctttctactcattatccaaaatcactctaaatcaattattttttggaaagtctaaagataagaaaaatgtattttaaaatatttacattcattttaattatatttgaaaatcttca

SEQ ID NO: 168644 - DNA, 604 bp, Homo sapiens
cactcaaaaacaaagcatttataggcagaagattgggtgggtattattattctgctgttttaatctgcagcaagcctcaagaattctctaaacctcaattttctcacagataaaaggcaatgtaatcttttgtccatctaacaggtttgccataaggaacagtgatgctggtccttgtttgtgtgtgtgtgtgtgtgtgtctgtgtgtgtctgtgtgtgtctgtgtgtgtgtgtgttttcgtggtggagaggaacttctgcagtgtcaaagtggcatggctgtagcaaagttggaaaagaatcctgtacccactgaagagctaaatcaataccattcgtaaaatctagccactgctagaatcttaactatcactggagagacaaaagaattaagtcccttggcaacatggcgaacaagraattgcttagggtcttacacaacacagcttctgcaaaagagaagttaaattgtgggaaacagagatatgccatgtttctactttaattcccaaagtttttccaccagttagtgtgccaaaagaaaggatagcactgttggcaaaccctaatgataatcttagcttgtctgacctctgtctgtgca

SEQ ID NO: 168645 - DNA, 550 bp, Homo sapiens
tataactacttatttctagtggtgtaatttatcacaacagtggatgataatggtaataagaatatgtataaggcgttgatatggtttggctgtgtccccacccaaatctcatcttgaattgtagttcccataattcccacatgtcgtgggagggacccggtgagaggtaattgaatyatgggggcggttacccccatgctgttctcatgatagtgagtgagttctaatgagatctgacggttttataaggggctttcccccttttgcttagctcttcttgctgctgccacgtgaagcaggacatgtttgcttctccttccaccatggttgtaagtttcctgaggcttcccccgccatgctgaactgtgagtcaattaaacctctttcctttataaactacccagtcttgggtatgtctttattagcagcgtgagaatgggctaatacagtcattgtgatatgtaactattattggtgatacaattggtgattagttagcaaagctaattgtaatctgttgctggaattcctcagtaatgtttaagtttca

SEQ ID NO: 168646 - DNA, 542 bp, Homo sapiens
tgtgagcctatagtcagctactcaggaggctgaggcgggaggatggcttgagccagggaggtcgaagtttcagggagctgtcatctcaccactacactccagcctgggcaacagagggaaaccccatctctatttaaaaaaaaacaaaactctaatgtgatttaatatccttgtgtagatttgacttaagaagatagaacattccatcatactccttttcttaaagactacctagaagactaatgagtgatttgaycacatagttgaatcagtgttataataaaaagaacactttactaaattctcgataatgttctgaagttttccaaaagtgtagtctatatagatctttatttttcagactatttaaatatttttgagatttagtttgtagtaacatctagcatcctaggaaaacacaaatactgtgtgacagctcatatacttttttctttttaattttcattcaaatttcagggtgctttgtttctccccttcaattttaattttaatagcagctgtaaacactttgcttcaaaatt

SEQ ID NO: 168647 - DNA, 542 bp, Homo sapiens
tgtgagcctatagtcagctactcaggaggctgaggcgggaggatggcttgagccagggaggtcgaagtttcagggagctgtcatctcaccactacactccagcctgggcaacagagggaaaccccatctctatttaaaaaaaaacaaaactctaatgtgatttaatatccttgtgtagatttgacttaagaagatagaacattccatcatactccttttcttaaagactacctagaagactaatgagtgatttgatcacatagttgaatcagtgttataataaaaagaacactttactaaattctcgataatgttctgaagttttccaaaagtgtagtctatatagatmtttatttttcagactatttaaatatttttgagatttagtttgtagtaacatctagcatcctaggaaaacacaaatactgtgtgacagctcatatacttttttctttttaattttcattcaaatttcagggtgctttgtttctccccttcaattttaattttaatagcagctgtaaacactttgcttcaaaatt

SEQ ID NO: 168648 - DNA, 542 bp, Homo sapiens
tgtgagcctatagtcagctactcaggaggctgaggcgggaggatggcttgagccagggaggtcgaagtttcagggagctgtcatctcaccactacactccagcctgggcaacagagggaaaccccatctctatttaaaaaaaaacaaaactctaatgtgatttaatatccttgtgtagatttgacttaagaagatagaacattccatcatactccttttcttaaagactacctagaagactaatgagtgatttgatcacatagttgaatcagtgttataataaaaagaacactttactaaattctcgataatgttctgaagttttccaaaagtgtagtctatatagatctttatttttcagactatttaaatatttttgagatttagtttgtagtaacatctagcatcctaggaaaacacaaatactgtrtgacagctcatatacttttttctttttaattttcattcaaatttcagggtgctttgtttctccccttcaattttaattttaatagcagctgtaaacactttgcttcaaaatt

SEQ ID NO: 168649 - DNA, 528 bp, Homo sapiens
aaaaatccaataaaataattactaatggggcaaagatctgactagacatttttcaaaagaagacatacgaatggcaaacatttatatgaaaaagtgctcgacatcattgatcatcagagaaatgaaaatcaaaattataatgagataccatcttatcccaattaaaatggcttttatccaaaagacagacaataatcaattctggtgaggatgtggagaaaggggaacytcatagactgttggtggggatgtaaattaatataggcactatggagaacagtttggaggttcctgaaagaattgaaaatagagctaccatatgatccagcaatcccactcgtaggtatatacacaaaagaaagggaatcagtatatcaaagtgatatctacagtctcatgtttattgaagcactgttcacaatagccaatatttggaagcaacctaaatgtctgttaacagatgaatggacaaagaaaatgtgatacttatttgcaatggagtactatttggccatgaaaaaaaagaga

SEQ ID NO: 168650 - DNA, 528 bp, Homo sapiens
aaaaatccaataaaataattactaatggggcaaagatctgactagacatttttcaaaagaagacatacgaatggcaaacatttatatgaaaaagtgctcgacatcattgatcatcagagaaatgaaaatcaaaattataatgagataccatcttatcccaattaaaatggcttttatccaaaagacagacaataatcaattctggtgaggatgtggagaaaggggaacctcatagactgttggtggggatgtaaattaatataggcactatggagaacagtttggaggttcytgaaagaattgaaaatagagctaccatatgatccagcaatcccactcgtaggtatatacacaaaagaaagggaatcagtatatcaaagtgatatctacagtctcatgtttattgaagcactgttcacaatagccaatatttggaagcaacctaaatgtctgttaacagatgaatggacaaagaaaatgtgatacttatttgcaatggagtactatttggccatgaaaaaaaagaga

SEQ ID NO: 168651 - DNA, 528 bp, Homo sapiens
aaaaatccaataaaataattactaatggggcaaagatctgactagacatttttcaaaagaagacatacgaatggcaaacatttatatgaaaaagtgctcgacatcattgatcatcagagaaatgaaaatcaaaattataatgagataccatcttatcccaattaaaatggcttttatccaaaagacagacaataatcaattctggtgaggatgtggagaaaggggaacctcatagactgttggtggggatgtaaattaatataggcactatggagaacagtttggaggttcctgaaagaattgaaaatagagctaccatatgatccagcaatcccactcgtaggtatatacacaaaagaaagggaatcagtatatcaaagtgatatctacagtctcatgtttattgaagcactgttcacaatagccaatatttggaagcaacytaaatgtctgttaacagatgaatggacaaagaaaatgtgatacttatttgcaatggagtactatttggccatgaaaaaaaagaga

SEQ ID NO: 168652 - DNA, 490 bp, Homo sapiens
ctcccacctcccatctttgcttccctgtattggattcttctcccagcagctggaatgatccttctgaaaagtaatttaaagtatattatttctcattattaaatataaggtctcactctgaataagactaaaatctttagcagggcctacaagaccctatacgaccttgcccttatctcatctctactattttcccctccactcacttcactgtcattacacaggcctccttgctgtttctcaaacaaaccaagtgcacttctaccccagggcctttacacttgctggtctttctgcctggaaagtgctgctccatatacccacaggactcttctctctcacttttttcaggtccctgttcaaatgtcactgatatggtttggctctgcatcyccacccaaatctcatgttggattgtaattccgaatgtttggggagggacctggttggaggtgattggattgtaggggaagatttcccccatgctgtt

SEQ ID NO: 168653 - DNA, 601 bp, Homo sapiens
attttaatatagtaacacaccctcacaattatctaatcttatttcaggttagtgcttctyggaaaggctacaaagcagccatagctcagaattatgtatctgaagtaaacaaaaataaaaacctcaacaacaaaatattaaccaaacaaacagataaagacgcatgcaacctatagcaccatacctaagaccacaaagggcaggagggttgacagaggtcttaagaggaatccagttttgggttttctcctaggatgagatcccaaatatagaacctatttgtagagtccaatacttttaaaaagggaaagcctgagaaattctgttaacagaaatatgaaaatccatgattttccagaagacagatgatttgacctgttcttattctaaaagcatcaaagacgttataccttagaaataaactgctcactttggaagatcagttaggcatccctgccacctcatgaactaaaatgatatctcagtaagttaaaaatatgatacacccccccaaggaccatttactcatggaaagtagtttacagagcagttagctctctgacatctgtataaccctacagacatgtgctacattgaaaag

SEQ ID NO: 168654 - DNA, 601 bp, Homo sapiens
attttaatatagtaacacaccctcacaattatctaatcttatttcaggttagtgcttcttggaaaggctacaaagcagccatagctcagaattaygtatctgaagtaaacaaaaataaaaacctcaacaacaaaatattaaccaaacaaacagataaagacgcatgcaacctatagcaccatacctaagaccacaaagggcaggagggttgacagaggtcttaagaggaatccagttttgggttttctcctaggatgagatcccaaatatagaacctatttgtagagtccaatacttttaaaaagggaaagcctgagaaattctgttaacagaaatatgaaaatccatgattttccagaagacagatgatttgacctgttcttattctaaaagcatcaaagacgttataccttagaaataaactgctcactttggaagatcagttaggcatccctgccacctcatgaactaaaatgatatctcagtaagttaaaaatatgatacacccccccaaggaccatttactcatggaaagtagtttacagagcagttagctctctgacatctgtataaccctacagacatgtgctacattgaaaag

SEQ ID NO: 168655 - DNA, 601 bp, Homo sapiens
attttaatatagtaacacaccctcacaattatctaatcttatttcaggttagtgcttcttggaaaggctacaaagcagccatagctcagaattatgtatctgaagtaaacaaaaataaaaacctcaacaacaaaatattaaccaaacaaacagataaagacgcatgcaacctatagcaccatacctaagaccacaaagggcaggagggttgacagaggtcttaagaggaatccagttttgggttttctcctaggatgagatcccaaatatagaacctatttgtagagtccaatacttttaaaaagggaaagcctgagaaattctgttaacagaaatatgaaaatccatgattttccagaagacagatgatttgacctgttcttattctaaaagcatcaaagacgttataccttagaaataaactgctcactttggaagatcagttaggcatccctgccacctcatgaactaaaatgatrtctcagtaagttaaaaatatgatacacccccccaaggaccatttactcatggaaagtagtttacagagcagttagctctctgacatctgtataaccctacagacatgtgctacattgaaaag

SEQ ID NO: 168656 - DNA, 523 bp, Homo sapiens
gttcagagtataggattcaaatacgatctgtgactctaaccagccttgcaacttttataaatgacttaatctccctgcctcagcccctcatctttaaaatgggcaaaataacagaatctattctcacaggattattgcaaagtctgartgaggtagtatacataaaacacagagtctggcaatggtaatcactgaataagctctattattattgttcatggttctttcagatattgaactaaaatttacatttgatagttacatcattataaaacactcagaataccatgcaaccatttaaaaatcttgggggttggggggaaggggacaccattatgcagttttaatcttaaatttaaaatttcacatttttctttttctcattgcaaatattttgcaatattatggagcatataggcattgtaaactgagcttggatcccaaccatgatatgacattgtatgtgtcctcagtttgtggtagagaagatttgtcgtgatctacttacccaacggctcccctc

SEQ ID NO: 168657 - DNA, 523 bp, Homo sapiens
gttcagagtataggattcaaatacgatctgtgactctaaccagccttgcaacttttataaatgacttaatctccctgcctcagcccctcatctttaaaatgggcaaaataacagaatctattctcacaggattattgcaaagtctgaatgaggtagtatacataaaacacagagtctggcaatggtaatcactgaataagctctattattattgttcatggttctttcagatattgaactaaaatttacatttgatagttacatcatyataaaacactcagaataccatgcaaccatttaaaaatcttgggggttggggggaaggggacaccattatgcagttttaatcttaaatttaaaatttcacatttttctttttctcattgcaaatattttgcaatattatggagcatataggcattgtaaactgagcttggatcccaaccatgatatgacattgtatgtgtcctcagtttgtggtagagaagatttgtcgtgatctacttacccaacggctcccctc

SEQ ID NO: 168658 - DNA, 577 bp, Homo sapiens
gtgcttgagttgtaatctttttctggtggaggatgttgccttggtattgatgctgatgaatcagggtagtggtagctgaaggttggggtggctgtgacaatttctgaaaacaagacaataatgaagttcactgcatatatcaactcttcctttcctgaaagatttctctgtagcatgtgataatgtttgacagcattttaccckcagtataacttctttcaaaattggagacaatcctctcaaaccctgccgctgctttaccaactacttttatgtactatcctaaatcctttactgttatttcagcaatgttcataggatcttcaccaggagtaaactgtaactaaagaaaccactttctttgctcatccataggaattatcttcacacttgttcaagttttcttatgagattgctgcaattcagttacatctttagattccacttctaattctagttttcttactgtttctaccacatctgtagttacttccttcactgaagtcttgaacccttcaaagtcatccatgagggttgaagtcaacttcttccaaactcttattaatgttattttaac

SEQ ID NO: 168659 - DNA, 390 bp, Homo sapiens
aggttgcttgctattcatttcttttctgtctattgaaaaactctgttgtgatggcagttcttttcaaaccttatgtattgtgactaaaaacttatttaattacttatttttgcttcaataaaaggaatatttccattttcatgaatcaatatcagttcagtctctgttttataaagcgtaaccactggttggcttataaagaccttctatattaattacatgtgtttgtacatgtggtttgggggttagtgaggcactctaaatgacraattgagctcaaacatttgtattaatatttcattatttttttagctgaaatatttagttgagtggttggttagttattgtaaactttagtcttattttttgatgaaatggataatttatttc

SEQ ID NO: 168660 - DNA, 373 bp, Homo sapiens
tatctctgtgtgtgtgtgcatatctccaatcttccagctccaattcaacgccatagaattattgcaaaccttcctcagttcactatttgtgactttaatacattcattcatttgctcaatcttacaatacacagtatatggctatacccataacactgtgaaggcactctttctatgtagagttcaatattggtgtgcagctttctttgcctttacactgggggtatgtagtcaaaagtattgggtccaacagttacttggstttccttttctccctttagtatagttattctgttccttggaagtacaaattaggtttatttgcttctgtttgtatttcattttgatgttttccccctcctagttgatttaa

SEQ ID NO: 168661 - DNA, 471 bp, Homo sapiens
gcttctgcccactaccttacwctgctggtgggcagaaataactggggatcactgaggtcttgcccagactggagccctgaagatgaggcccttgcccagggtttagggatgctcagcaggccaggtggtctttggaccagggagactgatgagaggaaaggccctggagcatggccagccaccttcgcacagtaggctcagccccatctatgtgcctttgcagcccttgaagtgccttgatgtagccatttgggttttcggtcattcatctgtctatcactgccctgagtaggggtgtggtgccggcaagaggcctgggatcaagtttagctgcctagcctacacatggcttctctcccaccttggagtggccattcgggtttttgatcattctagctaccttgcctgcacttggcttctctcctgcacagagcaagcagcaggtctggcatgctcttagaactactcctt

SEQ ID NO: 168662 - DNA, 482 bp, Homo sapiens
ttctgcccactaccttactctgctggtgggcagaaataactggggatcactgaggtcttgcccagactggagccctgaagatgaggcccttgcccagggtttagggaygctcagcaggccaggtggtctttggaccagggagactgatgagaggaaaggccctggagcatggccagccaccttcgcacagtaggctcagccccatctatgtgcctttgcagcccttgaagtgccttgatgtagccatttgggttttcggtcattcatctgtctatcactgccctgagtaggggtgtggtgccggcaagaggcctgggatcaagtttagctgcctagcctacacatggcttctctcccaccttggagtggccattcgggtttttgatcattctagctaccttgcctgcacttggcttctctcctgcacagagcaagcagcaggtctggcatgctcttagaactactcctttaggttactactg

SEQ ID NO: 168663 - DNA, 482 bp, Homo sapiens
ttctgcccactaccttactctgctggtgggcagaaataactggggatcactgaggtcttgcccagactggagccctgaagatgaggcccttgcccagggtttagggatgctcagcaggccaggtggtctttggaccagggagactgatgagaggaaaggccctggagcatggccagccaccttcgcacagtaggctcagccccatctatgtgcctttgcagcccttgaagtgccttgatgtagccatttgggttttcggtcattcatctgtctatcactgccctgagtaggggtgtggtgccggcaagaggcctgggatcaagtttagctgcctagcctacacatggcttctctcccaccttggagtggccattcgggtttttgatcattctagctaccttgcctgcacttggcttctctcctgcacagagcaagcagcaggtctggcwtgctcttagaactactcctttaggttactactg

SEQ ID NO: 168664 - DNA, 633 bp, Homo sapiens
ggctatgataagcagctcaggttttaagctgggatctcgaatatctacagcataggaataagagaatcttggcccaggtttcctagaatgcagagcccaaagaaaaagcttgcatgcttcctaggaaatacaattgcagggaagctggagtgaggaagaaaggtgagtgaagcagagtaggatgaacatatataaggaagtggatcactgagctttacaacaatcacagctgactgctccatttcatgggaaatgctatgtgtctctgaacagtccttccaagggtatgcaggttgagaattttcctgccagtgccttgcatctcttgtcccctagagtaaaagttcactccatagagggttaactcctacatttccatattatacgccaatccctttagcagtgccaagacagacatatcccacaccctttacatctgggtgtaaaagctgtaggggaagccagagacacttcacagcagactcatgtgttagaataatgctgacttgaatgcctttttcagagtcagtaacccttgtgttkgccagggctgaacaggtaaccaatagccctaaagacaggcgaaactcataggatctgagaaagaatgtaagaggtatttgatacaacgag

SEQ ID NO: 168665 - DNA, 564 bp, Homo sapiens
ggtagttgtcaagggcttggggggagaagagagtgggagttattgtttaatgggttcggagtttcagtttgggaagatgaaaaagttctggcaataagatggtggtgatggttgcacaacaatgtaaacatcttaggccactaaaattttcacttaaaattattcaaatggtaaattttatgttatgcttatttttctacagcttaaaaaatgatttaagaaactgacagaagacaaaatttaaaatcttactactctaaawctgtcaaagaaattgaatttcttatcaaacccctctataaacacacacatctctctagaacgagatgatttcactggtgaattctatcaaacatttaaggaagacttaatgcaaatcccacataaaccctttcagaaaatagagaaagaagaaacactttccaactcataagaccagaataattttgataacaaaaccaaaccaaaatattatcaaagaataaaatacaattataaatcaacatctctcataataattgatatggaaaaaaaccctcaacatgatataggtaaatcaaatcc

SEQ ID NO: 168666 - DNA, 647 bp, Homo sapiens
ctaatatccatcaacaggagaatggataaacaaatcatggtatgtttatacaatgtaatactattcaagaataaaaataaatgaattattaatatacacagcaacatggattgacctaaacattatgctggacaaaaccaactgagcgcaaagaaacatacrgtataattccatatatttgaagttctgaaacaggaaaaaccaatctgaggcaaaaaacattaaaacagtaattgcctctgggcgtggggattaactgacaaggtactcaagggaactttttgaggtaacgaaaatgttctgtatcatgacacaggaggcattaagtggtgcatccatttgtcaaaagtatacagctgaaatgtctgcactttcatgtatgtacattctaccttaaaataaaagaactgctaaaagtcatcatcatcaacatcatcaagtggaggagctgttggagtatagagatgcaagaattgcataatttgagaattgttgtagctaggagatgaatacatgtgagttagttatgttctcctcattttgtataagtttaaatttttccataataaatttcttgttaacaaaagtgaaataaagaagtttcagacaaacaaaaactaggagaattatttgtgtgcaagccttta

SEQ ID NO: 168667 - DNA, 561 bp, Homo sapiens
tatgttttgttatgatggtccaggcaaactaagacaagtagagagtccagaaacaaatccactgtcacttgatcaatgacactacggtgcaacggggaaagtataattattcattaactggtgctggaaaaattagataaaatgatatcttatatcatatttttgyattccagatggattgcaaagtgtgaaagatacgtttttctgctttctttttagaagtgtttttattttttaattgagctataacttatatacagtaaagtacacaagtcttaaaaaattgatgacagttttcatatacccaacaagatccttcatgatcccttccagttacacccaaaaaaatcactattatgactgtcaaaataagtaagttttgcctatttttttcactgagatctagagggtctctgttctcttacccttgaaagactgtgggaaattcatttcagctctttgaaagtgttgagtttaattttgtatcctcatgctccatacaactgcaaaatctgacaaatgtcgtgaagcctttttagactgggtgggtttttgagacag

SEQ ID NO: 168668 - DNA, 561 bp, Homo sapiens
tatgttttgttatgatggtccaggcaaactaagacaagtagagagtccagaaacaaatccactgtcacttgatcaatgacactacggtgcaacggggaaagtataattattcattaactggtgctggaaaaattagataaaatgatatcttatatcatatttttgtattccagatggattgcaaagtgtgaaagatacgtttttctgctttcttyttagaagtgtttttattttttaattgagctataacttatatacagtaaagtacacaagtcttaaaaaattgatgacagttttcatatacccaacaagatccttcatgatcccttccagttacacccaaaaaaatcactattatgactgtcaaaataagtaagttttgcctatttttttcactgagatctagagggtctctgttctcttacccttgaaagactgtgggaaattcatttcagctctttgaaagtgttgagtttaattttgtatcctcatgctccatacaactgcaaaatctgacaaatgtcgtgaagcctttttagactgggtgggtttttgagacag

SEQ ID NO: 168669 - DNA, 561 bp, Homo sapiens
tatgttttgttatgatggtccaggcaaactaagacaagtagagagtccagaaacaaatccactgtcacttgatcaatgacactacggtgcaacggggaaagtataattattcattaactggtgctggaaaaattagataaaatgatatcttatatcatatttttgtattccagatggattgcaaagtgtgaaagatacgtttttctgctttctttttagaagtgtttttattttttaattgagctataacttatatacagtaaagtacacaagtcttaaaaaattgatgacagttttcatatacccaacaagatccttcatgatcccttccagttacmcccaaaaaaatcactattatgactgtcaaaataagtaagttttgcctatttttttcactgagatctagagggtctctgttctcttacccttgaaagactgtgggaaattcatttcagctctttgaaagtgttgagtttaattttgtatcctcatgctccatacaactgcaaaatctgacaaatgtcgtgaagcctttttagactgggtgggtttttgagacag

SEQ ID NO: 168670 - DNA, 237 bp, Homo sapiens
acagtttaactgctcactctcaaacatacaaaatatgtattccatttgctttctrtagcaacatattttaataattatggaatagtttcacaaattcttagattattttctcacagtccacatataagcaatatgacatttcatagctcaaagttacgttctattacacacaaggttgcttaaattcgctttcgtttttggttaaaccacgaaaacagtgagctgaagtaggccaac

SEQ ID NO: 168671 - DNA, 566 bp, Homo sapiens
ttttttttcttgttattacctttaaattatgactatataaacatatttctctattaaagtaaaaaaggaagcatacctattaaaaccagttctgtagcttgaacatttcagcatttcagaatgtgttgctttctctgtctcatcttaccattcagtgtttcctagctttcagatatctttgatatttatatttttattaattttaactatctcagtattctctcatcaattatttttgacattcactttaaatttaatgttcctactaagcctaagagcaaagttttctgctttccttatactgacatttattttatgtcatctctttctcattcttattttctaccttgtactcatttctgagtcacctgacatacttctgataaatcaaaaatgacactgctggaggcatatttttatagtccttctatatctttgttgtatttctattgactttacatatcactgataacttttccaaatggacttctcaatttaaaattttcctcaatctcatctttctagaaataaytgtgagcatatccccttctggttcccacatttca

SEQ ID NO: 168672 - DNA, 497 bp, Homo sapiens
ctggactaataacagtgctggattcatacttgttaattaaataaatgaaatgacacacatggacactagaggaaatttcattatcctatactcaaagctacagaaagcatgaaatgcagaccaaattctagacatattaatataaaacttcattatgtattcagtacaatgttcactatttgggtgatgagtacaccagaagcccaaatatcaccattacaccatatatgcctatgacaaacctgcacatgtactctctgaatctataattgtttaaaaatgcatattctgcaggattggaaaaacggtatataaagttgccagtattgtgtctataaatgtccaacaaaattrattatatctctatcttctttgatttttcatagtgtacgtgacagggtttggatctatatccccacacaaatatcctgttcacttgtaatcctcaatgttggaggtggggcctggtgagaggtgactggatcgtgggggtggat

SEQ ID NO: 168673 - DNA, 277 bp, Homo sapiens
agaaaatgacttattctataccttgaagagactatgtgaaaatgtyttacaaagtattctgaaaactactaatagccaagtataaaaatgacaaggcaatgaactgaatatttataaaaaaattaaaataaaataataccatgctaaaatttacacgtgtaggattaaagacattctaaataatgttatcattgttattccatactgggaaagtgataattcaatcaaatctttcagcctgactcattttcagttattggcttaaagatgtttcacc

SEQ ID NO: 168674 - DNA, 277 bp, Homo sapiens
agaaaatgacttattctataccttgaagagactatgtgaaaatgtcttacaaagtattctgaaaactactaatagccaagtataaaaatgacaaggcaatgaactgaatatttatwaaaaaattaaaataaaataataccatgctaaaatttacacgtgtaggattaaagacattctaaataatgttatcattgttattccatactgggaaagtgataattcaatcaaatctttcagcctgactcattttcagttattggcttaaagatgtttcacc

SEQ ID NO: 168675 - DNA, 277 bp, Homo sapiens
agaaaatgacttattctataccttgaagagactatgtgaaaatgtcttacaaagtattctgaaaactactaatagccaagtataaaaatgacaaggcaatgaactgaatatttataaaaaaattaaaataaaataataccatgctaaaatttacacgtgtaggattaaagacattctaaataatgttatcattgttattscatactgggaaagtgataattcaatcaaatctttcagcctgactcattttcagttattggcttaaagatgtttcacc

SEQ ID NO: 168676 - DNA, 620 bp, Homo sapiens
ttctacttaaaaatttgttaagaaggtaaatcacatgtcaacatttttactccccacttaaaagggagtgagacacaaggaaasttttgaaggtgatggatatatttattacctcaactgtggtgatagtatcaagagtatatacatatgctcaaactcatcaaattgtatataataaacatgagcagggttttttaaaatatcaattatacttcaataaagctgtcaaaaaagtgaagggtctctataacataaaaaatacagctctaaagaaaactatacaatgggcagttggacaaatgctattatgaatttttggatctctacacaaatatattgaaggctttcttcaaaaatcacaaagcaatgatatcacgcccactttgatattgatgaaagatgtcacatgccaagaggaatttaactactttgaaactgagtctagccttcccttgtgctatataaacacacttaagggaagacattaataatattttattatttttaacaatcttcaagtaaataaagcttatttccagaatgagtcaaatgatgacatctgtttataacaaaagtataattttcaggttgaatttaaagacaaatccaaatgagcactt

SEQ ID NO: 168677 - DNA, 367 bp, Homo sapiens
tgattgtgggtttttcttcccctttctgtcactgcaacaaacacaggaacaaatatccatagattgatgaacattcagctacatgtgaccagtgaattacaggttgtgctgaagactttgtttttaatatgtatgtgaccttgtgtgtattctctagacgtgtacatgtgttatcagcatttttagatayagaagttatcagcaagaaaattgaagtcatccataggaagttatctacatgaagcaggcatataggaaaattgacttcttggattttcctgaagatcacttgtttcctgactgtgaactagaagattttggaggaagcaaatctttgggtatagttgatttccaagagatgagtcac

SEQ ID NO: 168678 - DNA, 499 bp, Homo sapiens
tccttaaactacaaaattaacccaaaactgaatccaaaataggcttttaatggaaatattttaaaagtttaatactaccatatgaatgtatggtcaagacatacattcataatagtatkataatataatatattactgttattcttattctttagggaagggatggagctgaaacatttgacagtaaattgtagaaatcatgaccctccatccctaaaaccttctctcataaccacacctcaaatttttaaaatgtaacatagctatatcactgtcatgtaatatagtttatattcctatttcactaattatcttccgagtgtcctttatagcaatgttgccctctgaaccaggatccaatgcagaagtttacatttagtcatattgtatgttttctctcctttgatatgtagcatttcctcccttttctttgtgttttatgaccttggtgtattaaaagagtacagacacaatgttttgtagtatttctctcaatttg

SEQ ID NO: 168679 - DNA, 499 bp, Homo sapiens
tccttaaactacaaaattaacccaaaactgaatccaaaataggcttttaatggaaatattttaaaagtttaatactaccatatgaatgtatggtcaagacatacattcataatagtatgataatataatatattactgttattcttattctttagggaagggatggagctgaaacatttgacagtaaattgtagaaatcatgaccctccatccctaaaaccttctctcataaccacacctcaaatttttaaaatgtaacatagctatatcactgtcatgtaatatagtttatattcctatttcactaattatcttccgagtgtcctttatagcaatgttgccctctgaaccakgatccaatgcagaagtttacatttagtcatattgtatgttttctctcctttgatatgtagcatttcctcccttttctttgtgttttatgaccttggtgtattaaaagagtacagacacaatgttttgtagtatttctctcaatttg

SEQ ID NO: 168680 - DNA, 499 bp, Homo sapiens
tccttaaactacaaaattaacccaaaactgaatccaaaataggcttttaatggaaatattttaaaagtttaatactaccatatgaatgtatggtcaagacatacattcataatagtatgataatataatatattactgttattcttattctttagggaagggatggagctgaaacatttgacagtaaattgtagaaatcatgaccctccatccctaaaaccttctctcataaccacacctcaaatttttaaaatgtaacatagctatatcactgtcatgtaatatagtttatattcctatttcactaattatcttccgagtgtcctttatagcaatgttgccctctgaaccaggatccaatgcagaagtttacatttagtcatattgtatgttttctctcctttgataygtagcatttcctcccttttctttgtgttttatgaccttggtgtattaaaagagtacagacacaatgttttgtagtatttctctcaatttg

SEQ ID NO: 168681 - DNA, 499 bp, Homo sapiens
tccttaaactacaaaattaacccaaaactgaatccaaaataggcttttaatggaaatattttaaaagtttaatactaccatatgaatgtatggtcaagacatacattcataatagtatgataatataatatattactgttattcttattctttagggaagggatggagctgaaacatttgacagtaaattgtagaaatcatgaccctccatccctaaaaccttctctcataaccacacctcaaatttttaaaatgtaacatagctatatcactgtcatgtaatatagtttatattcctatttcactaattatcttccgagtgtcctttatagcaatgttgccctctgaaccaggatccaatgcagaagtttacatttagtcatattgtatgttttctctcctttgatatrtagcatttcctcccttttctttgtgttttatgaccttggtgtattaaaagagtacagacacaatgttttgtagtatttctctcaatttg

SEQ ID NO: 168682 - DNA, 599 bp, Homo sapiens
cctagattcttacttaatattgtcctaaatacaaagtaaagccgtatcgattaaaaaaccaaacaaataaacaaacaaaaaaccctgtgactgatgcctgtcccgtagaattackaaattttactccttgatctataagatagacctttttataagtctgggagtctgtgtcagggcaattttcctgatattttgttaagaattcccctgatcacgtcggtgacagtgatgacaccaaaatatcatcaaagtgtaatttttatacccattctaatttttttttgtttgttttccaactaagacaaagaaacaaacaaatagcctcagacatctgtgtctatacctaggtatttttctcctcacctgggaatgcttgtctaatagcttctttcttgttatggcagaaagaatccctgcgaagtggcaatgaacccatgtcacatacacagttggaccaaattttactcttaatcaattgtcttagccacgttatggttttttatctaattgtttattcgtaggatgagctaataccttgcaaccaagcaaatttttatggctctctatataatttctgaacaaatagagtgtataatgga

SEQ ID NO: 168683 - DNA, 473 bp, Homo sapiens
acggaagtctgtaagagggttgccaagtcagaaagcaaaagcaaagtgtcgctttattaaaaaggtgggggcgggtcctgattgagctgagaacaaaacatctgggggagttctaaagctaggaggccaggcctgcagggagggggtcggtcatcccgggtgtcccgctcacgggtgcggcttccgtcgacactgtccgtcgacactgtgcaggtaaacactgctgaacgggttttgtttttgcttttttttttttttttttggctcccagactggagtgcagtggcgcgatctcggctcactgcaacctccttctcccgggttcaagcgattctcctgcctcagcccccccgagaagctgggattacaggcgcgcacaaccaagctcggcgtattattttatttatttgcttgtttatttttgagactgggyctccctatgttacgccggctggtgccactattttcaaaga

SEQ ID NO: 168684 - DNA, 302 bp, Homo sapiens
  misc_feature (1)...(302): n = A,T,C or G
gcaaccaccaggttgctctgctctctgcttctatagttggaaatgtttcttctttttagattccatatataagtgataccatacagtatttgtctgtctctgtcacacttcactgagtatagtgccctctaggttcatttatgttgttgataggcaggacttcttttttaaagtggctgaataatattccgctgtgtgtgtatgtgtgtcaagttttctttttatccattcacctgtcagtggacacttagatngtttccgtatctttgctactgtgratagtgctgcaatgaacgtgagat

SEQ ID NO: 168685 - DNA, 304 bp, Homo sapiens
tggaacaatttaagcaacaaaataaataatgttgtgtggtcttataacgcaaagaataaattaaatatccttgagtctacagtgatataaatgattgaataaataaatggagagaagagataaaacttycttacagaattccaaataatatatgtaaatacttccctcttcccggaggtgaagctaacttcccctccccttgatatgggctagacttaaacaataactttataatggagaaatctggcagatttcccttccctcaaccaagtgatcaaggttcatgtcacaggaatacctcatg

SEQ ID NO: 168686 - DNA, 582 bp, Homo sapiens
cctttgcccatgttaaaattgggttgtgtgtagttttgttgttgaactgtaggagctctttatagaatctgtatactagaccctaatcagatataggatttgtgaatattttctcacgtaaattcttgatcaggattctaaccacctccaaccaagacgcaatatgagcgtgttaacatcatcttgaacgttggtggaagttttccaatggtttcgtgctggtcttcacattagtccttactgagatcttgctacattaaaagtgggatattgttactaatatatttgatctgatcctctttagttaacagtaattgtattcrttttctattgctgtataacaaatgccacaaagttagcagtttaaatacacactgactatatcacagtttgtgtggtcagaggctgggcataactgcagttggtctctgctcaggttctcgaggctgaaatcaatgagtcagctgggggtttcttcctggagctctgagtcttctctcaagttcatgtggttcctcctggtttagcaggaaggcctcattctcttgctggctgttggctgggtactctcagttcccagag

SEQ ID NO: 168687 - DNA, 493 bp, Homo sapiens
tatatgcgtacaaggtgattttttagtgttttttttttttaaattctctctttttctataaattttaatgatgacttgagtataaaacaagatgatccactctgcagcaccaaaggtgggcaagagaagagatcagaatctggtatgagactgaaaatcactgtggcaaccagcttcagtggggcagctggggttggctctgaagaaagtctgttccatttgtatagcagacaggagcccatggggttcccatcagctagcactgggagtggacttcagaggctgcacgggctgctgttggactggtctrggggacgggggaggagggaagatgcctgtgaggcaaggcagaagggcttctagacctcagactgagggtcagggaagacctatcttcctaaaggtgctggggaatagttaggctagcagatcagaacaggtcaaaagaataagcactatggtagaggctattgtgggtttggggaaggggaga

SEQ ID NO: 168688 - DNA, 446 bp, Homo sapiens
aggtgattttttagtgttttttttttttaaattctctctttttctataaattttaatgatgacttgagtataaaacaagatgatccactctgcagcaccaaaggtgggcaagagaagagatcagaatctggtatgagactgaaaatcactgtggcaaccagcttcagtggggcagctggggttggctctgaagaaagtctgttccatttgtatagcagacaggagcccatggggttcccatcagctagcactgggagtggacttcagaggctgcacgggctgctgttggactggtctgggggacgggggaggagggaagatgcctgtgaggcaaggcagaagggcttctagacctcagactgagggtcagggaagacctatcttcctaaaggtgytggggaatagttaggctagcagatcagaacaggtcaaaagaataagcacta

SEQ ID NO: 168689 - DNA, 439 bp, Homo sapiens
aggttggagatatgggtataagaatggtagttaaacattgcattttctaacagaatmgaaacagtacaatttttaaaatgggagaagtgggtaagaacgtagaataagatcattgaatttacactataagtaatagccaaaagatatggtaaaaggttaaaaaattcttaaaaaggtaataaagagtactacaaaggtaaccattagaacaaaattaaacattttcctaaataccaaaaggaattttctaaaaaggaaagaaagtacacaaagagcattttaaaaataggtttgatgattaaattcagccaaaaaaagaaccggtttttcagtttattttatacaaaacaagaaaattacatgcaagtggtaagctcctatgcaccaagtgtttagcttagaaaaataaaatactcctaggaaacaatttatcttttgt

SEQ ID NO: 168690 - DNA, 372 bp, Homo sapiens
gaagcgcgggaggagcggccgcaggcagcgcccagggatatgactggagccgactttccagaagcggcgcacgcaaagcccagctccgcacgcaaaggggaggcgacagcagaaacttcaacccgataaagttcgccggrgcgcggagattcgcctcctcctgccactctccgccccgctcgggtcccgccccgctagctcccccaggcccccccagtcgccccagcttggctccccgccctgcgccaacggcttccatcgcagcctgggcggccccgcgcccaccagcgggcggcgccacctggagtggcctctacgcgggaaatctcagggccagctgcgccccaggagcctttgtgtgcccaagcactg

SEQ ID NO: 168691 - DNA, 536 bp, Homo sapiens
aaattgattctccagctttctaatatgacactagagtatgtccaacctttctagttccgaagtactcacttgtggaggctacagattggcttaggtccccattaggaagggacctcaagttatctgatccagaaagaaacattggtttttttcagtkttctgggaagtttgaatgcagatatactcaccttatagaagtaatgcctggggtgagtttctgtttctcaggttaagaagtttctccaataaaattcatctcagaaaagagagaggaggaggagtcctaagtaattatccatagaaggccaactaacagttctatctaaagtttattttccagtggtgccactgattggaaggccactggctgaaatgcacgtgatgtaactcagtattgcaagttgagtccttcagggtttcaagtaaggatgagactggaccacaaccacagagaactaatgtaaaatccaaaagatatgacattgtgaagaaattactacactgaacactgagcataaatttctatgttccttgta

SEQ ID NO: 168692 - DNA, 580 bp, Homo sapiens
aagtctggatgtgccctactgacatgctctgcctcctggcctatgaatcttctgggtcaactgctgtctagagtgggccttggcagtcttgtgagtttgcaggtttaatagagccttatgagacctcctggtgggtcttgtggatggaggttttcacttttactggtttgaatgagtgcatttgcctgtgaagctgtgagcatgagacaatgtccagtcttatggtttttactaattgccagtttttctttacaaattaaaaaataattttgtaatgaaaattggcaggtcccacttgagaatattatactaagtgaaataagccagtgacaaaaagacaaatacttttttccacttctctgaggcactcawattcatagacatgggaagtagaatactgtttgccaggggctgggagaggaggtaacggaaagttgccgtttaatggatgcagagttccacctttgcaagatggaaagagttctggagactggttggacaacaacatgaatgcacttaacactaccgattgtgcacttggtttaaaaactgcacatttgtaaaatggttaacgtggcaa

SEQ ID NO: 168693 - DNA, 537 bp, Homo sapiens
aaattcctggaagatcaaaccccttccagcatggccaggtagcacagctgagccagggatgatggggccatattgggtttggctctgccttgcagctggcagtccaaacactgaggacatgcatatatttctgcaggcctcactatggtcatctgtccaaaccccagaatccagagactcaaaacgaaatacagtcatacagtaagatatgtgcaaggtttcagggagcccagcagccagaccttacagctttagctcaatttagacaaatcaagcaagtttaagaaatattccagaagtagcagttttatgaccttaaaacatgtaataggctgggcacggtggcccatgcctgtaatcccagcactttgggaggccaaggtgggcagatcacttgaggtcaggagttcgagaccagcctagccaacatggtgaaatcctgtttctactacaaacacaaaaattagccaagtatggtggcatacayctgtagtttagctattcggaaggctgaggcaggagaatcacttgaacctg

SEQ ID NO: 168694 - DNA, 537 bp, Homo sapiens
aaattcctggaagatcaaaccccttccagcatggccaggtagcacagctgagccagggatgatggggccatattgggtttggctctgccttgcagctggcagtccaaacactgaggacatgcatatatttctgcaggcctcactatggtcatctgtccaaaccccagaatccagagactcaaaacgaaatacagtcatacagtaagatatgtgcaaggtttcagggagcccagcagccagaccttacagctttagctcaatttagacaaatcaagcaagtttaagaaatattccagaagtagcagttttatgaccttaaaacatgtaataggctgggcacggtggcccatgcctgtaatcccagcactttgggaggccaaggtgggcagatcacttgaggtcaggagttcgagaccagcctagccaacatggtgaaatcctgtttctactacaaacacaaaaattagccaagtatggtggcatacacstgtagtttagctattcggaaggctgaggcaggagaatcacttgaacctg

SEQ ID NO: 168695 - DNA, 597 bp, Homo sapiens
cgttaatagcaataactgcagcatctattcactactcacaaggctgtttgaggttaaacgagggaatccactttacaggactaattcaatgcctggcacataggaagctctcaagagctgcaagctaaaagaccaaacacaagtctcaacagcagccagctgccatgggcctcacgctgttgggctgtcatgagactagtggtctggatggagccccaggcctctyccctggggcagggctggaattggggacacagatccagctagaagagggccgagtcaggtgaaggatcacgggagttgggagggcatggtgattctggggcacactccccagggatgtgggggaggcagcaggtgtccatcaggcagttggagctgccgtgggacacgggaatgggcatctcctagtgtccaggcaggtcagaggtcagagccaggtcagactgtgggcagcagggtttcaatctttggttggggttcaagcactaagctctggggaaggagagatcaggccgatgaaagatacagagatcatagcaggaggcagcattgagaactgggcacagggttagagtatgactgtcagtgcaaggg

SEQ ID NO: 168696 - DNA, 597 bp, Homo sapiens
cgttaatagcaataactgcagcatctattcactactcacaaggctgtttgaggttaaacgagggaatccactttacaggactaattcaatgcctggcacataggaagctctcaagagctgcaagctaaaagaccaaacacaagtctcaacagcagccagctgccatgggcctcacgctgttgggctgtcatgagactagtggtctggatggagccccaggcctctcccctggggcagggctggaattggggacacagatccagctagaagagggccgagtcaggtgaaggatcacgggagttgggagggcatggtgattctggggcacactccccagggatgtgggggaggcagcaggtgtccatcaggcagttggagctgccgtgggacaygggaatgggcatctcctagtgtccaggcaggtcagaggtcagagccaggtcagactgtgggcagcagggtttcaatctttggttggggttcaagcactaagctctggggaaggagagatcaggccgatgaaagatacagagatcatagcaggaggcagcattgagaactgggcacagggttagagtatgactgtcagtgcaaggg

SEQ ID NO: 168697 - DNA, 353 bp, Homo sapiens
agatctgtttgtttaaaagtgcataggacctccctccttgctctcctcctcctgctccaaccctgtaaaatgcgcctacttctcctttgccttctgccrtaattgtaagtttcctgaggcctccccagaagcagaagtcgctatgcttcttgtacagtctgcagaaccatgagccaataaaacctaatttctttataaattacccagtctcaggtatttctttatagcaataccagaacagactaatacacatggactcaatcctcacagcagcctgatgaagtacaggttattcttcccgttttacagatggagaaactgaggcttagcaagaagaatggatgtgttcaagg

SEQ ID NO: 168698 - DNA, 545 bp, Homo sapiens
tgtgaagcaaattcctggaagatcaaamcccttccagcatggccaggtagcacagctgagccagggatgatggggccatattgggtttggctctgccttgcagctggcagtccaaacactgaggacatgcatatatttctgcaggcctcactatggtcatctgtccaaaccccagaatccagagactcaaaacgaaatacagtcatacagtaagatatgtgcaaggtttcagggagcccagcagccagaccttacagctttagctcaatttagacaaatcaagcaagtttaagaaatattccagaagtagcagttttatgaccttaaaacatgtaataggctgggcacggtggcccatgcctgtaatcccagcactttgggaggccaaggtgggcagatcacttgaggtcaggagttcgagaccagcctagccaacatggtgaaatcctgtttctactacaaacacaaaaattagccaagtatggtggcatacacctgtagtttagctattcggaaggctgaggcaggagaatcacttgaacctg

SEQ ID NO: 168699 - DNA, 539 bp, Homo sapiens
gcaaattcctggaagatcaaaccccttccagcatggccaggtagcacagctgagccagggatgatggggccatattgggtttggctctgccttgcagctggcagtccaaacactgaggacatgcatatatttctgcaggcctcactatggtcatctgtccaaaccccagaatccagagactcaaaacgaaatacagtcatacagtaagatatgtgcaaggtttcagggagcccagcagccagaccttacagctttagctcaatttagacaaatcaagcaagtttaagaaatattccagaagtagcagttttatgaccttaaaacatgtaataggctgggcacggtggcccatgcctgtaatcccagcactttgggaggccaaggtgggcagatcacttgaggtcaggagttcgagaccagcctagccaacatggtgaaatcctgtttctactacaaacacaamaattagccaagtatggtggcatacacctgtagtttagctattcggaaggctgaggcaggagaatcacttgaacctg

SEQ ID NO: 168700 - DNA, 493 bp, Homo sapiens
tttctgctaggagagaggtaaggtcagtctgaataataaagtratatagaaaagagagggtaaagacagacagaaaatagaataaagtgttgagacaagttatggggaatcatgaattgtaatgtgttggattggcagcaagtttgcgggggaagggtagaagacgaaaggggttttaataaatattggtatggtctttgaatgtagatcccctttatggttcttaagaaacataagtgaagggtttcagttgttttgaaattacttttggctgtgggcagctgtttcttgactgcaaacctgctctgagattgagctgtgtccatcccaggtttataaaagttatgcagacttatgaataggttttccttgttcatatacttcttattttgtgctatgattatagtcatttgctgttgatgatagtaagaactgagcacctgtttaaacagatttaagattgtttcttctggcctagggttttggtgtgtac

SEQ ID NO: 168701 - DNA, 488 bp, Homo sapiens
tcctgtaagtagggattcttttctgctaggagagaggtaaggtcagtctgaataataaagtgatatakaaaagagagggtaaagacagacagaaaatagaataaagtgttgagacaagttatggggaatcatgaattgtaatgtgttggattggcagcaagtttgcgggggaagggtagaagacgaaaggggttttaataaatattggtatggtctttgaatgtagatcccctttatggttcttaagaaacataagtgaagggtttcagttgttttgaaattacttttggctgtgggcagctgtttcttgactgcaaacctgctctgagattgagctgtgtccatcccaggtttataaaagttatgcagacttatgaataggttttccttgttcatatacttcttattttgtgctatgattatagtcatttgctgttgatgatagtaagaactgagcacctgtttaaacagatttaagattgtttctt

SEQ ID NO: 168702 - DNA, 658 bp, Homo sapiens
tataattgccttcaaatgtacacaacaatatacctcacatccatagctactggaaacctaggcgccttcaaggacatacttttgaagttctccaacattccatttctttccattttcacarcaaaaggaggggcattatgaatgattgggagtattaatgctagagtcaggagtttggttagtcctatgtaaggtgaagtctgtactgcacccacttactgcagacacctcaggctctgtaagaaatgatgacaggtggcttatcccatgttctgacagtaggaagaaggcatggagtctgagtgaggacgacttgctgggtgctcttctgtgctgtcctgagagatgagaccatgacctgatcaaagttaaggctgagtcaactctggatttggagaattgtgatggggcactgtcttgggaaaagcaaaagtgtgtgtgaggaatgagtgtttctgggatgctcccttctggctgcttgctcatccttttcattgatgctacagaccctctagtaagggtaatgtgaggctgaggaaggaggacagaaggcttgtttattatagaaatgccagccaacgatctatccacattagggcattaaaacactgtggggaaagcgtcattgatttgggttctaaactttctgtctttaagt

SEQ ID NO: 168703 - DNA, 658 bp, Homo sapiens
tataattgccttcaaatgtacacaacaatatacctcacatccatagctactggaaacctaggcgccttcaaggacatacttttgaagttctccaacattccatttctttccattttcacaacaaaaggaggggcattatgaatgattgggagtattaatgctagagtcaggagtttggttagtcctatgtaaggtgaagtctgtactgcacccacttactgcagacacctcaggctctgtaagaaatgatgacaggtggcttatcccatgttctgacagtaggaagaaggcatggagtctgagtgaggacgacttgctgggtgctcttctgtgctgtcctgagagatgagaccatgacctgatcaaagttaaggctgagtcaactctggatttggagaattgtgatggggcactgtcttgggaaaagcaaaagtgtgtgtgaggaatgagtgtttctgggatgctcccttctggctgcttgctcatccttttcawtgatgctacagaccctctagtaagggtaatgtgaggctgaggaaggaggacagaaggcttgtttattatagaaatgccagccaacgatctatccacattagggcattaaaacactgtggggaaagcgtcattgatttgggttctaaactttctgtctttaagt

SEQ ID NO: 168704 - DNA, 537 bp, Homo sapiens
tcaccttacagaatgatgaaaaaagtaggagtacaacttacattggttttgggcccaaaggccccaatgtctagagttcttaaaactctctgtggttgaaaatcttgctcattgcaaatcactgccaaggtgtataagggttttcaaatggaaaattctaggaagccaatggcttccagggtaccttataggttacagggaatggatctgtcatattctggccaaagatttttctctaacgctatcacaatgccagtatgccttcaactgatccctttcactaattagaagcattagacataagggattggccactgagaagtaattcttggtcccttgtttgtactttgtcagctttgtgagaaactggggacattgttgagcatcaggcagggcaggkttcctgcaaatggcaggtgggccaatgcctagcccttttcccttctgtcagacttctactctgctgctggtcctggtgtagaatttatataactagaaatcttacctgtagcagagaatgcaagctgttaattagaa

SEQ ID NO: 168705 - DNA, 596 bp, Homo sapiens
gtttcagagattacattgtattggaagacaacctaatttttccaccaaagatctacatattatttcccaggaatggcacttctatatatgtatgagttaatctttatttcaattcagagtgtttatttcttaggctaacttccaaactctgtaaggtgtgccctccttggaaactgtagagccctatgtactgacaccaaaaaatcacttaataataattataaagatatagtgtattcttaggttaagtacaatcaactaagctttctaatatgcaaaccacagtttttttaaaggaaactttttttctctgacatatatattacttttcaatcctaattgaagaaatattctgactcagtttttttggcatggtgatagagtgaacttycatccattattagctaatacttgaagtttcttcttaaaacatacagaccacagggaagtataattttgctacagagtagtgattctcaaccacgatatcccttctgttctctgttatcttctagccagatgacaattgttgtgattttgagcatgtagcatacccctcagctgtgttgagttaaaaataattgaaaatcactgcc

SEQ ID NO: 168706 - DNA, 596 bp, Homo sapiens
gtttcagagattacattgtattggaagacaacctaatttttccaccaaagatctacatattatttcccaggaatggcacttctatatatgtatgagttaatctttatttcaattcagagtgtttatttcttaggctaacttccaaactctgtaaggtgtgccctccttggaaactgtagagccctatgtactgacaccaaaaaatcacttaataataattataaagatatagtgtattcttaggttaagtacaatcaactaagctttctaatatgcaaaccacagtttttttaaaggaaactttttttctctgacatatatattacttttcaatcctaattgaagaaatattctgactcagtttttttggcatggtgatagagtgaacttccatccattattagctaatacttgaagtttcttcttaaaacatacagaccacagggaagtataattttgctacagagtagtgattctcaaccacgatatcccttctrttctctgttatcttctagccagatgacaattgttgtgattttgagcatgtagcatacccctcagctgtgttgagttaaaaataattgaaaatcactgcc

SEQ ID NO: 168707 - DNA, 578 bp, Homo sapiens
gggttggtaagataagaataagacaaatataattaaaatttacaggcttagctcagaggaagatgtttattgtataaagaagaaagcacagcacagacctagagaayagaactgaagaggaagtccttggtaacaattttgttaagccaaaacaagaaattaattagtgagaattagttccagaaattttaagattcagagtaaagtggagagattagttggtgacagtgactaaaaattggccatatataagggtttcacatagtttgttaagtttcagttcatgacaatatttagcatttttggcatggtgatagagtgaacttccatccattattagctaatacctgaaatttcttcttaaaacatacaggatttatttatatcaggatttgcaagcacccttattgcatctgggtagatgatatggtctggctctgtgtccccacccaaatctcatcttgaattgtgattcccacaattcccgtgtgttgtgagcagaatctggtgggaggtgattgaattatggaggtgggtctttcctgcattgttcttgtaacagtgaatgagtctcacaa

SEQ ID NO: 168708 - DNA, 578 bp, Homo sapiens
gggttggtaagataagaataagacaaatataattaaaatttacaggcttagctcagaggaagatgtttattgtataaagaagaaagcacagcacagacctagagaatagaactgaagaggaagtccttggtaacaattttgttaagccaaaacaagaaattaattagtgagaattagttccagaaattttaagattcagagtaaagtggagagattagttggtgacagtgactaaaaattggccatatataagggtttcacatagtttgttaagtttcagttcatgacaatatttagcatttttggcatggtgatagagtgaacttccatccattattagctaatacctgaaatttcttcttaaaacatacaggatttatttatatcaggatttgcaagcacccttattgcatctgggtagatgatatggtctggctctgtgtccccacccaaatctcatcttgaattgtgattcccacaattcccgtgtgttgtgagcagaatctggtgggaggtgattgaattatggaggtgggtctttcctgcattgttcttgtracagtgaatgagtctcacaa

SEQ ID NO: 168709 - DNA, 467 bp, Homo sapiens
ttaagttatttgtcacttagcatcccttgcccaggtcaggatttacattttttttcaataccataaggaagttctccaagccctggttctcatattctttctcaagctaagacatagatcagtggaacaaggcctcttgttgccttcgagtttcagtgttgtgcggattactaggccgttatcagttctttcctacccacatgatcttagtcacgtgaatttatctaaacctcagttttctcatctgcaaaggggcataatgataawggaatttacttcacggtgttgttaaggttatcaaatgagataattctggtaaataatgaacagattgccttctgtttatgccttgtcataaactattgccttcattattgtcatcataattgttattatgcactccaaaaataaagccatcctcatgcactttaccactttcccagtcttttccccatctgtaaatttat

SEQ ID NO: 168710 - DNA, 271 bp, Homo sapiens
aaaaaggaatgggaagtagtggaagagtgtcaaggsaaagtagtctgggagcggggtacttggcatctagggatctgcaatctaagcaatgctgtgtgagggctctatggtatcacttggtacctttcatagccttttgtagattaaatgctcccagaatcttccacccagacttcggctgtattttgctgttgttgagaatgaagttactttatttactctaaagaattaggacaatttagagctatttatcagccagaagtagtcaaat

SEQ ID NO: 168711 - DNA, 589 bp, Homo sapiens
cattttcttttgccaacaaaaaagtttccatactcctaggaaagactaattattctgtagccatagtaacaggtaagcaccaaaatggattttaaacctgtttrtttgtaataagacaatttcaaagtaatggagcatgagaagtcattgtaaacctatttaatccatcaacaactcccctcagtaaatatgcttctgaaagccaagtaatcagcatcagccttttgctttggaaaatcagacagtgggaaatggactccctccaatgaatagccttctagcagtgaacccatccacaacagtctcacctgagtaactacgctcctacaggttacactaccctccactccacccatcagttacctactcttcttctaagagatcacgcccatccagcataactcttcctcacttaaggaaggcataaattcagttttgtgggtttttgttgttgtgctttgtttgtttgtttaagacactgagaagtggtctcatcctttgacactttattgcttctcagtagcactcaaatattgactggtctaagggccttctggctctcctttaggtccctttttggtagaacatg

SEQ ID NO: 168712 - DNA, 586 bp, Homo sapiens
ttttggttgaataatctgaagaaaattcagcctcacacagacatgcagttggaaaaggcaggcatatttttataccagtttcagataatggtggattttcttatttgatattatgatgatgattgacaagtggtagtttctgaaaagttagtgcaatgcgttgaatctgaaaccaggtcagtgaagttttcacacrttgctgtattaaaatccatgatagcatcttgcattttgaaagaatcccttatccatgcataattttgttaacatcatatgttggtcatatggaaaatattggttcactgagttaggcagatctcccaaatcttgacacgtttcattatacaataccaaaaaatcatatttggtaatatttccatgcacctcatcagaaaagtctttcggtattaagaagctgtcaagctcacagtgctggacacatgttttttaaaatcctgattttcacttgaaagcttgaattttattattagtgacaattattgtcagctattctccttgaagtgacaggctttccttgtttatttttgagcaaatagttgtcaaatacccaggtttgaataatcac

SEQ ID NO: 168713 - DNA, 578 bp, Homo sapiens
gaggaagtagtttgacttcctctctttctatgtggatggcttttatttgtttctctttttatattgctctggctaggacttctctattttcagttttttgagtaaccttcatactgttctccataacggctgtgctagtttacattaccactaacaatgtttaagagtttctttttcttgcatcctcaccagcacttgttatttttgtcctttaggtgatagtcatgtaactggggtgagatgatagctcatttggtttgattttcaagttattgacaattagtgatggtgagcagttttttcatacactgttggscatttgtatgtcatctttcaagaaatatctatatagatgatttgcccattttaaaatgggatcatttagttttgctgttgagttgttgagttccatgtatattctggatattaataccctatggatgaatcgttgcaaatatttcctccatttcctccattttcttctagtagttttatagttccaggtcttacagttaagttatttgaatttattttggtatatggcaagagatatgggtctagtttaattcttctgcata

SEQ ID NO: 168714 - DNA, 578 bp, Homo sapiens
gaggaagtagtttgacttcctctctttctatgtggatggcttttatttgtttctctttttatattgctctggctaggacttctctattttcagttttttgagtaaccttcatactgttctccataacggctgtgctagtttacattaccactaacaatgtttaagagtttctttttcttgcatcctcaccagcacttgttatttttgtcctttaggtgatagtcatgtaactggggtgagatgatagctcatttggtttgattttcaagttattgacaattagtgatggtgagcagttttttcatacactgttgggcatttgtatgtcatctttcaagaaatatctatatagatgatttgcccattttaaaatgggatcatttagttttgctgttgagttgttgagttccatgtatattctggatattaataccctatggatgaatcgttgcaaatatttcctccatttcctccattttcttctagtagttttatagttccaggtcttacagttaagttatttgaatttattttkgtatatggcaagagatatgggtctagtttaattcttctgcata

SEQ ID NO: 168715 - DNA, 552 bp, Homo sapiens
cttcttcttacatgaaaatgcagctactaaactagtagctctttagcctctttataagtcctggcttgaaaagaagtcttaaatgagtatcctcatgtacgctggctaaaatcttgcttcattgctgacttgctgttaatgaagtagaaacacagggatttttccccatggatcataacacctgtgagaacaatttaatgactcaacaaatgatggaagtctcctaacactctgttacaaactttccctggatcaaggatggtggctgaccatagtctccactcacgtgatctgaatccattaaaccctctctgtggcagagttccattagacmagaaataatctgtaagtatccttctaaatagattagggaggccgagcaatgaaaaaatttcagaagaatttccaaaaaagtaactttaatcatgagcatgcttaccctttatgtatatttttccaatgtagtatgtggccagccttaaaagaaaatggtggcatgacttggcttccttggttaaaagcaagaatcataatctataaatctcacatgtt

SEQ ID NO: 168716 - DNA, 552 bp, Homo sapiens
cttcttcttacatgaaaatgcagctactaaactagtagctctttagcctctttataagtcctggcttgaaaagaagtcttaaatgagtatcctcatgtacgctggctaaaatcttgcttcattgctgacttgctgttaatgaagtagaaacacagggatttttccccatggatcataacacctgtgagaacaatttaatgactcaacaaatgatggaagtctcctaacactctgttacaaactttccctggatcaaggatggtggctgaccatagtctccactcacgtgatctgaatccattaaaccctctctgtggcagagttccattagacaagaaataatctrtaagtatccttctaaatagattagggaggccgagcaatgaaaaaatttcagaagaatttccaaaaaagtaactttaatcatgagcatgcttaccctttatgtatatttttccaatgtagtatgtggccagccttaaaagaaaatggtggcatgacttggcttccttggttaaaagcaagaatcataatctataaatctcacatgtt

SEQ ID NO: 168717 - DNA, 587 bp, Homo sapiens
gatctgcttccaagtgtcctcagattgttggggcagagtgttggcagagtccatcttttgttgttgtagaatagaggttcatgttacctagtggactgttgrcaggagatggctcttagcacccagaaactacccagaatccagaatttcttactatgtggccatttttcataagtcctcatcaaacacggcagcttactccttcaaaaccagaaatggagtgttccctaatatgctaagagagtcttatataacaacataattgtggaaatgacatcccatctcctttgctatcatctgttggttagagacaagtcatggttctcagtcacatttaagaagagggaattatgcaagagtatggattgcctgggctcacttccatagttcaccttctggcttccatgaattcatgtccctctctccaaaaaaatatattttctcccacttcaaggtccctcaaatgtttgtgagtcttccatgggttttatgaagatttacttcactagatcaaagacacatccatagatcttttagagattatctcttctcacttttggttcctcctaagatagctgaggaacacc

SEQ ID NO: 168718 - DNA, 587 bp, Homo sapiens
gatctgcttccaagtgtcctcagattgttggggcagagtgttggcagagtccatcttttgttgttgtagaatagaggttcatgttacctagtggactgttggcaggagatggctcttagcacccagaaactacccagaatccagaatttcttactatgtggccattttycataagtcctcatcaaacacggcagcttactccttcaaaaccagaaatggagtgttccctaatatgctaagagagtcttatataacaacataattgtggaaatgacatcccatctcctttgctatcatctgttggttagagacaagtcatggttctcagtcacatttaagaagagggaattatgcaagagtatggattgcctgggctcacttccatagttcaccttctggcttccatgaattcatgtccctctctccaaaaaaatatattttctcccacttcaaggtccctcaaatgtttgtgagtcttccatgggttttatgaagatttacttcactagatcaaagacacatccatagatcttttagagattatctcttctcacttttggttcctcctaagatagctgaggaacacc

SEQ ID NO: 168719 - DNA, 577 bp, Homo sapiens
taaccataccaatagacctctaggaagctgaagggtgttgttcctcagctatcttaggaggaaccaaaagttgagaagagataatctctaaaatatctatggatgtgtcttttatctagtgaagtaaatcttcataaaacccatggaagactcacaaacatttgagggaccttgaagtgggagaaaatatattttttggagagagggacatgaattcatggaagccagaaggtgaactatggaagtgagcccaggcaatccatactcttgcataattccctyttcttaaatgtgactgagaaccatgacttgtctctaaccaacagatgatagcaaaggagatgggatgtcatttccacaattatgtgttatataagactctcttagcatattagggaacactccatttctggttttgaaggagtaagctgccggtttgatgaggacttatgaaaaatggccacatagtaagaaattctggattctgggtagtttctgggtgctaagagccatctcctgccaacagtccactaggtaacatgaacctctattctacaacaacaaaagatggactctg

SEQ ID NO: 168720 - DNA, 586 bp, Homo sapiens
cataccaatagacctctaggaagctgaagggtgttgttcctcagctatcttaggaggaaccaaaagttgagaagagataatctctaaaatatctatggatgtgtcttttatctagtgaagtaaatcttcataaaacccatggaagactcacaaacatttgagggaccttgaagtgggagaaaatatattttttggagagagggacatgaattcatggaagccagaaggtgaactatggaagtgagcccaggcaatccatactcttgcataattccctcttcttaaatgtgactgagaaccatgacttgtctctaaccaacagatgatagcaaaggagatgggatgtcatttccacaattatgtgttatataagactctcttagcatattagggaacactccatttctggttttgaaggagtaagctgccggtttgatgaggacttatgraaaatggccacatagtaagaaattctggattctgggtagtttctgggtgctaagagccatctcctgccaacagtccactaggtaacatgaacctctattctacaacaacaaaagatggactctgccaacactctgcc

SEQ ID NO: 168721 - DNA, 583 bp, Homo sapiens
gacctctaggaagctgaagggtgttgttcctcagctatcttaggaggaaccaaaagttgagaagagataatctctaaaatatctatggatgtgtcttttatctagtgaagtaaatcttcataaaacccatggaagactcacaaacatttgagggaccttgaagtgggagaaaatatattttttggagagagggacatgaattcatggaagccagaaggtgaactatggaagtgagcccaggcaatccatactcttgcataattccctcttcttaaatgtgactgagaaccatgacttgtctctaaccaacagatgatagcaaaggagatgggatgtcatttccacaattatgtgttatataagactctcttagcatattagggaacactccatttctggttttgaaggagtaagctgccggtttgatgaggacttatgaaaaatggccacatagtaagaaattctggattctgggtagtttctgggtgctaagagccatctcctgycaacagtccactaggtaacatgaacctctattctacaacaacaaaagatggactctgccaacactctgccccaacaa

SEQ ID NO: 168722 - DNA, 531 bp, Homo sapiens
tgttatgtacttgctgtttttatttatttattttatatgggttatagcctatgagaagttctgaagagctaacaataaccttcttcatacaaactgggttttcactcaatgaaaaatagtgtagtacgattcagcttaatatgattttaaggaaggcaaaggtgtataaacaaagtacagaaatcatttatgtatagcttcaacttccatactgttaacgaagagttattgatcatgtggaataaagaacacaatggccagtcagttgcactttaagytacttttccacaagtggtgatgctcatgtggtgccttactaaaattgtaagcaagaatgttgattctatgtatttttctcaggtgctaatagtattgattcttctttcctttctcactgtaatccactagctttatattacaccaaaacttataggataaagaaaatgtacgagagaaggaaaaatatggttcccctcctctttagccatgatgaataaaattagtcaagcttcatatggtcaacagcatgta

SEQ ID NO: 168723 - DNA, 609 bp, Homo sapiens
catggattaatgcctatttgactgtgtgctattttttattgaaatgtgcttaaatttcaaggcactttcagcaagtgccttgaaaaacaggcactatctgaaaccatcaagtcaggacccccgtattttcatgggttttttcagcccttkgcacacggataattttgcactcttcctgattattgatcatatgaaaactggtcttaatgtcttcctgcaaattataactgcaacctgagataaaaattatagctggatacataaaagcaataaccttttgaaaactgaaacagcaactccatattttaaccatgaacataagaaaagaacatgcagaatattttttcaacatgtaaataaaaaataaaatatacatttgtagtgtgagaatttctttaaaaataacaatgcttcaattttagacatcaaagatatcacagataatttaagtttagccatttttgtttgtaattctgtgttcataagagcttgatgctaataataaatattttgggggcacctactcttttcaagagaaccacagaatgagaagtcaggcttaagaagctgacagcctagcagaaacataacacaaggatatgagcctct

SEQ ID NO: 168724 - DNA, 609 bp, Homo sapiens
catggattaatgcctatttgactgtgtgctattttttattgaaatgtgcttaaatttcaaggcactttcagcaagtgccttgaaaaacaggcactatctgaaaccatcaagtcaggacccccgtattttcatgggttttttcagcccttggcacacggataattttgcactcttcctgattattgatcatatgaaaactggtcttaatgtcttcctgcaaattataactgcaacctgagataaaaattatagctggatacataaaagcaataaccttttgaaaactgaaacagcaactccatattttaaccatgaacataagaaaagaacatgcagaatattttttcaacatgtaaataaaaaataaaatatacatttgtagtgtgagaatttctttaaaaataacaatgcttcaattttagacatcaaagatatcacagataatttaagtttagccatttttgtttgtaattctgtgttcataagagcttgatgctaataataaatattttgggggcacctactcttttcaagagaaccacagaatgagaagtcakgcttaagaagctgacagcctagcagaaacataacacaaggatatgagcctct

SEQ ID NO: 168725 - DNA, 368 bp, Homo sapiens
gcccactataaacaacaccaccaggctctccagcttccawctctagcaatcttacatcaatgctttgactcctcaagaccgcaagtcccttgactttcataagttttcattattcatcactatgttcatcttcacttgccatcatgactagtttaaattccatagttaactattaaaatcatccttttaaaaacatcctttactcctatgcatgtgtcttcttccacacacaaatccaaacttgtgtgggcctaattatcttcttacttttctaaggctagttctgaacagttgaatgttcctggataaaatacacatataaggtgattattgccatttcaatacaactattcatttagcaaatattt

SEQ ID NO: 168726 - DNA, 368 bp, Homo sapiens
gcccactataaacaacaccaccaggctctccagcttccaactytagcaatcttacatcaatgctttgactcctcaagaccgcaagtcccttgactttcataagttttcattattcatcactatgttcatcttcacttgccatcatgactagtttaaattccatagttaactattaaaatcatccttttaaaaacatcctttactcctatgcatgtgtcttcttccacacacaaatccaaacttgtgtgggcctaattatcttcttacttttctaaggctagttctgaacagttgaatgttcctggataaaatacacatataaggtgattattgccatttcaatacaactattcatttagcaaatattt

SEQ ID NO: 168727 - DNA, 356 bp, Homo sapiens
caacaccaccaggctctccagcttccaactctagcaatcttacatcaatgctttgactcctcaagaccgcaagtcccttgactttcataagttttcattatycatcactatgttcatcttcacttgccatcatgactagtttaaattccatagttaactattaaaatcatccttttaaaaacatcctttactcctatgcatgtgtcttcttccacacacaaatccaaacttgtgtgggcctaattatcttcttacttttctaaggctagttctgaacagttgaatgttcctggataaaatacacatataaggtgattattgccatttcaatacaactattcatttagcaaatattt

SEQ ID NO: 168728 - DNA, 368 bp, Homo sapiens
gcccactataaacaacaccaccaggctctccagcttccaactctagcaatcttacatcaatgctttgactcctcaagaccgcaagtcccttgactttcataagttttcattattcatcactatgttcatcttcacttgccatcatgactagtttaaattccatarttaactattaaaatcatccttttaaaaacatcctttactcctatgcatgtgtcttcttccacacacaaatccaaacttgtgtgggcctaattatcttcttacttttctaaggctagttctgaacagttgaatgttcctggataaaatacacatataaggtgattattgccatttcaatacaactattcatttagcaaatattt

SEQ ID NO: 168729 - DNA, 368 bp, Homo sapiens
gcccactataaacaacaccaccaggctctccagcttccaactctagcaatcttacatcaatgctttgactcctcaagaccgcaagtcccttgactttcataagttttcattattcatcactatgttcatcttcacttgccatcatgactagtttaaattccatagttaactattaaaatcatccttttaaaaacatcctttactcctatgcatgtgtcttcttccacacacaaatccaaacttgtgtgggcctaattatcttcttacttttctaaggctagttctgaacagttgaatgttcctggataaaayacacatataaggtgattattgccatttcaatacaactattcatttagcaaatattt

SEQ ID NO: 168730 - DNA, 526 bp, Homo sapiens
agatctggtagggggttcctggaggcccaggcctggaggacctgcccagtgaggagatatgggaactggcatccacatagcagtctggccacttctccataggactgctgtagtatgctgggggtccactccgttccctagtcacctcaaattttccagtacctggagatatcaccagtgaaggctgtgaaacagcaaagatggtaccctgcttctcccttttggaactctgtctcagggagatgcaacaccattactggtggttagctggaatttcaagccagtgggtcatattctgtgagatgccatgaaactgggccctgttgctgctcaaccccctggattcagcctcttgcctaggggtatatatgagggtctaacctcctgctttgtgggagttgaagcttctttggctgggaagcctgaagagcctgaggacctaaagttcrcgggtctccctgcatgtctgagcagctgctctgctgagactccatatatccctgtgtcagactgaaggccttggtgg

SEQ ID NO: 168731 - DNA, 368 bp, Homo sapiens
aatctccctgcaccattgtttcctaataattctatatcctggtcccccaaaatttcattagaatttgatgaatggcaggttaaaatggaaatattaaaaacataaatatgaaatatttatattttatatgaacttataatayaaaatattaaaaacacataaaacttatggtgccttctttatggaagggtggagataaatcatatagtgatctcagataagtggaccaggcaggtaacagcaaggaaattaatgaagacagctggatacaaatgtattagtgtgcttgtctgccacaacaaaatagtgggtggcttaaacaaaagacattttaaacaacaggcatagttgggtcacttaaacaatag

SEQ ID NO: 168732 - DNA, 567 bp, Homo sapiens
aagttaaactatacttaattatatgcaacaaactgaacatttcagtggaattctgatagatgttgtcaattccaccttcttgtacactggtgaaaactcatagccagctagttcttggaaagtacattagtgtgatttggttccagaataactttatctgcattgtatagaaagattctgcagaacttttataggtaagtactacactaaatgaaaagactagcaagttggcagcaggaaacctggtcttctctgtattctcctttacagtattcatccccttctgacccatcatttctttgtatgtttaatgctactaaagctaatttatagctagatgaggtttacataaaatggtatgacatgtaaagtaattatkgaaatgcctgatgcatagctggttcttagcaaatgatagctggtactatgatgaaattagtgatgatcacctataattacaaaaatgtttgtttctttaaatcaagtcttaacctcagaaaaattattgtatctcaaattggagggcttatttttaatctttatccactgttttaaagagatttttac

SEQ ID NO: 168733 - DNA, 537 bp, Homo sapiens
taagagacgggaccttgaaattttagaggtcattaaaaatgatggaaatatttttaagaatgcaaagcagaggcttctctaaacatggaaatgtatacatatataaagcattcaaatgtatttcatattaaaatgacttgaatttgagctacaccttgcatgtagtttaattataattatttgaacgtagattatttttagcctcttttctactaacaaaaaccacactgttcaacccacttccacatttactggatagtccaaagactgattaaatataacttaacagctagacatgatatgtgttagtctattgtttatatgtgtatatctacaaactattaataatgtgtgcatgctgcactacattttactacaaatgtaggagagttatcttmttctcatttcttgaacgtccataaatatttttctcccaggataaaagcttcctacgtcagtaacaaacataaaataaatattcaataaatttttattcatcacctactatgtagaatattgctagacactaataatgta

SEQ ID NO: 168734 - DNA, 581 bp, Homo sapiens
cgggcatggtgacttatgcctgtaatgagagcaatatggccggaccccggctccaccaaaaaaaaaaaaagctaaatacttgtttcaaggttacacaaaagatcaggcagaggctgtgtggccaaagagttcatacttaaaagcaagacacaatcgagtatgtatattatatggttttcttgtgttcgtgtatactgtccctctagtatttaggcacgatgactttaattaaggctagttggtaaaatatagcacaaaggaataaaacactgactttkggtatttaaaaatgcgtaaaatgccagtgttcacaaacattagccatgtgacttgaggctaggcacagcttctctgactctcagtctctgtcctgtaagctggcatgacactattggtttctgtggttgtaaaaataattttcaaagatgcctatattaaaggctggcataatttctggcatgtagaatatccttcacaaatgttcagtaagtatgaaactaggaggcatcttgaattttcagtgtaaaatattattcttttaaagcatttattgtggtttaatctacctagtttgttaattg

SEQ ID NO: 168735 - DNA, 441 bp, Homo sapiens
aaggctggcataatttctggcatgtagaatatccttcacaaatgttcagtaagtatgaaactaggaggcatcttgaattttcagtgtaaaatattattcttttaaagcatttattgtggtttaatctacctagtttgttaattgtaaaattagtgaatacctttaagatttcaaagtattaatgaaagatataatagaaacaactttataatataaggtaacatagccccccaggaaaatattatagaggatttgaattcaataaagaaataaataacttctctgaactggcttttctctttcctattaaatatcagaatagatttattttaaattatatttctattatttaatgctacatggaggtttaaaatataatgttttttaraagaatggtcacaattcattaaaaatacttttttgccatatgtaaagtgcttt

SEQ ID NO: 168736 - DNA, 593 bp, Homo sapiens
attgtctataagatactatcgcacctcattttaacagaggaaactgagacacagagaggttaagtaacttattccaggtcacacagcttatagagaggaagagctggcatgtgcactctctttgaatacagagcccatgtgtttaagtgctaggctgggctgacaggtaggcagtgctgaaagaagccctgcctctgcctagagtgagatggaagggatttcactccacgggttttgttggtcgactttgcctccgtgagttaaggatygcctgggttttcccaggagctgaggaagaggggaggatctttagttgacacagctgatttctcaaggggtcaggcagatttggtgcctggagctaccttgatgttaactatctggctgaaattaaaccccaggctcccatgttcataaattaaacctcaggctgctgtgtccataaattaaacttcaagctgctgcatctatgaaattaaacctcaggctcctgtgtccatgaaattaaacctcaggctgctgtgttcgtgaaggcagggatggtgtgaacccttcatcccctgtatcccaaccactgatctcagtacccagca

SEQ ID NO: 168737 - DNA, 494 bp, Homo sapiens
atgctggatttagcaaatacaaattttatctggcaaaccttacttcccaggaacccctgagttctcctacagaaagttctaaacattccagggaattaattacaccagtgaggctgaaagccaggatttgagttgattaggagacacgtccagtcaggaatgcattaagaacgggaaatattttaagcytcaagagcagcagctaaaaggagccctgttctctagagcccatccccacgatgagaaaaaggctgtattcagtgcagacctggaccccccttcacagggccaaacagaggccagtctactccctgtccctgatacaaactggtccctgataaaaactggtctaatatttgcatacaacctatgctcactcagggtccctccccagccatgcgaccccacagcatggggagacaattagacccagaggtctgggcttgtggaggaggaccagcagagagaccaacctgcctctgccttcctctgcc

SEQ ID NO: 168738 - DNA, 598 bp, Homo sapiens
tatactacactaaattagaaacagagggtagagcaaatgtctatagttttgcataatcctcataaattggaggagaaacatactcgggctttttaatcaatgagaagactgttctttcaatgactttgttgcagttcttagcccagaagtactacagccaatggtggaatgactactgcaattttattcgcaaaatacctatgagaattccagatggtgcccctgaggccagttgttaacggggcaagagcggattcattccacacccattttctactttggtgttgaaatgcgagctagtccatggtctagatcccacccacatgccaacatgcacctgcaaaagtcttcaatttgggggcttttaaatcacaagcagacaccctgatttagcttacatattaaaaattccatcgcaggaaaaaaattctccaaaaactcagagctctaattccttaatgaattatgtacgtggtgagggatatayagacagacatgacttgatttcctgttcagaatactggagagcatattggaatacagaccacgaccatttcagggctagtgtttcagtcacacttgcaagtaaagcaaaatg

SEQ ID NO: 168739 - DNA, 538 bp, Homo sapiens
  misc_feature (1)...(538): n = A,T,C or G
ttgagtctttagactgaaatatgtatttagaatactctcagtttgtggcttayttttcaacattttacttagtgttgtctttcaaagagcagatgttttaaatttagataaaaaacaatttacttattatgttcttatattgtttgtgttatatgtgtcctgtctatccaaaaagttgtaaatatatttatatgtgttcatctagtagcttcatactgttgttttttaaaattaggtttataatccattttgaattagtttttgaatatgatgtgcagtacaaaggtgggattctttttttctcataaacttatccaattgctttgaaacaatttcttgaaaatatgttctttttctcagtggaattatcttagaaccttatgtaaaaatcaattggctatataggtataggcctatttctgtattctctattatattccactgatgtatgtatctatgttntggttattctaggtcaggtcatttttatttccacataaattttagactcataaatttccacaaagtcttttagggt

SEQ ID NO: 168740 - DNA, 623 bp, Homo sapiens
tgggttacactagtttatgcatgttttaaaacttatcaaactgtaaacttaagacatgtagtatttcattttgtgttgtttgccacaacaaagacaaaaaaatgaggtgacaaatcaaagtgattatgtgaaacaacagagatttaaagtcttgtaagaaaattaaatgtaaatgatgtaacttacataacatcctttaattatactcaatgtgttccttctatattctggtctttgagaaaaggattaagtaacatagtcccttgtattatcaattagggttttagagttttaaagcaattggattatttgtaaaasttgctttaatatctatatttgttggatatttttatctttctctgtggagtctgtcttcagatttatagtctacattccattggtttgtaccagagatttcgtttcttgtccaggtgtcttgaatcatatacattacaaaaagacacaatggcttttactgtctttttaatgttcagatatctaatccatccaatgatggatttacaatgtcactgcaaaggaaatcgggtcaagcagcaggtaacccttccagccttctccaaacagcttccaaagtctgttttaatttcattttaaatcagtta

SEQ ID NO: 168741 - DNA, 573 bp, Homo sapiens
gggtctgtaatcccagctactcagggggctgaggcaggagaatcacttsaacccaggaggaggtggaggttgcaaatgagccaagatcatgccactgcactccagcctgggtgacagggtgagactcaatctcacacacacacagagaggtgaagaggaaaaaactaaagaaaattaataaaacaaagatgagttctctaaaaatgtcaacaaacctgataaacatataattagacaaagataaaaagggagaagacgcaaataaccattatcagtactaaaagtgtgaatatcaccataaatcccagtcattaaaagagtgataaaagtatacaacaaaaaacgtcatgatcataaatttgataacttagaaaaaatgagcaattctgcaaaattgttaataatattatctcttctagtatgtgaacatgggaaatcttttatatgacttttcttctatttctttcatcattgttttatagttttcagtatacaggtcttccagcttcttggttaaatttaccattggtatttatttgttttgttgctattaatgaatggagtagtttatta

SEQ ID NO: 168742 - DNA, 573 bp, Homo sapiens
gggtctgtaatcccagctactcagggggctgaggcaggagaatcacttcaacccaggaggaggtggaggttgcaaatgagccaagatcatgccactgcactccagcctgggtgacagggtgagactcaatctcacacacacacagagaggtgaagaggaaaaaactaaagaaaattaataaaacaaagatgagttctctaaaaatgtcaacaaacctgataaacatataattagacaaagataaaaagggagaagacgcaaataaccattatcagtactaaaagtgtgamtatcaccataaatcccagtcattaaaagagtgataaaagtatacaacaaaaaacgtcatgatcataaatttgataacttagaaaaaatgagcaattctgcaaaattgttaataatattatctcttctagtatgtgaacatgggaaatcttttatatgacttttcttctatttctttcatcattgttttatagttttcagtatacaggtcttccagcttcttggttaaatttaccattggtatttatttgttttgttgctattaatgaatggagtagtttatta

SEQ ID NO: 168743 - DNA, 506 bp, Homo sapiens
ggacatttgctggagattttctttcagctgtagaaaaaaaaaacaccctctatcaatttattcctgaatctatagcccagaaactttccttccagtaatatgaagtatctttctttttattcacgtcttattttatgtcctttggtagaattttgaccttttctctatcccagttttggacatttctggtaaggtttattcctacgtcttttgtggtttatgttaactgctgtgaaatamgtaattttaattattaatattttctaataagttactggtggcatgaagcaaaggtattgatttttaaatatgttttaaaacttctgacctgtacaaaaaggtatgcaatcagaaataaaaatagtccaggcatggtggcttatgcctataatcccagtgccttgggaggctgaggctagaggattgcttgagcccaggagtttgagaccagcctgggcagcattaaaaggtcccatctctaaaaaattttttaaaaattagccagg

SEQ ID NO: 168744 - DNA, 546 bp, Homo sapiens
actcataactttttgtcatattatgagattgaatctttactttcatgcataatatacatatggcctacaagaaatatcaaggctaaatggagtctatccccctgagcatttcaagaaagaaaaccacattttttaaaaattgcagtagtagaaacagaaacagaatatgacaatgaacaaagtatatatggctatatacaaataggattttgcaaactgggcagaaacactaaataatcttgaggaatagtaaaaaggaacaaagaaggacagttgcaacagggtcagtggggagagcttatttagcagaattaaaactgaccagggtaacaacrgtgattggagaaaaaaagtaaggactggatgaggaacaggaatatctgagctgcagccttattaactaactgctggattgctatagtttaattttcatttttctctttgcttctagtgtcttttggctcttgtctattccaccatcaacattaaactaatcttacaaaaccataaattctctttgcaaacagaaacacctaaccagtactt

SEQ ID NO: 168745 - DNA, 502 bp, Homo sapiens
acttggtatacaccccatgcaaataaagtagtgtcccacaattagtatgattggttgtagaaagcagccaatcagaagtactttccactttccatctgccacacaggaaaaggggggtgggggtttgcaaagggagtaccctcaggtccatttgttacttaagtgtggaaagttggggttttccttttgatttagttctaggaagtcagcgtgaatctgccttaggttccctgcctccagaccctattctattgcctcactttcatgactaaaatatagaaaatatttaaactagaaaataaaggagatggtgggaataatgtaaaagctacaaccacaaaataaaaatggtagaaatggtaacaccaaaaactagttctttcaaaaggccaatgaaataatctcatgggcaagtctgattagaaaamaaaagtactcaacatcaggactgagaaagaagatataactgtacattcagaagagattaattttgtcatggtcc

SEQ ID NO: 168746 - DNA, 559 bp, Homo sapiens
atctcttgagatcaggagtttgagaccagcctggccaacatggtaaaaccccatgtctactaaaaatacaaaaaaattagccgggccgggcatggtggctcacacctgtaatcccagcactttgggaggccaagccagatggatcagctgaggtcaggagttcaagaccagtccggccaacatggtgaaaccctgtctctactaaaactacaaaaattagccgggcacagtgccgcatgcctgattataattccagctacttgggaggctgaggcaggagaatggcttgaacccaggaggcagaggttgcagtgagctgagattgagattgtgccactgcattccagcctgggcaacagagtgagattctgtctcaaaaaaaaaaaaaaaaaaaaaaaaaaaaagccagacatggtggtgtagcacctgtagtcccagctactcaggaggttraggcaggagaatcccttgaacctgagatgtggaggattgcagtgagctgagatggcaccattgcacttcagcctgggaaacacagtgactccgtctcaaaaaaaca

SEQ ID NO: 168747 - DNA, 566 bp, Homo sapiens
ggttttatcagttaaatattggcagagtcctgtgttcctaccactcagcaaaaaacatgagttgccttttccagagggatgatgatgtgagtagaaaacctttcatacattcatgagtgaggacaacatggccccttgctatggaggctgtagtcactgagaggatggagctgactctagatcggagcagatcctcagatgccaatgggggacaagtcgtttaggcagaaccccatcaattacccagtggaccttgataaaaagatgctattcccaggatgactgaascctcagcaagtcattgactgattcttgccaattcccttcagatatacttttgaaattggtaatggtttatctctagcttgtaacctctgaagcaacagctatgaataacaaatttctctcttatttaaaaatacacacctgtctgtcctccctcaatgtaccatgcaatcgacactggctctgatttttctctcagggtgcctcactcctccacttgtctctgtggagcaagtggttgatttaccttgtgtggtgtgaatagattcttagtggacatg

SEQ ID NO: 168748 - DNA, 557 bp, Homo sapiens
tttgcaaacaacaagtcactgagcaaaccttactggctatttggtccaacagcacaagccaggagttcagagccaggactaatgaataccactgctgagttgccagatgggaggcagggggcactgtcggatggatggtgttcttgagaacatggtyctttgctgaagactgagtggaagaaagcagaaagggagaccacagaaagaggagaatacagcaaagtatgtttgatcacctatgcagagacacagtaaattgagaagcaaatagctttaaataagcagctaagtttctcacagattataagaaaaactgggcttcaaaaaattaccgagtattccccaaaaattcacgtttatgatcaacattaatcttcagatttcaaggactgaccatatgagtcatccattaagcaaggatttctgaagcagccctgggctaagggctcttctagctgtagaaattggaaatcaagatttcacaggcaacccagggtcaatgttgagagttcagtttgtgtattttgttggaaaatattcgaataccaggctttctt

SEQ ID NO: 168749 - DNA, 578 bp, Homo sapiens
gttttaagaccaaaacaatttattcacatcacatttttccggctttttttcttttttttttttttttagagcagctttaaattcacagcaaaatgaagaggcagttacagggatttttcacatatcccctgacccccatatatgcaaaacggcctctgtgacccaaaacaaccagcccagtgatacatttgttacaattgatgaacctacactgacacatcattgtcaccaaaaggccatcgttgacattagggttcactcctggtgctgcacattctacggatatagacaaatgtgtagctggcatatatccatcatgatagcttaatacagagtattttcacagtcctaaacatcctctgtactcacctattcatccctctcacctcttaccaaacccctggcaaccactgattttttttattgtttccatagttttgccttctccagaatgtcatgtagttgaaatcatattgtatgtactcayttcagattggcttctttcacttattaatatgcatgcaagtttccttcgcgtcttttcatggttgaagaactaatttcttattaacacggga

SEQ ID NO: 168750 - DNA, 484 bp, Homo sapiens
atcataatacacaagaaattataatgcacttaaaaagatacatacctgaagggaataatttctgaatttctggaggtaacagaagtaaagcaaaacatttaaaatctagatttgcaacattaaaacaaataaagaggctattattcaaattgtatcaagacattagagagagctcagaatttataacacagttgggattcagatattttctgcaaattagatttttctttttttcttatgaatagaatcactgggaatatttcctggtagatataggcctttaaaaataatgatgaataagagatgactagtaaaaactaaattaacaggakagaccaaatgaacagaattatattagactgaagcaggaaaatgaccattttaggcagcattccccctgggctgtaatatgtctaatgctgttgtttatagtacttcatatgctgctggtggtcagtgaaagtttaaaacacaatcagtaaca

SEQ ID NO: 168751 - DNA, 224 bp, Homo sapiens
taaatttaagggtttatttctggactctcaatttaattccatttatccacatgtctatccatatgccagtactacactatcttgattactataggtttgtagttaagttttttttaaaattgggstgtaattttttacactagctatgataacatttatttgatctaaaaagttttacatgttaataatagtataaacttgtaaaatatgaaaaatagcaaaca

SEQ ID NO: 168752 - DNA, 476 bp, Homo sapiens
gctcccatcccaactcctctcatcctcaaaattagggattagttgatagaattatagagtgctagacagagtcagattcaccttgaggttaatggagcataagcttgcacaggtccctttcaaagtcttgaaaggggctctatagaagktgttcatttagaaatacacatataaaaacagtttccatgctcgcacgcacacacacacacacacacattaaagcaggtcgtttgcagaaataaagtattttcaaccaaaattgttaagaattttgtctctttctaccctggcttcccttccatcacatatctagagttgagtaccattagagtagaagtcattttgggaatctgaataaggggaattttaattgtggatacatttagttttgctttagtgggaaatatttatatagctcacagtcactttgtacagaattgttttcgctttcacttctaatctaagaatggcttcca

SEQ ID NO: 168753 - DNA, 343 bp, Homo sapiens
actctgggattgagtttctttagcagagtggaaatttagatcatggaaggagaaaaggacaggtcattgagcgtccaggttttgggaaagatcatctgtgtcagytttgaattcatcaaggtttatgagagagtggagagactgataggatgttaggtcttaaaatcttcaaaagagaatctacaaactcctggcaggtctgatccaggagtttgtaaatccctgtaatcaagtagtatagtctgatagcatgggcttctaacctggcggggcagcagttagaaaggagggtgggaaaaagttaggaagtgcagtaacaagcaacaaggctgcagaggaagca

SEQ ID NO: 168754 - DNA, 516 bp, Homo sapiens
cttgtttgacacgtcctacattcaaacctatggactttagtggtgacatcaatcacatctgttctcttgtccagcttcaggacaccatgcatgttctatctggacgtcatcagtcctcatccacactactgatcaaagctattgatcggtactggagtcctgtcactccctattagcagagtgacctagattactagtcagcagacaatccagtctgccactatgtgcttgcccatatcattccatcttatccacaaagacagaattagcttttctgaaacaccttgctgacgcctccagcattctgaagggctaagtgtctataagtgcagatttgcttgactgctgctgaaaattactttraagtatgtaatagttctctgtagaagaactaaataccatcagactctgccaaaaacatcatggggtgcagcctgagccaaagccccagggttaccttgctgatctgcccattcacagagtccacagaaacgtgtggtaaccatggaggaattc

SEQ ID NO: 168755 - DNA, 557 bp, Homo sapiens
gaattctgtaaccattaagcagtcaattcccgtatcctcctccctgcsgctcctgacaaccactgcttccccctctatggatttgccctattctggatatttcatataaatggaatcatgcaacatatgaattagcataatatcttcaaggttgattcatgttacagctcttatcagcactacattcctttccatggctgaatactattccatcatttggatagaccacattttgctttgtcatcagttgacggacattcaggttgttcccgtcttttgattattctgagtagggagcagctcggttttattttgtttggttttgttttcaaaatagtgagagctgactctgtaggtgaaggggaagaagcatgcagcagggctggatggcttttgtccaccaggcagtgttttctgcatgcagcctggcagcttgcagtagagtctgatctgccacaagggggcagagttatgtctgggggacaggtggactggcagatgatgggcgtggctcatcatccataaatattggaaaattgacgatagcattaagtaac

SEQ ID NO: 168756 - DNA, 577 bp, Homo sapiens
aactaatgtacacttatcacatggtttacagtttctgtgaattctgtgtttatgaaaacgttaagtcctgtgagagattttcaatccccaattgttttggctgtctacatatgcaaagtcttgtcttaatttaataaggaattgaaattwacagcaaagcctgtttacacagcatttaaaacagtatagatcaactggtttctgcagtctttgaaaaaagaaaaaaactaaaataaaatcagtatttaatacttagtgaaattctgttaaactatttaaaattatgatcgctgttaatgtatcaaaaagcaaaaccaatatactagtatgatacattagaaagagaataggctttggggtcaggctggctttttccctgactagctatgtaaccttggacaatttatctaccctgttctttggcaaaatgttcctaataccacttaactgtagagtcaggagggttaaacaggatcctgttttctatgtcttagaccaagagtttgcacacttttcctgtaaagggccagaaagtaaatatgctttgtaggcctgggttctctgtcacagctaatca

SEQ ID NO: 168757 - DNA, 575 bp, Homo sapiens
aaccattgtctatgtgatacacaactgcttgctttctatgggttaataccacccactgcaagactagagatggcagtcaatggagcatgcttctttacaaataagcctaagtctacaactgcagaaataacatggaaacgtttcagtctatccagagtacttaaatatacttttaaattttttcctaagaaattaattttgatagtatttcccaagtccttcaactaagataccttgataatttcggtcttttttacatcaaaatctatccgttgaaaaaaaaattttccaggtattaggaataaggaagctggtaacagcatgtattcacaattaattgttaatatttttcagtaagttacaataaactgttttgcatgcttgaaaaactgtaaagaaaaagaatatttataggaggattttaatagtttggtttttgtttttttctttttgctttaaaaacaacccctaatatttatctctgacaacacagtggtgtgtataaagttcatttccatgcttatkacacaaaaataacgatcagaaatatcaatctatcagtgtcagctgatata

SEQ ID NO: 168758 - DNA, 612 bp, Homo sapiens
taaatctttacaaatgggaccaaaacaactttctttggagacaccatgggactaaagaaagagacaatattcctattatagaattttgcaaactctccggatgtcctaacaataagttacagatgtttaatcctaaattaagaagctaaatataatgtggactttacaaatggcaattttctataatttgaggaaaatatctggtagctcagttcccactaraaatgtttggcaatggttctgctctctgttaaacatctctggtatgatttcctaaggacagaatcatagcagaagacaacagattttttttttttttaaagaaaaacaacatagaattgatcaagaaactataatttgaattttcctctgggcatgtgggtattgttttataactgagagaagcattaaaatatcaagggaactacattcatatttgtattaattctattgaatcatttcttggcttatcatattttgtgttattgccttgttctcctttgttttgaaaagaaactttatcagttttcctgtgtcatgccattttatctcttcactctgcctgcaataagatatcagcctaatattggcagagcaactccgtacaatgat

SEQ ID NO: 168759 - DNA, 597 bp, Homo sapiens
caggttttttttttcaatatagaaaataataatctcttgttactaatctaaaaccttaatatatttcctatatcttgattcaatacatgctttgtttctacaaaatctgttttaatctctctgtgttatcaatgtaaaatatcattgaataagttttttgaggggaagaaacgccatagaatgagttagccaaagacagaaatggttccctttatcttaaaatacattttgcaacacctaacatctacaacatggcataatggccatcagagaaggaaactgtgtctactgcacartgttttctggcagcaacaagatgggtcccatttttccaagatcttattgttactctaggccatctaacaagatgtcctttggtacaaagtcttacctcaagcaaatacacttaaatgtcaaaggatcataagagtcctggagggaaaggagcagagaagttcctgtacctctgaaatcacccagtgtaagtggcaatctgcttggtcttcacaaataaggctggcagcaggcaaggattaattctgatgtaaattaactacatttctattttgattaaatataaacttgttaaaattaaaa

SEQ ID NO: 168760 - DNA, 455 bp, Homo sapiens
ggatcattccagcaaataggctgtgtgaactcaacaagacttggcaaagaccttgcctgagctcgtcatctcagagggcctcacagcccatccaggctcagtcacccacaggagccaactgttcatgccagatttcagtgtaagggaagaaaaggagaaaagaaaatggctggaaccaaggagttctgaaataaaaggacatttccttgcattctctcataagccattttcaccttcatttggtatcttcaaasagtgacacccagatcttaccaagcgggagcagcagacacgattccctttgatccatgtgatccttttcatccatttgaaaatccttcatgtggcatcgatttgattagttcacattattaacccatgattgtgttcttacttcatactcagctctgcacccagaactgagacacaaaaagggccaattccctggccctccc

SEQ ID NO: 168761 - DNA, 514 bp, Homo sapiens
cagtgctcgtcaggaatttttgtctgtagttttctttttgggggtgtctttgtctgcctttggtatcagggtaatgctggctacctagaatgcgttagggtgtatttcctcctgttaaattttttggaaaagtttgaaaaggattggtgtcagttccttaaatatttgatagaatttaatgaagccatcaggtccagagcttttctgtgtcaggagatttttgactatagattaaatatcctactagttagagacctgttcagattttctagttcttcatggtttagtcttggtatattttgtgtttctttctagaatgggcaaattctcatttgtccatttcatttaggttatacgatttttctttttttttttttcatgtattccatttatctctactctaatctttatttccttccttttgctagctttggggtttcaaaatgttttattttayatatatataataaaaaatacataatatatatattagagacaagacaaggtcttgcta

SEQ ID NO: 168762 - DNA, 472 bp, Homo sapiens
aggtcttaagaaagtctaacactttctaaaacatttcctggttttgccttctctactttttcttgtctccatttagacaacagatattggttttcaaaaaaaaaactttactttttccacagaggatggtggtgttctgagagggaattgtggctagtattccatttttgctatttcccgacccttgsaggattcaggatgaaatcgtaacatctcttgttccagagtgcctttcatgtaactgatacacaaataaattgacatttctttttttatctctcatacacctggaatatcagaggatattccacagtattattccggaaagacatcagagcagtgtggatatgatgttggaactctgatcatctgtttctgttattattttaaaacattcacgataggagactaatcctggatccctcttgccccagtgagaccttctttatattccacatccattaccgaattc

SEQ ID NO: 168763 - DNA, 545 bp, Homo sapiens
ccttaaggttttaaaatccatggcagttagtggacttagggagaggatgctggctaagccttgaaaagtcccaacattttgagttcagatagaaaaggaagaggctacaaaggagagtgagaatgtgatctgaaacaaacccaaagagtcacagaaaaaagagaagtgggagggtggttttcagggtgagtggtgactgctcagaagctgagtaaagtgaggttagaagtgatttagcaactcaaagcacctgtggccatggcaagctgaggatggtggaagccgaagccaatttgcagagcatgaaagagtgaatgaactggagataagaaagggaaacagcatcggttgaacactcttgaaaacttttgccatgaagatgcagagaaatgggctataacctctaagggattttttttttcctgttgttttatagtgagagtgcatgtttatgtgctgataggaatgattcagcagagatggaaaggtgaagagacagataggtaaatgcatgggtgggtgggtgggtgggtggrtggatggat

SEQ ID NO: 168764 - DNA, 454 bp, Homo sapiens
gaattcgttatggatgaggagaatcaccctcaaactattttcaaacactgaatagctttggaaattagcttttgctgcaaacttaataatgctttctaataaattcaacctacaattatgaggcaaaacagcacttacatgtgaaacatactgtgacaaggtcattttgatggcaacaaatgttgtttaaatcacaagtaatatcaagctggctttatatatttcccatgctgtcaagataagaaacaagatctccattcccgcacaaacttgcagtgaacgtattttccaagttctactatagttcaagctgcattactgaaccttaaggcaastgcaaaggaaatttttctatttaattattcacttaaatatacaattgagcatccacctaaccttcaacaggaagtgattaatatgcaatgtaatgacagctaaaaggcaaatggcaata

SEQ ID NO: 168765 - DNA, 454 bp, Homo sapiens
gaattcgttatggatgaggagaatcaccctcaaactattttcaaacactgaatagctttggaaattagcttttgctgcaaacttaataatgctttctaataaattcaacctacaattatgaggcaaaacagcacttacatgtgaaacatactgtgacaaggtcattttgatggcaacaaatgttgtttaaatcacaagtaatatcaagctggctttatatatttcccatgctgtcaagataagaaacaagatctccattcccgcacaaacttgcagtgaacgtattttccaagttctactatagttcaagctgcattactgaaccttaaggcaactgcaaaggaaatttttctatttaawtattcacttaaatatacaattgagcatccacctaaccttcaacaggaagtgattaatatgcaatgtaatgacagctaaaaggcaaatggcaata

SEQ ID NO: 168766 - DNA, 603 bp, Homo sapiens
ctccaaacatatcccatatctaatcaattctcaccatctctattactacaaggactccagtccaagccactatgatctcttatgtgattaagagcaaaaacctattatctagtcttcagctttgtcccccactcaaatgtattatccacacagcaatcagggtgctccttttaagatgcaaatcacatcatgtatagctctctgcttaaaactctccaactgttggcttcccgtttcacttagaataaaaaatctatattccttacacaaattgacaaagtcccacatgatgtgatgcctgcctacctctctgagcttacaccatcttctctgaagctcactagcctccatccaatatgtcgagattcttcccacttaaaggccttggcatyacctattgtcactgcctagaattctcttcctacttattagctgacttctcatctttcagattctcaaacagcatctctgagacaggccttttctatcacacagctaaaaatttctatgctgacacagcacagaaattatgttacaccctattttaaattatttgtacagtatttatcagtattcatgtttttcttatttgcttgctcattt

SEQ ID NO: 168767 - DNA, 580 bp, Homo sapiens
caatttacatactatttgtgtccttttgtggcaaaaagtaaattcttaaaattgaatatatgaacattgcaatgatttgttaaataaaatattttacttccctgaagtttgcaagcagatattcatttaatttcttatatatattaagaaagatttctctaaagggctgtcagttacaatgacagtttctattcatattttttgtcttgctktcagtgataacactatggctgtttaatatttcttattaatttctattcacacaacctcattcattaggttatgatttattctgatatttgtgattgtatgaggttagggttccaggaaacagagtctgaaagattttgctgcagaaggcttattggagatggcccctataaagtaaggagagaaggaaaaatacaacagaggcttcagccaattccaaggggagatatggagctgggatagcccttcaaaactgtttccaatcaaagcaaggaggtcacatcttatggccctgcatcagaagtcattgaatgaaggttaatcctatgaagaaggaggtggggcaggtaattgtggtaaattggagctc

SEQ ID NO: 168768 - DNA, 604 bp, Homo sapiens
aggcactaaccactccaaaattttgttagaatgccctttcctttcagagaagccgaactagataaaccaaagagtatttgatgaagatctggtgttatgcttggagctaaatttaaacctttcttcttaaagataattataatggaaattattaaaatcagcccttccccttatgcagctatattatgtgaatcatcatgaattctaaaacaatgaataagggtttaccaaagttccatttgaacattttatattagatmctatttctttcgcttttaataatctttatatctcttctctgaattcttaaaatttctgctctctggtgcaacattaaataggaagcctagaatactataccgagctgtacacagctcagatacacacggaattgtgatgaaacaggatgattttatgatgtataaatggctatatatgctgtgcttctacttacccattctgatccagggccactcctgggtgtaacttagtctttctctttagttacacaacatcatgagttattattagttagaaatctactttaaaaacttctacatttttatttcaagcctcacctttaatgttctttaatttgcaattc

SEQ ID NO: 168769 - DNA, 604 bp, Homo sapiens
aggcactaaccactccaaaattttgttagaatgccctttcctttcagagaagccgaactagataaaccaaagagtatttgatgaagatctggtgttatgcttggagctaaatttaaacctttcttcttaaagataattataatggaaattattaaaatcagcccttccccttatgcagctatattatgtgaatcatcatgaattctaaaacaatgaataagggtttaccaaagttccatttgaacattttatattagatcctatttctttcgcttttaataatctttatatctcttctctgaattcttaaaatttctgctctctggtgcaacattaaataggaagcctagaatactataccgagctgtacacagctcagatacacacggaattgtgatgaaacaggatgattttatgatgtataaatggctatatatgctgtgcttctacttacccattctgatccagggccactcctgrgtgtaacttagtctttctctttagttacacaacatcatgagttattattagttagaaatctactttaaaaacttctacatttttatttcaagcctcacctttaatgttctttaatttgcaattc

SEQ ID NO: 168770 - DNA, 610 bp, Homo sapiens
tacaacaacatttaactagagtgttaccctttacagaatgactcttcgtagattatgtccccaagataaactttctttagcataactctcccccatctcagcatacatgagcttcatcgtacaccarcaatatcttccagtatttgctccatttccacctgcacttgcttgaacctcctgcttcagcctccttgccttctctttgcttctagcctcatgttggcttgtggtgccttagtttacctagtttcattagcctctggtctagtgcatcctgtttcggattacatcttgtctcctttctagctcagcacaatacagctgtctatttagcatgttgctcttcttatgccactccagaactctagatctttcctaaggggcaagggcacggtctgacacttccagatgcactcccatgtcctggctccatctctaatggatcagttattacagccagtacctcacaggagctataccatcccaggacacataatattatcattgcaattttatagccacaaagacaagatgtgaggaggttaaattatttactcaagaacacaaagataacattgaaaacatttttgcccacttcttgctcttctgc

SEQ ID NO: 168771 - DNA, 610 bp, Homo sapiens
tacaacaacatttaactagagtgttaccctttacagaatgactcttcgtagattatgtccccaagataaactttctttagcataactctcccccatctcagcatacatgagcttcatcgtacaccaacaatatcttccagtatttgctccatttccacctgcacttgcttgaacctcctgcttcagcctccttgccttctctttgcttctagcctcatgttggcttgtggtgccttagtttacctagtttcattagcctctggtctagtgcatcctgtttcggattacatcttgtctcctttctagctcagcacaatacagctgtctatttagcatgttgctcttcttatgccactccagaactctagatctttcctaaggggcaagggcacggtctgacacytccagatgcactcccatgtcctggctccatctctaatggatcagttattacagccagtacctcacaggagctataccatcccaggacacataatattatcattgcaattttatagccacaaagacaagatgtgaggaggttaaattatttactcaagaacacaaagataacattgaaaacatttttgcccacttcttgctcttctgc

SEQ ID NO: 168772 - DNA, 306 bp, Homo sapiens
tgtgcttcttctccactttctgtgtggtagtgaagtatttttccttttataagtacaaatgaattactcactttttgattccagtcaatgcaacactagaattattcaatgaaattacattttcttatggtgctcagaggacggcccactgccaatgtaattgaggccctttcaaaacgtaatttccattaacaatgtttactctgaaattgtctctttggctttcttcatatgayagaatctatgattgaatgaaagtgctaggtttgagattactgcatctataaatgtaatatttactttgag

SEQ ID NO: 168773 - DNA, 613 bp, Homo sapiens
ctaaagtggactttgtttttttccatagaataagtattttgtaggacttctcttcaatattggtgtgtagaaaaaaaaatgtgaacttcaagtttcaatcaattaaacttttgcttaaactgaaaaaccatgccaacacacaaaaaggtcatctggggtgtgccattacattaggattacgtactggtactacacactcagttgtgtaggacataagaatggattatacttaatcctctaaaggatggcctgaattaaagtgatagaaaatgrgagttaatattgctagtgttaccatgtaaaatttaataattatttgcttaattattgtcttattaatttaatagtttctaaagagaaatttcattaacaaattaacaggaacagctacaaatttgcagtgttcagtgcaaaattaaaatataggacatcttcctcaaaaattatttaaaacttgacacgaatgacaccaaagaattagccaagtgatgggcccctgcaaatgagcagatcacataaatctatccctgaacatcaattagttataaaaaaataagaatttaaggctgggacccatagccataattttacccatacctgcatttatatctgt

SEQ ID NO: 168774 - DNA, 265 bp, Homo sapiens
ggccaggctggtcacaaactcctgacctcaggtgattggcccgcatcagcctcccaaagtgctgggattacaggcgtaagtcatcgtgcccagctaagattwctaatatttataagctctaccttctttcttggagaaatgactttataatttcactttctaattcagttacctgttgaaactaaattaaaatatattcatatgcaaaatgcaagtaaataaaaacagcagctttctctatgctaaaaggaagttcctttggagc

SEQ ID NO: 168775 - DNA, 586 bp, Homo sapiens
cctgttttctggggaaagaaaatttctctcctcctttgcaattctgggacccaggcacatggtcttggacacttatcccaggaacccccagtgtaacccatccctcagggtgcttaatttcttcctcttgagcagcaaatcatactgagcacattgccatagtcctgggtcatggcccttcaaaccccctgggatttccaggtttctggaagagaatttttattgacattctaaattccatacaataacatgaaatcctgacagcattcccgagtacacatcgggagcttcccacccacctctctgcttttctgttcgtggcatgattgagttcaaggtattttaatgaacgaaatgatgatctctkgtcaagacaccatccctcaaaggatgtgcgttaccaatagctgaagaagtggaggaaagatcttttcacacaagaaagtgagtctggagcattttctcatgcctaattcttttggaaatagcaaccaacattttcttttttgatttctatgaattgaaattatactgattaacttcaaatgagtggtctcttttaaaaaactttttaaaaaaccaaaca

SEQ ID NO: 168776 - DNA, 470 bp, Homo sapiens
tgaacatacccatcaatgcaagacagttcaagtgatgaaaccatcattaaaaatatagaggaccttgtcttagtcaccccaggttaccaaccaaaaaaagcccataataratggattcacacccaattgtagcatactgaatggctaaaactggaagcattccccttgagaaatggaataagacaaggattctgaagcccatcactcctgttcctttttatggctgtgtagtatttcatggtgtatatgtatcacataaaaaaaaaaatccacaaggcgggcagattaccagaggttaggagttcgtgaccagcctggccaacaaggcaaaaccccatctctactaaaaatacaaaaattagctggctgtggtagcacacacctataatcccagctgctcaagaggctgaggcaggggaatcacttgaacctgggaggaggaggttgcagtgagccaagatcgccccact

SEQ ID NO: 168777 - DNA, 470 bp, Homo sapiens
tgaacatacccatcaatgcaagacagttcaagtgatgaaaccatcattaaaaatatagaggaccttgtcttagtcaccccaggttaccaaccaaaaaaagcccataataaatggattcacacccaattgtagcatactgaatggctaaaactggaagcattccccttgagaaatggaataagamaaggattctgaagcccatcactcctgttcctttttatggctgtgtagtatttcatggtgtatatgtatcacataaaaaaaaaaatccacaaggcgggcagattaccagaggttaggagttcgtgaccagcctggccaacaaggcaaaaccccatctctactaaaaatacaaaaattagctggctgtggtagcacacacctataatcccagctgctcaagaggctgaggcaggggaatcacttgaacctgggaggaggaggttgcagtgagccaagatcgccccact

SEQ ID NO: 168778 - DNA, 585 bp, Homo sapiens
cccatacatcagttgtcaattgaagaatagtctgtttaacaaatggtgctttgagaactgaatatctacatgtaaaaagatgaagttaggcccatacctcaattcatatacaaatatcaactcaaaatggatccaagacctaaatgttagagttaaacctatagaactcttagaagaaaccataaggataatcttaataaccttacttttggaaaaagatatttatatattataccagaagcacaattaacagaaaaaaataaattggactttatcaaaatcaggaatgcttgtgcatcagagaacagtatcaagaaagtgaaaaaacaacataaaaatgggagaatatagttacaaatcatgtatttgaaaaagatctaatatccagaatagataagaactcttayaattcaataacaaaaagacacaccatccaatcttttttaaaatgggcaaaataattgaattggtatttttccaaaaaagatacacaaataactggcaagcacacgcaatgatgctctacatgattagttattaagaaaatacaattaaaaccacaattagatacagcttcacactcat

SEQ ID NO: 168779 - DNA, 483 bp, Homo sapiens
ccttttttcttttgacattggtatcttgtagacattggtttaatctttttctttttaagatcagcttccctgcccattacctacgtgcatatggccatttcttgcgacaatggaaacccctgtagtctacatgatccttcattttgtcagccttgcatcagattctgtgtttcaattctaaattcctaaaggagagcatgtgaaaggctcaggctagttcaggtatatgcctctgtcttcaaycagagagagaggttctggggctgagattaagttcatcttttctaggctacaataggacatttgttacaagagagaagtggggctgaggaagagggcattggaagagggtgttatcatctcttctctaggtgggcacattatatgtcttacaataaacccaaaatgttttacatgtagtatctttctacattaaaatgatcctttgatataccagaaataaagagtaagaaaagataagtc

SEQ ID NO: 168780 - DNA, 519 bp, Homo sapiens
ttctttcgagtgaaagagaaaagaatgagtcagacgtatacaacaaaaagtaaagaagtgagtttacaagtttccatagaaagagagagtaagagtggtcgccrtgctggctgatggctttccctctgctgattcattgtaaagcatctcctgcctttggtttctgggagataattctgaaatcttaactaaaacaataaatactaaagtattcatatgtgaggtagtaggaacaggtttctgttacttgtaaccaaaggagctttgagataattgacagcaagttgataagtcaatgagaatggagaaaggatgagataataaggagattaattgaagagcccttttacaaagtttcaagactttggtacttatatttattttgtttgggattttaagcttgtttttgaaggacaagtcttacaaattcctcttttagaaaatagaaaattgagcaaaataattctttgcattttattttacttatataaagctagtcaagatattaatttgggggaa

SEQ ID NO: 168781 - DNA, 522 bp, Homo sapiens
ggacatgaattggaaagctggtgcataaaattaagtacattattgaaaccaaaattgaagaattaaagaatttaaaaaatcaaaaaamcaaaattgaataattaaacatgagattaattccctccaccctattggccatctacagtctcttctgaatactgcctacagttttggggtctacagtttaaaaagaaaggctcaaagaaaaacattacaaataatagtaccttttaagaaatgagatcatgtagctcaagaagaaaacactgttgcaaaaattttcaagtgttgatatagatgaaaagcaatcattacatagatggcaatgccagatggtctccaggcctactgagaaaataccaaaaagtatgagtaaatcatactacgtaatacatacatagctttatttggaacacttatttggaacagccacacttttgtttggaacgctctcctcaatgcaaagatgtggaaaaatacatcaaagaccacaggaaagaaaggaaggcgggaagggaggaa

SEQ ID NO: 168782 - DNA, 584 bp, Homo sapiens
agggaagcaccatgactttacaagacaaatccactgaaaaccctcagtttcccatgaagtctattgttctactcgggacccatactattattttccagaggccaccccagcagagctgagaggatcatctctgtgtatcccatttgccagagaagcgactaatttttagaaagaatacaggaagagaaataaagacctggctcagagctgttccccaacattataacattatacatcccacagaattgaccataatccctkgattatgattatgattgggagacccgagttgcagttcattcaagtctgatcacgtgaaattctccaaagacaatgggaggaattcacattttcttcaaaggataagaatttctttacacagtttcacctcctgtgtgagctaaaagctgtttcaggtgttaagattatcccgaggcctttgccatcttcacccttacggcatggagattttatatggtcatactttatttcatcagcaaaatttttgcatttttgtagcaataaagctgaggaaagcaatcatttgctagacactcatttaggcaaaaaatattaaacccaca

SEQ ID NO: 168783 - DNA, 602 bp, Homo sapiens
ttttttttactttttatttttatttttttttgtacagacagcagtctcactgtttcccagggtggtctcaaactcctggtctgaagcgattctcctgcattggcctcccaaagtgctgggattacaggggtgagctactgtgcccaatctggctaatttattttgaagcaaattaaaataactgttccatgctgaaacattattgataataaagagtaaaattcttggctgggcgcggtggcttcatgcctgtaatcctagcactttgggaggctgaggcaggtggatcacctgaggtcaggagttcaagaccrgcctagccaacatggtgaagccccatctctactaaaactacaaaaactagctgggcacagtggcacgcgcctgtaatcccagctacttgtgaggctgaggcaggagaatagcttgaacctgggaggcagaggttgcagtgagttgagattgtgccactgcactccagcctgggccacagagtgagactctgtctcaaagataaaatccttaggtttaaactagaatagtgactttaaaacctcatttgctaatcaaaggtggctaacaccactctttttttatcaaac

SEQ ID NO: 168784 - DNA, 565 bp, Homo sapiens
ttttgtttttagttggggtctcgctctgtcacccaggctggaatgcagtagcacaatcataccttctgcagcctcgaactcctggactcaagcaatcctcctgcctcagtgtcccgagtagctgggactacagacatgcaccaccgggcccacctaattttaaaattttgtttagagagatttttgtaaagagtatttctgtcttgccatgttgcccaggctgttctcgaattcttgggctaaggcaatyctcttgtcttggcctcccaaagtgctgggattataggcatgagccactgtgcccaatccaactgtataggttgctttggtggctgttgttattttaatgtgataactcatccacaccgtgtccaagaaagtaactaaagccattttcagtgagcaatcgctctttaacttcaggttcattttcaatacaaacatggaaaactgattgttatcaaatacttgctcccattctcagtaatgcacaaatgtaatgttctagttcaattgaaataatcatcaagataaaaactgcctggatatggaacctcactactac

SEQ ID NO: 168785 - DNA, 550 bp, Homo sapiens
tacaagtccccctcagttaaagcatgcagtctaggagttgagagctgagcattactctcctaaaatcttccagaaatgaagccaatcagctgaatccaccttatatcacaatcaaaccctcaagatcatcgaataggataaaaggaaaaaaaaatccaaaggttagcaacttaaaagattgaaggaatattcaaccacaaagatgagaaagaaccatcgcaggaattctgacaactcaaaaggccagagtgccttctttcctgtaaatgatcataccacctctccaggaggagttctgaaccaggctgagatggctaaaatgacagaaatagaattcagaatatggataaaaacaaagatcattgagctgcaggagtacattgaaacccaatccaagaaagctaagaatcacagtaaaacaatacaggagctgacaaacaaaatagccagtatakaaaagaatattactaacctgatagagttaaaaaacacactacaagaattttataatgcaatcacaagtattaatagtagaatagaccaaggaaga

SEQ ID NO: 168786 - DNA, 484 bp, Homo sapiens
gtattttttaaaaaatatattggtctgcaaaaaactgggaaaaaaactagtccttcaccataaataagaagcactattacacatgtgtgtgtgtgtgtgtacatatttattttttaatggcattgggaatttaaaaatttgaaatacgagctggaggaaaacaaattcactcaaagtacttgttaaacccctyttcttaaaagtctttattaaaaagtctttccgagttgcttctaaatttaagacaccagctgggtgcgatagctcatgcctgtaatcccagcacctgggcccaccttggcctccttttatcttccttgtttttttttttttttttttttttgagatagagtctcactgttgtcggcccgggctggagtgcaatggtgcaatctcagctcacagcaacctcagccttccaggttccagcaattctcctgcctcagcctcccgagtagctgagattacaggtgctcgccaacac

SEQ ID NO: 168787 - DNA, 484 bp, Homo sapiens
gtattttttaaaaaatatattggtctgcaaaaaactgggaaaaaaactagtccttcaccataaataagaagcactattacacatgtgtgtgtgtgtgtgtacatatttattttttaatggcattgggaatttaaaaatttgaaatacgagctggaggaaaacaaattcactcaaagtacttgttaaacccctcttyttaaaagtctttattaaaaagtctttccgagttgcttctaaatttaagacaccagctgggtgcgatagctcatgcctgtaatcccagcacctgggcccaccttggcctccttttatcttccttgtttttttttttttttttttttttgagatagagtctcactgttgtcggcccgggctggagtgcaatggtgcaatctcagctcacagcaacctcagccttccaggttccagcaattctcctgcctcagcctcccgagtagctgagattacaggtgctcgccaacac

SEQ ID NO: 168788 - DNA, 484 bp, Homo sapiens
gtattttttaaaaaatatattggtctgcaaaaaactgggaaaaaaactagtccttcaccataaataagaagcactattacacatgtgtgtgtgtgtgtgtacatatttattttttaatggcattgggaatttaaaaatttgaaatacgagctggaggaaaacaaattcactcaaagtacttgttaaacccctcttcttaaaagtctttattaaaaagtctttccgagttgcttytaaatttaagacaccagctgggtgcgatagctcatgcctgtaatcccagcacctgggcccaccttggcctccttttatcttccttgtttttttttttttttttttttttgagatagagtctcactgttgtcggcccgggctggagtgcaatggtgcaatctcagctcacagcaacctcagccttccaggttccagcaattctcctgcctcagcctcccgagtagctgagattacaggtgctcgccaacac

SEQ ID NO: 168789 - DNA, 562 bp, Homo sapiens
tggagaaataaacagaaacaagaaataacatgcatggttactttcaggccaaaagcattatttttggctctacttctggctgttatgtagaaacttggtaggggcactgctcctactctaacaacaaatctgatgtacaaaatcataatttttctgtttaacatcagagagatgaaatcacacggcaacctacacatctaaatgtaaggatatacaggagattacaaaaagagaaaaagaggacttgaacagtggctcatttgtgaagaacacaggtgacagaaatcaagtaccatacaagcaggtaagaggagatcagctaaaatctgctaatggctgagtgtacgctattgtgagatcacaggacctaacagccaaaactcggaggacctgcacccactctcaagcactttgccacgaacttccaccaggtgctcatgagaaggaagactggagaaaactttcctccatggtacagccttggagaaagtgagcagtcacctttgtggaaacaggaaggaagccttgccagacctttcycatctgctcaactgagggaaca

SEQ ID NO: 168790 - DNA, 538 bp, Homo sapiens
ctaaaggagtccatgtttgggatccaagaaattcccctgccaatgctattaccttttggaaaacagctagcagtctgtcaaatatgctagatttggggtttgacgcccctcaaggtaatcagtgacctgttaaaccacagtatctcaagccttgtaggcaaagcaaaatgttacctgtcctacccctgctcaaagtatccatcatttctctaatgtagtctcacacccatatgtaaagcctctctagcactcctttccaaaatctgtagcttaattatgctaatgatcttcatttatcatgttggtttacttatcaggacattttcctatttctggtcagatgtttttccagggatycaaggcatggaatccttcattaagtggggaagaaccaacagaatttgttccacatattcctctgacacatccccaaaagcatgacttctagcctgaatcctacaatgaatgtatgggtgtatgtgacacactgtaatttttcatcaacagatgggtcacatatgagccaaagatgaatgta

SEQ ID NO: 168791 - DNA, 486 bp, Homo sapiens
agtcccagctacttgggaggctgaggcaggagaatcgcttaaacctgggaggcagaggttgcagtgagccgagatggcaccactgcattccagcctgggcaacagagcaagactccctctcaaaaaataataaacaaataaataaataggctaaatgttgttttcttttgaattctagctcttttgtgaacaaaaggccaaaatgaaaaactgagataatttcttgtaagattatctttctgtccagcctcatgttcctgaaaagaacattaaattccctcataaaacatwgtgtcaactttacaaatacaagtagactttattctacttctaaaatcatattcccactgaactagatgagtcaatgagtcaatttaatataatttgaatataagactttgataccctaatgggtacagaaactataattgttgaccagaataattctaattcatactaaaaagattccatgtttttaccaaaaga

SEQ ID NO: 168792 - DNA, 486 bp, Homo sapiens
agtcccagctacttgggaggctgaggcaggagaatcgcttaaacctgggaggcagaggttgcagtgagccgagatggcaccactgcattccagcctgggcaacagagcaagactccctctcaaaaaataataaacaaataaataaataggctaaatgttgttttcttttgaattctagctcttttgtgaacaaaaggccaaaatgaaaaactgagataatttcttgtaagattatctttctgtccagcctcatgttcctgaaaagaacattaaattccctcataaaacattgtgtcaactttacaaatacaagtagactttattctacttctaaaatcatattcccactgaactagatgagtcamtgagtcaatttaatataatttgaatataagactttgataccctaatgggtacagaaactataattgttgaccagaataattctaattcatactaaaaagattccatgtttttaccaaaaga

SEQ ID NO: 168793 - DNA, 486 bp, Homo sapiens
agtcccagctacttgggaggctgaggcaggagaatcgcttaaacctgggaggcagaggttgcagtgagccgagatggcaccactgcattccagcctgggcaacagagcaagactccctctcaaaaaataataaacaaataaataaataggctaaatgttgttttcttttgaattctagctcttttgtgaacaaaaggccaaaatgaaaaactgagataatttcttgtaagattatctttctgtccagcctcatgttcctgaaaagaacattaaattccctcataaaacattgtgtcaactttacaaatacaagtagactttattctacttctaaaatcatattcccactgaactagatgagtcaatkagtcaatttaatataatttgaatataagactttgataccctaatgggtacagaaactataattgttgaccagaataattctaattcatactaaaaagattccatgtttttaccaaaaga

SEQ ID NO: 168794 - DNA, 522 bp, Homo sapiens
gtgttcactcactgatagcatatttttcttcagttctttgaatatatgtataatagcttttttgaattactttacttgctaaattcaatgtctgagcccagttagagtcatttgtattgagtgtattttttcttaagtaatttcctgaagactttcctgtttgtttttttggggwttttttttttttttttttgcatatgtagaaatttctggttgaaaactagacattgggaaacatatggtgaaatgactatgggttctgtatattcttttgaggaccttggttttttgttctagtaggcaattaacttccttgggttgaaaccacaaactgtctcctgtgaggtattcagcttacacctttcctctgctgctttgttagcctgaacacctataggtccccctgtatatgcacagtgtggtagcccaaagattttggcagatgctcatcttctttgttgtttctttgtgtctcagaatttcctcctaattgacagtagccatgccagctttgggccctat

SEQ ID NO: 168795 - DNA, 561 bp, Homo sapiens
tgtttttgttgtttcatttttctcttgagatttattctgtgttcactcactgatagcatatttttcttcagttctttgaatatatgtataatagcttttttgaattactttacttgctaaattcaatgtctgagcccagttagagtcatttgtattgagtgtattttttcttaagtaatttcctgaagactttcctgtttgtttttttggggtttttttttttttttttttgcatatgtagaaatttctggttgaaaactagacattgggaaacatatggtgaaatgactmtgggttctgtatattcttttgaggaccttggttttttgttctagtaggcaattaacttccttgggttgaaaccacaaactgtctcctgtgaggtattcagcttacacctttcctctgctgctttgttagcctgaacacctataggtccccctgtatatgcacagtgtggtagcccaaagattttggcagatgctcatcttctttgttgtttctttgtgtctcagaatttcctcctaattgacagtagccatgccagctttgggccctata

SEQ ID NO: 168796 - DNA, 480 bp, Homo sapiens
cacttttcttgggcagcacatgttactcttaaatgtttactgaatgactgaatatagtggatgacaraaatgactaacagttgtaaatgtaagtagagtttcatggtttatttagcctatggtggagctgaaattatatctctaggtttttgaacaatgatgcttagtaaagattgtcaacaaataataatagagatattggaatatgtttacaatcatctataattatattgttatagagaatgtatctgtagacatatttaataaatggtgcctaatgagttttgttttataaactcattcagtaagacttgaaatattatttacattttatctctgccttttatttctgtaactaaaaagaaaacttcctctttaagtacctaccaaagtatttttacattcaacttggacaagagtttagtactatttcttttactgaaatattctatctcctgattttctagttgaaaagataat

SEQ ID NO: 168797 - DNA, 480 bp, Homo sapiens
cacttttcttgggcagcacatgttactcttaaatgtttactgaatgactgaatatagtggatgacagaaatractaacagttgtaaatgtaagtagagtttcatggtttatttagcctatggtggagctgaaattatatctctaggtttttgaacaatgatgcttagtaaagattgtcaacaaataataatagagatattggaatatgtttacaatcatctataattatattgttatagagaatgtatctgtagacatatttaataaatggtgcctaatgagttttgttttataaactcattcagtaagacttgaaatattatttacattttatctctgccttttatttctgtaactaaaaagaaaacttcctctttaagtacctaccaaagtatttttacattcaacttggacaagagtttagtactatttcttttactgaaatattctatctcctgattttctagttgaaaagataat

SEQ ID NO: 168798 - DNA, 437 bp, Homo sapiens
cttcgggttgtaaggttaagcgactaagcgtacacggtggatgccctggcagtcagaggcgatgaaggacgtgctaatctgcgataagcgtcggtaaggtgatatgaaccgttataaccggcgatttccgaatggggaaacccagtgtgtttcgacacactatcattaactgaatccataggttaatgaggcgaaccgggggaactgaaacatctaagtaccccgaggaaaagaaatcaaccgagattcccccagtagcggcgagcgaacggggagcagcccagagcctgaatcagtrtgtgtgttagtggaagcgtctggaaaggcgcgcgatacagggtgacagccccgtacacaaaaatgcacatgctgtgagctcgatgagtagggcgggacacgtggtatcctgtctgaatatggggggaccattctccaag

SEQ ID NO: 168799 - DNA, 428 bp, Homo sapiens
agttatcatataagggctgagcatactgaaatatagagatgtgcatatatatatgcacacacacaatattttagtgaaaaatagttcattagtggataatgaacataataatttgcaagattgtgatataattagaacaacattcatatcagttataaacatataactaatagagtttgaatattggctcaaactagaactaatctagtttaaatattgaaataggagaatttcctgacctccctcacaggacatgtgacaggggtgtggctcatctgtttggycgctatgcacactcaaactcttatgggagggggagcatgcagaagggcaggtgcaggagccagggtgagcggccctgggctctggccccatggcagcatctaggggtgggtgtctgaggcctctgaagccagagtgagcatgcg

SEQ ID NO: 168800 - DNA, 593 bp, Homo sapiens
catttataaaacaataacaacaatcagcttctggatggttcccccccccccccccattaaaccctattaaagggaatacggtctctaaaagggaaatccagagacctgtgtattcgagttataaccctgggtcaagcaacttaactaggctgatattttggcttgatgtgatttatatgtaaccttttaagcaatgtatattaaatccgtactttttactcatctacttgattgcaagctcctgcaagataaactttgttgaactcaaatgttgtaaacttcatggggcttagatataaactacagacttcatcagtgtttaacaaatacttgcttaagaaacacaaagtcctgttatatcagccaattaactatgaagctaattttaataactgaaatatcatagaggttaatattcaaaacaccactcatcttttttctcattgagtattatttatttatttttgctttctggagacatacgtttaccctttatttactgtctcattttgtcrtctctgaacataccatttacagctttttagttattctggaaaaatcactttgtatgaaataataggctatgatggcta

SEQ ID NO: 168801 - DNA, 493 bp, Homo sapiens
aattgtagacaataaaaatgtctattgattggcagatgatataatgattcttttactaccaactcctagaaactgtcttggagaagggttatgataaaaatcgtggcctgggcatatgatctgagaggatagttaatgcttcagtcagagtccaaatcaaaacctaatgactcttttttacaggacctatgtaggaaggctggttaatattataagtcatgacctagtaatcattattgtatattttccagtagacgtttttgagtttgtttctttctaaatagacatgcttctcctgattttcatcccatctacaaataatctgaaatctcagatttggtgcctttgcagtctcacatgtgtttgctaaactcttttccaatctgtagaaataaaccataactatccagggtttttatctttcacattcattgatcacttccttcatttctaaasaaaccaaggaaagtatgaaagtagataaaattttgtg

SEQ ID NO: 168802 - DNA, 462 bp, Homo sapiens
caaatgtagtactctaatattgaatgaggctatagagtctttaaagagtagataaattcaaacaaagcttagttgatcctaccgttgatcaccctttccttccctgaccagaaaaactaacaccaacaaaaatgcatgacctaacatattaaacttcagtcataacaactataaattatatctggcgccaaacagaacaaaataagatcaataaaattaaatatatgtatacgcttttgctgagatggacaaaaaacaaccaaatacagtrtatattaaaagtcataagaatgttgaaacctgattatatttctcaacagtacaagcccttttagaaggatgtaccttgcaaatctgatgaaattaataactacacattgtaattttagtcggaaatagcccagggtttcagaatactaggaaataccaacaacaatcggaactcaaagcagcaacaaacaa

SEQ ID NO: 168803 - DNA, 534 bp, Homo sapiens
aggattctccagactacatttgctgatttcaggatatgttgtacaatgtttaaacaaataatggcaaaaatgagaacataaagaaaatccgaatttgtttttattatctatttctaatatgattgtgtgtggttgtgcgttgctttgttttaaatttaatctagtcatttctgctgtccatttgattatactttgctatgttgggggagtggaatatctaaatgaagaaagatatacagaaagatatgaatgacactttagagttagttaggattgaaactcctccttgatgggtagaaagtgtcagtaacataattgtcaagagaaattagcaattccagaggagctaggctgacagcaaaactaaactttatatttgtgccattcatattatctttgcatataaccagcatgttctgattcacatagcaacggaaagatcacattctgaaaactcaatctaaagtggtgaaagwgattggagtactttaaaatacaaataaacgcatcaatgggcaaatggccatggtgaaa

SEQ ID NO: 168804 - DNA, 583 bp, Homo sapiens
tcatgtaacatcactgagctgctacaaccatcctctactatcacacctcttgttacttacaataattaaatgtttatatggtckaagctcttgttgttagagtattctattacctgaagcaaaattcagtcctcacagttacatagcagtggtgctggaggtttaggtaaaatagtagaaactattgttgtgaatgggagtatcctggttaggcaaagagcaaggctgttacaggaaatctcagcaattagttgagataattgagtgtgattttctttgggtctagaaactgctatattcgtagagtacctgattgatgtttcccattccacacattcatattttaagggaggttatgttactgcccaaatggccagtttcaagaacactcgcaaactctgcagctgatccagaagaagatctgtgagggctggtagagggtccaggtgtctaacatgtagaaaccaagctaattattgagtaagaaacagcaaattattttctataacttaattaatttctggcttgcaaagccttattcatcatcactcctcctcagagtcctgtccgggttctagaatct

SEQ ID NO: 168805 - DNA, 510 bp, Homo sapiens
actctctatacctattcacctcctttctttcacctcctttctttcacctcctacacaaaccctctcagttttcctaaggcatttggctttgaaagcccaagttaaagarggagggacggtgaggagggaggcttgtggactagctatggtgtcctccccaacacactcacacattaatcacccctatactactcacatgggatgcaagagcctgcttgactgagggcaaagcaaaaagggaaatacaataacaaaagattacaagtaaatatccctaaatatttcccagtcgtgttggcagatgtgaagaatctatttttttcttttcacgtgtagcacatgaaaaagtctgcttgggaggtaaagaactaaagaaactttgctatgatttcgtgtgtatgtattcattgaaaatggccttgtttggggtttcaaacagtgagtgatcccactggagaaatctaaggctcttgagtacaaatcagttactatggcacccttaagatttga

SEQ ID NO: 168806 - DNA, 510 bp, Homo sapiens
actctctatacctattcacctcctttctttcacctcctttctttcacctcctacacaaaccctctcagttttcctaaggcatttggctttgaaagcccaagttaaagaaggagggacrgtgaggagggaggcttgtggactagctatggtgtcctccccaacacactcacacattaatcacccctatactactcacatgggatgcaagagcctgcttgactgagggcaaagcaaaaagggaaatacaataacaaaagattacaagtaaatatccctaaatatttcccagtcgtgttggcagatgtgaagaatctatttttttcttttcacgtgtagcacatgaaaaagtctgcttgggaggtaaagaactaaagaaactttgctatgatttcgtgtgtatgtattcattgaaaatggccttgtttggggtttcaaacagtgagtgatcccactggagaaatctaaggctcttgagtacaaatcagttactatggcacccttaagatttga

SEQ ID NO: 168807 - DNA, 575 bp, Homo sapiens
cagtttatacatgggagtgagtagaatagtggttggtgtgagcagcctagataaaatctaaaagaaatttgttttgtctgygaaaatctataactctagatttattttttgaaaaaggggcacggttcttgggaaaggtagttgctagaaagaatatgatcttttctgaagctgttaagggcaccaggaaacaggtgttctgcttggtcactgatcccagattttatgtcagtctggcagttgaggggataaagataaggctgtcactcactgtgactgttagtagattacatagtaaaatacttgcattacagaataaaatatgctattgtaaatatagcttggccaaatactgacactgtcttgattggaaataacagaagtatgtcatacacaaaatgtatatttcatttaatcttcactactagggagtcagtgataacatcctcattccatttcataggtgagaaaacacaggtgctgacaagctaacatagcaagtagtagtggagctggaacttaaattcaacaggctgagtttataggtcatgcagttaataatcaatcataccata

SEQ ID NO: 168808 - DNA, 650 bp, Homo sapiens
attcccccttatttccctaaactgaggttgcaaatcagtggttatgcctgtgctgtttttcctataccaggcctgtttcaggcatttacaacacgaacctgtcctctagaagaattgtaatttgcaacttatggtgcaacatatccttagacttcctctaaacgaaagtatgtttgtattggttggcaggcattttctgtggaaaaaaaaaataggtctttcagaacggagacttctagaggcagaaaagaccttgattgtgagcctttgctctattcggtagctattgaattgtggatttactaggtgccgggaactgcgtaatttttgtaacacaaaaattctacccatgaagacctcaatagtackctgaaaggacaatgcaggtgtggggaatagtaagcattcagtttttcttgctttctttttctttttcttacatttataaacctttattggatttagattcttaaaaataatacctgcaggtattattttaataacacagaagcttataaaacaattacaaaataaacataaaagcccttttttccctcaatctcactcctttcttatagcgcttcctctctaagctgagcttctcccattttttgtgcaagactgtaacaattgttgaaagatctctaaat

SEQ ID NO: 168809 - DNA, 538 bp, Homo sapiens
gtccatgctcttaacagccacactgtgctgcctgtctggccaccagaggtcagcttccctgaaggaattagtatttgactgaggtgtggtgctttccacagggaagcagagaagatttttggggaatcccatagtgtttttagcatcagtgttgtacacaaaaggagtacactaacaacagatgaaacaacacaaatatcttttgactgagaaagttatggctacccagctctgctgaggcttatttgtgmtagaaagacacataaaacttacccatgaatattgaagatttgaaggcacgaaggggatacccagataacaaaagaccagagctatacatatatgtcttctgctgttcatcaagttaattctccaaacatttattaagcatctattatgcatagcataattaagcatctattgtacatgagacactagactaacagggggatgcaaagatgaatgccatttgtttggaggctggagtggacatgcctcattatttgattcaacttgtagagcaatggttcttgaattt

SEQ ID NO: 168810 - DNA, 586 bp, Homo sapiens
aaagcttttctagtcttgtccatctctacctattctatgtcttccaatcgtgattattagtttcttctgttctacrctttaacccaaatgaaaaggggggttgtttagtaaagcactgtctcatacatagaagtaaaaaacactcacatctgattctactcactgttacctgaacaaatacatacacctacattatatataaggtactttatatatgacatcttttttaaaaataaatacaagtgatttattttaaccataattatttggagcttttgcctttgaatgtacttcacatttactgccatctcttttaatctactctataatcttgattgataactaagccagatagttataggattaaggaaacaaacacaaaaaacagaggcatagggagattatgacttgtccaatgtctcaaaatcagtcagtgacatagcaagtgatctaacactcaggtgttttggcccatggctcttttcactaagcaagagattaactagattcagagcaaatagcatttttcaggatttgtttcaaaatatcaaagatggtgatctggtagaaatttaaaaatattaag

SEQ ID NO: 168811 - DNA, 586 bp, Homo sapiens
aaagcttttctagtcttgtccatctctacctattctatgtcttccaatcgtgattattagtttcttctgttctacactttaacccaaatgaaaaggggggttgtttagtaaagcactgtctcatacatagaagtaaaaaacactcacatctgattctactcactgttacctgaacaaatacatacacctacattatatataaggtactttatatatgacatcttttttaaaaataaatacaagtgatttattttaaccataattatttggagcttttgcctttgaatgtacttcacatttactgccatctcttttaatctactctataatcttgattgataactaagccagatagttataggattaaggaaacaaacacaaaaaacagaggcatagggagattatgacttgtccaatgtctcaaaatcagtcagtgacatagcaagtgatctaacactcaggtgttttggcccatggctcttttcactaagcaagagattaactagattcagagmaaatagcatttttcaggatttgtttcaaaatatcaaagatggtgatctggtagaaatttaaaaatattaag

SEQ ID NO: 168812 - DNA, 545 bp, Homo sapiens
gcgcgatcttggctcacagcaacctccgcctcagcctcccgagtagatgggattacaggcgcctgccactatgcctggctaatttttgtatttttttttttttttttttttttaagagacagagttttaccatgttggccaagctggtcctgaactcctgacctcaggtaatccactggcctcggcctcccaaagtgctgggattacaggtatgagcctccgcgcccagccatggttccgtctttttctaagtcctcatgacttgattgtgcacaggcccaccgttccaaccttccatgctatcatatattcctgagtgtatctaagttcctgttagccttctgctacatgtatatacatatacatattattttttagtacctgctaaataacaggcactatgtatgctaaaaaagagagtgtatatctatctatattcatatgtgtgtatatatttctaatamatttctaatataattttatgagggacttccacttaaacatggggattgaatgtacatatttttctatttctccacaaaaac

SEQ ID NO: 168813 - DNA, 592 bp, Homo sapiens
cctgaacacatttgatgctcattgacttcaagaaaagggacgagactggctgctacaagaaggcatctacaaaacatttgagaatgccaggagcgcaaagaatgaattgctaggacatagggcactggctggagaccccatgatggcattgcttcatatggggagctcacactgggtcaccccacccaccctccctcttaccccactcttaaggcactccagcaaggtaccattttgaaagcccagcagactgcatcctaccctgggaccccacagaccttgcaactccagattccttgagccccattgacctccccctaacgcagaccctgctgctkctggctgctgcctccatatccaatgtgggggccactggaagctacccaccatccccatcagcagggtaccgtacatttagaagcaccctgagaacaggctaccccaccagcaactaccacctggggccaaagtgtgtgctcccagtggccctcctaaggcttctgccaatgaaagcaaccccagcaacatggctagggtgtagctgctggtcctcccatccaagcattccactgagggcctggaaatcaccacg

SEQ ID NO: 168814 - DNA, 567 bp, Homo sapiens
tagggtgtagctgctggtcctcccatccaagcattccactgagggcctggaaatcaccacgcccctgcctaccatagctagtgcctatatataccatcggggggcctgaggctcacctctgtctcccttctccctagtgcccatgcaggggcctggggattgctcagccccatctattcctgttggcrcctgagcactcatcctgaaggcctggagatgggttcacccaacctgccactaccatcacagccagcatacaccccccacccacagacatgaaccacctgtgggcctgggaaatggcctgcagccaccttgaaaatcagttgggactacttgggtaccagaggattgtcctgccactgcaactgccatcacccacaccatgcctgatgcccagggcctatggacctgcccatccacctggcccacagctgccattgccagcacctcagcaagctgactgggaagcccccagatcagcccgcctggacacactaacactgatgccagcatataccacatttaccaccaactgattttctataaaggtgccaagtatataca

SEQ ID NO: 168815 - DNA, 496 bp, Homo sapiens
tgtgggacaatttctggtaagggctagagttcatacctcactgaggcagtggtgcctgtttcagacgttatctatttatttattttcgttgatatataataattgtacatatttatgggattggtgggatttttgatacatgcattaaaagtataatgatcgaatcagagtaattaggatatccatcacctcaaatgtactttttttgtgttgggatgtttcagatgtttagaatgctcagcagattgtacgcttttcctaaatctatactgatttaaatcaaccaagctaacaatcagacacttgctatttaccttttttccccaaaccaattacacrtgttgttaaattaccccctcctgaaattagcttatctatgtgatattccatacttctccatagtttaaagtagagattagaaacagtaatttgccagcccttatgttaaagcaaatgacttgggcctcagtgtatttttgtcttaaattttcaagat

SEQ ID NO: 168816 - DNA, 572 bp, Homo sapiens
taataaaactatatgtgtgtgtatatatatatatgcccttctaattccaaaaatgacaccaagacaactttttctgtaagtaaaaatacaggraaacctacattataaacagacacacaccgagatacacactacaaatagaaggaaaagggagaagagaaattacattttaatatcccaacttaagcaacttcgtagtttctcagcagtcaaggcagaaagggcaacgtaaggatcctgcagccttcatcatctatgatatagttcactatttaatgactgttcgctcagacacaggtagatagtctatgcctattacacacccattactaacagaagagcttcggggacagactccttcattccctgctggggttttttttctccccatatcctcctgcaacagaaagttagacaaatacagtgtggcttaaggcctagtagaggtgacaaggaattgaatagaaaaataacaatgggatgtctctctactccatcgtgagagggaaacattttctgagagggacatagaagaatgtgatgaatgctgtcctcagtatcaaatacctgat

SEQ ID NO: 168817 - DNA, 439 bp, Homo sapiens
agcagagtgcatgttcattcagctgatgatgtaacctcatcttacaattacatatattctctagttatttcttatttatcttatacctaactaagcaactttaggagagaattcatatgttctattattttttacaaaatatgatatatgtatttatgtgtttgtttcatcatatactctaacatatctcagttaactagctagttaagcaaattcattgagtagccatgaagtggcagtggcactcagcagaagctagcaggttgaggtgactaaagaatggaggattttagatagatgcctttttastgagaggaaatagggtgattgaaagagcccttggataagggatacacatcttagactagaccccccttccaccacttcactatagggattgggtgttttcaactcagtttcctcacttatgaaacattat

SEQ ID NO: 168818 - DNA, 569 bp, Homo sapiens
actttcaggaagtttaaatacttttcctgaggttccagttagtcagtgggttggccagaaatcaatttcgagcctgcttggctcctcgaaatataaaatttttcgcttttctaaagccagtcaagataaagacaagtttagttttcagaatgaaccttcaaaatctacacgagatatataaatttaagaaatggggaagaaggaagccttctagggtcagaggaaatacctttttctttttagagcttcctttatcttaccccaaataatcagatcaagtgtgtgcatgtgtgtgattttaaaatatggcatatggattccaaaggtctgcttacctgttagtaacattattgcaaattcaaaagagctttcaggcataaaaactagttttcataaactttcatctcataaatcaataaaagtttttcttagctattctacccttaagttaatgtcacagaaatagttttcccatagtgacactaggcaataattttttttattggcaaattgttatttattktatgtccataacaacgtatggcattagaaactatcaggattccctt

SEQ ID NO: 168819 - DNA, 529 bp, Homo sapiens
ttcttgagagactttctttctcttgatcagwagtatagaagttcagctttctctatagaaaaggaggtcacaagaggtggtagatggaaaaacaaggaaggcaggcaaggagaggagttaagagaacatctctcagcagaggcggaggggtgggagaaggtaatggtagggcatggctcagaccaaggagaccaggatgaaccaagtggcctggagagcatcacccctgaactgtgggctcagcattttagaagttggaaaggtatgtgtattttttagaaagattgttattaaaataaaacaaaaccccagagtcacaagagttaacattttggttattggaagcatgaaaatcatgctgctatgattgtggtgagggacagaggcattctgtggagggggttacagggaggttccctcagttacgtatagaggaaagaaagtcaggagccgcctgggaaccacagagtgaggctctgtgtctcaaccacttggctggacccaagacacctctggtcttgtttccact

SEQ ID NO: 168820 - DNA, 504 bp, Homo sapiens
agattcctttctggaggctctaaagaaaaatcatgtccttgctattcccagattctacagctgcctgtgcttcttggctcattgccctcttcttccatcttcagagccagcaacagcaggtggaatcccttttcatgctttgaatttctcctgccttttctgtcttcacatctctctcacccactcttctcctttaaagagcccgtgtaatcagagtgggcccaacaaaataatacaggatgatctccccataatcacatttccaaagccccctttgctgtgtaaggcaacatattcacaggtaccagcaattggaacagggatatctttgagagtcgttattctgcctattgcattatgttaaaaaaaaaaaamaaaaaaacttagacttcatcacaagagtggtgggaagctactgaaggtttctcgtaactgaatgataagatcaaatttgcatttttaaaagacccctctggatgccttctggaaactgaattagagagt

SEQ ID NO: 168821 - DNA, 557 bp, Homo sapiens
ctttttaactcttccctctcctctcctggaggaaggagtctctcctggagctctgagctgccctgcctggagttgggggaggggtgacaccagcactcccttggctgccctggctggtgtctcaccaggtcatgtgcactccagggattttagttcttgtggcctagattgcctttcaagtttattttgaaccccagagcactttagcctgcggtgcttggtctaaccagcactgaggttcctactgctgaggtggatgattccattctagcaagggctggtctaaatkctccctgcatgggtgccagctgaattcttccctgtgttgctttgctctgtgactgcagagcactgacttccactgcaaagtctatagtcactgtgctctgcctcccctaagcacacagattctgtctctgcaccacatggtaattgaagactgtctttcctaccttctcagtgcctttttcctcggtatgatgttaaaaccaggaatggtgattgctcacctcatttttttttgttcttatgaaggtgttttcttgtggatagttgtt

SEQ ID NO: 168822 - DNA, 539 bp, Homo sapiens
  misc_feature (1)...(539): n = A,T,C or G
ggtaaatattcccattccaaatgggagaaattgtcctaaacaaaggggctataggccccatgcaagtctgaaacccagcagggaagccattaaatcttaaagcgccaaaataatttcctttgattccatgtctcacatccaggacatgctgatgcaaggggtgggcttgcaaggccttgggtagctctgcccctgtggctctgcaaggtatagcccctatggctgctttaatgatctgttgttgagtgcctgcagctnttccaggaggatggttctacaattctggtttctggaggacagctccactakgcaatgccccagtggggactttgtgtgagggcttcagccccacatttctcctctgcactgccctagtagaggttctccatgagggctccacccctgcagcagacttctacctggacatgaaggcattttcatatatcctctgaaaactaggtggaggcttccaaatctcaactcttgccttctgcacatgtgtaggcctaactccacatggaaaccaccaagtcttgggg

SEQ ID NO: 168823 - DNA, 602 bp, Homo sapiens
aattccactagagggactcccaaatataagatcagtcaaagagatcatgtgtatataatttgtcgccatcacagscttaaggtaggaaagtaattctcagcatctaacctaaattagtcttcctagagacttaccagagaaaacaggtgggctgttagcatcacacacatgttattccatgtcacagaagtttcagctattattgtgaaaaatacatacacagtatcccttgtgttttctatcttcattcagccttagtgaccacatgcttagagagccacatacctcttgtcttctatgacttgtttcattgtaagtgtcagtgtgtcggctgtgacctgattcaaccggatagagacaccataatttttggctactactcggaccatgtttccatgctggtctccattgactggtaatcccaccatgggcacaccatgacggatggcctccattacgctgttctgcccaccatgagtgacaaaaagacggatgctggggtgagctgtggcaaataagaaagagagtggaacacttcaggatgaaaaattttggaataccaggtaaagcagaaaagtcagatgaaacaccaatgaaatcaa

SEQ ID NO: 168824 - DNA, 498 bp, Homo sapiens
gtcctcctttgtttgccatcagcaagggctatgctgtgattctgtctctgagtgacttggaccactgaccctcagatttccagccttaaaatccaccttccttctcatgcgcctctccgaatcacaccctgactcttccagcctccatgtccagacctagtcagcctctctcactcctgcccctactatctatcatggaataacatccaagaaagacaccttgcatattctttcagtttctgttttgttctcccacatattctcttcaatgctcaggaagcctgccctgtgcttgagagttcagggccggacacaggctcacaggtctccacattgggtccctgtctctggtgcccacagtgagctccttcttggctgagcaggcwtggagactgtaggtttccagatttcctgaaaaataaaagtttacagcgttatctctccccaacctcactaaatgattggccaagagatttctgtcctaattgcccagaattc

SEQ ID NO: 168825 - DNA, 373 bp, Homo sapiens
ctttcggacgtgattcacacctggcacaacatcccagagttcacactggagagaaaccttacaagtgtaatgagtgtgtcaaagcctttagtgggcagtcaacacttattcaccatcaggcaatccgtagtgtagggaaacttgactaacgtaatgattctcacaacgtcttcagtaatgctacaaccattgtaaatcactggagaagccataatgaagagagatcttacaaatgtaataattgtggcaaatttttcagacatygttcatacattgccgttcattggcgaactcatgctggagagaaatcttacaatgtcatgattgtggcaaggtcttcagtcaagcttcatcttttgcaaaacaggagaat

SEQ ID NO: 168826 - DNA, 521 bp, Homo sapiens
gaaactctatccatttattcatcaaacgttaaccgagtatctgctacgttttaggtactgtaacagtgtttgggaatactgagatgagtaagatagtgttcttgccgttaaaagttcattctagtaggaagacatatgtataattaaattacagtataactagagaggaggtgacagtaagagcacatacacagtcagagaagtttgatagtgaggagagtgatgaactttatgtgatagagctaggaaggacctgagataatggaaggctgaattccagcaccacccccgtggaaagcccttctttaatccttagtctggtttagctgtccctcatctatgctgtgatggcaacctattgcagttgtagccttatgtatctgtctatctaaactaagtacaccttgaggacagagayagtttttatatcccttgaatgtagcaaaactctgctacatgcttggtgctcagttaagatataaaaaaatgaatgaataaatgaaggaagaagggcattggag

SEQ ID NO: 168827 - DNA, 591 bp, Homo sapiens
ggggatggcaaattagggaaaaaaatatcctggaatttattgacctaaattcatttacaaccaatcagatcccagaaggctaagggtttaagccaggaaacaaaagggctgagcctcttgaaatgctggtttccactcttcctttgcaacaggaccccccacagtggcaaatacatgtttctttcctgtgaggtaggcagcaccaatgtttgacttcaggttactaaactcactggctttcctatctattcaccctttggaaatctcctcccaggactcaacagaggctgaagacattgtcaycagttgtggatctgggggtgaaggaagtgagatctgagcaggtcaaggatggtctgtggagcaagtggcaaacactggtcatggctcttggcattggggaatgctctagatcccttgagatgcatgcagggccatgaggcactggtccttgtggtaaggtgggacagcctggaggtaaggatggaggagagagagtacatggtgtgcaggagccttcttgggggatgcaggctgcctcctgcagtacacatgggagtttttgcaggcagttcatgtagaaatgaactt

SEQ ID NO: 168828 - DNA, 591 bp, Homo sapiens
ggggatggcaaattagggaaaaaaatatcctggaatttattgacctaaattcatttacaaccaatcagatcccagaaggctaagggtttaagccaggaaacaaaagggctgagcctcttgaaatgctggtttccactcttcctttgcaacaggaccccccacagtggcaaatacatgtttctttcctgtgaggtaggcagcaccaatgtttgacttcaggttactaaactcactggctttcctatctattcaccctttggaaatctcctcccaggactcaacagaggctgaagacattgtcatcagttgtggatctgggggtgaaggaagtgagatctgagcaggtcaaggatggtctgtggarcaagtggcaaacactggtcatggctcttggcattggggaatgctctagatcccttgagatgcatgcagggccatgaggcactggtccttgtggtaaggtgggacagcctggaggtaaggatggaggagagagagtacatggtgtgcaggagccttcttgggggatgcaggctgcctcctgcagtacacatgggagtttttgcaggcagttcatgtagaaatgaactt

SEQ ID NO: 168829 - DNA, 591 bp, Homo sapiens
ggggatggcaaattagggaaaaaaatatcctggaatttattgacctaaattcatttacaaccaatcagatcccagaaggctaagggtttaagccaggaaacaaaagggctgagcctcttgaaatgctggtttccactcttcctttgcaacaggaccccccacagtggcaaatacatgtttctttcctgtgaggtaggcagcaccaatgtttgacttcaggttactaaactcactggctttcctatctattcaccctttggaaatctcctcccaggactcaacagaggctgaagacattgtcatcagttgtggatctgggggtgaaggaagtgagatctgagcaggtcaaggatggtctgtggagcaagtggcaaacactggtcatggctcytggcattggggaatgctctagatcccttgagatgcatgcagggccatgaggcactggtccttgtggtaaggtgggacagcctggaggtaaggatggaggagagagagtacatggtgtgcaggagccttcttgggggatgcaggctgcctcctgcagtacacatgggagtttttgcaggcagttcatgtagaaatgaactt

SEQ ID NO: 168830 - DNA, 591 bp, Homo sapiens
ggggatggcaaattagggaaaaaaatatcctggaatttattgacctaaattcatttacaaccaatcagatcccagaaggctaagggtttaagccaggaaacaaaagggctgagcctcttgaaatgctggtttccactcttcctttgcaacaggaccccccacagtggcaaatacatgtttctttcctgtgaggtaggcagcaccaatgtttgacttcaggttactaaactcactggctttcctatctattcaccctttggaaatctcctcccaggactcaacagaggctgaagacattgtcatcagttgtggatctgggggtgaaggaagtgagatctgagcaggtcaaggatggtctgtggagcaagtggcaaacactggtcatggctcttggcattggggaatgctctagatcccttgagatgcatgcagggccatgaggcactggtccttgtggtaaggtgggacagcctggaggtaaggatggaggagagagagtacatggtgtgcaggagccttcttkggggatgcaggctgcctcctgcagtacacatgggagtttttgcaggcagttcatgtagaaatgaactt

SEQ ID NO: 168831 - DNA, 439 bp, Homo sapiens
ccagatctacgacaacagtttccatttcttcccatctcccaagcagtgagcaacaaaggaaagacattctaagagcccatgaaacgttttttttttttattgaaaccctgttctccagagagagattgaggaggcgatttaagcaaacttattacaaaataaaaatgtatcctcctactccatggcaggaaatgtgagaaagagagacaagcccayaaaaaagcaccaaaaaaaaaaaaaaaagtttgcacaaggactagaacaaaggagagacattaaataattatgtgcagaagaaacaaaaacagcatgagactcaaaaaggatcgttaaaaaaaacaatttacacaatattgccttaggcaggaacttctttgagacattatgcattatatttcaaattttctaattaaaaagattaatcaagctgtgcataata

SEQ ID NO: 168832 - DNA, 439 bp, Homo sapiens
ccagatctacgacaacagtttccatttcttcccatctcccaagcagtgagcaacaaaggaaagacattctaagagcccatgaaacgttttttttttttattgaaaccctgttctccagagagagattgaggaggcgatttaagcaaacttattacaaaataaaaatgtatcctcctactccatggcaggaaatgtgagaaagagagacaagcccacaaaaaagcaccaaaaaaaaaaaaaaaagtttgcacaaggactagaacaaaggagagacattaaataattatgtgcagaagaaacaaaaacagcatgagactcaaaaaggatcgttaaaaaaaacaatttacacaatattgccttaggcaggaacttctttgagayattatgcattatatttcaaattttctaattaaaaagattaatcaagctgtgcataata

SEQ ID NO: 168833 - DNA, 586 bp, Homo sapiens
aaaataaaaaactagagggtattaaatctaggtctagaattgtgattccacttcttgagtgtccctgccaacctgtctttcttggagctaagaattctcttcacrttcagtcatgcatatctgtccatattgtcattgaaacacatattattgtaaaagtatatccagaaaaggtatttttaaggtgcccacattttctatctcctggcagtggaaggactttgacttcagggaaaattttaggacactgggaaggtcaattactcttttaagatcataatatccttacaaaagggtcccatatgaccaaccaagaatcacagtatatgaagcacattcacctagagatgaaaactattcatttctgactcttgtagactcctaagtgttctaaatatgatgtatagctgaaaacaaagtttaaaagctgatttcagaagaaaccattaagcatatcctgaaagaaatcagttgattttacctatttgggaaaacctttcagcacagagaagcgtaaaacagaatggttgtccttttgcaaaaagctcgttttgcaggagtcagaaggagaagcagaaaggcgggt

SEQ ID NO: 168834 - DNA, 448 bp, Homo sapiens
ataaatttttgtagagatgggggtcttcctatgttgcacagsctggtctcgaactcctgggctcaagcaatcttcctgcctcaccctcccaaagtgctgggatttcaggtgtgaggcactgtgcctggcccaagactcctgttgaacaaaatattttgtttctgtaagggcgagagacacctattacccaacacctttatttaggtattaaggattttttttttaacttatttgtcttcttttcctcttgttttcacatgaatttggaatccttatgggagaggagcaacataaacagcccatctgttgggcagagcaggagctcatgcttgaatgactgcttcccaaagaaaccaaaatcctcagcaaactttgaagccaacctcttggcatcagtttattttttccacatcctttgtgtcccatgcggcctacactccagggaggt

SEQ ID NO: 168835 - DNA, 460 bp, Homo sapiens
atgcaaacacatacaaatgtggtaagagactataatataatgattaagggtgtctccttagaattaaacttagtaggtccaaaacctggctcttcatataccagcatgggaccatgtacttcctacatctgcgccttagtttcctcatctataaatggggaagaaaataatgcctacctctggaatcattataaccattaaatgaaatactgagtaaagtgtttgacacamagcaaacatacaatgttagcattatgtgtgtctacttatccattggtgatagaatccacaagatccatttcaattgtacatgctatgcctagagaaaaacacttccaactgagataatctcctaattgcctcttaatattttctctactttaaagagtatttttaaaaaatatttagtttattttgattacaaaagtaagtcatactcaagctgggcatggtggcttgc

SEQ ID NO: 168836 - DNA, 467 bp, Homo sapiens
atgttgcccagatgagtccatcagcagacttgtcactggcagttgttagaattacccagcccactaaagccctttcttgctttgcagtcagggttggagccaagggtgggatggctgtgcccagtgggctacacaaggctggcagccagtgctcagagcctctggcaattagcacagttcctacagttccttaaacaatgctgatggacccttgtctttcattaagctgcctgaaagtcaatctcctgatggatcccagaggaaaaatcaaaaaggagagtttattttcagcagtttaatagcaatcaacttaagaagtacctaaaaaatgatwattaaatatttctccaaggagcaaattaagataaataccctaagagttatttcacatagatctgtttagaaaatgtccgattaggataatataaaccacatttaaggaccaaagggactgttttgcttcactc

SEQ ID NO: 168837 - DNA, 467 bp, Homo sapiens
atgttgcccagatgagtccatcagcagacttgtcactggcagttgttagaattacccagcccactaaagccctttcttgctttgcagtcagggttggagccaagggtgggatggctgtgcccagtgggctacacaaggctggcagccagtgctcagagcctctggcaattagcacagttcctacagttccttaaacaatgctgatggacccttgtctttcattaagctgcctgaaagtcaatctcctgatggatcccagaggaaaaatcaaaaaggagagtttattttcagcagtttaatagcaatcaacttaagaagtacctaaaaaatgattattaaatatttctccaaggagcaaattaagataaataccctaagagttatttcacatagatctgtttagaaaaygtccgattaggataatataaaccacatttaaggaccaaagggactgttttgcttcactc

SEQ ID NO: 168838 - DNA, 636 bp, Homo sapiens
tcagaattcaatgccatgaagaggaaaaatmaaattccctattttgaaagaatacattggtttaaattggaaagcaaattagaggatagggtagaagctaggaaaagggatgatgagaatccaaacaaaggctcatcttccatttgcccctccagatccactctgcactcttctgtgtcctaatctttgcccttgaaggctgagctaaaccaactgcactctgttgttctctagtttccaattagattctgggttcagccaacaggacataggagcaggagactgggtgataggcatgcagtcagctgagtgtaattatttatttggccttattctttccaaagactgtatctcttgataaatagcaccatctctatatgaataatactctggtttctggttactgctctctatctttcaagctgagacaggctaaaggctactctaacatcaatagcccaggggtactgcattgttcctgctggtttccctaaacctttccctttgttaaacttctcaaacttagagactgggagaaccatttgttgttcactgtcaccctgatccatacaaagaccaagataacagggtgatgctaagaaggatctaagagccagaattgactaaatttgctta

SEQ ID NO: 168839 - DNA, 636 bp, Homo sapiens
catacagttagttaatgaggcaggcacattcaggtctctccaactccagaagccaagccaatagagaaacaatctttgttgcccatcctgccccttctcccttccccctaggttgggtgactacaactgtattgtttatatccttccaagatggcactcatcaaaggacactgttgctatctgtttactgtttgttcctcaaggagcttgcttgctagttcagtgttcttgtagaatagatgaggcaatgaatgctcagaacgtgtacagacatgtgatctggtgttatatcagacctctacatagcaaacgcagaaaaagattttactttaagtgtaaacagtttaacagaaagagtctstttgttctatttcttacatgttaggtagataagtcttcataattttacctctggcaacatctttatgtaatattttccagatagtagcatgtacataataaattcccatctggactaatgaaggaatagaagggcaaatgatgattcataataaacctccatgatttctagttgttatcatcatcaattaaattaaaatgtgaattaaataatatatggacaatatttctactatccaagtaatatgcccaggagatctgtcctctgccaatagg

SEQ ID NO: 168840 - DNA, 398 bp, Homo sapiens
acaatgaatagaacctggttatgcaaatgactgcccagtcaattccactatgtcccatggggcccttgggatggggctaaaactaggctctgttcctatcacttaaaagctttgtagaagatgggcacagtggcccatgcctgtaatactgaaagtctgaggcaggcrggtcacttgagcccaggagtttcagaccagcctgggcaacatagcaagaccccatctcagaaaaaaatctttgggaccagcttatccatctttttgtccaatcccagcagctcaatagacaccagatcaagtctacgggtgaggggtaggacggagcctcttttgttgcttggaatgtctgcttcagaaaaagctgaaccagtttactctggtaggcatccaggaattcc

SEQ ID NO: 168841 - DNA, 465 bp, Homo sapiens
gtcaccacagttagtccacaagtggaaaaatttacagcaccatgtcatatgtagttcatcctaaattcacctggcaattggcaaggccatcggtgtaagcttattggttatattcaatgacaaaataaacttttcacatcttcataacaggaggttaattctgcaacatgaagccargtgcctgctgaaggtaggctcccactctcctacagaaatggctgaatagggtgttatctttttggctatttatattttaaagcaatggctctttaactcctttagcactgggctagagcaccctgcttgccctctcctgatggccatgtcctctcttgacgcctactatctgccattgacacacagcccacaacacaaagctcatagctggcagctcacatcttacatgaaccccaattgccacagcagcactccagtgtcacatcagacaatgaagcctgagctgca

SEQ ID NO: 168842 - DNA, 424 bp, Homo sapiens
catcagagaaatgcaaatcaaaaccacaatgagataccatctcacaccagttagaatggcgatcattaaaaagtcaggaaacaacaggtgctggagaggatatggagaaataggaacacttttacactgttggtgggactgtaaactagttcaaccattgtggaagtcagtgtggtgattcctcagggatctagaactagaaataccatttgagagtcacatattttaagtgctgggctaaagatatgttacartatcccctatgggcagggcccaggaaggagagttaaattacctgtgtgctgtgaccagtgatatgtcacaatgccttctatgagaatggcctaggcaggagtttttaattacctttgtgctggtccaaatccccctcaattggcatgacctagagagaatagaaaagtca

SEQ ID NO: 168843 - DNA, 451 bp, Homo sapiens
tcaactaaaattaactgtgagctatgctaaggagctatacttaattcgttcagactttatttggccaggtttttttttatatttcaaagaagaaaatttttttaaaamagtctttatttgcaacaacattgatgaacctggaaaataagccagcaataagccagcacacacacaaaacaatagcaaattatctcacttctatgtagagtattaaaaaattcaaactcactccaggtgtgaagtggcggccttgtgtgtgatctttctgccctccccaagtttgcattttcgacattaaagtctactttttaattaaaagttttaaattggagaataaaaaaaattgatactcataaaagcaaagagtagaatgatgattgcctgaagctggaggtggaggagatgttggtcaaaagtaatgagtctttcctacatctcttaccttaacaaa

SEQ ID NO: 168844 - DNA, 451 bp, Homo sapiens
tcaactaaaattaactgtgagctatgctaaggagctatacttaattcgttcagactttatttggccaggtttttttttatatttcaaagaagaaaatttttttaaaaaagtctttatttgcaacaacattgatgaacctggaaaataagccagcaataagccagcacacacacaaaacaatagcaaattatctcacttctatgtagagtattaaaaaattcaaactcactccaggtgtgaagtggcggccttgtgtgtgatctttctgccctccccaagtttgcattttcracattaaagtctactttttaattaaaagttttaaattggagaataaaaaaaattgatactcataaaagcaaagagtagaatgatgattgcctgaagctggaggtggaggagatgttggtcaaaagtaatgagtctttcctacatctcttaccttaacaaa

SEQ ID NO: 168845 - DNA, 451 bp, Homo sapiens
tcaactaaaattaactgtgagctatgctaaggagctatacttaattcgttcagactttatttggccaggtttttttttatatttcaaagaagaaaatttttttaaaaaagtctttatttgcaacaacattgatgaacctggaaaataagccagcaataagccagcacacacacaaaacaatagcaaattatctcacttctatgtagagtattaaaaaattcaaactcactccaggtgtgaagtggcggccttgtgtgtgatctttctgccctccccaagtttgcattttcgacattaaagtctactttttaattaaaagttttaarttggagaataaaaaaaattgatactcataaaagcaaagagtagaatgatgattgcctgaagctggaggtggaggagatgttggtcaaaagtaatgagtctttcctacatctcttaccttaacaaa

SEQ ID NO: 168846 - DNA, 600 bp, Homo sapiens
aagctttcataaattcaaataatcattttaaatatgtcataggaataaaaccttgtatttttgttttctttgctgaagtagtgactttttgggtaagagaataaaagccaagggctgtaacttgagcatttacttcaatactgaaaaaaaagttagttttattggacacatttctctgtagattttgatataaatatgagatagatagataaacatatacaaacacacagggttatgtaaatatgtctaggtgatgtcaatytgtatttttttctaaaacagccccaaaataaaagtaaatcagaggtcatttttctacacattctctttagaaacagtgaacccaatcagtcaatgagctcagctcaggtgaatccaatcagccaattagctcagtccaggtgactttaataagctagttagctcgactcaggcagatccaattatgcaattgtctaaatagggactgcagattcatcaagtcaggcctaatatagtgaatgcaaatagcatgttgatacagtgagaaacaaagcaatagtctgaaatgctagcctggaaatatagcattacatagctgtactgtcagcttactgtcta

SEQ ID NO: 168847 - DNA, 572 bp, Homo sapiens
gtattctgcacctaacttttaaaatagtcttactcctttgcaataaattactctatgctgcatcttctttgttgtttgtctcttgtttaaatttttttgaagctaagacaactgaggtttcataaaagccattaaacactatcatgctttgttttgtattttttattgtcaaaaattttttctctsatatgtcaatattcacattttaaacacagtcaacactgctaaattgaaaatttaaatgaccacaaaataatttatcataaaagcatgtatatctctcatgtttcaccttcaccacactttctatctattcaactttttaaaaaatttgacggtcaaatacatacatcaaatttaatattttatttaataatatgaattcaattccaaaatgatttatatggaagtatattgttatatttacttttgaccaaatttggctttccaaactaaggtaaaactaaagcatattttcaaagttttaaggaacttaaccttactagcattgagagaagctagctagcatgccttaggtagatagcaagggaagggtttatggagagctccca

SEQ ID NO: 168848 - DNA, 572 bp, Homo sapiens
gtattctgcacctaacttttaaaatagtcttactcctttgcaataaattactctatgctgcatcttctttgttgtttgtctcttgtttaaatttttttgaagctaagacaactgaggtttcataaaagccattaaacactatcatgctttgttttgtattttttattgtcaaaaattttttctctgatatgtcaatattcacattttaaacacagtcaacactgctaaattgaaaatttaaatgaccacaaaataatttatcataaaagcatgtatatctctcatgtttcaccttcaccacactttctatctattcaactttttaaaaaatttgayggtcaaatacatacatcaaatttaatattttatttaataatatgaattcaattccaaaatgatttatatggaagtatattgttatatttacttttgaccaaatttggctttccaaactaaggtaaaactaaagcatattttcaaagttttaaggaacttaaccttactagcattgagagaagctagctagcatgccttaggtagatagcaagggaagggtttatggagagctccca

SEQ ID NO: 168849 - DNA, 493 bp, Homo sapiens
gagtcccatttattttggggtttttttttacaagacatactcacagatgaacattacatagayatatttatacaaccctatgtgttttatatgtttatttacctacatgtcttatatctgtatctaagtctacagagaaaaacatccaagaaactctgaaatttgctttaagcattgtagtctatcttcgagtaataacgcctagattttcttgccttactcaaaaactcacttcttcagccagtaaaagaaatacaatacagatattatattttcatttcccatgggaaaaaaaatcctctacattgatggaagctgtaaagagaatattttagcactttcaaatttgaaggagggattttaagctgagactactttatctctagtcctgtgttcatcagaaaaaaagggtcactttgacctagcaattaatgttttacatggccttattgtatttttatctcctagaagttagaaacaaagaccaaggctt

SEQ ID NO: 168850 - DNA, 568 bp, Homo sapiens
aagctttaaagaaaagttttcagcatttgcacatttgggttagggcttttcagcagaggctagtttatttttggttctgtgttcactagaataaaaagggttatccttgatttagygtgaatgactctcatggccttagtgaattttcatctcccagaagtcagcaacaaggactaatgcttactttgtataagttaaatgcagatggatggacgttatagcacgcctccatttgtgtactactctctagacagagtttataggccagaacattgtatacatctatggaattatctttatatatcactatcagtatcaatacctatcaacccttccaccttctacatctttaatttttatgaataaaaatacaaaataaatatatctggatatagatattcataggtagataaacacacatactgaattatataagtacatctatgtaaatatttaggtgtacacaggatgttcacaaaaagacattttcaataccttagtatataatcaggatgtggatacgaacttactaccctactctatgccacaatacaaacccagaattgta

SEQ ID NO: 168851 - DNA, 555 bp, Homo sapiens
catgaccgaggggacagtggcatttcctgcagtgccgagatcggagttggtgtcacccgagcttcctgctgttgctccctgggccgggcttggggcaatccctgtgagctgtgccctatggccaacaccagtgagtccctgcggggcagttgaacaccgtgacctaagccaccgaggcccgggagcttagggggtcacctctgctaatggcggtggtggggggcttaggcgacaggaaaaccaagaactgggggaggagaggggctcatcctgggtcacacagtgtacgtcttggtagttcattggctgggcctctctccaaggtcgctttctgtaaattctctgtgtwtatagtcacttgatcactcagtcagtcaacaaatattgagagttcctctgtgtcatgtgctggggactggggactcagagaaggatgagccacagcctctgcacgctgcttctccctcacccttaaatcaacagtttcaggactgtgagagtagaactgtcctaagggttttctttgaggcatacccatagctcaggagaaagctg

SEQ ID NO: 168852 - DNA, 622 bp, Homo sapiens
ttcctatggttctcagttacattccagatagattgtatttttcatttaaatcatgcacagtaaaagggggcccttgattacttagaggctgattgtccagtctgcagcttctttttggtgacatgggttatctaaaatagcaccttattaattctaccaattgaggaaagatgtgaaaaagtcaaactatatgatagaagaagaggaggcagtttgttacattttcatactagaaccaatggctattaccagaacctctgtatataacttattcatctaaaaaaaataggtcccatgtgattattaawgtgctaggcactggactaaatactgggtattcaatggtaggtgaaactgctaaagtctctatcttcatggagcctacctacctcctagtgtgggagataggtcttatttaaatagtcataagtttgatttacacatgattatataagatgactgtagaaagtgctatgatagaaaaacaaggtattaaatgagagctcattgttagagggtctggctcatgctgggcaagtggaggccagagaatgctccccagaggaaatatttgagctgagttctaaaggacaagtaggcattaactaggagggttctgcct

SEQ ID NO: 168853 - DNA, 327 bp, Homo sapiens
ccacctctgcgacagcactcctttcaagggggcaccagctgcagggagtctgtcccttacagacccgtgaccccgtgacagatgaataaagtacagacacacagatattctgctctgccagtccagctgagtgttccagccgcttataggctccctgctgagtcctgtaaacagttgctacttggccctgatcagctagtcagacgygcatttattcagtatgattaattaacaaaagcttgagtcaacaccattagagtgtaacagacattgtggacttaccgggtaaaaagcatttaagcacccagggtcttaagattatatgag

SEQ ID NO: 168854 - DNA, 312 bp, Homo sapiens
gaattctggcacagcttgggcaatgtagtgagaccccatctgtacaaaaagtcaaaaattagcttggtgtagtggtgtgcacctgcagtcctagctactcgggaggctgakggaggaggatcgattaagcccaggaacttgaggttgaagtgagctctgattgtgccactgcactcagccaaggtgacaaaaaaggccctgtctccaaaaaagaaaaaaaataagggctttgctttattatataatttttttagagtacattcatcagtcttataatctgtgctttcattttagtgtctatttacttttatt

SEQ ID NO: 168855 - DNA, 312 bp, Homo sapiens
gaattctggcacagcttgggcaatgtagtgagaccccatctgtacaaaaagtcaaaaattagcttggtgtagtggtgtgcacctgcagtcctagctactcgggaggctgatggaggargatcgattaagcccaggaacttgaggttgaagtgagctctgattgtgccactgcactcagccaaggtgacaaaaaaggccctgtctccaaaaaagaaaaaaaataagggctttgctttattatataatttttttagagtacattcatcagtcttataatctgtgctttcattttagtgtctatttacttttatt

SEQ ID NO: 168856 - DNA, 312 bp, Homo sapiens
gaattctggcacagcttgggcaatgtagtgagaccccatctgtacaaaaagtcaaaaattagcttggtgtagtggtgtgcacctgcagtcctagctactcgggaggctgatggaggaggatcgattaagcccaggaacttgaggttgaagtgagctctgattgtgccactgcactcagccaaggtgacaaaaaaggccctgtctccaaaaaagaaaaaaaataagggctttgctttattatataatttttttagagtacattcatcagtcttataatctrtgctttcattttagtgtctatttacttttatt

SEQ ID NO: 168857 - DNA, 458 bp, Homo sapiens
tcaagtaatcctcctgccttgccctcccaaagttstgggattacaggtgtgagcaatcatgcctggcctcctttaattttttttttttttttttttttttttttttgagacggagtctcgctcttttgcccaggctggagtgcagtggcacaattgtatttttagtagagacggggtttcaccatgttagccaggatggtctcgatctcctgacctcgtgatctgcctgccttggcctcccaaagtgctgggattacaggcgtgagccaccgcgcccggccggcctcctttaatttcttaaccataaatatcctccccccacttttattatggacgttctgaagcacataaaaatagggagcatagtataataaatttgtacatatttaacactcagcttctataattagaaacaaatggcccatctggtttcatctaggcctctttgctatcctttc

SEQ ID NO: 168858 - DNA, 574 bp, Homo sapiens
aagcagctttgagtctggaaaatttgtcgaatgtaccgagcaattagaattgttaccaggagaaaatatcaatctacttgctggaggatcaaaagaaaaaataggtaggtatttgagaaaatagttttaaagttattttagtggacaagttgctcaaaatgtttggcttagtatattttactggaaaatctggaagttattttacatttttgkgggggcagaatgccatgtgaagcaacaaatttagggctgccctatttatgtttgatttgggaaatgaaaagcacttaaaattaagtcaaataaaaaaaatgaccaccttaatactttgagatttatctagccattttgtttgataaaggacaaagtagtgtttcagctaaatatttttcttgattttcatcttgatgtggctcgttaattaagttctttatcacaaatggaacacttgataagatgttattaaaaagtttaatgagtattctggattgagcaagatttgctaatgcaggtctagatttgtccccttaaatagtagattgacttaccgattttcttttttgttgagacagag

SEQ ID NO: 168859 - DNA, 574 bp, Homo sapiens
aagcagctttgagtctggaaaatttgtcgaatgtaccgagcaattagaattgttaccaggagaaaatatcaatctacttgctggaggatcaaaagaaaaaataggtaggtatttgagaaaatagttttaaagttattttagtggacaagttgctcaaaatgtttggcttagtatattttactggaaaatctggaagttattttacatttttgggggggcagaatsccatgtgaagcaacaaatttagggctgccctatttatgtttgatttgggaaatgaaaagcacttaaaattaagtcaaataaaaaaaatgaccaccttaatactttgagatttatctagccattttgtttgataaaggacaaagtagtgtttcagctaaatatttttcttgattttcatcttgatgtggctcgttaattaagttctttatcacaaatggaacacttgataagatgttattaaaaagtttaatgagtattctggattgagcaagatttgctaatgcaggtctagatttgtccccttaaatagtagattgacttaccgattttcttttttgttgagacagag

SEQ ID NO: 168860 - DNA, 399 bp, Homo sapiens
ttgctgaattccagaaggaactactgagatgcaaagaagcacagcagcttttgcacacatgcgtgggattagatggaaaacaagtggattgagggtctgccaatgaaagcgacccatactgaagtccactggctctggttgagacccagaagagtcatgcatcagaataaaggtggacaggaaataccctggcctttgtagggactgagcctgcaccgacgacttcaattgcagcctgtatggaggacccctgaccatcccccagaagtagactcccatctcttctgcagcaagataacatgctactaggcctcaattcattgctaaayattttttaacaagtatctcacatttaacaaaaaagatcagtcatatggcagcaaatacaatgtcatatga

SEQ ID NO: 168861 - DNA, 369 bp, Homo sapiens
gatagggggaaaccgccttagggctggaggtgggacatgcgggcaacaatactgctctgtaaggcattgagatgtttatgtgtatgcatatctaaagcacagcacttaattmtttaccttgtctatgatgcagagacctttgttcacgtgtttatctgctgaccttctctccactattatcctatgaccctgccacatccccctcaccgagaaacacccaagaatgatcaataaatactaagggaactcagaggctggcgggatcctccgtatgctgaacactggtaccctgggccccattatttctttctctatactttgtgtatttttctttcctaagtctctcgttccacctaacgaaaaacaccc

SEQ ID NO: 168862 - DNA, 517 bp, Homo sapiens
tgcctatttaaggggatcacatgaatttctatgtttattgattttttttggttaattgtgaccatttctattccttccttgatttaaatgtaggttctgcattcttcccagtgaattctatttttcttaattggcttatccaattcattatctgtagaaacttcctaaaactggctgtcagtgttatagttccactacctgacttyataacaactactaagctacagtacaaagactgccatttatgttctaacatttttagattttccaaattctgaactggtgttttgcaggaatgctccactttgtccaataaggaatcttgttttgtgaggagtagatgagttaatatatgtagagtatgtaagacagtgcctgatgtgtagtgggcactcaatacatgttagctattatcatttattgaatatctgctatatttgacagactatatgaagtattttacatgcaaatttctcatttaatatgcatcaatctacaacagacactatttcactta

SEQ ID NO: 168863 - DNA, 544 bp, Homo sapiens
taagtatatataagaaactgggctgggcgcagtagttcatgcctgtaatcccggcactttgggaggctaaggcaggcggatcgcttgagcccaggggttcaagaccaacctgggcaacatggcaaaccctgtctctactaaaaatacaaaaattagctaggcatggtggtacacacctgtaaaaactttatttaaaaaaaaagaaactgggctgggtgcggtggctcaygcctgtaatcccagcactttgggaggccgaggtgggtggatcacgaggtcaggagttcgagaccagcctgaccaacatggtgaaaccccgtctctactaaaaatacaaaaattagccgggtgtggtggcgtgtgcctgtaatcccagctacccgggaagctgaggcaggagaatggcttgaaactggaaggcggaggttgcagtgagccaagatcacgccactgcactccagcctgggcaacaagagtgaaactcttgtcgcaaaaaaaagaaagaaactgtccaaagtggctatattgtttggcattcccacta

SEQ ID NO: 168864 - DNA, 410 bp, Homo sapiens
gggcgtggtcagccagccttgcctcctggggcatcagctcccagcttgtgctgcaccctctgaccacaactttgtggggcgcctgctgtgtgcagaatctaccccgaaacctatagcttaggagaagcctgggtaagctgctaatggctggtagtatgggtgtccaaggacctgttggaggagcccagtccagccctacatgtgtgaccctyggtgcctggcaggcgggggggtagggagcagccctcgcacagccagctagactgttttgctctggggcctgaggacttgcggggccagggaagcaaccaggcccagtctggggcccctgtgaagcgatctgcctgcccagggtcagggggatgggggggtcgccctcacctcggctaacctcccagcggaacaagggc

SEQ ID NO: 168865 - DNA, 547 bp, Homo sapiens
tgagtgcactttaggtgttatattcccaagtattttatttttttagatgttattataaatgaaatttttttwaaatttttattttcagattgttcattgctggagtatggaactaattgatttttgtatataatcgttcatcctgcaattttgctgcatccatttattacctctaatagtttttttgtgtgtgtgtgtgtattccttagggttttctttacacaagattatgtcatctccaaatagagatcattttacttctttctttctaatctggatgacttttattctttttgcttgccaaattgctctggctagaacctcccacacagtgttgaatagatgtggaaagagtgaacagccttatctttttcctaatcttatggggaaagaatccagtcttttaccactatgtatgatgcttcccactgaggaagttctcttatattactaattcgttgagtgtttttttaattataaacgggtattggattctgtcaaatgatttgtctgcatttattgagatgatcatgtgtattttgtgtcc

SEQ ID NO: 168866 - DNA, 547 bp, Homo sapiens
tgagtgcactttaggtgttatattcccaagtattttatttttttagatgttattataaatgaaatttttttaaaatttttattttcagattgttcattgctggagtatggaactaattgatttttgtatataatcgttcatcctgcaattttgctgcatccatttattacctctaatagtttttttktgtgtgtgtgtgtattccttagggttttctttacacaagattatgtcatctccaaatagagatcattttacttctttctttctaatctggatgacttttattctttttgcttgccaaattgctctggctagaacctcccacacagtgttgaatagatgtggaaagagtgaacagccttatctttttcctaatcttatggggaaagaatccagtcttttaccactatgtatgatgcttcccactgaggaagttctcttatattactaattcgttgagtgtttttttaattataaacgggtattggattctgtcaaatgatttgtctgcatttattgagatgatcatgtgtattttgtgtcc

SEQ ID NO: 168867 - DNA, 427 bp, Homo sapiens
tctatgctttagtattccatccaacaaaattaatactagaattttcttacatgttattaatggctagcaagatttttatctacagtgttttgcatttatgctacctgatgttcatatttgatatagtattaagttactacaattagttaaaggaaggaggtttgagaagtatttaggcatgagcaacagacaattaaaaatgctaacactttgaacatgagaattaagtattaatgagacagaaaagcccatagcagattactcatctgagtmactgctggttgactcaacaccaagctatagttccttaatctcctatctgtaaaatatgaataacagcaccaaacacctacattggttagaaaaaatgaaactaatactttgatcttctttcaagaagtgagctgcctaattagctgagtttctt

SEQ ID NO: 168868 - DNA, 541 bp, Homo sapiens
gaagaaatacaaagtccttgaataacaattagttaacagaaacctcagtgtagcccagtaagcttgtcagctccactctccctctgttctaatctctgccctgccccgctcaggctggtattagtcaggcatgcagctgcacagagcaggggttgcggtgggcggctgttttctttctaacatctcgcctcttcactcaccattttttctaacctgctctagggtcaggcttagaggagagggatagaataggacagtgagactccagcgtgtgtgtgygtgtgtgtgtatgtacctacatgttgtgccaactacgtgtgtctgtgtgtgtgtgtgtacatgttatgccaactatctccctgtccccatctggccccagaaactcctcctttgaccctgggctggctattgatgaccactcccaccttcatgggggtcctgttacctctccaagtggtccttttgggcacagttgttttcaacaaccttaggttggttccctcctgcaggagccctatccaagctccaggacacacacagt

SEQ ID NO: 168869 - DNA, 350 bp, Homo sapiens
tgtctcaggagtagactggtggctcacctgcctcaataccactggctccaagggtaaggacagctccactcccaccagctgtggactgctgccactctgggctccataaccagwggtacaaagaacaaagaacactcacaacatgcttcaaagtcctggcagaagaagatctgtcagaacgaacagtgcacaagcccagtgaagtgcagctgctccaagagacaaatgaaaactcaagcagaacatcacatgagccctacagcaactcagggcagacttaaaagatttctcacatattaaaacaatgtcttcccaactattgcaggtgagtccctgttgagatgtgaatt

SEQ ID NO: 168870 - DNA, 579 bp, Homo sapiens
ttgttctctctcttccctgttggccaagtcygagctgtgtcctggtgtccctatctcctcttgattggcagaagcacatcatgtaaacccactgccctaaccagtgattggtttaagaagagacatgggacccaaatctgtgcaatgagggctaaatctgtccagcgtaagggccagtctcccagcagggcttctaaaatagggagaggctcgaccctgtcatttcccttgatttaggtggtgaaaccataatgcctggagctgctgcagggaggagccagctggtgtgctgaggcaggcacaatgaatagagagaaaagacttgggtccctgatagcttcattgggcaaccgtgggcctgcttaatttccagacttcttgatatatgtgttcataatttccggtatggtttaagcccttctgaattgggttttctgttacttgcagccagtggctccttgacacaaaagctctgttccagctcctctcccccttggtgctttccctgatcatgccagttgtccacagaacagcctcctccccagcactcctctcccctccccagtggatatgcctgga

SEQ ID NO: 168871 - DNA, 486 bp, Homo sapiens
gtgctgaggcaggcacaatgaatagagagaaaagacttgggtccctgatagcttcattgggcaaccgtgggcctgcttaatttccagacttcttgatatatgtgttcataatttccggtatggtttaagcccttctgaattgggttttctgttacttgcagccagtggctccttgacacaaaagctctgttccagctcctctcccccttggtgctttccctgatcatgccagttgtccacagaacagcctcctccccagcactcctctcccctccccagtggatatgcctggattgtctgtcratgccaggaaagtgcgatggttttcattctagattgggttctgcagcactgtgttgagatggtgaggccatgctggggctctgaaggaaacggtgtcgtagcagcacctgccatgaacttcggaggagccatatgcagcttcgagaatccaaacaaaactcctgacttcactgcccaaacttg

SEQ ID NO: 168872 - DNA, 588 bp, Homo sapiens
accatacagacaagcacattccagggaatggtgtctgcatgagcctgcctctaaccactcccgagccctccacacactgagctgagaccaatgagaggacacttccctggaggctgctgaggtggctttcagacacacctgaggaagagatcccatctccattgtaagattacactggggctggctgtgtccccaccctaaatccagggtgtgttatgtgaagcctcctgcttcttcattttccagaccacctacccaatcaactcctgtggccccagaaaacaactgcaagttgttcttctgactcaaaagcctgacctatraacatctttgtggagacaggactccctgttgaagggctcaaggatagttgctgagacctgcaccccctaccccaaggcaatgctatagcctctgcccagcaaccaggcctaagagaagccatgtgctgtctctatctttagtgaataactggcagtcctattcatccagcttgggaaagacaaccatagctgaggctccagtgataacaatgacatttataaggatctagcgtgtggattatgtgaagtggttgccatatttgtc

SEQ ID NO: 168873 - DNA, 595 bp, Homo sapiens
tcacataaagcataagccacactgcccaggtaatggtgtcatcctgttttgggacttgtacatcctcattctcctcatctcttcctgtctttgggtcctggctatatgacatacccacagggtggggattaaccagataagaaatgctgaacaaagcctcagctgtctcctgacagggacagacacccagggcaccaactccacagacccgggctgagaggttgcagactgacagagcacaacggggcacascctccctttctgtctctgggcctcagttccccatctgagaaatgcaagggctggatggtctctatgagccttttcagttttaaaccacacatgactctggacatgcctgaactcagtttccaggaagaggaaagcaaagacacaaagaatgaagaaaccttatcgcgagtcaatggaaatcctggagtctggacccctatattagagaagatgctcagaaacccagtcactgaaacatgaaccagaaaaggggcccttagctatgtgacatcaaagtcttgtgggctgagtctcagtggtccgtttcacataccacaccagaacacaggtttatatacaacaa

SEQ ID NO: 168874 - DNA, 616 bp, Homo sapiens
tcattctcctcatctcttcctgtctttgggtcctggctatatgacatacccacagggtggggattaaccagataagaaatgctgaacaaagcctcagctgtctcctgacagggacagacacccagggcaccaactccacagacccgggctgagaggttgcagactgacagagcacaacggggcacaccctccctttctgtctctgggcctcagttccccatctgagaaatscaagggctggatggtctctatgagccttttcagttttaaaccacacatgactctggacatgcctgaactcagtttccaggaagaggaaagcaaagacacaaagaatgaagaaaccttatcgcgagtcaatggaaatcctggagtctggacccctatattagagaagatgctcagaaacccagtcactgaaacatgaaccagaaaaggggcccttagctatgtgacatcaaagtcttgtgggctgagtctcagtggtccgtttcacataccacaccagaacacaggtttatatacaacaaaccataaaggctattccaatagcttcagggatatttcatactctctgtctctccccacccacgctctgattatggatgaagggcag

SEQ ID NO: 168875 - DNA, 547 bp, Homo sapiens
caagtaaattaaacagttaaatagaaaataaaataaatctccaaagctttttaaagaggcgggaaatagagggtagcctttgagcttcaagataaggaaagacttcttcttaaataggacacacacaaaaaaaacactaaccaaaaagagggagactgaaagaatgactacattaaaaaagagaaatatctgtttagcayaaaacaccattaacaaagtgaaaagacaagccagggaatgggaggtaatatttgcaatgaaaacaaaaaacaaaaaaacaaaaaagactagtatttacaacacataaagaacacctacaaattaatgagaaaattacaacctaatttaaaaagtggcaaaagaacaggtacctcacaaaagaggaaatccaaatgtccaataaatataggaaaagctgttcaacctctttagcaatctagactatgtaaagtaaaaccacaatgagatctactacttgcctattggtttggtaaaattgaaaaaattggacagtaccaaatattggcagcaagaatttataataaca

SEQ ID NO: 168876 - DNA, 591 bp, Homo sapiens
tttatacgtccacatttagaggtaactggtactcccaattcatgggggtttctgcttaggaatccatttgcctctctagcaacctctcctaaaagcacctataccctttctccataccacttagttagttacaaattatgcatctgcatcttccaaaaatgtatrgatatttattagaccctctctactattcttggctttgcaaatttatgctttctgccatattaacagaaagtctcaagtgaactatttaaggcaatataagccacttcaaagatattctccatttatgctggctaataggccatacacccagtttgtactcttcggccaagaagggatagctcagtgaaaaaaaatttgagacatactgactaaataaccagaatctctgatattaaaaaatgaatgaaatacgattatcacaataaaatgtccttttttctttgtcaatcaggaaaattttattttatttgactttctctctccccctcattataggcttcaaaactcattatatccatatcttgatatgttttcccaaaacttcctttacagctctctctctaaataacatatttctccttctag

SEQ ID NO: 168877 - DNA, 591 bp, Homo sapiens
tttatacgtccacatttagaggtaactggtactcccaattcatgggggtttctgcttaggaatccatttgcctctctagcaacctctcctaaaagcacctataccctttctccataccacttagttagttacaaattatgcatctgcatcttccaaaaatgtatggatatttattagaccctctctactattcttggctttgcaaatttatgctttctgccatattaacagaaagtctcamgtgaactatttaaggcaatataagccacttcaaagatattctccatttatgctggctaataggccatacacccagtttgtactcttcggccaagaagggatagctcagtgaaaaaaaatttgagacatactgactaaataaccagaatctctgatattaaaaaatgaatgaaatacgattatcacaataaaatgtccttttttctttgtcaatcaggaaaattttattttatttgactttctctctccccctcattataggcttcaaaactcattatatccatatcttgatatgttttcccaaaacttcctttacagctctctctctaaataacatatttctccttctag

SEQ ID NO: 168878 - DNA, 591 bp, Homo sapiens
tttatacgtccacatttagaggtaactggtactcccaattcatgggggtttctgcttaggaatccatttgcctctctagcaacctctcctaaaagcacctataccctttctccataccacttagttagttacaaattatgcatctgcatcttccaaaaatgtatggatatttattagaccctctctactattcttggctttgcaaatttatgctttctgccatattaacagaaagtctcaartgaactatttaaggcaatataagccacttcaaagatattctccatttatgctggctaataggccatacacccagtttgtactcttcggccaagaagggatagctcagtgaaaaaaaatttgagacatactgactaaataaccagaatctctgatattaaaaaatgaatgaaatacgattatcacaataaaatgtccttttttctttgtcaatcaggaaaattttattttatttgactttctctctccccctcattataggcttcaaaactcattatatccatatcttgatatgttttcccaaaacttcctttacagctctctctctaaataacatatttctccttctag

SEQ ID NO: 168879 - DNA, 591 bp, Homo sapiens
tttatacgtccacatttagaggtaactggtactcccaattcatgggggtttctgcttaggaatccatttgcctctctagcaacctctcctaaaagcacctataccctttctccataccacttagttagttacaaattatgcatctgcatcttccaaaaatgtatggatatttattagaccctctctactattcttggctttgcaaatttatgctttctgccatattaacagaaagtctcaagtgaactatttaaggcaatataagccacttcaaagatattctccatttatgctggctaataggccatacacccagtttgtactcttcggccaagaagggatagctcagtgaaaaaaaatttgagacatactgactaaataaccagaatctctgatattaaaaaatgaatgaaatacgattatcacaataaaatgtccttttttctttgtcaatcaggaaaattttattttatttgactttctctctccccctcattataggcttcaaaactcattatatccatatcttgatatgttttcccaaaacttcctttacagctctctcyctaaataacatatttctccttctag

SEQ ID NO: 168880 - DNA, 606 bp, Homo sapiens
gtaactaataagtcacactagtataggctagtctacaatgaatcttcaagtgctggaattaagtccactgaggacagcgttcaagattcaatcaatatacatttattttatacctattatacaactgtttccaatttcacatcatgtaataccacataaaatcaatgcctgcacataccttttacgctagtaaatactatatgcagttgactggtatgyatgtagcaattagtagttttgtatatgatttgctcaaatgtaagaactaagaacattcttcctaacagtgacaacttttcccctttagaaatacatcaaagttcctcctcaaagaatctgatgagtagtcctccaaggaagtctgaccaagaatcatatacactcatgatatgagtgtatttctagtaagcaagactacaacaaactttgctttgagtaatttaaatttaaaaccaagaaacaaacttaattttccaaatgtgattattacaatattagatatgcttgttgaaacaatatccttcctctttctcctgccccagccccaggactaagaatttttgtattaaagaataagtagaggagtaaagaatttccagacaaggt

SEQ ID NO: 168881 - DNA, 620 bp, Homo sapiens
atacaactgtttccaatttcacatcatgtaataccacataaaatcaatgcctgcacataccttttacgctagtaaatactatatgcagttgactggtatgcatgtagcaattagtagttttgtatatgatttgctcaaatgtaagaactaagaacattcttcctaacagtgacaacttttcccctttagaaatacatcaaagttcctcctcaaagaatctgatgagtagtcctccaargaagtctgaccaagaatcatatacactcatgatatgagtgtatttctagtaagcaagactacaacaaactttgctttgagtaatttaaatttaaaaccaagaaacaaacttaattttccaaatgtgattattacaatattagatatgcttgttgaaacaatatccttcctctttctcctgccccagccccaggactaagaatttttgtattaaagaataagtagaggagtaaagaatttccagacaaggtaaaaacagcagcaagaacactgaatagaaaaatagtgtgatttctgcagagaaactaaaagccataccagtgtagttggatataaaagaataagactgcgaatgataagagatgacagtgggatgaaggcgc

SEQ ID NO: 168882 - DNA, 524 bp, Homo sapiens
accagttctattaaattgaagatcctgaagacaggctttcagagaaatcacagcacttgaaaagtgaggaagacaattttagaaaggaagaagcagaggagagaagctctaaatyctatggataaactgttcaaatctcttgctaaactctaaatgaagtatatttgagacagactccaagtaacagtgctaaggttaaaagaactgacctgaaatttcagctaacacctaccacataggaaacaaagtttgaagttgaaatacagccaagttaactgactcagaaaacagactcctccttacctcaaaaaaccaatactcctcagatgagtctaagagaatctcctctctacatcattcacaatgttcagtattaaatctaaaagttgtcaacaagtagagaaataacacactgaagaaaagccacagtcaatggaaactgacataagtttatctagatgtttaaattagcagacaaggatttttaattagctattatcactgtaattaaggattaaaaataa

SEQ ID NO: 168883 - DNA, 524 bp, Homo sapiens
accagttctattaaattgaagatcctgaagacaggctttcagagaaatcacagcacttgaaaagtgaggaagacaattttagaaaggaagaagcagaggagagaagctctaaatcctatggataaactgttcaaatctcttgctaaactctaaatgaagtatatttgagacagactccaagtaacagtgctaaggttaaaagaactgacctgaaatttcagctaacacctaccacataggaaacaaagtttgaagttgaaatacagccaagttaactgackcagaaaacagactcctccttacctcaaaaaaccaatactcctcagatgagtctaagagaatctcctctctacatcattcacaatgttcagtattaaatctaaaagttgtcaacaagtagagaaataacacactgaagaaaagccacagtcaatggaaactgacataagtttatctagatgtttaaattagcagacaaggatttttaattagctattatcactgtaattaaggattaaaaataa

SEQ ID NO: 168884 - DNA, 524 bp, Homo sapiens
accagttctattaaattgaagatcctgaagacaggctttcagagaaatcacagcacttgaaaagtgaggaagacaattttagaaaggaagaagcagaggagagaagctctaaatcctatggataaactgttcaaatctcttgctaaactctaaatgaagtatatttgagacagactccaagtaacagtgctaaggttaaaagaactgacctgaaatttcagctaacacctaccacataggaaacaaagtttgaagttgaaatacagccaagttaactgactcagaaaacagactcctccttacctcaaaaaaccaatactcctcagatgagtctaagagaatctcctctctacatcattcacaatgttcagtattaaatctaaaagttgtcaacaagtagagaaataacacactgaagaaaagcyacagtcaatggaaactgacataagtttatctagatgtttaaattagcagacaaggatttttaattagctattatcactgtaattaaggattaaaaataa

SEQ ID NO: 168885 - DNA, 524 bp, Homo sapiens
accagttctattaaattgaagatcctgaagacaggctttcagagaaatcacagcacttgaaaagtgaggaagacaattttagaaaggaagaagcagaggagagaagctctaaatcctatggataaactgttcaaatctcttgctaaactctaaatgaagtatatttgagacagactccaagtaacagtgctaaggttaaaagaactgacctgaaatttcagctaacacctaccacataggaaacaaagtttgaagttgaaatacagccaagttaactgactcagaaaacagactcctccttacctcaaaaaaccaatactcctcagatgagtctaagagaatctcctctctacatcattcacaatgttcagtattaaatctaaaagttgtcaacaagtagagaaataacacactgaagaaaagccacagtcaatggaaactgacataagtttatctagatgtttaaattagcagacaaggatttttarttagctattatcactgtaattaaggattaaaaataa

SEQ ID NO: 168886 - DNA, 369 bp, Homo sapiens
atatgagtataagacaggttatttatccattccactagtggtaggcatctgggtactttctagattttgactattacaaatactgctggcagaaacactctagcaaatacatatgcatttctgttgagtatatacctaagagtaaaattgttggatcagaggatatggatatattcaattttggtgctacacagcaaatatttttctaaaagsgttgtaccagtttacaattgatagtatgagaattctgattactgcacattcttgcaaacattttccatggttttcatgttagccaattttttacttcatacaataaagaagaaaataaaattaggggtacacaatgtaatactgaaagttagagtt

SEQ ID NO: 168887 - DNA, 633 bp, Homo sapiens
tgtaaaattgattttgtgagcttcattaaaagatgcttataccgtagaagctaataaacaaaactagagaaataacataaaaattataaatatgcaaagagaaaacattataaaaagtcagaatcaggaacaaagcacaaacttccaacatgaaaacattacaactattatttaatcacatagcatgaatctctcattagatgatcctttaaaaaaacattataaagtaatccttatagccccatcaattaggcatgtaaaatttttaaatatatttaagtttgtaggtttgatacgataatcacwgaaaaaataatttttaaatattccatttagtcaaaattttctcctacaataaggtcctttgcctagatgtgcttaattctgaaatgctttatccatttgtgaatattttcttttagatcaattagtcaatacatttaatgtgcagtaaattactcacatgctctgtaatccttaaatttgaaaattactggaaaatctgttactgtttttctatgccaatcattgaaaaagacatatagttcaaggcttacataattctaattggctcaaaacccacaattttgggggtggggtgcatgggagggtgtaggaactacttgtggcata

SEQ ID NO: 168888 - DNA, 378 bp, Homo sapiens
agcctctctctgctgcagtccaggagtaatcctgtctaggtagagaactaccagaagactagccagtctgagcaactgggacaggcttgccagcctccaccatcccacaacagatcctcagcagaktttgacaacaggcaggcacttgttctgacataggagggagtttaaccagagtggtccctagcctcaaagcctactttcctaccccactgatcatttctaataagcatttctattgaacataaaaattggtccatccaccccaatccacttaacctcaaggaccctcctgcaaccctgtccaactgctgaactcaaataaaggaatacaccctgtggccaaggctgatcagaggaaatttctgtgtccattca

SEQ ID NO: 168889 - DNA, 378 bp, Homo sapiens
agcctctctctgctgcagtccaggagtaatcctgtctaggtagagaactaccagaagactagccagtctgagcaactgggacaggcttgccagcctccaccatcccacaacagatcctcagcagattttgacaacaggcaggcacttgttctgacataggagggagtttaaccagagtggtccctagcctcaaagcctactttcctaccccactgatcatttctaataascatttctattgaacataaaaattggtccatccaccccaatccacttaacctcaaggaccctcctgcaaccctgtccaactgctgaactcaaataaaggaatacaccctgtggccaaggctgatcagaggaaatttctgtgtccattca

SEQ ID NO: 168890 - DNA, 518 bp, Homo sapiens
atctgcccttggcttctggatgcttctagtcaccagaccgtaagtgcaattagatctttctgctttttctctcargtttgtcaaccagctttatattatctccttatcttgctgactgggacaacacatctttcaagtactttgtatatccaatcatatccttcatttttaaggcttgatagtagatgtatttttaactgacaatactatatgtacatgaattttcactttttaatccttttcttttacttctaaagaatatgttttcttcttcaaacagccagtagttaaagccgagagagaaaggatggcatagataaggccagagaggtaaaggagaccacatcatggtgagccttaaggattatattaaggatgctggacttttgccaaatggcctttggtactataatacatttggaagcaaatataattattctcattttaaaatatttttattttagtttttataactagactttttttaagaataatttagaaaatttgggaagacaata

SEQ ID NO: 168891 - DNA, 518 bp, Homo sapiens
atctgcccttggcttctggatgcttctagtcaccagaccgtaagtgcaattagatctttctgctttttctctcaggtttgtcaaccagctttatattatctccttatcttgctgactgggacaacacatctttcaagtactttgtatatccaatcatatccttcatttttaaggcttgatagtagatgtatttttaactgacaatactatatgtacatgaattttcactttttaatccttttcttttacttctaaagaatatgttttcttcttcaaacagccagtagttaaagccgagagagaaaggatggcatagataaggccagagaggtaaaggagaccacatcatggtgagccttaargattatattaaggatgctggacttttgccaaatggcctttggtactataatacatttggaagcaaatataattattctcattttaaaatatttttattttagtttttataactagactttttttaagaataatttagaaaatttgggaagacaata

SEQ ID NO: 168892 - DNA, 518 bp, Homo sapiens
atctgcccttggcttctggatgcttctagtcaccagaccgtaagtgcaattagatctttctgctttttctctcaggtttgtcaaccagctttatattatctccttatcttgctgactgggacaacacatctttcaagtactttgtatatccaatcatatccttcatttttaaggcttgatagtagatgtatttttaactgacaatactatatgtacatgaattttcactttttaatccttttcttttacttctaaagaatatgttttcttcttcaaacagccagtagttaaagccgagagagaaaggatggcatagataaggccagagaggtaaaggagaccacatcatggtgagccttaaggattatattaargatgctggacttttgccaaatggcctttggtactataatacatttggaagcaaatataattattctcattttaaaatatttttattttagtttttataactagactttttttaagaataatttagaaaatttgggaagacaata

SEQ ID NO: 168893 - DNA, 450 bp, Homo sapiens
taggctttaaaagctcttgtttctgaaagaaggaatgatttccaagttaggtcctctttgtgaacagacttctctgttcagttgggacccaggggccattatgcttcctgggcagcatgttctccctgccgaagctcaggatttggctgtttaactcctgttaacaggtaatccaccctccaatgagggatgacaacctcatactgcttgttagtacatagacgaaagggagcagatttttaaaaagatgttatatcctcaatttgggatagagcaagctgaacctayataattttaaaatgtcccccagaatgcctaacatctgacaaaaaaacagaacacttgttcttccttagcagtctgttaagacattaaaaaaggcttgccaagtgacaagcagcatatgcacacatgacatattaaaatcatgaaaaacccttggtttgctca

SEQ ID NO: 168894 - DNA, 560 bp, Homo sapiens
gttatatgcaataaaattgcctgtaactaagttaattttaactgatttatgtgatttgatttggactatataaagcagaatcttctaaatatctggcattgtatactaattgaaacaacatcatttaggggcattggattagttggaaggagaagtgtggcttcagaaagaaaattattggggctagtgcaaaatgtgggttgactagaatttttactaaaaatcttcattttggaaacagttaatatgttaacatagttattaaaatattaaccaatttatgtatacaattagacttttcacatagtcatttaacacagaaatgtgtttcattactcttaattgagtattttgaatcaccagaaggtaaggtacttggaaactttagactttctyaattggaattaaaatttccaacaggcagacttttaaggtcttaattgtttgatcctcaaaattgtaagatgaggcaaaccatggataattaactgacagatggctaaatggctttattatcatacagaatttatgagttaaacattcaattgggaattatattt

SEQ ID NO: 168895 - DNA, 560 bp, Homo sapiens
tctttttcttcatccttccctagggaatgaattgcagaggtatatgagctaaaatatttccctgatttcagctttaacctaatatactgatctccaactcagaagaacctgtggtttggatgcaatacagtctgtagtttttgaaaacaagatgataaccactgtgaggggagcctatagccttctggtctctggagaggtcagatcagcagaaaggctgttagtacaaacacagctgagccttcagctggcttgccttgccaggaggctttttttttttttttttttttttttttggtctgttcctagggacaatactgcttctgcttctggatagcgctttttttttcttttttccctgaacacattccacccctccccaactttaatagtttaaccaatctcacatggcaaaagtatcacagcttttgactaggcacaattcctgtttctccacaggagacattctcatggcarcacttgcctcatttccatttgtcttcctggaatctcacatcctacatttgtgcaaatcactcagatgtgtctgccagtcttct

SEQ ID NO: 168896 - DNA, 509 bp, Homo sapiens
gaattcaaatagggaccagatggttgatgcttaaatactctactcatagggtagagatgtaaggacctgggatgcagacattaagggaaggtgaggggtggagctgcatagggaaaatgttgttatatgatacagataaagttccctagggaatctcttggagcttccctcagaagaatagatgaaaagtctgtctgagcatggcaacaactcccagtttctcctcttctctgatggtttatctttcctggctttttgataagatccccaggaagagagtgtaagacagttgcatttcttttggarggaagctttcttggtcaaataaggaaattccagagagcatccctccttacatctggagggggctgggaacaagacaaggttacggggaccttggttctgagacaccttcaaaggcctctacatgtttaaagagccagcctttggggaatcactttctaagacccaacaacagaacctctggcaacatagtgaagcacaaggtt

SEQ ID NO: 168897 - DNA, 509 bp, Homo sapiens
gaattcaaatagggaccagatggttgatgcttaaatactctactcatagggtagagatgtaaggacctgggatgcagacattaagggaaggtgaggggtggagctgcatagggaaaatgttgttatatgatacagataaagttccctagggaatctcttggagcttccctcagaagaatagatgaaaagtctgtctgagcatggcaacaactcccagtttctcctcttctctgatggtttatctttcctggctttttgataagatccccaggaagagagtgtaagacagttgcatttcttttggaaggaagctttcttggtcaaataaggaaattccagagagcatccctccttacatctggagggggctgggaacaagacaaggttacggggaccttggttctgagacaccttcaaaggcctctacatgtttaaagagccagcctttggggaatcactttctaagaccmaacaacagaacctctggcaacatagtgaagcacaaggtt

SEQ ID NO: 168898 - DNA, 439 bp, Homo sapiens
aactgttaaaaaccccagaaacttgcttttctagctttccttgcagtgaggggttgggcacatgacctaggctcaaccaatgagatgcacctactctggtctttgaaatagaagctaattgagcaaagaagcagaagcagaggaaaatatacacatataaatactattcacgaacactattttaagccaggcactgtgctaggctctgggtataccacagggaacaaaacaacatgtgaagtcctccagacctaaccttctagcaatagacaaatacatgagtaaatacayattggcattgatagcagtagttccagtaggggaatctattattcagaactggctgtaaactatggtgtcctttgttcaatatgatgtcagcagagtcctttcctgattggttctgttacataatattatctgtgatccttactgctgt

SEQ ID NO: 168899 - DNA, 486 bp, Homo sapiens
gaattcatctctcactataactgttaaaaaccccagaaacttgcttttctagctttccttgcagtgaggggttgggcacatgacctaggctcaaccaatgagatgcacctactctggtctttgaaatagaagctaattgagcaaagaagcagaagcagaggaaaatatacacatataaatactattcacgaacactattttaagccaggcactgtgctaggctctgggtataccacagggaacaaaacaacatgtgaagtcctccagacctaaccttctagcaatagacaaatacatgagtaaatacacattggcattgatagcagtagttccagtaggggaatctattattcaraactggctgtaaactatggtgtcctttgttcaatatgatgtcagcagagtcctttcctgattggttctgttacataatattatctgtgatccttactgctgtgcagacctacatactcaagactgtttgaa

SEQ ID NO: 168900 - DNA, 578 bp, Homo sapiens
gggtggtggaggcactagatttgagagttggatttccctttgcttttactttcctttacacttattagatatgggagtgagtagaaagtagggattgtggatagactgagatttccattttgggacatcatgtagatgatgatgttgtaaactgaaactgagactactagaggaacaggcaggtaagacaaaataatgagtgtaggtttgtaatgcatcacatcctagaaataggagccaagaaagacatcattaagttgatctgggcatggaaccatcaaggaatcactggagaagtctcatagatgaaggaattatgggtactagtgaggagatgctgctacagtaagtttgttctcaagggtggtttcagtgcagtaattamtatgttcaattcagtatattcatcaatacaccttcatctcagtcaaagattcacctctttctgatccttcttgctttgggctctgaatccagcactgcagaatagagtcagcatcacatgctcttcctttacacacactttacctcacctctctgctttctcatgttctcccactaaggtatagatagactaa

SEQ ID NO: 168901 - DNA, 578 bp, Homo sapiens
gggtggtggaggcactagatttgagagttggatttccctttgcttttactttcctttacacttattagatatgggagtgagtagaaagtagggattgtggatagactgagatttccattttgggacatcatgtagatgatgatgttgtaaactgaaactgagactactagaggaacaggcaggtaagacaaaataatgagtgtaggtttgtaatgcatcacatcctagaaataggagccaagaaagacatcattaagttgatctgggcatggaaccatcaaggaatcactggagaagtctcatagatgaaggaattatgggtactagtgaggagatgctgctacagtaagtttgttctcaagggtggtttcagtgcagtaattactatgttcaattcagtatattcatcaatacaccttcatctcagtcaaagattcacctctttctgatccttcttgctttgggctctgaatccagcactgcagaatagagtcagcatcacatgctcttcctttacacacactttacctcacctctctgytttctcatgttctcccactaaggtatagatagactaa

SEQ ID NO: 168902 - DNA, 623 bp, Homo sapiens
agggctaacattgcaggcacagattttagaaggcttaaatatgtaattccaaaagaattcaacttactaatttggcaagttaaaggagaagaattaaagagttaaagaggacaactggtcttatctgagatagttatgaactagtgaaatttccrtcattattaatgtgggcctagaaggacttctgaagacaaataactgttagaaagttgtgtacgcttattcagggattccagcctatctgtacacaagtttataagtgaggaagaatgtatgtaccacacataagtgaaaaatggctagttacttttaaactaataaaatattattcctcaaagtgctgcttttctccagggcttaaaagtctctgtacaattgggaaagttttcttgctgcttatgctgagttagttacgttaaatgacaacacatcataacagctattaagctaagacatgaattttggaagtcagattttttaaaatgaaattgttgaacttcatcttatttgatacaattttaagtggcttgagaatcagaattgtcaaatttaccttagtatcctctgtagcatctagtggcatacccagtacacaatggaaattgaatagataccattgaatt

SEQ ID NO: 168903 - DNA, 411 bp, Homo sapiens
tttacagctggtctggtgacaacaaattctcgcagtgttttttcatctgagaatgttagggtgactaactgttctggtttgcctagttttagcaccaaaagtcatgcatcctgggaaacctctcagtcctgggtaaaacaggatgattggtcctacaaggtatctttattttacctttattcctaamggatattttcactggttgtcaatttctgggataacaattctattcttgcaggctttcaaaaatgttcctctctctctggtctccatggtttctgaggagaaacatagagaaacattgtacagtcattccaattgttattctcgtacaagtaacatgatgtttttccctggctgttttcaagattttctttctttatctttagatttcaattctttgattacact

SEQ ID NO: 168904 - DNA, 549 bp, Homo sapiens
ggtatgtatacacacacaccatctatgaatacagtgaagatgacacagctgaatttgccagtaacaactccatgtgttggagctttttgccaatttaaattctctggttacttcactgcaggtcagtaataatctgtatctctaaaatgtcataattgacccattaagtcatacaattttgctatttccaaagcatagttttacagtatatggactgagtggcaagttgaccaaagaggacatttgttattcttatttttaaccacaaatgggaaatcagcttattccataaacctggctttagggagattatttcattagattgcagggtaatgttattagcaggcagaaaattccttttggcttccgaacactcttaatccaactctgggactataawacattcctaaggtatttttcattgttctcaatacactaaaaacattgacttcaacttgtaaagccataaaatatttgcagttcttttcaagtaacaataccagaaagcctacatcatgctgggttaattcttgttttgttttatttggt

SEQ ID NO: 168905 - DNA, 499 bp, Homo sapiens
cgtagggaaattattaccatttcagatgtcactcagcctgatgcatgattaaggggaacgtgaggcacctcctgtctaggcagtgggctgatacaaaagcggaaatctgttctcccaaactggtgtactgcattgtcataaccaatgcctgtcacccccaaagctgccttccccaacacactcagaatcctgaagcatttagcttcaattacaaatgtcacttgtcatttctgggatactgactatattaataaaactttttctttccctttttgtagaatttgattaaagtgtcttctggataaataacatttatctgtttttcttcattcccatgttgtgtacacgaaacggcacgaaggagaaacacctgaactttcaaktccctgcagtgggcagatgcagcgtcttattaagtactccagaggctctgtaacatcctaagggatttttgcttaacttgttacacagaaccgtgcaaccagagggctccttgtgc

SEQ ID NO: 168906 - DNA, 552 bp, Homo sapiens
tttggcttatgttggtgtaagtttggtttttgtcctttacaactaaaaaaatcctgacacatgcacccttaattacttattccctttaattgtttaaattagttcaatttgttytctactactcatattcacacaagatttaatttacagagttttccttcatagacaataagaagcaaaatagaacctaaaaatgttcttaatagcctctggggataatttcttgactcaaagcagtttctaagtgaccttctaagtgtcatcaaaatatgagcatacttgaaggcaaggtctgttcctatgactttttttctttattttttttcatacctaaagcctgctcagccttagcaagaaattcaaatgcaaagcgggtttgtatgtaaaaagaaattaggtgttctctgaaggaaagcatcttctacttggtggcttgtagcagttagctattgctgcataaaaaccccacacccaatggtttcaagtgataagcatttattcagctttgcatatgcagatgggtagtcatttccactggggtgaactgggctt

SEQ ID NO: 168907 - DNA, 552 bp, Homo sapiens
tttggcttatgttggtgtaagtttggtttttgtcctttacaactaaaaaaatcctgacacatgcacccttaattacttattccctttaattgtttaaattagttcaatttgttctctactactcatattcacacaagatttaatttacagagttttccttcatagacaataagaagcaaaatagaacctaaaaatgttcttaatagcctctggggataatttcttgactcaaagcagtttctaagtgaccttctaagtgtcatcaaaatatgagcatacttgaaggcaaggtctgttcctatgactttttttctttattttttttcatacctaaagcctgctcagccttagcaagaaattcaaatgcaaagcrggtttgtatgtaaaaagaaattaggtgttctctgaaggaaagcatcttctacttggtggcttgtagcagttagctattgctgcataaaaaccccacacccaatggtttcaagtgataagcatttattcagctttgcatatgcagatgggtagtcatttccactggggtgaactgggctt

SEQ ID NO: 168908 - DNA, 583 bp, Homo sapiens
ggatctattcaaagtgatgtgcttggctggtacctggtagtaatggtcagtttcttttatattgaaccagagtgtctgagaagagctaccctaagactctttctcatagcttgttaggcaactggggatacagaggctcactggagactttcacctgcatccagtccttgagagcaaggaaggacaaatctactcatgtcagaatgtccgaatgccatcacagcaggccagtgatgcggtcaatacaatcgggtttttattaagtttatattcaactaacttgtcagaaacttctgaccctaccaattgggttacatgaccagcactgtgtactggactctttggtgagactgtccagagaaaagaggttattgaacaatgtatctgactgataagtcatagtgaaagatctgtaaaagtagaaccttcatgctaccatctgtgtgtgtaatgttatacccaaacatgaatatgccttggttaggggtcatgattgattgattgatagacagacagatagatgagatagataagtaaatacattgattttttaattattwttattttacttgacatttcttga

SEQ ID NO: 168909 - DNA, 498 bp, Homo sapiens
tgccccccagcgactttctcgggttgttaacaatttatatcaccagtgtttgatacagtgttttaaaccagatttgtcacagccaaggaactggcattggtatgttgttaaccaaagtcagattctttcagagtttcaccagtttttccattaatatcctcttctgttcctggactgccttatctaaattgaggttgcttgaatgtttctggtcctaaagacaaggcttctgtgggatgctttaaaaaataaaaaagaatgctgaggtagagctcctagagattctatgcagtcactctgatgtgggtgagagaacctcccccatcccccagcagaggccactgcagagccatgcagagatggctgggaaccacaggcttgggctsgaaggtgagtcaggttttcaggttgagctccttatgctggtgatggatggagataaccaatactgacatgtctcagccaaacttctgaagtatatttggggctatacatcta

SEQ ID NO: 168910 - DNA, 552 bp, Homo sapiens
ttcattcttgtgtgtgccaaccccaagataagaactgtataaagtaaggagttttacatttcttctctcaattccagcaatacatataatatattatactttttttgattactttgaaaatgaagaaattatttttcatgttcagctgaaaccctcccctatttttaagcctggtttcttcctctttagtctttcatggacataaaaaattactcaccatctgctgaaaaaattcttcacctttgaaaatttggtctttataagggaaaaatgaagcaaaataaaaacaaaacaaaaagaaaatttggtmttttcctcagttgtttcaaagatagcaatgaaaataaaatttgcagcagaggagaggaaaaaagcaatgtgggccagagctgagtcatgatgaatgaatgggatttagataggagaacagaagaaaagggtagcattccaaacataggagagtggggagaatggaaggatatcatcaaaagtctgaaaataggagctaatgtgttttaggaaagtaagaaggtaactgtctataccttaaaa

SEQ ID NO: 168911 - DNA, 596 bp, Homo sapiens
tattgctgtaaacttccccctttgcactgcttttgttgtaccccatcagttttgctttattgtttcttcatttttatttctttcagtttttttaaattttcatattaatttcttttttatccagtggttattcagaagcatgctgtttaatttccatgtttttgtatagtttccaaagttcctcatggtattgatttctagttttatccattgtggtctgagaaaatacttgatatgattgtggtttgttaagttttgttgagacttgttttgtggcctaacatatggtctatcctggagaatgttccatgtgctgatgaaagaatgtatattctstagtcagatagaatgttctgtaaagatctgttaggaccaattgctctaaagtttagtttaaatccaatgctttttgattttctgtcgaggtgatctatctaatgctgagtgggagagatgaagtctctgactgttattgtattgcatctatctctccttagatctaataatatttgctttattaatatgagtgctccaatattctagacatatatatttagaataattatatcctcttgctggattgatccctttatcat

SEQ ID NO: 168912 - DNA, 596 bp, Homo sapiens
tattgctgtaaacttccccctttgcactgcttttgttgtaccccatcagttttgctttattgtttcttcatttttatttctttcagtttttttaaattttcatattaatttcttttttatccagtggttattcagaagcatgctgtttaatttccatgtttttgtatagtttccaaagttcctcatggtattgatttctagttttatccattgtggtctgagaaaatacttgatatgattgtggtttgttaagttttgttgagacttgttttgtggcctaacatatggtctatcctggagaatgttccatgtgctgatgaaagaatgtatattctgtagtcagatagaatgttctgtaaagatctgttaggaccaattgctctaaagtttagtttaaatccaatgctttttgattttctgtcgaggtgatctatctaatgctgagtgggagagatgaagtctctgactgttattgtattgcatctrtctctccttagatctaataatatttgctttattaatatgagtgctccaatattctagacatatatatttagaataattatatcctcttgctggattgatccctttatcat

SEQ ID NO: 168913 - DNA, 411 bp, Homo sapiens
gaattccagcctaggtaagagagtgagtgaggctctgtctcaaaaaaataaaaagaaaaaaagaaaaaaagaaaaaaagaaatgaaacaaagagatgatcctttgaaagatcaataaaatggagaaacagagaaacttctagcaaaagagatgaactaaagaaagaaaacacaaattatccatatcaagaaggaaataatgctaccactacagatactgaaaacatcaaaaggataagagaatactatgaaaaactctacacacataaatgtgcatacatttgaatggttcagtccctcaaaaagcacaaactactacaaatcatcsatatgaattacataactagaacagccctgtaactattaaagaacttaaattcataatttaaaacctcccccaaaagaaatctca

SEQ ID NO: 168914 - DNA, 594 bp, Homo sapiens
tatatatgaaacttacactacagtagtcatttcaacaactaatgtttgaatcataatgttaagctgcataaacttcctttgttgtcagatattttaaaaagagatgagatctccattccaacacagatytgcagcagatatgttttctgactccaaactacagttctagcagcattatttgaatctcaatgcaagtgcaaaacaatctgcttatttcaagatccatttgacttcaattgaagagctgccaactgaccttcaattagaagtgattaatctccaatagtgatatacaaaaagaaatatcaagagaagaatcaaatagaattctgtaaatgcttttcaagtgacaaagtcatatgcctgtctgtggtgccacttacatgagatacttagaatatgcaaattcatagagatagaaagtagacgagagactaccaaggtctacaggggagggaggaatgggaagatattgttaaacgggtacagaattgtttcagataatgaaaaattcttgaaattgatagcgatgatggttgtacagcattgggaatatacttaatgccactaaattgtacatttataaatggctaa

SEQ ID NO: 168915 - DNA, 601 bp, Homo sapiens
ctacaggatcccccaaacttgaattgtgctgccttccagccactcttgttcactggcctttcttcctctccacaccaaaccctgccctcaggttgccaaagcagtagaagcaagagcaaactccctaggaacaatcaggtgaccccagagaagtctggagaggccagtctgagggcagcgagcagggctgtgggcagtcctggtctggcagccaaaaccagcgcggaggatttggttctcagtctaagcaagcacctcagatttcagggttccctgaaagcatcccaggggcagggccattgcttccaggggccggagtcctggagggaagaccagcagggatcctgagctctgggtcattcatgccttctctccacccacagaactctcaggccaaggacacctggccactgccctgatcattgcaatgtccaccatcttcatcatggccatcgccatcgtcctcatcatcatgttctacatcctgaagacaaagccctctgccccaggtgacggcccccatgcgccggtgccctgcytcctggactctccgtcaactccccctgtcggagagcctggctgctcactccctcctctctcc

SEQ ID NO: 168916 - DNA, 597 bp, Homo sapiens
tcaaataaaaatgtatgtccacaacaagcatatatggaaaagtttatagcagtttcatttataacagtccctaactgaaaataaacgtcaagttttgactggacaaataaattgtgagatattcatacagtggaatactattcaacaataaaaatagcataccacagatacatgtagcaatatgaataaatctgttaagaattatcataagtgaaagaagccagacacaaaasgctacatatcgtctaattctgtttgtgtgacattttagaaaagccaaatgataaaaacacaaaaaagtagaaatggttaccagatcctgcaagttgagggaaggggattgactacaagaggcacaaggaaaattttgggatgatggaaatattttatttctcatttgtaattgtggttacatagttgtatataattgctaaaacagatagaaacgtacatttaaagagtgaattgtacagtggtgaattatatctcaacaaatctaaatttaagaagttattgaagaaaaattctatgaagaaaggtatcctttgctgaaatgtcactgtagagtttaagggatgacacatggtgacctagctg

SEQ ID NO: 168917 - DNA, 597 bp, Homo sapiens
tcaaataaaaatgtatgtccacaacaagcatatatggaaaagtttatagcagtttcatttataacagtccctaactgaaaataaacgtcaagttttgactggacaaataaattgtgagatattcatacagtggaatactattcaacaataaaaatagcataccacagatacatgtagcaatatgaataaatctgttaagaattatcataagtgaaagaagccagacacaaaaggctacatatcrtctaattctgtttgtgtgacattttagaaaagccaaatgataaaaacacaaaaaagtagaaatggttaccagatcctgcaagttgagggaaggggattgactacaagaggcacaaggaaaattttgggatgatggaaatattttatttctcatttgtaattgtggttacatagttgtatataattgctaaaacagatagaaacgtacatttaaagagtgaattgtacagtggtgaattatatctcaacaaatctaaatttaagaagttattgaagaaaaattctatgaagaaaggtatcctttgctgaaatgtcactgtagagtttaagggatgacacatggtgacctagctg

SEQ ID NO: 168918 - DNA, 650 bp, Homo sapiens
gaaaataaacgtcaagttttgactggacaaataaattgtgagatattcatacagtggaatactattcaacaataaaaatagcataccacagatacatgtagcaatatgaataaatctgttaagaattatcataagtgaaagaagccagacacaaaaggctacatatcgtctaattctgtttgtgtgacattttagaaaagccaaatgataaaaacacaaaaaagtagaaatggttaccagatcctgcaagttgagggaaggggattgactacaagaggcacaaggaaaattttgggatgatggaaatattttatttctcatttgtaattgtggttacatagttgtatataattgctaaaacagatagaaacgtacatttaaagagtgaattgtacagtggtgaattatatctcaacaaatctaaatttaagaagttattgaagaaaaattctatgaagaaaggtatcctttgctgaaatgtcactgtagagtttaagggatgacacatggtgacctagctggggtagtatgtttgcccttctagagagcarttagatacacaactcgagggatgaagtagagtccaccatgtgggtttcactgactgacttaaatagtgtcaaatgccttgcttaagccagaacaaataa

SEQ ID NO: 168919 - DNA, 490 bp, Homo sapiens
cattgctctttattacacagataattcttacataagttttgaccccattaatctgctaattaaatatcacaagtgtctgaatctgtgggaaacattggacatctagaaatgaaaaggcagatgcagttactgcaaattatggtaccccatggtaaatgcaatgtagggagattacaaggtgctatgagaacatgtatgaaagttacttaacccaggcttaatggttaggaaatgccttccagtgagagagaactaaatcaagaacagaaagaaaggtgggggttaagctaaaaggwtaggggttgggggttaaagtttatgataaaattaacggcatgtgcaaaaacctgtaataaggataatatgcttaaatcactaaaagaagttagctttgatagactcctaagaggaacagggaatgagagtgatgagacacatagctgaaaaatgatccaatgacacttgaatttgattataggaactgtggata

SEQ ID NO: 168920 - DNA, 573 bp, Homo sapiens
ctgcttcaccttgcacttttatgctatggagacagctttctttccttaaatcttatgagccaacttctggtagcttcaaatcttccttctgaagcttcctcayctctttcagccttcatagaattgaaaagagttagggcctttctctgtatttggctttggcttaaggtaatgttgtatctggtatgatattctatacagaccactaacactctccatatcaggaataagcctgttttgctttcttattatttgtgtgttcactggagtagtgatcttaatttccttcaagaatgtttcctttccattcacaacttggctaactgcttgccacaagagccctagctttcagtctttttcaccatttgacatgtctttctcactaagagtaatcatttctactttttgatttaaagtgaaagacatgcaacttttacctaaacatttagaggccattgcagggtaattaattgacctgttttaatattgtcatgtcttttggaatatggagcagtaaagagaaggaaagagatggagaaacagctggccagtggttcagtcagaacacaaaca

SEQ ID NO: 168921 - DNA, 475 bp, Homo sapiens
ctaaactcagtgctaatactgggtctagactttggccctttcctaatacatattaccagaacaaacaattcatactctccagaaatatgttctcacaggccaaaataaccaaacccctgtggagtataatgccctcagaggaaaaacagcaaatmtttggattatcttaacacctgaataaaaatttctggaatagatggagtatgtgtgatactatttagttacaggattaatcttttcgtaagtattttcttttgtgagataacttcaaagtttagtttactcatttaggatagaacactggagagcagcacatgcgggcagggagtgataattaggtacagcatcactaaagacatgcctcaataccatcgtttccataaaactgtgtgtataggtgataagaatagttaccatggatggaatgctcattatatatctgccactgtgctaggcagatggtacacattgtttt

SEQ ID NO: 168922 - DNA, 612 bp, Homo sapiens
tttacattaggtatatctcctaatgctatccctcccccctccccccaccccactacaggcccctgtgtgtgatgttccccttcctgtgtccaagagttctcattgttcaattcccacctatgagtgcattaatactactttttctatgaaaggtctcacctgtaagatagaatatgttggaaaccttaaatatgctttcttcctctctgcttttcatcctttttgtgttcactcctggaaacaataagatatttctgaaaccctattataaatgcttaatattgatccaaaatgcactgttatagaaataattacacatgtccatatatatatatatatatatatatatatatatatayatatatgcaatagacacatggttcttcagtattagaagtgctcttgggagaaagatgacagataatatctctaaagttacactgcttttagaagacaagtggactttttattccactataagggctcatgtatgtgtcaatgacattttgcaaacaaatgaacaatgatgcttctgaggctattaaatttgaaatcagaagaaaatgataggtagcactcatcatgtagttaaattatgcttactagctactg

SEQ ID NO: 168923 - DNA, 512 bp, Homo sapiens
gggtggggcacagccaaatcatatcaatatggtttggttaatactccaatatctcatccgatgaactttttagattggcaaaaggatctgttgtcttggtttaatttgagcattcttaattcctggtctagaagaaaactaaaaactattttcttagtatttgctatgttgcaatactgaaatatatgatttccagaatcttaaatgctgttacaaagccactgtctcccaaataataattcaccaaaataatagaaactaaactttataaatgttgaatttatcacaagaaaaaaacttattatgtgaacatgactccacaaagagtgatccagatttggattgatcatacccccakattatattgatttattgtccagcacaggcatacaaacaagaaaatacagagagctgtgtcttcttgcaataacatgataccatatttattttgtcccaggaaactcttcaccaggaaggtaggagtataaaccaaaaaataaccactatttact

SEQ ID NO: 168924 - DNA, 468 bp, Homo sapiens
caagaaggatcctgagtgtgtattcccagatcttgtccctcctctactcaaatcctgaatctcatcaggatgaacaaagggtttctaggccccctttctctgccytctcaccttgagcttcttcccgcaccatcctccttccccttccctgagggatctctgctacaggcacacttgcctctcccagctccagcatacaccctggggaaccacttttgccagccatctgggctgattgcaccttcactgcccccagactcaaatatcacaacatcaggcaggactccccaccaccctgtgtaagccagtcagagcctcccaccccccaccagcattctcttaccccatcgtggtttattgttctccataacatgaatcgccccctaagaaattacatgtatgtttgcttccgatctcctgcactacacatgagttccatgggggccgaacgtttgtctacttgattca

SEQ ID NO: 168925 - DNA, 587 bp, Homo sapiens
ttttaattaatccatttagatttgcagggaacatatatttactgtttcagcatattacaaagactttttgagcctcttcgtgtatsaacattctgctaatgctaaggattcaaagatggatacaattagataacttccctggaagagactaccatttaattgtaataaatgaaaaccatttcctttcgtcttcacttctttttacgtagagtaatgaaagtcaagtggcaaacaccttgaccttttaacttaaaagccattcacattccctttctccatcttcctagaatatagagatgtacaagatgaaatgctttcttttccactgcccttaagtgaagtgtgactatgtgacctggttctgaacaaggagatcaaagccaaaataatcaaatggagcttcttctggagatgtgttttattagtacagaaagataatatgccctctcagtcctttgcccttttccttcttcatgcttagagaggagctcaatgcccacaagtataataaccgtcttgcaaccatgaaaatgaaaaccattcactaagcatggaagagtcagaaaatgtaataggccttagtcctt

SEQ ID NO: 168926 - DNA, 566 bp, Homo sapiens
attagtagataaaaatgcaataaacttagtgaaacattagttacaaggccaggcacatatttaattttttacagaataaatattaattatagaatgatagagccaaacaatatgaatcatgtgaaaagcaatgtattctaacccctttttaacaattgccmtcccaatacagcacaatgttcaccaaagtgtgtttcacagaatggttccaaattatctattaaaattgccatgttctacaaatatttaagaccaaatgtttaaaactattattccactaataggagaggataaataggattgattgcatggttatatcagttctacctatatgttgacctatactactgaagttacagagactaagaagcaaaaaatgacttaactagatcacatttgcttcaaatctccacttcagttcattaatatagaatagtcctagtgtagtctgcttcatttttcccccatacattgccagggtgaactcataaaattaaaattctcttattcaatgaactaaatgaatatagcaactcatctagtaataaaaaagtaactccactaca

SEQ ID NO: 168927 - DNA, 566 bp, Homo sapiens
attagtagataaaaatgcaataaacttagtgaaacattagttacaaggccaggcacatatttaattttttacagaataaatattaattatagaatgatagagccaaacaatatgaatcatgtgaaaagcaatgtattctaacccctttttaacaattgccctcccaatacagcacaatgtwcaccaaagtgtgtttcacagaatggttccaaattatctattaaaattgccatgttctacaaatatttaagaccaaatgtttaaaactattattccactaataggagaggataaataggattgattgcatggttatatcagttctacctatatgttgacctatactactgaagttacagagactaagaagcaaaaaatgacttaactagatcacatttgcttcaaatctccacttcagttcattaatatagaatagtcctagtgtagtctgcttcatttttcccccatacattgccagggtgaactcataaaattaaaattctcttattcaatgaactaaatgaatatagcaactcatctagtaataaaaaagtaactccactaca

SEQ ID NO: 168928 - DNA, 566 bp, Homo sapiens
attagtagataaaaatgcaataaacttagtgaaacattagttacaaggccaggcacatatttaattttttacagaataaatattaattatagaatgatagagccaaacaatatgaatcatgtgaaaagcaatgtattctaacccctttttaacaattgccctcccaatacagcacaatgttcaccaaagtgtgtttcacagaatggttccaaattatctattaaaattgccatgttctacaaatatttaagaccaaatgtttaaaactattattccactaataggagaggataaataggattgattgcatggttatatcagttctacctatatgttgacctatactactgaagttacagagactaagaagyaaaaaatgacttaactagatcacatttgcttcaaatctccacttcagttcattaatatagaatagtcctagtgtagtctgcttcatttttcccccatacattgccagggtgaactcataaaattaaaattctcttattcaatgaactaaatgaatatagcaactcatctagtaataaaaaagtaactccactaca

SEQ ID NO: 168929 - DNA, 595 bp, Homo sapiens
tttatttgtttgttttttttattatcagcataggtttaatttaaaaacttaataagattaaggttaaaaataaccttttcatttggtgaaaaagttaaccagagtagtaacatatacttaaagagaacattttcttgttcctttgcttaaatttcaaccagtagttttgatatagtatacatcatttaacccttaattcccaccataataagataaaagagtggcactggccaaatattgttcttgctcaaaaagatcaactataatcacgtaagttcattctgatattcatgtttattgccaaaaaatagattaaacagggatgttgaatgctgtgttataaagaacatgctgcgaatagtactcatatttggcattagaaaactctgagttctaatcctattcagctacttcccaactgggtaatcttgggaaatataaattccctgagccttggtttcagtatctgcaaattggatgtactagcacatatcttaaaggatttctctgaktactaaataagatgatgcaaagtgccaggatccgatgctcactaaggtctaatgcctcatccctgaatttttttattatgatt

SEQ ID NO: 168930 - DNA, 582 bp, Homo sapiens
ttcctatgagataaagaaagcaatggcagtatcaagaaatgtatcaacaattttatactatttaaaaatctttgcttgccaagaactttgtttccatatttgtagcagctaaataaggataagctcaggcatacagaaatggaactatattgctctcatttgtgtgctacttaaagagatataatgattaaatttaaaaactgtatgaacatgcaatmctagattggatgattaatccatttgaaatggatgtgaaacatgttatccaataattgaagaggagttaattaaaaaatgattttgaagccaaaatatgatttaatacatctagttatgataggttttggacccaattaaaacttacatacccactccttggaaagaaactcaatttattatgatagcattttcaactatgtattttgattaaagcagatgtctttgtgcagtagtacaattattgaaaggcaaaatcaactgaaaatatataagaaagaaatttgagggttttttgttttttaacagtaaaagaaccaaattctattaaattaacagagacatgaaattcagagatatcattga

SEQ ID NO: 168931 - DNA, 520 bp, Homo sapiens
attttaaaaggagaaaactaaagcctgcagatacaaagtagcttgtcccaaatcacaaagcttataagttaaactttgactgttctaattcaaaaaaatccttgcaactctcaaatgccaggatgctatataactgagctgaatttaattaccaaaaaaatccaactatggaccgtcaaggtttgggattttgtcaattctattgtgaagaaaggaagaaaaaaagatacagcaatatttgaatttgtgactaataactctgaaccctcatgtttggccttttggaacctcacaaaaagaactttattgtctctattgtaagaaaggaaaaccaaaacttttgagtccacactatatgtcagttctttggaaatgytggaaatgattatgaaacatgtttaaaaaaaatcacaaaaatactaagagactagtttaaaacccatcatctttttattttaagatgctgtcttccagcaccacttcaaatctgtgtggtagtgacttcaccgcctgaagataa

SEQ ID NO: 168932 - DNA, 543 bp, Homo sapiens
aaataaacccacacttatatatatggtcaactaatcttcaacaaaggtaccaagaatacaaaaaggggaaaagatggtatctttgacaaatagttgaaaacattggatatccacatgcaaaagaatataagtagattcattttacactgtaaataaaaatcaactcaaaaggaattaaagacttaaaattaaaacctgaaactgtacaactctcagaagtaaacatagaggaaaatcttcatgacagtgatcttagcaacaaattattgaatatgacatcaaaagcacaagcaacaaaagcagaaatagaaaattgggactacrtccaactaaaacacttttacacagcaaagaaaacaataaacagagtgaaaaggcaaatcacagaatgggagaaaattttatataccatatatatgataaatggttaacattcaaaatatagatggaactcttataactcaataagaataaccacaagtgacctttttacaaaatgggcaaaggacttgaatagacatttctccaaagaagacacgcata

SEQ ID NO: 168933 - DNA, 572 bp, Homo sapiens
ttatattgataatttcttctagtattagattatccttgctttcctgcaataatcctcataatatattaacttgataaaaatgtatccaatttaaaaatttcgttcaatatttcagctacgtattcaaatacaacattgctctctaactggctttttatgctcctgtttctccttttgttgtgaggtcaataaaaactacagaatataattcacatggcttgttttttatttttataccctagagaaactttttataagattggtagccatctctaaagattagtacatttccagaaaccaaatgatacaattaaactttgtgyctcttgccttgattttggagttgaaagagataacaacttatttttggttgtttgaggaaagtgtctaatgactctggtagaagtaattcctaggaatgtaatggtttgtgctgggccttgtactttagccaggttaattagatactctctagtggtcattagattaacaaagatttgaaattcagttttagctcgatcgtctaattgacatatcagcattacatcatcaatataatatttgtagaaaac

SEQ ID NO: 168934 - DNA, 443 bp, Homo sapiens
agattgtagaattcatctcattccttatgcaggaaaggagtatttaggtatgaatacatttatatttttaatattataagtgttaggtgcatatacatttataattatcatatcttcttcatatattaaccttgttttcttcataaaatgtccctctttgtttctggaaatatttcttgtattcaagtctattttctgtgatagtaatgaaaccactctagttcttttgtacatatttatttctatggaatatatttttttatccttccaacctgcttgtgtctttgaatataaagtaggattttatagataacattgagaaaagtcatgttttttagtcagtctagcaatctctgccttttgattgaagtgtccattcacatttaatataaycatagttacggctgggtttacatctgacattttggtaggttttttaaaac

SEQ ID NO: 168935 - DNA, 593 bp, Homo sapiens
gatctccactgatcaacaaggatgatgtaactcttttctaggctctgtctacagggacttttgtgacatctcactgtattgatcacctaggtgatgtaagccttgtatgggctttgactacagaaggctttgtgacatatctctgcactgatctctgasgtgaggcaactcttgtctaggcactgactacaggggacactagtacatatctcttcactgatcacccatgtgatggactcttgccttaaatctgcctacatggacattgtggcacatctctgaactgatcatccaagtgatgaatctcttgtctaggctctgcctacatgatctttgtgacacatctcttcactgatcactctggggagggtactcttgtctatgctctgcctacaagatgctttatgatttatagtggcactgataacctaggttatgtaacacttgtcgaggctcagcctacacaggaattctcacatatctctgcactgatcacccaggtgacggactcctgtcttgtatctgcctatgggggcattgtgacatacctctgcactgatcactcaggtgatgtaacggttgtataagctctc

SEQ ID NO: 168936 - DNA, 555 bp, Homo sapiens
ttctaggctctgtctacagggacttttgtgacatctcactgtattgatcacctaggtgatgtaagccttgtatgggctttgactacagaaggctttgtgacatatctctgcactgatctctgacgtgaggcaactcttgtctaggcactgactacaggggacactagtacatatctcttcactgatcacccatgtgatggactcttgccttaaatctgcctacatggacattgtggcacatctctgaactgatcawccaagtgatgaatctcttgtctaggctctgcctacatgatctttgtgacacatctcttcactgatcactctggggagggtactcttgtctatgctctgcctacaagatgctttatgatttatagtggcactgataacctaggttatgtaacacttgtcgaggctcagcctacacaggaattctcacatatctctgcactgatcacccaggtgacggactcctgtcttgtatctgcctatgggggcattgtgacatacctctgcactgatcactcaggtgatgtaacggttgtataagct

SEQ ID NO: 168937 - DNA, 584 bp, Homo sapiens
atcaacaaggatgatgtaactcttttctaggctctgtctacagggacttttgtgacatctcactgtattgatcacctaggtgatgtaagccttgtatgggctttgactacagaaggctttgtgacatatctctgcactgatctctgacgtgaggcaactcttgtctaggcactgactacaggggacactagtacatatctcttcactgatcacccatgtgatggactcttgccttaaatctgcctacatggacattgtggcacatctctgaactgatcatccaagtgatgaatctcttgtctaggctctgcctacatgatctttgtgacacatctcttcactratcactctggggagggtactcttgtctatgctctgcctacaagatgctttatgatttatagtggcactgataacctaggttatgtaacacttgtcgaggctcagcctacacaggaattctcacatatctctgcactgatcacccaggtgacggactcctgtcttgtatctgcctatgggggcattgtgacatacctctgcactgatcactcaggtgatgtaacggttgtataagctctccc

SEQ ID NO: 168938 - DNA, 593 bp, Homo sapiens
gatctccactgatcaacaaggatgatgtaactcttttctaggctctgtctacagggacttttgtgacatctcactgtattgatcacctaggtgatgtaagccttgtatgggctttgactacagaaggctttgtgacatatctctgcactgatctctgacgtgaggcaactcttgtctaggcactgactacaggggacactagtacatatctcttcactgatcacccatgtgatggactcttgccttaaatctgcctacatggacattgtggcacatctctgaactgatcatccaagtgatgaatctcttgtctaggctctgcctacatgatctttgtgacacatctcttcactgatcactctgkggagggtactcttgtctatgctctgcctacaagatgctttatgatttatagtggcactgataacctaggttatgtaacacttgtcgaggctcagcctacacaggaattctcacatatctctgcactgatcacccaggtgacggactcctgtcttgtatctgcctatgggggcattgtgacatacctctgcactgatcactcaggtgatgtaacggttgtataagctctc

SEQ ID NO: 168939 - DNA, 568 bp, Homo sapiens
tttctaggctctgtctacagggacttttgtgacatctcactgtattgatcacctaggtgatgtaagccttgtatgggctttgactacagaaggctttgtgacatatctctgcactgatctctgacgtgaggcaactcttgtctaggcactgactacaggggacactagtacatatctcttcactgatcacccatgtgatggactcttgccttaaatctgcctacatggacattgtggcacatctctgaactgatcatccaagtgatgaatctcttgtctaggctctgcctacatgatctttgtgacacatctcttcactgatcactctggggagggtactcttgtctatgctctgcctacaagatgctttatgatttatagtggcactgataacctaggttatgtaacacttgtcgaggctcagcctacacaggaattctcacatatctctgcactgatcaccmaggtgacggactcctgtcttgtatctgcctatgggggcattgtgacatacctctgcactgatcactcaggtgatgtaacggttgtataagctctccctactggg

SEQ ID NO: 168940 - DNA, 391 bp, Homo sapiens
tggaatggaatggaatcaaccacagtggaatagaatggaatggaatggaatggagtagaatggaatggaatggaatggagtagaatggaatggaatggaaaggaatcaacctgaatgraatggaatggaatggaatgcaatggaatggaattgaatggaatggaatcaactggattggaatggaatggaatggagtgaaatggaatggaaggactggaaagaaataaaatggaatggaatcaacccgagtagaatggaatggattggaatggaatggaatggaatggacaggaaaggaatggaatgtaatcaacatgagaggaatgcaatgcaaaggaatcaaatggaataggatggaatggaataaactttaatggaatggaatggaatg

SEQ ID NO: 168941 - DNA, 383 bp, Homo sapiens
aattcccctttaggcagagcttatacaacagttacatcacctgagtgatcagtgcagaggtatgttacaatgcccccataggcagacccaagacaagagtccgtgacctgggtgatcagagcagagatatgtgagaattcccgtgtasgcagagcctcgacaagtgttacataacctaggttatcagtgccactataaatcataaagaatcctgtagacagagcatagacaagagtaccatccccagagtgatcagtgcagagaggtgtcacaaagcccatgtaggcagagcctagacaagagtttcatcacttggttgatcagttcagagatgtgtcaaaatgtccatgtaggcagatctaatacaagagtccatcacctgg

SEQ ID NO: 168942 - DNA, 383 bp, Homo sapiens
aattcccctttaggcagagcttatacaacagttacatcacctgagtgatcagtgcagaggtatgttacaatgcccccataggcagacccaagacaagagtccgtgacctgggtgatcagagcagagatatgtgagaattcccgtgtacgcagagcctcgacaagtgttacataacctaggttatcagtgccactataaatcataaagaatcctgtagacagagcatagacaagagtaccmtccccagagtgatcagtgcagagaggtgtcacaaagcccatgtaggcagagcctagacaagagtttcatcacttggttgatcagttcagagatgtgtcaaaatgtccatgtaggcagatctaatacaagagtccatcacctgg

SEQ ID NO: 168943 - DNA, 323 bp, Homo sapiens
ccctgtaggcagagcttatacaacagttacatcacctgagtgagcagtgaagaggtatgtcacaatgcccccataggcagacccaagacaagagtccgtcacctgggtgatcwgagcagagatatgtgagaattctcgtgtaggcagagcctcgacaagtgttacataacctaggttatcagtgccactataaatcataaagaatcctgtaggcagagcaaagacaagagtaccctccccagagtgatcagagcacagaggtgtcacaaagcccatgtaggcagagcctagacaagagtttcatcacttggttgatcagttca

SEQ ID NO: 168944 - DNA, 323 bp, Homo sapiens
ccctgtaggcagagcttatacaacagttacatcacctgagtgagcagtgaagaggtatgtcacaatgcccccataggcagacccaagacaagagtccgtcacctgggtgatctgagcagagatatgtgagaattcycgtgtaggcagagcctcgacaagtgttacataacctaggttatcagtgccactataaatcataaagaatcctgtaggcagagcaaagacaagagtaccctccccagagtgatcagagcacagaggtgtcacaaagcccatgtaggcagagcctagacaagagtttcatcacttggttgatcagttca

SEQ ID NO: 168945 - DNA, 323 bp, Homo sapiens
ccctgtaggcagagcttatacaacagttacatcacctgagtgagcagtgaagaggtatgtcacaatgcccccataggcagacccaagacaagagtccgtcacctgggtgatctgagcagagatatgtgagaattctcgtgtaggcagagcctcgacaagtgttacataacctaggttatcagtgccactataaatcataaagaatcctgtaggcagagcaaagacaagagtaccctccccagagtgatcagwgcacagaggtgtcacaaagcccatgtaggcagagcctagacaagagtttcatcacttggttgatcagttca

SEQ ID NO: 168946 - DNA, 323 bp, Homo sapiens
ccctgtaggcagagcttatacaacagttacatcacctgagtgagcagtgaagaggtatgtcacaatgcccccataggcagacccaagacaagagtccgtcacctgggtgatctgagcagagatatgtgagaattctcgtgtaggcagagcctcgacaagtgttacataacctaggttatcagtgccactataaatcataaagaatcctgtaggcagagcaaagacaagagtaccctccccagagtgatcagagcasagaggtgtcacaaagcccatgtaggcagagcctagacaagagtttcatcacttggttgatcagttca

SEQ ID NO: 168947 - DNA, 419 bp, Homo sapiens
attcccctgtaggcagagcttatacaacagttacatcacctgagtgatcagtgcagaggtatgttacaatgcccccataggcagacccaagacaagagtccgtgacctkggtgatcagagcagagatatgtgagaattcccgtgtaggcagagcctcgacaagtgttacataacctaggttatcagtgccactataaatcataaagaatcctgtaggcacagcatagacaagagtaccctccccagagtgatcattgcagagaggtgtcacaaagcccatgtaggcagagcctagacaagagtttcatcacttggttgatcagttcagagatgtgtcaaaatgtccatttaggcagatctaagacaagtgtccatcacctgggtgatcagtgaaggtttatgtactaatgtcccatgta

SEQ ID NO: 168948 - DNA, 522 bp, Homo sapiens
tgctcctgttagaaatcttctgtgatatttaatatactcttccctgtagtcctgccacttatgcactcacctcatgtcctmtatgcatttaaatgctcagtcccttgtgaaatatgtattgagtatctactccttgaggacaggggctgagatctatacatcagtatgtcaccccagaacctcgctagcacctggcacttgctacatacccataaaacacatattgaatatcactgaccaccccagatcaccctccaggctgcttgctaccctcagacggtaactcactacacagggagaaagaagcagggctgcttcccaaggtttcgtttcacccagaggcaaggagtccaaactggcaggcttccttccagaaggctaaacccagcccaggtcggaggtagagggaggaatgaaatgactccattcaatctcttccagtgtggaaaaatccagaagaaataatgctgacattttgcacagttttccagtgagaatgaatgtgtgggtatgcatgaattc

SEQ ID NO: 168949 - DNA, 368 bp, Homo sapiens
acacacaaacatgcacactactgtcttactccttgggaaatctctgttctttccttctgctctgcccatctatgaggccaaggctggggactgaagtgaggccatctgaagggcatagtttggsaagctgcttgaccttgctgagtcaggagttcctcctgagatgccttctgtggtcccaggaactgtccttagtggagcaaaagtgcagcagcagcaagggatgattggggtctggagcagatgaggacagctaggcaaatattttcaagctacatgaaagaaagcctgcatgcaaggacatcctttgtttgctcatctgtgttaatggcactacagcccttaagaagccagataactagaactca

SEQ ID NO: 168950 - DNA, 503 bp, Homo sapiens
gaattcttagcaagtaccagttttcattaatgggaagcaaatccactaatggcattcaggaacagcgctcagagtgagaccaggggcctcactcttttctcttattctctatcccagggctctataaaaaagatagcagggccccctgctgcatcccttggagccccatttcttcttcctctgctcagccctggctggtcatcagggtatcctggagcaggagggagagaagagctccatcatatcaacattcctcacccaggagggcagagagcaaagtgaagataatatacasactttggaattgcacaggcttgccagttggagatgtgtaacctctctaagactcagtttcctcatatataacatgggtgtaataacagtaccagcctcataggatagttacaagatctttacatgtaaagttcttagaccagcgcttggcatgtacttactgctcaatataagttagctgctgccactgtgattattatctgctcctg

SEQ ID NO: 168951 - DNA, 534 bp, Homo sapiens
tagatgtttattcacatatgctacgtgccgggcattgcatcagacaccgggtccagaaaggtgaaacactgatcgtggtgcttatcctakgaaagggcaggctcatggaggagcccaacaaataaacggagaaatcacaaggcagcacggggagctctgtaacatgcacagcaatctatcatggggcctggaggaggcggctgccaatcttggggacatctgtgaaagcactgtggattctacgccgtgagaagaggaaacagcgtatattgagaatccactataagtaacacacctgtgaacaagacctgggtgtatcctgaggcctggactgtgtcgacataacttagcacgagctctgcgtataccttgctgggtgctcggtagatacatgcactgccaggattaactgagcgatgagtaactgatgtgcctctgtcatcttatttcctattcagataatctggttttaacttatgcttaaagcagagaccttattaccaaagaaacccctattgctggtataaagatctg

SEQ ID NO: 168952 - DNA, 337 bp, Homo sapiens
atgcaggcttaattgcgtcactccttccaaaaaacattcattggctcatccactgcctrtgaattaaatgccaactcctcatgctctgtggtccaaatgctcctttacaaccctaattaccattacttgttattcatttcccaatgttccagccaaatggaactccagctcttctccaaacatgctctaaactctcctgcctccaaggcttgtttatgtagccctcacttcctggaattcccccctgctggttctacctgtcaaaatcctgtccatctttccaagttcaaatgtcatttcaaatgtctattccattaagtaatcttattccttacaa

SEQ ID NO: 168953 - DNA, 593 bp, Homo sapiens
taagctttggggagcacaatccattttctaatatcttgttttgctgtcagaagtattgagataaaggggaggggctgtggagagggaggagagaaaagatgggagaattgttgcaggcttgtacattactcctagagtaagctctttttctagtgagagtgaggggagatagtgcttgtgagtatgggatgggtcttacatatttcttaggcargtttctttattacaggattgcttcagtctttaaaaatgttatatctattaaacatcttagtatatttgcatattgtttcttaaatgtatttgatcatagaaaactttatgaaatcattcagaaaacagtggtctagagtagcttgagaattttaatacatttttcttcctttttatgtagatcccattccttctggtctgatggaagaatgtgtggattgggatgtggaagttaaagctgctgtgcatacatatggtatagcaagtgtacctaaccaacccttaaaaaagcaaattcagaaaatagagagaacccttcaaattcagaaagctcatggtgaccacatggcttcctctagaaataattctgtatctggact

SEQ ID NO: 168954 - DNA, 559 bp, Homo sapiens
ttaaaccattttctcttttgctttggtgttttacagtttcacctgatgtgcmtagtgtgtgtgactattattattattattattatcattttttgagatagggtctcactctgtcactcaggctggagtgcagtggcatgatctaggttcactgcagtcttgacctcctgggctctagtgatcctcccaccttgagaccctgagtatttgggaccacaggcacatgccatcacacctggctaatttttaaatttttttgtagagctgagatctcattatgttgcccaggctgatcgcaaactcctgagctcaagcaatcctcctgcctcagcctcccaaagtgctgacattacaggtgtgagctgaggtgcgtagctatatttggaaatttgtcctgcattattcttcctgtctctgaggattcatgtcattcattagttctagaatttccttagccactttctttttggaatgtctctcccattgtttctattctttcttctgggactccgggtgtatgttagaacttctcattcctccctttttcttactcattgta

SEQ ID NO: 168955 - DNA, 502 bp, Homo sapiens
atacatataggtgggggcatttgacagttggctcatctccccaccctccaaattatttatatttctagtccttcagtttagcactcctatttaccccaggattgtaattcattgcctctttccctggccatattcctccatcctttttgtttctcccatctcttttcttcctccatcacccccactgctgagcttggctacacttggctagtagtgcaggttgggagaacacagagtcctatcacagactggaggactattatttaatcacaagaatgttgtcttttttctcytaaggtagcactctggggacggtcattgctgtctttattccctcacccccccaccacccctgcactggattagacacatgaaatgtgcctatctctgagatgaaaggagcaagaactgcttcctccccactgaccttttgcctgcccatccttggagatacctggagttggcaggctggaggcctagcagcatttgcagtcagtgccgc

SEQ ID NO: 168956 - DNA, 584 bp, Homo sapiens
accaaaccatcttgtgtaggtatctgccaattgtcattagcaaactatgatcccagaatgtgaggagcttgttgacataaagtatacagggtctgacccaacagacctttacaacctattctaatatgaatttctgaagaaaataaatatgttcaaaaattgtatgtgaaacaaagccatgcttgtgaatttaaaactctatcagaggctgggtctggtgctgcagtcccagctacctgggaggctgagatgggaggatagcctgagcccaagagttcaaggccagtctgggcaaaatagcgagcctcaaaacaaagcaaaacaaaacaaaacaaagcataacaaaaaaacaaaaaacaaaaaaaaccctctatcatcattgctacccttgaataatagcatataatggagcagacactgtgtttagctttttccctgctttctctcatttaatcttccccaaagcccttgaggttaatattacccrcactttacagatggtatgaataagtgcttatggttctcaatcactttggctttttgaaaatatcccagagttcttcattatcttcaaaatgatcacc

SEQ ID NO: 168957 - DNA, 549 bp, Homo sapiens
tgcatatgaataaatgaaataaaaacagttgaattagttttgtgcagcatttccactcytttggtaagaataaaatacacataaatgtatgaatgatgatatccaaattgtgtaatttctgatgtttccacatatgggtcaaatgctcttatatttgcatttataactggcatcgtgtaatataagatgaatggtaaatttatgctaataatttaaaattttaatttttctttacttagaacgacattaaaaagcaaatgagaaataccatgacaattcaagagagaaacctcagaagaaaagaaaaagctttatgtatttatgcctttaatggcaactttttttcctgttttttgaacaagaggacctgcattttcattttgcaccgggccttcagattatatagctggctgtgatgtccctgcagcatttggctagtgagatttccagggaagtggtgagaattgtaaaagggcctctgtatttcaggggccttgaaattaaattcatgtccctggttccaaggactaaaaaaacctcaaagacaca

SEQ ID NO: 168958 - DNA, 553 bp, Homo sapiens
gtggccaatgctttaaggtagaggttgcaaactgggagcgtgtgcaccaggtctggcttctgggtatgtttgtcttgcrtggtattttttaaattagtaaacttcacataaaagtccagaattataagttaccttaaaaaactaatagtgtaggttatattgagccctccttccttcaccatgacaattggttagagctgagtagctgctgtcagtttgccacagttctcaccattccctaatctataccgcccctgcttcattcttcattcactacttgtgagcagacatctgagatgactctggatttatgttttaatctctttatttaaaacacacacacatacactgcacacacacaagtcaccacaatcacaaccacaaagaagtgcttgagtatgctatagcatgaccttttcttcacatctctgctcaaatatctccttatcagagaggccttctcttactaccttctaaaataggacccactgcccctctatgggtctcatttctcttcacagtactccaacacttgacccattactgattcact

SEQ ID NO: 168959 - DNA, 553 bp, Homo sapiens
gtggccaatgctttaaggtagaggttgcaaactgggagcgtgtgcaccaggtctggcttctgggtatgtttgtcttgcgtggtattttttaaattagtaaacttcacataaaagtccagaattataagttaccttaaaaaactaatagtgtaggttatattgagccctccttccttcaccatgacaattggttagagctgagtagctgctgtcagtttgccacagttctcaccattccctaatctataccgyccctgcttcattcttcattcactacttgtgagcagacatctgagatgactctggatttatgttttaatctctttatttaaaacacacacacatacactgcacacacacaagtcaccacaatcacaaccacaaagaagtgcttgagtatgctatagcatgaccttttcttcacatctctgctcaaatatctccttatcagagaggccttctcttactaccttctaaaataggacccactgcccctctatgggtctcatttctcttcacagtactccaacacttgacccattactgattcact

SEQ ID NO: 168960 - DNA, 575 bp, Homo sapiens
aacaaacaattaaaaaaaaaactgaaaagaatgcacctttcctagtatagttgctcaactttacacatttatttttcattcgtttatttatccaccactcaatcactacatattcagcaratattaattaaatactgtgttaaggcatgctgtgagtatatccagaacatctatagctatctaaagtcatactcaaaagtaatggctatttctacttatagttttggctagacggatgtacttttgaccatgtataattttattacatactttttaaagcaatttagtcacaaggcttcagcttctttgtggttaggctggtgattctccaacactattgcctattagcatcaccagatctttcaaaaatccccaactccaagctttgctacagaccaattacatcagaaatctctgggggcaggacccaaacatggttatttttaaagctgtccaggtggctccaacatgtagacaaaatggataaccagtaaatttgagaatataagcctaattctagtgcctcttaagaaaagttttcctgtcttgtctcattttgaaatatctcagagaga

SEQ ID NO: 168961 - DNA, 479 bp, Homo sapiens
ctatactaccatcttttaaactgtggtcagacatcagcaagagtaacctttataaatataaagcagattgatttcttcccctacttaaatggtcctattgcagttatagaaaaatcctaagtctttaacatgatcaagaagagcctacacaccaggtccttcccacctctccagctgtgtaccattccttctgactaattctgccccaccactctcccatccagctgtgcaaacacaccaaacaccttyccaatgcaaggccttttctcatgttattccttccatgtggagcacactgaactccttggctgctgtccttcagctcattttttgtgtctcagctgaaatattactacctgaaagaagtcttcaccagcttcaaactcaatcaacatcctgtgctggacattgtagatcatctcactcactctccattccactctcctcctatttgaagaggatagaatgctactaactgc

SEQ ID NO: 168962 - DNA, 524 bp, Homo sapiens
atactgaacatgtaccaacttcttttttcttttcattataccctaaaaatacaatgcaacaactatttacatagtacttacattgcattaggtattgtaagtaatctagagattacttaaagtatacaggaaaatgtgtgggttatattcaaatactatgccattttgtataacagacgtgaacttttgtgaatttttgtatctgcagggtgtcctaaaaccaattcctcacagatattgagggactaccatatacctacaattgttatatcctcttggtgaattactccattatcattatataatgaccttctttctcatttgtagaggtttctgatttaaagtatattttatctgatataagtatagccacttctgctctattttcagcttatgtgtgtccataatgctamagcatgtctcttgtaggcagcatacagttgaatcttattttgtttatccattcagtcactctttgtcttttgattagggaattgaattcatttacatttaaagtaattatt

SEQ ID NO: 168963 - DNA, 577 bp, Homo sapiens
tgggctcctatctctgcattgccacttctcaactgtataaccttaagcgagttacttaaaagtctctgagcctcaayttgcttatctgtaaaggtgaggaatagccatctgatgagttcgtagtagagattaatataaaatattgaccctgtgcctgatacatagcaggcacagattaatatcctccctctttccttccacccagtgactccttggatgtctaatggccctctgtctgatagggcctggtccttccctctctgtctccctgtccttcctcttgcacagtcagaacctcagttcctcagatcttgttctactctctttcagtctcatagagcagagcagtaaaggtagtaatgacattcattgactcaggaaatgttcttgattacccactaggtgccagccactgggggtacaacagtgaacaaaacagacaaaaatccctgcccccagtgaacttactgagacagggtttgagttgagttttctgttactagtagacaacaaagtaaatggcatatatagcatgtgagatggtgataatttgtaaggataaaaatataaagtggaa

SEQ ID NO: 168964 - DNA, 577 bp, Homo sapiens
tgggctcctatctctgcattgccacttctcaactgtataaccttaagcgagttacttaaaagtctctgagcctcaatttgcttatctgtaaaggtgaggaatagccatctgatgagttcgtagtagagattaatataaaatattgaccctgtgcctgatacatagyaggcacagattaatatcctccctctttccttccacccagtgactccttggatgtctaatggccctctgtctgatagggcctggtccttccctctctgtctccctgtccttcctcttgcacagtcagaacctcagttcctcagatcttgttctactctctttcagtctcatagagcagagcagtaaaggtagtaatgacattcattgactcaggaaatgttcttgattacccactaggtgccagccactgggggtacaacagtgaacaaaacagacaaaaatccctgcccccagtgaacttactgagacagggtttgagttgagttttctgttactagtagacaacaaagtaaatggcatatatagcatgtgagatggtgataatttgtaaggataaaaatataaagtggaa

SEQ ID NO: 168965 - DNA, 577 bp, Homo sapiens
tgggctcctatctctgcattgccacttctcaactgtataaccttaagcgagttacttaaaagtctctgagcctcaatttgcttatctgtaaaggtgaggaatagccatctgatgagttcgtagtagagattaatataaaatattgaccctgtgcctgatacatagcaggcacagattaatatcctccctctttccttccacccagtgactccttggatgtctaatggccctctgtctgatagggcctggtccttccctctctgtctccctgtccttcctcttgcacagtcagaacctcagttcctcagmtcttgttctactctctttcagtctcatagagcagagcagtaaaggtagtaatgacattcattgactcaggaaatgttcttgattacccactaggtgccagccactgggggtacaacagtgaacaaaacagacaaaaatccctgcccccagtgaacttactgagacagggtttgagttgagttttctgttactagtagacaacaaagtaaatggcatatatagcatgtgagatggtgataatttgtaaggataaaaatataaagtggaa

SEQ ID NO: 168966 - DNA, 577 bp, Homo sapiens
tgggctcctatctctgcattgccacttctcaactgtataaccttaagcgagttacttaaaagtctctgagcctcaatttgcttatctgtaaaggtgaggaatagccatctgatgagttcgtagtagagattaatataaaatattgaccctgtgcctgatacatagcaggcacagattaatatcctccctctttccttccacccagtgactccttggatgtctaatggccctctgtctgatagggcctggtccttccctctctgtctccctgtccttcctcttgcacagtcagaacctcagttcctcagatcttgttctactctctttcagtctcatagagcagagcagtaaaggtagtaatgacattcattgactcaggaaatgttcttgatyacccactaggtgccagccactgggggtacaacagtgaacaaaacagacaaaaatccctgcccccagtgaacttactgagacagggtttgagttgagttttctgttactagtagacaacaaagtaaatggcatatatagcatgtgagatggtgataatttgtaaggataaaaatataaagtggaa

SEQ ID NO: 168967 - DNA, 612 bp, Homo sapiens
ttgagcagattccatagaccaagacctttttggaattaaaggacagtttgagactcaacttgctgacttgttctggctcaaaaactatacctctttactgataaaactacaatttttactgaacaaagtaaacctgaaggcagaacactattctcaatctgcaaagaagtaagggtgttcagattccaaatgaatctataaagcaaatatcaatttttattcttcactggtaaaaaactctaagctcaatggaattacacttacgtaaggattgcagagtgtattactgagggttctccagagggacagaacwaattgaatatatgtttatattgaaaggagtttattaaggagaagtgactcacatgatcacaaggtgaagtcccatgataggccatctgcaaactgaagaggtaggaagccgttagtggctcagtgcaaaagccttaaaagtgggaaaacttgacaatgcagccttcggtctgtggccaaattcctgagatccctgggcagaccactggtgtaagtccaaaagtccaaaggccgaagaacctggagtctgatgtccaaagtaaggaagtatccagcatgggagaaaaatcaaagccagca

SEQ ID NO: 168968 - DNA, 588 bp, Homo sapiens
  misc_feature (1)...(588): n = A,T,C or G
tgtgccccacgattcaattatctccacctggtccttcccatgacacatggggattatgggacctacaattcacgatgagatagccataacatatcaatgatgatgatgaaattgacccagcatcctttgttggagtcctcattgtacaagaggtactgtgatgtgccctgggtatgcattatttcattggtgacagcctcacsacaaccctttggaggcagcatcttgttattccctcattttttcccagaggtgccatctgaagcttggaaaggttaagtagcttgccccaattacggagtggagacaggaaggcttcctggagaaatggcttttaagggatgggaagatggcaggaaggccacagtggagatggaggagagggcagagggcaggtgggtgctaagagtagcaggcagtccagacagagtgaggctggtgatgcggggaggggccagcagggaatgttgcagcagatcctggaggtgatagggagccatcgaatgtttcagagcacaaaagtaatggaaaaatgcgttagggacagtgttgtatggtggggagaaagagctggatataacantgcaa

SEQ ID NO: 168969 - DNA, 572 bp, Homo sapiens
acgatgaagcacttgctcattcattgcactctgggaactcatctccccagagcagctctggctggcccccaagcccagagccgggcacagagcagctcctgtcctctggtctgctgcaagcaggaggtacccaaaccacattaattcaggtctctgaatggaagtaactaaggctgaagtttacttctacactatccatgaaaaaatgatttcccagcaaatgaacaatgtaaatgaggcwgccaaatggtgcttcacctatttaaaggaataatctattttaaaaatcttttagaagcttttagttacccagaaacaattgatacggtaattgcaagccattttttaaatttacttattagagaagactccctaagctctgttcacccactcccatgctctgctaacccttagggagctgggtactaaatgctcgctgtccttgtaggccccatctgtaaaatggggtcaagagtagtaccttcccctccctagttgaccaaaatggacagagaatgcccaaaggacagagccttcacagggccacctcacctgcacttacacagtatgaa

SEQ ID NO: 168970 - DNA, 542 bp, Homo sapiens
tgagtcctatttttggtctctccctgggccctatctctggttgtagaccggcctgtcttacagttgagctcttattcccatccaaccactaggaaggccacttatcactggggcagtcaggcraaagtgtgattcattcagtgcagcccttctctattgctgtgtccacagcccaggatgcacatctttaaaaagcagagaagtctgtttgtgtgacgtgaaagatgactagacatgcttacttagtgcttgatgagtcaaggagtaggagaaggtggaagaggagaaggagatgagttcctagaacattaagctcccttttctataatgaagggagctctcactacaagcctagagctccctgccaaccagataggaatgcagagggcatagcgacaacctgggactagctgtgctctggcctggggcctgctgggcttccgggagagaaatcagacctcagcctctcccacggccagaggccagtaggatcttacttagtgagatcctgcatgtcacacggggtagcaggcagagtgggc

SEQ ID NO: 168971 - DNA, 542 bp, Homo sapiens
tgagtcctatttttggtctctccctgggccctatctctggttgtagaccggcctgtcttacagttgagctcttattcccatccaaccactaggaaggccacttatcactggggcagtcaggcaaaagtgtgattcattcagtgcagcccttctctattgctgtgtccacagcccaggatgcacatctttaaaaagcagagaagtctgtttgtgtgacgtgaaagatgactagacatgcttacttagtgcttgatgagtcaaggagtaggagaaggtggaagaggagaaggagatgagttcctagaacattaagctcccttttctataatgaagggrgctctcactacaagcctagagctccctgccaaccagataggaatgcagagggcatagcgacaacctgggactagctgtgctctggcctggggcctgctgggcttccgggagagaaatcagacctcagcctctcccacggccagaggccagtaggatcttacttagtgagatcctgcatgtcacacggggtagcaggcagagtgggc

SEQ ID NO: 168972 - DNA, 623 bp, Homo sapiens
cgcagaagaaaagtaatcattacaccaaaatatacctgcactcatatgtgtactactcaaagcagcaaagatatggaatcaacctgagtgtccatcaaaggatgattggataaagaaaatgtgttattatatatatatacacatatataaaaacacattttcrtgatatatatatatatatatatatatataccatgaaaaaatactcagctataaaaaagaatgaaattatgtctttttcagaaacataagtggaactggaggcctttatcttaagtaaagtaactcagaaacgaaagtcaaatacggcatattctcacttataagtgggagctaaacaatgtgtacacatgaacatagagagtggaataatagacattggaggcttggaaaggtgggagggtgggagtggggtgaaggatgagcaattacctctcgggtacaatgtgcactatttgggtgatgattacactaaaagctcaggcttcaccagcacataatatatccatgtaacaaaactgcacttgtaccttctaaatctgtaaaaataaaaattaaattgtccttatttcaaatgcagtaggtggtttctgttttgtttttgtgtttttgctttttgacaa

SEQ ID NO: 168973 - DNA, 623 bp, Homo sapiens
cgcagaagaaaagtaatcattacaccaaaatatacctgcactcatatgtgtactactcaaagcagcaaagatatggaatcaacctgagtgtccatcaaaggatgattggataaagaaaatgtgttattatatatatatacacatatataaaaacacattttcgtgatatatatatatatatatatatatayaccatgaaaaaatactcagctataaaaaagaatgaaattatgtctttttcagaaacataagtggaactggaggcctttatcttaagtaaagtaactcagaaacgaaagtcaaatacggcatattctcacttataagtgggagctaaacaatgtgtacacatgaacatagagagtggaataatagacattggaggcttggaaaggtgggagggtgggagtggggtgaaggatgagcaattacctctcgggtacaatgtgcactatttgggtgatgattacactaaaagctcaggcttcaccagcacataatatatccatgtaacaaaactgcacttgtaccttctaaatctgtaaaaataaaaattaaattgtccttatttcaaatgcagtaggtggtttctgttttgtttttgtgtttttgctttttgacaa

SEQ ID NO: 168974 - DNA, 523 bp, Homo sapiens
tgtcatcttcccatcagcagcgagagcactgggaaaacttcttaccacctcactgcccgagagcctcmcctcatccaaacatcaacaaatccagcctcatttttcagaagggccaccttagtctttccatgatcacaagtgaaataattaaatgactaaaagttgtacttgtacaggtcacagccagataatccttcatttgcagttaactaaacagcatgctacacaattggatgtaaggaatgaaggtgacatagcaattttccatctgtattatctgagaccatgttattggaaaacggatggtcctaaaagtagaaatgaaaagttcacaagggcaatgatgggaagttgttttaatgggatcctaaggtctgcttctactaagcaggaaacagagagtgaagcagttactattttcttgctcaacaagtgaaagcaaaaagagaaatccacgttacagagaagactgaaacagaatcccataaaaatgtttctcagtatcatttctcagaccaaccaa

SEQ ID NO: 168975 - DNA, 600 bp, Homo sapiens
gctctttcatcaaaaaaaaaataaagaaaaaagaaaaatccattaacagtaatattgatgaattgtggcaggtttgcataatggaacgatatacagcagtgaaaattaacaaaccacaaccacaggaaacagcatggccaagccagctaaaactgaggctgcaaatgctgggctgggagcagcaatgtctgctattagcaagggcactgaggcaacgcgctagagaacatggcctgcaaagggaaaagggaaagtgctgccttgcctatcctaagcactttcagcctctggagcacaatgtcactatggctttccttgttgcccttccttggttgttgcctttccaagcagccagttgcagtacttgctgccttaaatgcttgtctattcctcttgaagagaaaaaacaacaggataacttggtccatcttagaacttaaaaaaagagaaaagtctaaagtagtgaatgaaataaacatttaaatcttgtgtcttacagcccatgacagatgttggcattctaagacctgtgctgtctgcagaatacaaggtcctgcattatggtttayataataaactgaatgattgatgggcaataat

SEQ ID NO: 168976 - DNA, 589 bp, Homo sapiens
tgaatctgggcattgaatggcttagccaggtggttctcactcagagtatctcttgtggttgccatcagacagtggctgagctggcatcatctttaaggattcttagctcacatcagctcctgagctggatgcaactgaacagctgatagcacacactcctcaggtctcattctttctccacgtggtctccccaaatggaggtctcaggacagctggtctccttacatgggatcggaaagctctgagagcaagtcctaagagaaactggtggaaatggcggggcctttcctagttcaacctracatcacacagtatcttagtttgcgttgctgtgacaaaataacagaagctagataatttataaagaaaaaaggtttatttagctcattgttctctaggctgggaagttcaagaattattgtctcagcatctgttcagtttctggtgaggacttttgaactaggtcaaaacatcatggaaggtcaaagggtaagtgggtatgagtgaaaaggcaaaatctaagaaacatcctggctgtataacaacccactcccacagcaactaatctaatatcaccacagcaagaact

SEQ ID NO: 168977 - DNA, 589 bp, Homo sapiens
tgaatctgggcattgaatggcttagccaggtggttctcactcagagtatctcttgtggttgccatcagacagtggctgagctggcatcatctttaaggattcttagctcacatcagctcctgagctggatgcaactgaacagctgatagcacacactcctcaggtctcattctttctccacgtggtctccccaaatggaggtctcaggacagctggtctccttacatgggatcggaaagctctgagagcaagtcctaagagaaactggtggaaatggcggggcctttcctagttcaacctaacatcacacagtatcttagtttgcgttgctgtgacaaaataacagaagctagataatttataaagaaaaaaggtttatttagctcattgttctctaggctgggaagttcaagaattattgtctcagcatctgttcagtttctggtgaggacttttgaactaggtcaaaacatcatggaaggtcaaagggkaagtgggtatgagtgaaaaggcaaaatctaagaaacatcctggctgtataacaacccactcccacagcaactaatctaatatcaccacagcaagaact

SEQ ID NO: 168978 - DNA, 408 bp, Homo sapiens
gcaattaatacttacctgagtgttccttcagtgccaatatgataaactgggaaaatgtgttggaggacacttgtcaatgactgcctctcccatggaaaggacaggtcttgtctcatggaggatggttctcttttaacagagccttcctgaagccaatgcctgaagtacaaagcatagtgaaaggccagtagcacagacattttgaaggtttcacagatcataccaagaaagaactgaggctttagttagtgtttactatggttctgggccttgtgcttttgttttgcatagatgttctaatgtaatcccccaactgtcctatgagttagctaccagtgttattctcattttrcagatggagtatctgaggcatagagaggttaagtttcttttgaataaacatagaaa

SEQ ID NO: 168979 - DNA, 603 bp, Homo sapiens
acaataaggctgtgtgtggtggctcatgcctgtaatcctagcactttgggaggccgaggcaggcagatcacttgaggtagggagttcaagaccagcctggccaacatggtgaaaccccctcyactaaaaatacaaaaattagctgggtgtggtggcatgcatttttagtcccagctgcttaggaggctgatgcagtagaatcacttgaaccccggaggcggaagttgcagtgagtcgatatcgcaccactaccttccagcttgggcaacagagtgacactccatcttaaaaaaaataaaaaactataatgagatatctcctcacacctttcaggaaggttattaccaaaaagacaaaagataagtgctggcaaggatatggagaaaagggaacccttgtacactgtagggatgtacattagtacagccattattaaaaagtatgaaggttcctcaaacaatcaaaaacaggactaccatacgatccagcaatctctcttctgtgtatttatccgaagaaataaaatcagtatgttgaagagatatctgcaatcccattttcattgctgcattattcacaatagccaagatatatagaatcaac

SEQ ID NO: 168980 - DNA, 525 bp, Homo sapiens
acagatcatataaggcaattatataattgagactacactatttatcacttagcaacagtatgacaggaacaaacctcacatatcgatattaacctctgggacatatcgaaagcagtattaagagaaaagtttatagcactaaatgccgacatcacaaagagagatctcaaattaacaacctatcattgcacctaaaggagctagataaacaaaaagcttaaatgcttcacttaaaagacacagagtggcacattgggcagaaataagacccaagctttcaccgccttcaagagacctatcttatgtgtaaaaacattcataggctcaaaataaagggatggagaaagatcactcacacacatggaaaacaaaaaacagcagaggttactatttttatatcagataaaacagactttaaagcaacaacactaagaaaagagacagaagggcattatttaatgataaagggktcaattcaacactgtgtatgcactgaacatcagagtacccacatttataaaacaa

SEQ ID NO: 168981 - DNA, 506 bp, Homo sapiens
tacaggatttaagtcaatattttagtgggtgacagttaataaaaatgtagattagataaactacatctattacaaccaacagcaacaagcttttcatgagttaaaagaaaaactcatgtcggcctcagtcctggggctacctgacctgacaaaaccctttataccctatgtgtcagaaaaaaaaaaaatggcagttggagttttaacccagactgtagggcsctggcaaaggccagtggcctatctctcaaaacaactagatggggtttccaaaggctggcccccatgtctaagggccctggcagcaatggccttgttagcacaagaagcagataagctaactcttaggcaaaacctaaacataaagtacccccatgctgtggtgactttaataaataccaaaggacatcattagctaatgaatgctagactaactagatatcaaagcttgatctatgaaaatccccgcataaccattgaagtttacaacaccctaaaccccgcca

SEQ ID NO: 168982 - DNA, 506 bp, Homo sapiens
tacaggatttaagtcaatattttagtgggtgacagttaataaaaatgtagattagataaactacatctattacaaccaacagcaacaagcttttcatgagttaaaagaaaaactcatgtcggcctcagtcctggggctacctgacctgacaaaaccctttataccctatgtgtcagaaaaaaaaaaaatggcagttggagttttaacccagactgtagggcgctggcaaaggccagtggcctatctctcaaaacaactagatggggtttccaaaggctggcccccatgtctaagggccctggcagcaatggccttgttagcacaagaagcagataagctaactcttaggcaaaacctaaacataaagtacccccatgctgtggtgactttaataaataccaaaggacatcattagctaatgaatgctagactaactagatatcaragcttgatctatgaaaatccccgcataaccattgaagtttacaacaccctaaaccccgcca

SEQ ID NO: 168983 - DNA, 593 bp, Homo sapiens
gggacagtcagtatctaacttatttatctatttattattttaaattatttcacatctaagtctttacagtgttctaaacagccacctcccccaaaataggtccaatacttatgatgtatataaacaatgaggaaataattagagagccagtttatacactcccttaaaataccaggaggattaattggctagtgatgagataataaatctccaactgataattaaatattagtgttctgtgtggatatatggagtaagtgcatgcaaggtgggattagtttttagtgctatagttggtgtaccacattgtatctcaatttctcaaatttttattttattttatttgatatgaagtcttgatatgttgcccaggctggtctcgagtacttgggtttaagtgatcctcccagctcagcttcccaagtagctgggattcstggcacatgcccccataattaggtagatatgaacttttagcgatggcctactcatttatcatagattgggaagcccagaatgactggtatgtgtaggaaaacttcaacagactagtagacacagattttagcatcctcatcctcagatatcataga

SEQ ID NO: 168984 - DNA, 491 bp, Homo sapiens
ttgttgttgttatttttttaaactgttcattatcaaaataatacamtttcactaagaaaattttgaaagaaaaaaattgtctaaaataaaaatttagagtaatacccttactcttcaatttcattccccattggtagcctctgttaatatttttgtgtatatcccactatgtgttacacacacacacacacacacacacacacacacacattttaacaaagatgggatcacactatacaagattctacaagttattttctcactaacaatgtctccttaacccctactcatatccgtggatatagatcttttgtctaatgctgcatggtattccattgtatgaacatgttgtaatttaagtagtcttttattgatgggcacagaggtgatttccagtttcaccaagaggtagctatcacagttgttgagagcacaggccttagcatcagactgcgtgggctcatgagcccagttcctccacttacttactt

SEQ ID NO: 168985 - DNA, 580 bp, Homo sapiens
tgttccccttgcctggaatattctttcctaactcccttttgccctgactaaagtgaccccattcttctgacattaaatttcactctggtaagatcttcactgacctctactctaggataggttctcctactgaatgtccccatctcctatcctcacacacaatacactttattataattaaatgtcatcctgtcctgcaagatatgagttacctgagtatataattgcacctgttcctttcactactgcatttctacygttcagcaaagtactttgcatctagtatgtgcccaaaaaatctgtggctgtctttgttgaatgacagagagggatatctctgggagattgagtttaaatccctgtcctgttatgacatctgagacaagtcatagttcctgtattatctacctcacagggtttttatatatgaaaatgttttttcaaattgtgaaggtctacaaaaataagacaaaagcatttgatgggaaaagacactcagataattttgtgcctcttcagagaaatttaaatgatttaaatgccaattgcttgagtaagtgaataaaataataccctcatc

SEQ ID NO: 168986 - DNA, 580 bp, Homo sapiens
tgttccccttgcctggaatattctttcctaactcccttttgccctgactaaagtgaccccattcttctgacattaaatttcactctggtaagatcttcactgacctctactctaggataggttctcctactgaatgtccccatctcctatcctcacacacaatacactttattataattaaatgtcatcctgtcctgcaagatatgagttacctgagtatataattgcacctgttcctttcactactgcatttctactgttcagcaaagtactttgcatctagtatgtgcccaaaaaatctgtggctgtctttgttgaatgacagagagggatatctctgggagattgagtttaaatccctgtcctgttatgacatctgagacaagtcatagytcctgtattatctacctcacagggtttttatatatgaaaatgttttttcaaattgtgaaggtctacaaaaataagacaaaagcatttgatgggaaaagacactcagataattttgtgcctcttcagagaaatttaaatgatttaaatgccaattgcttgagtaagtgaataaaataataccctcatc

SEQ ID NO: 168987 - DNA, 617 bp, Homo sapiens
tctacaaaacatcaattggatttctatatggtaacaatgaaaaaatagaaattgatgttaaacakaatattatttatagtaacatcaaaaatatgaaatatttaaagacaattctgacaacatatatgaaagggctatgccctgaaaattacagaacattgttaaagaaatctttaaaaacccaaataaatggagagattacatcatgttcacgggtcagaacattcatgttgttaagatgtcagttctctcaagattgagctatagattcagtgcaatcctaatcaaaattccagcagatttttggtatatttaacaaactgtttctaaagttcatgtgacaatttaaaagatctaaaacaaatttcaagcaaaattgaaaaagaaaaacaaagttggatgactaacactatctgagctcaagatttattgtaaaagctgaagaaatcaggacagggtgctattggcatcaagaccaacaaacaaaccaatggagcagaagacatggtccaaaaatagatccacgcagagatggacaacttggttttttaccaaggtacaaagatgatttagagtaggaaaggtaggctgcaaaaaattgtgctgtaacatttgga

SEQ ID NO: 168988 - DNA, 606 bp, Homo sapiens
atctaaaacaaatttcaagcaaaattgaaaaagaaaaacaaagttggatgactaacactatctgagctcaagatttattgtaaaagctgaagaaatcaggacagggtgctattggcatcaagaccaacaaacaaaccaatggagcagaagacatggtccaaaaatagatccacgcagagatggacaacttggttttttaccaaggtacaaagatgatttagagtaggaaaggtaggctgcaaaaaattgtgctgtaacatttggatatccgcatgccaaagaatgaccttcaatccatatttcacctcataataaaaaattaacccaaaatacatcccactatgtaaaatctaaactataaaaccttcacaagacagcacaggataaaaacatggcacatgtatgcatatgtaactaacctgcacattgtgcacatgtaccctaaaacttaaagtataataataataaagaaaaaaaaaacayttgtgaacttgaattaggcaaagatttcttaggtcttacacctaaagcataatccataaaaggaaaataaatcatatattggctttcaaagttaaaaacttctcctcttcaaaagacagaatt

SEQ ID NO: 168989 - DNA, 607 bp, Homo sapiens
agtgtgctcactctttagtgcaaatgtagaaaaacaagctttgtgtccatcgggcatgagcagtgtaccccctattgaaagtatttttgccagacttggttgctcatgcctgtaatcctagtgrctcagaggctgaggtaggaggatctcttgaggccaagagttcaggaagagcctgggcaacatagagagacccaaaatctaaaatcaataaatcaataaactatagtcaggtgtggtggggtgcacctggagttccaactacttgggaggctaaggcaggaggactgcttgagcccaagagtttgaggctgcagtgagctatgattatcactgtactccagcccaggtgatgaaacaaaccctcatctctaaaactaaaataaaactaaagatagatagataaataaataaataaataaatatataaataagtgttctcagcacccacagctgcagctgtgaatggtcagatcagctccagagggccactgcgggagaggccccaaaacaataatacggagtccaccatcagctctgaaaccaccaagaagcagcagaccttttgggagagatcagcactgaccataagttttccttttctaga

SEQ ID NO: 168990 - DNA, 607 bp, Homo sapiens
agtgtgctcactctttagtgcaaatgtagaaaaacaagctttgtgtccatcgggcatgagcagtgtaccccctattgaaagtatttttgccagacttggttgctcatgcctgtaatcctagtgactcagaggctgaggtaggaggatctcttgaggccaagagttcaggaagagcctgggcaacatagagagacccaaaatctaaaatcaataaatcaataaactatagtcaggtgtggtggggtgcacctggagttccaactacttgggaggctaaggcaggaggactgcttgagcccaagagtttgaggctgcagtgagctatgattatcactgtactccagcccaggtgatgaaacaaaccctcatctctaaaactaaaataaaactaaagatagatarataaataaataaataaataaatatataaataagtgttctcagcacccacagctgcagctgtgaatggtcagatcagctccagagggccactgcgggagaggccccaaaacaataatacggagtccaccatcagctctgaaaccaccaagaagcagcagaccttttgggagagatcagcactgaccataagttttccttttctaga

SEQ ID NO: 168991 - DNA, 607 bp, Homo sapiens
agtgtgctcactctttagtgcaaatgtagaaaaacaagctttgtgtccatcgggcatgagcagtgtaccccctattgaaagtatttttgccagacttggttgctcatgcctgtaatcctagtgactcagaggctgaggtaggaggatctcttgaggccaagagttcaggaagagcctgggcaacatagagagacccaaaatctaaaatcaataaatcaataaactatagtcaggtgtggtggggtgcacctggagttccaactacttgggaggctaaggcaggaggactgcttgagcccaagagtttgaggctgcagtgagctatgattatcactgtactccagcccaggtgatgaaacaaaccctcatctctaaaactaaaataaaactaaagatagatagataaataaataaataaataaatatataaataagtsttctcagcacccacagctgcagctgtgaatggtcagatcagctccagagggccactgcgggagaggccccaaaacaataatacggagtccaccatcagctctgaaaccaccaagaagcagcagaccttttgggagagatcagcactgaccataagttttccttttctaga

SEQ ID NO: 168992 - DNA, 353 bp, Homo sapiens
tgcataactctctggccatggagaatcgtttgtgtggctagaatttcctgctgtgcccccagcccaatgccaggaaatctctcctctgttttttttaattgatcttttgttcgtatgtgttgtttcttcttytctttgtaggctatgagaaattgaagtaaaagaggagggctagtgatctagtaggaactggatttcaattttgaatctgagtacttggtgacatgagatagggtgttgataggttcacccatcacctaacagcagagcaaggagaagataagatgggatgccaagcacaagaatagatttctgaagggtcccagggcccatgaagaggggccagacccaca

SEQ ID NO: 168993 - DNA, 420 bp, Homo sapiens
agtcaaacttaggctgggtttctggcttcgcataactcccacattctttgagttttggattcctctagaatccatcacatctaagacccacartgacttcagttcctatattatattagagatctgaggagcatagcaagaatctgcttccctagccctagtttccatttaattcagagaacagaactcttaatttatatttcccttgacaaacaatggcttgacttacagagaaaaggcgtctcaggaacttggacaaacttgagaggagaactaaattagaggttaaataaaattcagccttcccacttcagccaggttctgccatctctagttactataaacaattgggattctgaaagtgttgaaaaaaatacattgacaatctcccccaaaggagaaaggaattataagaccatt

SEQ ID NO: 168994 - DNA, 587 bp, Homo sapiens
ttcctcatttgcttccaagttttctgttgatgggcgtttaatctatgcagaatttcattatcatctgatttgctgtggcctcaacataaggaaagacttttcaggtgtcaactttttttttcgtctttcccttcctctttgccctctytctctctttcacttgctgtctctctcctctctgttgtccctctaaacacacatgagcatatagaaacaaacatacacatgtgcctgcacaatttctctgtcctccctcttctctctttctctctctcctgtctcttctccctcttttcctctcccctgctttgcctcccttcactttctctctgtctctcttcatctccctgacgtttctctaaacactcatgagcactcacacgcacacatacaaatgtgtgcctgaactctttctctttcctccatctcctttctttctctgtctcctgtctcttctctctgtctgccccctcctctgtttttgtcactgttacgtcttctttccacctccccttatatttgagtttcagtgctcacatctaatggactgacatcttggctttgtcctccagcccaattcactcctc

SEQ ID NO: 168995 - DNA, 553 bp, Homo sapiens
gcaggctttgcacatggaaaagtggccacaaatgtgggaattataggaccagagaacctgagcatgatcagaagttctcaacagccaggaatataaagagtggaaaaaagaagttatcgctagggtcattcctattatttatgtataatttgttctcagtatcttctcaamacctgtaacagggcttggcatatatgagatgctcaataaatacatgtggaaagaaggaatctctaatcagaaccttgttaatggctctaagttttcatcatctgatcatttatgtaaacaacatttaataaccactgcatgtgtattaggcactggagagtttatagataaatgtgacatgagctcaggactgaaaatctgatggggaaggaaaaatatttacccaagtagccataagtgcactaagaaagggtcaagataagacatggtgagtcccctaaacacagggacgtattgtaaagagagttaacaaaaagccttgatgtaaaaactcttcaactagtgtcactctgttaaacttgaagctcaatattccctcttc

SEQ ID NO: 168996 - DNA, 553 bp, Homo sapiens
gcaggctttgcacatggaaaagtggccacaaatgtgggaattataggaccagagaacctgagcatgatcagaagttctcaacagccaggaatataaagagtggaaaaaagaagttatcgctagggtcattcctattatttatgtataatttgttctcagtatcttctcaacacctgtaacagggcttggcatatatgagatgctcartaaatacatgtggaaagaaggaatctctaatcagaaccttgttaatggctctaagttttcatcatctgatcatttatgtaaacaacatttaataaccactgcatgtgtattaggcactggagagtttatagataaatgtgacatgagctcaggactgaaaatctgatggggaaggaaaaatatttacccaagtagccataagtgcactaagaaagggtcaagataagacatggtgagtcccctaaacacagggacgtattgtaaagagagttaacaaaaagccttgatgtaaaaactcttcaactagtgtcactctgttaaacttgaagctcaatattccctcttc

SEQ ID NO: 168997 - DNA, 553 bp, Homo sapiens
gcaggctttgcacatggaaaagtggccacaaatgtgggaattataggaccagagaacctgagcatgatcagaagttctcaacagccaggaatataaagagtggaaaaaagaagttatcgctagggtcattcctattatttatgtataatttgttctcagtatcttctcaacacctgtaacagggcttggcatatatgagatgctcaataaatacatgtggaaagaaggaatctctaatcagaaccttgttaatggctctaagttttcatcatctgatcatttatgtaaacaacatttaataaccactgcrtgtgtattaggcactggagagtttatagataaatgtgacatgagctcaggactgaaaatctgatggggaaggaaaaatatttacccaagtagccataagtgcactaagaaagggtcaagataagacatggtgagtcccctaaacacagggacgtattgtaaagagagttaacaaaaagccttgatgtaaaaactcttcaactagtgtcactctgttaaacttgaagctcaatattccctcttc

SEQ ID NO: 168998 - DNA, 383 bp, Homo sapiens
tttttgaactttggtctcattatttttggaccatcatttggtctggaagattttctttccacgggttccttctgttcttccttttcaccctcttgaatgtgcttcccaaggcctctttttgcagtttcttttgggtggtttttattaccttcatgcatctaatctgagtagggagaagctccaagatcattgttatcttcccgcttggaatcctgcttgtttggttgttatgggagctcctccatttaaagggctggggaamtctgcttctccaggagctcgtgacccagctcccagaatggccttttccaacacaacatgagaaaccagcttcagcggcaaccctgcagggccacaacccatcctcactctcggaaacaaac

SEQ ID NO: 168999 - DNA, 574 bp, Homo sapiens
gcaactcaattgtctaatttctcttttggtttggccgcagcccagtagccctagctggtggacctggcccaccttggctcctgctttcattatggatggtgctgagagctggctgggacttcctgtggttctagtccaggtgaaccattccatacctacaaggcctctgtagccctgctccagaaacccagtcccactgccctcagtgagctcatttttagcatctcaactagcttcccatccccaagtctaaatctcgtccatacctcccaggacccaggacagcttgagagaacaaatcctttgttctttctcttccaaataatggggactcaatcaattttactttgatgtggccactgccaggttggtgctttccaggtgagcctctccaagaggtggggagatgtttcctagtcttcaaattttattaaatctagatattttggatctttcttaagtgattgctctcacctgtcattccaygtcctactcatcgtcttccttttccttttcccctttcctcatttcttttcccacaaccccttgaagaacaagcctgggtggccagcct

SEQ ID NO: 169000 - DNA, 607 bp, Homo sapiens
atatacctctgtgcagctttgagagaagcagggatgggaaaagggaaaagaaaacctatcccctttaatgtgagggcaatagtccattttgagtgtgtctctacaacctggaagcactgtgattttaaggcaatcaattaacatgggccgaagtgatggacctttcagggagctggtccagttctcttttttgccaagttgtcatccttgaggattagttactgaaaattgtaaggcatatggcatttcaccgtaggatttcctttttctaagwttctctaattggaggtgggattgacctaaatacattggcagtaagtgtgaggaaagggctgtcagttacagctagttttaaaattgcgtgtaattaaggagagcaacataattgagaaaaaatattttgtttatttagcatagaacagcaaggtgggctgtgattttgtgtaggaattttttaagtgttgcaaattttcagtagtggaacatttcttagaagtgtgaagcaatgaaaaatcattgtattctagaatagtctaaaatcatagcatcttcaaattgaagacatcataaattcatttctctctgaatatgttccctagatcataat

SEQ ID NO: 169001 - DNA, 607 bp, Homo sapiens
atatacctctgtgcagctttgagagaagcagggatgggaaaagggaaaagaaaacctatcccctttaatgtgagggcaatagtccattttgagtgtgtctctacaacctggaagcactgtgattttaaggcaatcaattaacatgggccgaagtgatggacctttcagggagctggtccagttctcttttttgccaagttgtcatccttgaggattagttactgaaaattgtaaggcatatggcatttcaccgtaggatttcctttttctaagattctctaattggaggtgggattgacctaaatacattggcagtaagtgtgaggaaagggctgtcagttacagctagttttaaaattgcgtgtaattaaggagagcaacataattgagaaaaaatattttgtttatttagcatagaacagcaaggtgggctgtgattttgtgtaggaattttttaagtgttgcaaattttcagtagtggaacatttcttasaagtgtgaagcaatgaaaaatcattgtattctagaatagtctaaaatcatagcatcttcaaattgaagacatcataaattcatttctctctgaatatgttccctagatcataat

SEQ ID NO: 169002 - DNA, 575 bp, Homo sapiens
ccctccaggagaaaaccgaagatcagataggtgcagtgcagtccccaaggtcacaggcatagaattgggtctcctgaaccagtgctaatttctatggcaacatggttttgctgctgtgtatattggggtaattgtgggaaataaggttagatggtgtggtgattttttaaaaaatcatgtccacaaattcttcaatactgctcctttcaacaggtggagcttagttcctctccctttaaatcagggctgacataatgacttgcttccagtgaataagatggaagtgaagatatgattcagacactaggtcgtaaaaaggcattgtgtctttggtcccatttgctttctgtctctctcttgttctctctccgcctgtctctctctgcctgtctgtctccgcctgtctctctctctgtctcatcacttgctctagagargtgagctccagctatcatgttgtgaggatactcaaacagcatataaagggggccatgagggaagggatagagaccccttgccaatagctgtttgaatgagtcattttggaagcagatcctccagcctcagtcaagctt

SEQ ID NO: 169003 - DNA, 613 bp, Homo sapiens
agcatgtctctctctgacttaatcccttctcctagtgcccccagtgtgccttattcatgagaaggcattaattctgatgctctttccctcctttagaaccatggaactagattttgtggaaagggaggtgttacaggtttaattgtattctcctcaaaaaagatatgttggagttctaacctstggtacctcagaatgtgaccctatttggaggtagggtattcacagtggcaaccaaattgaaatgaaattcttggaatgggttatagttcactgtgactggtgtccttatagaaacggataaaagggagaaatttcagatgcagagacacacatagaagaaagatgactcaggagtttgaggccagcctggccaacatagtgaaaccccatctctactaaaaatataaacactagctggacatggtggcgcgcacctggaatcccagctactcgggaggatgaggcaggagaatcacttgaacctgggaggtggagtttgcagtgagccgagatcttgccattgcactccagcctgggcaacagagcaagactctgtctcaaaaaaaaaaaaaaaaaagaaagatgacatgaagatgcagggagaagacag

SEQ ID NO: 169004 - DNA, 613 bp, Homo sapiens
agcatgtctctctctgacttaatcccttctcctagtgcccccagtgtgccttattcatgagaaggcattaattctgatgctctttccctcctttagaaccatggaactagattttgtggaaagggaggtgttacaggtttaattgtattctcctcaaaaaagatatgttggagttctaacctctggtacctcagaatgtgaccctatttggaggtrgggtattcacagtggcaaccaaattgaaatgaaattcttggaatgggttatagttcactgtgactggtgtccttatagaaacggataaaagggagaaatttcagatgcagagacacacatagaagaaagatgactcaggagtttgaggccagcctggccaacatagtgaaaccccatctctactaaaaatataaacactagctggacatggtggcgcgcacctggaatcccagctactcgggaggatgaggcaggagaatcacttgaacctgggaggtggagtttgcagtgagccgagatcttgccattgcactccagcctgggcaacagagcaagactctgtctcaaaaaaaaaaaaaaaaaagaaagatgacatgaagatgcagggagaagacag

SEQ ID NO: 169005 - DNA, 613 bp, Homo sapiens
agcatgtctctctctgacttaatcccttctcctagtgcccccagtgtgccttattcatgagaaggcattaattctgatgctctttccctcctttagaaccatggaactagattttgtggaaagggaggtgttacaggtttaattgtattctcctcaaaaaagatatgttggagttctaacctctggtacctcagaatgtgaccctatttggaggtagggtattcacagtggcaaccaaattgaaatgaaattcttggaatgggttatagttcactgtgactggtgtccttatagaaacggataaaagggagaaatttcagatgcagagacacacatagaagaaagatgactcaggagtttgaggccagcctggccaacatagtgaaaccccatctctactaaaaatataaacaytagctggacatggtggcgcgcacctggaatcccagctactcgggaggatgaggcaggagaatcacttgaacctgggaggtggagtttgcagtgagccgagatcttgccattgcactccagcctgggcaacagagcaagactctgtctcaaaaaaaaaaaaaaaaaagaaagatgacatgaagatgcagggagaagacag

SEQ ID NO: 169006 - DNA, 613 bp, Homo sapiens
agcatgtctctctctgacttaatcccttctcctagtgcccccagtgtgccttattcatgagaaggcattaattctgatgctctttccctcctttagaaccatggaactagattttgtggaaagggaggtgttacaggtttaattgtattctcctcaaaaaagatatgttggagttctaacctctggtacctcagaatgtgaccctatttggaggtagggtattcacagtggcaaccaaattgaaatgaaattcttggaatgggttatagttcactgtgactggtgtccttatagaaacggataaaagggagaaatttcagatgcagagacacacatagaagaaagatgactcaggagtttgaggccagcctggccaacatagtgaaaccccatctctactaaaaatataaacactagctggacatggtggcgygcacctggaatcccagctactcgggaggatgaggcaggagaatcacttgaacctgggaggtggagtttgcagtgagccgagatcttgccattgcactccagcctgggcaacagagcaagactctgtctcaaaaaaaaaaaaaaaaaagaaagatgacatgaagatgcagggagaagacag

SEQ ID NO: 169007 - DNA, 356 bp, Homo sapiens
gcaggaaggtggaaagggacatccggccacgccaggccagggccaggcagggctctttgtctccatctgggattcattttcatgagcagctgggtatccctttgcacctgtgggcaggtgggggttgaaaggtgagaggccaagcccccagcccctgtctagccaagaacaggcagagagactccccaagccttggcttctccatgtgaaatggggcacwgggaggttctggggagggtgggtcacccacacaagagggggagcccacgatgtggggggatcaggtgggacctgttttggggcatctggaggtagctgctgggcccatgtaggctggagttgacttctgccccagc

SEQ ID NO: 169008 - DNA, 559 bp, Homo sapiens
agctacagaaataaaactaatgggaatgaaacaatacaaagtaatgaaatgctaaataaatggactaactatatagagatgagaatgtcttagaatgatggaattttcagggaagatgtgaaatctgatctggactgtaaagaactagcagratttgcacaagtagaaggagagagctttccaggtgggagaaagagaaggacctgaggcctagaggagggattagtcatagaccatgccagcaccagtggtggccccagcagcttaagtggaattcagtcttatttttaatttttttaaagagagtcttgctctgtcacccaggctggagtgcagtggtgccatcaatatggtttaatgctaattgtgcactttttaatgaaaatagttttattaaaatatgttatgaacagatatgatcttatactttggttttagagcagcaaagccatggttttattaaaatatgatgagcacattgaactcacttgcactatttgcatacttgtaatatttgtggattattaatttcaaaataaatcaaatagttggttatgca

SEQ ID NO: 169009 - DNA, 567 bp, Homo sapiens
  misc_feature (1)...(567): n = A,T,C or G
nnnnnnnnnnnnnnnnnnntagcataagtttctaaatgacattcttcccgacatttaaatgtgcrcatacaactatagttttcaagactagaccatcttagatcatctagacatcagcaaactttatactgtaaagggccagataataaaatttttgaccttttagacatatggttcctcttgcaactaatctactgccattgtatggaagcagccacagacaatatataagtgaatgaacatggctgtgttccaataaaactttatttacaaaaacaggtgttggaccaggtttcatttgtgggctatagtagtttgctaacccctgatctagatgagtagttctcaacctgaggagctttcaaaaaatttcacccattgatatctactcctgaaccaattaaaaaagaacatttggggatgcaggttaggcattagtacttatttttgaaaaacttcttaggtgactgtactttagagccaataccgagaaacaatgattcaagtttctcaccacaaagacctttttacacaattttatacctgtccaacaggaaaacaaacaaa

SEQ ID NO: 169010 - DNA, 567 bp, Homo sapiens
  misc_feature (1)...(567): n = A,T,C or G
nnnnnnnnnnnnnnnnnnntagcataagtttctaaatgacattcttcccgacatttaaatgtgcacatacaactatagttttcaagactagaccatcttagatcatctagacatcagcaaactttatactgtaaagggccagataataaaatttttgaccttttagacatatggttcctcttgcaactaatctactgccattgtatggaagcagccacagacaatatatamgtgaatgaacatggctgtgttccaataaaactttatttacaaaaacaggtgttggaccaggtttcatttgtgggctatagtagtttgctaacccctgatctagatgagtagttctcaacctgaggagctttcaaaaaatttcacccattgatatctactcctgaaccaattaaaaaagaacatttggggatgcaggttaggcattagtacttatttttgaaaaacttcttaggtgactgtactttagagccaataccgagaaacaatgattcaagtttctcaccacaaagacctttttacacaattttatacctgtccaacaggaaaacaaacaaa

SEQ ID NO: 169011 - DNA, 182 bp, Homo sapiens
aactgattgcttggggacagcacgactaatgtccaaactcagttcctctggtgccatggcttggagggtcacacctgcagtcatgggcggcacatttaaacgggtgctgggaatccasgaaagaaagagagaaaatagttgggggaacggatgcctcctactactttctcctccatcctgga

SEQ ID NO: 169012 - DNA, 182 bp, Homo sapiens
aactgattgcttggggacagcacgactaatgtccaaactcagttcctctggtgccatggcttggagggtcacacctgcagtcatgggcggcacatttaaacgggtgctgggaatccacgaaagaargagagaaaatagttgggggaacggatgcctcctactactttctcctccatcctgga

SEQ ID NO: 169013 - DNA, 582 bp, Homo sapiens
  misc_feature (1)...(582): n = A,T,C or G
ctgccaggactttttattgaatttactgakgcacttttaaatgaaacatgctgcttttggattaacacctccagtaaagtaaaggaaaatctacaagtacttaaaaatcaaatcaaaattattaacaggctcagggaaaatgccgactccagccctgggtggctacaatccctctttaatgaattccagtcttctttatggaattggttagtcactttaaagagccctctcttgcttatatgtcttgtattaatatttacaccttgtatactcaatactgtaacttgaagtgtttcttctcgcctagaagcaatcaaactccaaatggtgccgcaatgtgaaccacacatggacatgccattcttccaaggacccttaaatcaaccccaggaggagccctagctgctgttccccatttgacaccccttttcagcaggaagtagccagaaagagtcatcgcccaaaaccccctaacagcagtcagtgtggcatctccacagggaggaatgttgtaagagttaataagaaatttttaagaaattattttaggcagatagaaaaagcggtcttgnnnnnnnnnnn

SEQ ID NO: 169014 - DNA, 582 bp, Homo sapiens
  misc_feature (1)...(582): n = A,T,C or G
ctgccaggactttttattgaatttactgatgcacttttaaatgawacatgctgcttttggattaacacctccagtaaagtaaaggaaaatctacaagtacttaaaaatcaaatcaaaattattaacaggctcagggaaaatgccgactccagccctgggtggctacaatccctctttaatgaattccagtcttctttatggaattggttagtcactttaaagagccctctcttgcttatatgtcttgtattaatatttacaccttgtatactcaatactgtaacttgaagtgtttcttctcgcctagaagcaatcaaactccaaatggtgccgcaatgtgaaccacacatggacatgccattcttccaaggacccttaaatcaaccccaggaggagccctagctgctgttccccatttgacaccccttttcagcaggaagtagccagaaagagtcatcgcccaaaaccccctaacagcagtcagtgtggcatctccacagggaggaatgttgtaagagttaataagaaatttttaagaaattattttaggcagatagaaaaagcggtcttgnnnnnnnnnnn

SEQ ID NO: 169015 - DNA, 582 bp, Homo sapiens
  misc_feature (1)...(582): n = A,T,C or G
ctgccaggactttttattgaatttactgatgcacttttaaatgaaacatgctgcttttggattaacacctccagtaaagtaaaggaaaatctacaagtacttaaaaatcaaatcaaaattattaacwggctcagggaaaatgccgactccagccctgggtggctacaatccctctttaatgaattccagtcttctttatggaattggttagtcactttaaagagccctctcttgcttatatgtcttgtattaatatttacaccttgtatactcaatactgtaacttgaagtgtttcttctcgcctagaagcaatcaaactccaaatggtgccgcaatgtgaaccacacatggacatgccattcttccaaggacccttaaatcaaccccaggaggagccctagctgctgttccccatttgacaccccttttcagcaggaagtagccagaaagagtcatcgcccaaaaccccctaacagcagtcagtgtggcatctccacagggaggaatgttgtaagagttaataagaaatttttaagaaattattttaggcagatagaaaaagcggtcttgnnnnnnnnnnn

SEQ ID NO: 169016 - DNA, 488 bp, Homo sapiens
atctgcaaaccaagaaaagaaaaatatttgatatgcataataaagtgacagctatgtgcattttaattctgcaatgtgtttattttcctgtattttgtcatttgaaaaaaacaatacacagagtttagaatgtatatagaacttaaaatttctgtctccagatactttatcttgtaaacataagatgtaagttcagaaaacctrcattgcattattattataataatgtaagttcagagaaaatgaggtctgataataatcttgagtatcagtttaatcataaagaataaataactgatatgaaattaaaagggaagttgctttcgccaacactctacccagaaaatacacattatagctctcaaaggggagaaaaccagttctcttgagattccccatctgcagctgaattctacagagattgaaaaaccattgaaatgaattgccccaaagttcaactcaaggttttactttgaagggcacactga

SEQ ID NO: 169017 - DNA, 585 bp, Homo sapiens
gtagtcttctcattctgggcttgtttatattcatccttcttgggaagtctttccagatgtttgaaatgatgtgggtattgtgatctaagctgaatctgtgttaaggggcaccacacgccatttaatattgtgcttctttgcagactcacagaggtactgccttgatggtcttggaaaggtccagaagatttccctggattaccaggcagagactctcattctcttcccttactttctcccaaacaaacagattctctctttctctctctctctctctctctctcctctgttctgagccaactggagctgggggtggagtgatacaagctctcctgtgggcactgataccggaactgtgctgggtcggatctaaagccagcacagcactgggtctcacccaaggcctgctgtaaccactccctggctatcrcttgcaacctctacaatcagcaagtggcaaagccatctaggtctgtgtccatcctttcatgatggcaatctttttcaggacctgggtgagtccagagctgccatcttggagccaggaactagagtcaaaaaccttagaagtctaccaggtattct

SEQ ID NO: 169018 - DNA, 585 bp, Homo sapiens
gtagtcttctcattctgggcttgtttatattcatccttcttgggaagtctttccagatgtttgaaatgatgtgggtattgtgatctaagctgaatctgtgttaaggggcaccacacgccatttaatattgtgcttctttgcagactcacagaggtactgccttgatggtcttggaaaggtccagaagatttccctggattaccaggcagagactctcattctcttcccttactttctcccaaacaaacagattctctctttctctctctctctctctctctctcctctgttctgagccaactggagctgggggtggagtgatacaagctctcctgtgggcactgataccggaactgtgctgggtcggatctaaagccagcacagcactgggtctcacccaaggcctgctgtaaccactccctggctatcgcttgcaasctctacaatcagcaagtggcaaagccatctaggtctgtgtccatcctttcatgatggcaatctttttcaggacctgggtgagtccagagctgccatcttggagccaggaactagagtcaaaaaccttagaagtctaccaggtattct

SEQ ID NO: 169019 - DNA, 518 bp, Homo sapiens
cttttctaatcaacctgtttaaaaaatttctctagtatctataatcattgtcaatatttttaatactaatgctcatcacacacaaaactcctatattcatatttgactcacgaaaaatacccatatttggctcacaaaaatgaaatatgtcttatatttgggggcataagaaacaagagaaaaactggaagtcgcaaacaataatcgaagcattgagctatgcaaaagaaatgttggattgggtgaaaaaaaaaaggagttaaaacttaaaacttctattaacccacaatgatttactgctacctacttcataaaagataggctgttagaaaattaggggatacaattgcraataatcaaaaatctctgaccctcaaagagagtcacagaagagtgagaaagatacagtccatgaaatggcagattcaaattttgtaaattttaaagtgttctgtgaaataaaaaaattatacaattcaggttttagtatatgctatttcagacataataacaaaatg

SEQ ID NO: 169020 - DNA, 546 bp, Homo sapiens
aaccatctgcagagagtgatcagaatgacagcctcaggaagtaaccacggcaagaagactatagggagtaatctgaaaggagcaggctccaggcaggccggacggaggctgtccccttagggttgagggtgtggctagagaaggaaattggaaattgtgagcaaagtgctccgtgaaacttacactttatgggacaggtttatgcctaaattaaatgtataggaaaatatatgttgtccttaggcctcagcgttggcttgtactttctcataaaatccttttgtgtatgtttgtaaactttaggtagctttmaaggtaactctctgaaatgggttgatcctttctgactcttaagcctcaagattctggtacccagactggaaaaaccatgtaactaacactgcttataaggccccctttagcaaggtgttttcagtctgagttttctatatgctacagacgacttacagtggtcctcaccaaagaggcagtgatcctggaggctagcctggaaactatttttggaggtgggagctgggaaatact

SEQ ID NO: 169021 - DNA, 544 bp, Homo sapiens
tccatatgatctcaaaatcctacccctggatatacccaaaagaagaaaatcagtatgtcaaagagatatctgcactcctatgtttgttgcagtactgttcacaatagccaagctttggaagcaacctgtgttcatcaacagaggagtggataaagcaaatatggtacatatgcacaatggagtactatccggccataaaaagaatgagatcctgtyatttgcaacaacatgggtggaactgatggtcactatggtaagttaagtaagccaggcacagaaagacaaaccgcatattctcactgatttatgggagctaaaaatcaaaacaatgaatctcacagacagagagagtagaaggatggttaccagtggctgggagggtactggggagtgaggtgtgggggcagggaagtaggaatggttaatgggtaccaaaagtagttacaatgaatgaataagacttagcatttgatcgcacaaagtgtgactatagtcaataataatctaattgggcattttaaaataacgaaaagaatataatttg

SEQ ID NO: 169022 - DNA, 270 bp, Homo sapiens
gaatgttaatttcatggagatgattgttagtacagaatttgggatagaaaggaagtaatgggaaggaagagtgaagaaaggagagaattaaaaacaaagtcatatattcatataccatattatttattaattaaacaaattttactgaatatcccacaacaaaatcmaaaacaaatattggtctctgagatagttctagcatccaaatttcttggctaatctcctaagtaaatagcttattttaaagaaaatcaaaagtcagcgaacaaa

SEQ ID NO: 169023 - DNA, 511 bp, Homo sapiens
gaattcctggattccagacaaagcaaaattgtttcttaaaatcatgactaccctgccagtagtgtattattattatttcttmttattattatcattttaagacaggatctctctctgtcacccaggctgaagtgcagtggcatgatcacagctcactacagccttgacctccctggctcagtcaatcctcttgccttaacctccctagtagttaggcatgagccaccatgcctggctaatttttttcatttgttgtagagatggtggggtgtctcactatgttgcccaggctggtctagaactactgagctcaagcaatcactctgcctcagcctcccacaatgctaggattacaggcatgagccactgtgccaggcttatttcctatttttttcatcactttgaagagtcagactttctaatttttgcctatttcatgactgtcaaatgccattttattatgattttaacttacatgtacctccttgttagccatgttgaacatattttc

SEQ ID NO: 169024 - DNA, 652 bp, Homo sapiens
ctggcctctgtgtccgtgactgtattatatgggtgcttaatctaaagactggcagggttgacttctgctttactattttctcattctgtgaaatgcgcccttcctttgctcacttactttcatactcatgccctgattcaacaaatatttatacagcacctgctcagtgmcaggcacaaaggagacctggagttggaggtggggatggggatgcatagatagacaatgggcggctccaacccttgaatccaacttgttgggtggagggtgagaatgcgagacagacatctacatggataatactactgggtgggatctgattgatagctcctggggtaactccccacacaggcctgtacagagggtgcttgcctcagaaatctgggaaactgaggtaatgccaaggggaagatagaaggtagcagtgttcttgagtgggtaggaaggctcagtgggactgtcctgagcacttcactacatttaaagagatcacagatcacctctcacccacctgatggagacatcaggaatgtatgcatgtgatgactgtgtgtctagatatttcgggttgagtaaaaaacccacatggaggtgtttatgctataggctgggtctgttgaagaggctaccatgttctctgagattagttgcc

SEQ ID NO: 169025 - DNA, 630 bp, Homo sapiens
caccactcattttttttttgtatttttagtagagacggggtttcaccatattggccaggctggtctcaaactcctgacctcatgatccacrtgcctcggcctcccaaagtgctgggattataggcgtgagccactgtgctccgcctaagtaagcatttttaaaatgaaacaatggtatgtttgttgtctgttgctgtgtaacaaactatcccaaaatttagcagcttaaaacacaaacactgaacataccacatagtttctaagagtcagcaatccaggagcagctcagccagggttcaaggtctctcatgaacttatggtcaagctaccagcaggggctgtggtcatctgaaggtcagaggatcgcatggttgttccacagactgttgggcacgctttaattataggccttgtgaagctctccacatcgatgtctgaatatcctcacgacatacaaaagctggtttcccctaaagcaagtgacagagagaaagagagagacagaaacagaagtcacagcatctttcataacctgattttggaagtgaaaaactattctttctgctgtttcctattgttcatatagaccaatcttggtgcagtgtaagaaaaaaatgtacgagggacaca

SEQ ID NO: 169026 - DNA, 556 bp, Homo sapiens
agtcatgttgatagtgtgtacctttaacatgatgggatgagaatgggatgttacctctgkggtcttcctccccaaaccacataactccagtctaatcataagaaaaacataagacaaacctcaatggaggtgcattctacaaaatacctacaattaattaaacctattatgataactttgaatgttaaagggaaaaggtcaagatattgatcctcttcctcccagaaagctccttgtgcttttggcaaatttgcctgcttattccccaataacttttaagttcctttgattaatgagtgttggggagaggcagcctaattctatctgcttatagcattgagcccaggactttgccaagcaaaaaattaatcaaacaaaaagatacaatttttgtcctttgtctttccagaaccatgtgtgctttcttgctttatatcaacataactgaaaggggccactcaagtgattcttccccaaatgaaagtctgttcaaagatttcttagtatttccatttaaacaggaaagactgataaccttttaatgatcaggctggtg

SEQ ID NO: 169027 - DNA, 554 bp, Homo sapiens
tgcaaacttgaccttctgggctcaagtgatcctcccacctcagcctctatctaccaagcagtttatgtgctagggtcggtgctaaagtctttattttactatctcatttaatcctcactacaccctcaagaggcaggtactgctttacccatttgacagatggggagtctgggggttagagaggttatatgacttgatcaggtttttcagctagtgttttttttagggctcaaatccagacctttctgatgccagagctcatgggcataaccagagagcaacactgagctttggcaaygtaatcatggtctgtaagggaagcccactgagccgtttcaaaaaaatccattttgaagaatagccaggggaacttttgggaggcttaacaacaggtgttaaaaaggaacacaaacagaaacagaagaaaatcccccaatagcattctttcccttcctggtgttctctctcactggctctggctggggatgagagcaaagccagcaggggacaggagaggttggaaccttgggcagctggggagggacttgggtagc

SEQ ID NO: 169028 - DNA, 554 bp, Homo sapiens
tgcaaacttgaccttctgggctcaagtgatcctcccacctcagcctctatctaccaagcagtttatgtgctagggtcggtgctaaagtctttattttactatctcatttaatcctcactacaccctcaagaggcaggtactgctttacccatttgacagatggggagtctgggggttagagaggttatatgacttgatcaggtttttcagctagtgttttttttagggctcaaatccagacctttctgatgccagagctcatgggcataaccagagagcaacactgagctttggcaatgtaatcatggtctgtaagggaagcccactgagccgtttcaaaaaaatccattttgaagaatagccaggggaacttttgggaggcttaacaacaggtgttaaaaaggaacacaaacagaaacagaagaaaatcccccaatagcattctttcccttcctggtgttctctctcactggctctggctggggatgagagcaaagccagcaggggacaggagaggttggaaccttgggcagytggggagggacttgggtagc

SEQ ID NO: 169029 - DNA, 521 bp, Homo sapiens
ctaaccaggcttagagtttggagcagactgttgggtgatgcccacatcctgcttcctgctgtccacctctatcttcagaggggcctgggccccatgtccagttccatagggtgaatcatgaactgtttaaatcaaggactagatacataagacatggtccctttctccttctggatgttgccctgtgtatgtgttgatgtctgcgtattgatgcctggaattgcagcagccatgttgggagtacgaggggagctggtctgggcagracacactgaggatggttgagtggaaagtggaagcagcctggatccttgctgacattgctgagccactgaggaagccaacactggagccgtgttcctctggagttgttataggaactaaattcccctattgtttaaagttattttaaattggggtttctatttcttacagctgaaaatattaaaattcatatagaggtcaggaaagagatgccctacacagaatcccgtatcgggcacatcgtgggttcctagttg

SEQ ID NO: 169030 - DNA, 553 bp, Homo sapiens
tttggttaaccgacatcttgttcctattgatcaatgggagcaagcaattcaggtaattatttataaggtaaagaatgggaatttggaatctgtgtctggcctggtcataagtaaacaagggaggcatgtgtgagttttctctaagtcatatggagaagtatgagtccttgcagtaagcgttttccagaacacaaagagttagggatttcttaaccttcactgttcttcagaatcactgggctcaggtaaaattcaacattgtcaggagaaagtgcttttagaggtcaagtacattgtttaaggtcacactgctaagacacagtggaaaagggactcaaatgagatctgatggactccaaaactcacatcytctcccctgctcctgctgaccttgcaagtctaaaattgtattgtcaatcagagcatttctcacagcatctggtggagtgctggtcagatgtacctggtaaatacttattgagttgaactgtcccatttttccagggtggtgagggtagggtgagaatgtgagaatgtgtgggttggttcatag

SEQ ID NO: 169031 - DNA, 596 bp, Homo sapiens
tgaatgagaaaagcaaaggctatttattgtgaacttgctatagcaagggagtcagccaccatcacttgtgtttagtgaaggctcaaaggcaagcagagtgggaaagcttcacagtggaagaaagcgaaggcatcaggtgtgctggtgcraggcagttagcatggagaagctgtaggggccatgaaggcaaagcgaatgtgattaatcctctgtgattcattagaggggcatatttggctttctctggtttgttttaaattggatgtgggggctgggcatggtggcttatgcctgtaatcccagcactttgggaggccgaggccggtggatcgcttgagtccaggagtttgagaccagactggccaacatggtgaaaacctgtctctactaaaaatgcaaaaactagccaggtgtggtggcaggcacctgtattctcagctgttagggtggctgaggcaggagaatcacttgaacctgggaggcggtggttgcagtgagccaggatcgtgccactgcactccagcctggccaacagagtgagactccatctaaaaaataataaataaaaaaaattaaataaattggatgtggggaca

SEQ ID NO: 169032 - DNA, 596 bp, Homo sapiens
tgaatgagaaaagcaaaggctatttattgtgaacttgctatagcaagggagtcagccaccatcacttgtgtttagtgaaggctcaaaggcaagcagagtgggaaagcttcacagtggaagaaagcgaaggcatcaggtgtgctggtgcaaggcagttagcatggagaagctgtaggggccatgaaggcaaagcgaatgtgattaatcctctgtgattcattagaggggcatatttggctttctctggtttgttttaaattggatgtgggggctgggcatggtggcttatgcctgtaatcccagcactttgggaggccgaggccggtggatcgcttgagtccaggagtttgagaccagactggccaacatggtgaaaacctgtctctactaaaaatgcaaaaaytagccaggtgtggtggcaggcacctgtattctcagctgttagggtggctgaggcaggagaatcacttgaacctgggaggcggtggttgcagtgagccaggatcgtgccactgcactccagcctggccaacagagtgagactccatctaaaaaataataaataaaaaaaattaaataaattggatgtggggaca

SEQ ID NO: 169033 - DNA, 579 bp, Homo sapiens
agttcagactcttcctttgagtcctttgtgccctagtcctagttttaagagtcttggctacctgtaggagaccttaagggtccctcaggtgttgctgggttctctaagaactccttagagacctgtttgagacaaggtcttgctctcttgctcagagtggagtgaagtggcacaatcacatctcactgcagcctcggtctcctgggctcaagcaatccttccacctcagcctaccgcgcagctgggaccacgcctggctaatttttaatttttgtagagacggggtctcactatgttaccaggctggtctccaactcctgagctcaagcgattctctcacctctgctttccaaagtgctgagattacaggtgtgggccaycgtgcctagcctaggttttgtaagcaattatgcaaccttcaccctttccccctagaggctctaaaactctgccattagagagtccttctcaagcaaaccagggatatgctctggtatgaaaaggtggtgggttttccagtttgttctgagggcccaagcccctttagaacaagaatcaaaacaatgcctgggacctgcc

SEQ ID NO: 169034 - DNA, 432 bp, Homo sapiens
ttttgtttgcatttccctaatgactaatgatctagagcatttatagatatgcatattggccatttgcatatcttctttggagaaatgggtattcagatttttttgcccattttaatattggataattagtctttttacattgagtcataagttttttaatatagacagggtcttgctctgttgcccagagcaacatgattgcagtggcatgattatagctcactgtaacctcaaactcctggactcaagtgatcctcctgcytcagcctcctcagtagctgggattacaggtgtgcaccaccatgcctggctagctttaaaatcttttgtagagacagggtctcgctatgttgcccaggcaacatctcaaactgctggcctcaagcaaccctcctgcctgggcctcttaaaacattggtattacaagcatga

SEQ ID NO: 169035 - DNA, 482 bp, Homo sapiens
tggaggcaacaccctgtgctgtcgggtggtgatggggatgactactcacttttgggtgtcccttcgaggcctgtcccctgaaatctcataatcccctgtctcctggaccctcctatccgcatcttccacttgtccccccctttagctgcaggagatcaaagttctccaggagatgcagctgcttcagctggctgtagacaattatcaccttcagcctgtggagcaattttgggtctgcctccagttaacggagtggctcagtgagactgagaggtgagggtccagcagatcggcagaggttatggagaatatttattttgggccagctgccaagagcctgtggccatggctccctggtcagtgtcaggccctgctgcatggtgaccccrggggcccagcactccagctgggcaggcactgggaaggagactaggggtgtggctcctacatagagacctcacatctgcctctatgacttgtag

SEQ ID NO: 169036 - DNA, 390 bp, Homo sapiens
tattgaaatccaatattcatcaccaattttaaattcaatagtgttggatagtagagctaagggcccagaaatgtaaaatatgttttaaatattctaaaggttctgtcagaaaacagtactttgaaattaattttttagaatgttttataatrttctctcctctctactgaacataatactaggtcagtaattggagaatcccagcaagtcatgttacttttttctaacaggtcttgctgtctgtaaccctcatctgatctcctgccttgagcaaataaaagagccctggaatgtgaagagacatgagacagtagtcaaatactaagataggtaagcatgaatgaagcagataacacagaccagaggtacaaaggtcaaaaagaatgccag

SEQ ID NO: 169037 - DNA, 390 bp, Homo sapiens
tattgaaatccaatattcatcaccaattttaaattcaatagtgttggatagtagagctaagggcccagaaatgtaaaatatgttttaaatattctaaaggttctgtcagaaaacagtactttgaaattaattttttagaatgttttataatattctctcctctctactgaacataatactaggtcrgtaattggagaatcccagcaagtcatgttacttttttctaacaggtcttgctgtctgtaaccctcatctgatctcctgccttgagcaaataaaagagccctggaatgtgaagagacatgagacagtagtcaaatactaagataggtaagcatgaatgaagcagataacacagaccagaggtacaaaggtcaaaaagaatgccag

SEQ ID NO: 169038 - DNA, 591 bp, Homo sapiens
ggagaacaagccagaaaaatatagagtaactaggagaaagtgtctgaaacatattcaggaaaaaaagaagtggaatgatattttaaaataccaatagttactacaaattcataagtaaaagaccataaccaaatagaaaagatgataaaggctatcacaagaatataaagaataagagcgattgtcgttttaaatgttcaataagtactatatatgaaaatatgttcaaccatgttatttatcagggaaaagctaatcaatggtaaataatttccatagatcacatgggaaaatagataaaagattagtaacatcaatgctggtgacagtggtcaagatgactctcatacatttctgattaatgtgctaattacaaagatcttctagaaaataatctggcagaatctaaaattgaaatattccattagattcagcaatctcaccttgtaataaaaatayggaaaaacatctctaacatataaagacatgtatttaagcatattttctgcagaattcattgaagtgacaaaaataaaaacatcctaagtactcattaatagaagaatagctaaataaatgatagcattatcc

SEQ ID NO: 169039 - DNA, 446 bp, Homo sapiens
cctccaagtaataagcacataaaaaactgtaatatacacccatatcacagaattatcttgatttatgtaagtagcacagacagaattacctaggggaatgtgcagcacaattgaagtggaaaatgctaaatctcaaattgggtctcacagtagtttgcagcagagatgtcttgctcaagagggtcataaactgactttaatggaagtcagtmatttgtctactgcatgttgaaccatctaattgttgtttatgttgatgtaattgctatgatgaaagtggggaatagggtccaaaacatattttcaaagtattagttctctgaatttagagtgatatttgattaaataaaaaataaataataaattgatttgactggctagtaaatccctttttaaaaaatattttgcactatagaatatgctttatactaagagacaacagagag

SEQ ID NO: 169040 - DNA, 399 bp, Homo sapiens
caaatgtaaccaaaataataaaaaaaagtacacagaaaactattaaaacattgatgaaagaaatttaaaacaacacaactaagtggaaagttatcacatattcacggactagaagaacaaatattgttaaaatgtccatactgctcaaaacaatctatagattcaatgtaattcctatcagaattccaatgggatatttttatgsaaacagaaaataaaaccccaaaattcatatgaaatcacgaagacctaaaatagccaaaggaatcttgagaaagaagaatgaaattagaggtgttacacttcctgaattcaaattatgttacaaatctatagtaatcaaaatagcacggcactgaaataaaaacagacaaatggacaaatggaagagaatagaga

SEQ ID NO: 169041 - DNA, 592 bp, Homo sapiens
aggcctttcaaaacaaagagctatcagatttagcaaataaaaataaaagacatccatttaaatgtgattttcagataaacaacaagtaacttttacaatagatatatcctatgcattttcccatgcaactttgggcaaatttatactacaaaattataatatggcttttctaaaatacaaatttatcttggaattctgtgttttatcgagcaactttattcaaraacagtttcctactctaatatcctcctaatttctttaggtttagccttaatacatacatttaaattattgggaaacagcagttctgtgtgctttcaagactcataataaccttggaaacgttgcacttatgactgtgaaattatcataatcttcaagtatagtctacattgaaaagaatgttgggggccgtaactttcctttatcattcatcagtgttcgactcaacatgtctttttgtttgcttcttcaaatttttgcaaaatgtcatactgacattgtgcttgtgtcaactgaaatacttaatactacctacacccccaggttatcattctgccactccatgcatatgctaaggattttcaaccta

SEQ ID NO: 169042 - DNA, 429 bp, Homo sapiens
tggttactgccataaaattaaataaatccactcttaatcattaagtatctactattgtcaacatatgatattttttggttcaatgtttcatttaatgaataattcttgagtaccttttaagtattaattcctgggaatagagcagtgacacaaagctctgctcctcttatctttgtattttaatggaagaagataaataatgrgcacaaaaatgaatcaatatgtaatattccagcgagatggagatttgtgctatgaaggaaaataaagcagggtaaagggacagaaaggggcaagaggaggggagtgctattttattgaggcttttcaagcatgcttctctgatataatgacacgtgagaggagattcaaggcaagtgagagaaaagccatgttgataactgagtgagagcatttgaagcagagcag

SEQ ID NO: 169043 - DNA, 395 bp, Homo sapiens
actctcaccagtccacctgaaccctcccaccactgcatcccctatgccactttgccatgcacttgtcatagccctcccaaacccctccgcacattgcttagccagcttgcaggtgcaggggaccttcccttccttctccagctgaggccatccaccacaatcaagtaggctttatctctgggttacaaggttggttcaacrtatgcaaatcaatgtaccccaccatgccactgctgccaatgtgagtgtacccccaaccaactgcatagccattgccattttgaacatgtatatggaggccagtggccccacccttcattgtgtaccaccacctctgctggcccaaatgaatgcatggttccagaagccctgcacccaccagagctctgcccaga

SEQ ID NO: 169044 - DNA, 419 bp, Homo sapiens
caatattacattcattattattatgaaattgtatataatgtgcaaaaacatttattgacattaaaaaaggagtgatgagaagaccacctaattttaagtgagatgatgatggttaaattttgttttggacttcatattttgtttttattttccaaattttataaaattatatatatcaattttataascagaacaaataatttgaaaatcatatgtcgtcaatgatttacagcattttaatctactaatttatagaaaaaacattgcaaatgtttgtgttgctttgtttcatatttatatatttggaaatatatgatgtgatggtttatataaatttttattttaataagattactgaaatgggcttgattgcaataataacagtttttcaattaatatatttcctcttttgaaaactt

SEQ ID NO: 169045 - DNA, 422 bp, Homo sapiens
ctttagtacacattatttaattatgataccaacatttttattatggttagttttctgaagacattactatttcaacataataacagtctcaaaattatataaatccccagaatcaagttttattataattagcaaaagatatcaatcataaatgaattataatgcaggtatcagttaactaatttagtattcttcttacataacaataacactttagagactgtgaagaattgtcattcactcaaattttttmtgggatacttaagccttttgtggatgtgtaagctactgggatatggacatttatctttgattgaagcagcttttccagaaaacaggtacatcagtagcagtgtttgaaagaagagaatgtactcaggtcagaagcaagaaaccaaacaaggaatgttcatcgtgtcaaa

SEQ ID NO: 169046 - DNA, 560 bp, Homo sapiens
taaatagccatcaaaccagattttaaattcatttccaaataagaaattcttagataatatatgttataactcaaatccttaatgccgaaaatgaaatgttaaaatagtgtatctcttcagttatattccagtattggcttttgtgacataatctttgaatatgtcaacaatttaccattctcagttgttaaagaaaaactttatcaaatagagttaaagaagcggggaagattttcttcaagactatttcaataaggaagaaagactgaattaattaaaaacagttgggggtagaatttttaaagcatggggtaagttctatgggatagaggtggggcatcaatgtgattaggaaatctgtacttgccaattgtaasttattaagttaggctcttaccccctcacagagactgagagagaggagtgatagccttcttgaataattacatttcaaaaagatggctcccgagtccttgagaaaaacattgctatgttgtaaatctgtcaagagactgagggaagattaacatctacaaagggcagagaaagaatttgcaatt

SEQ ID NO: 169047 - DNA, 577 bp, Homo sapiens
acacaattctttataatggtagatgtccaataaatatttgcaaaccagaattaataggtctgctctaaaattgtgtcgctgttatatgtaaaacacttttttcacagtatttctgaaatctgttttcttccttattttgaaatttgacaattttgtcatatacagcttctgacaccacctcttatccttatgatttatcaggtgatgacaatgattgcaagatcatrtctgcaagttgttacattaccaagggacatagttcaatgcaactcgtaaaacagcttgatatcctctaaataatcctctcattactgctgaacttcaagttccttttaatcatgaatattctacaatgtttctaataaaaaatatggaagcatgcatttacattatactatataccctagatcataggctgaaaatttcctttctcatttgccagctttgaatataacttttaagaagtattttattgttgttgtttctcctttgcttataatttgctcatccataggtgatcctacattttcatctgcatgatattgatcatacacacaggttttgccaccttcatttc

SEQ ID NO: 169048 - DNA, 543 bp, Homo sapiens
tctcaaaaaaaaaaaaattagcaaagcatggtggtgcatgtctgcagtcccagctacttgggaggctgaggcaggagaactgtttgaacccaggaggcggaggctgcagtaagccaatgtggcaccactgcactccagcctgggtgacagagtgagactctgtctcaaaaaagtcaaaaaaaaaaaaaaaaaacaacagatgttggtgtgaatgcgaagaaaagggaacacatatatttttcatgagaatgtaaattagttcaacctctatggaaaaccacgtggagatttctcartgaactaaatgtagaactaccattcaactcagtaattccacaactgcatatccactcaaaggaaaattctataaaaaatcattctataaaaatgatacctgcacatgtatgttcactgcagtactattcccaatagcaaagtcatggaaccaacctaagcatgcatcaacagttatgtggttaaaggaattgtgatacatatccaccctgaagtactgtgcagccataagaaagaatgaaatcatgt

SEQ ID NO: 169049 - DNA, 469 bp, Homo sapiens
tgtcagcaaaaaaatttaaaagtttcagcaaagaatagaacatgtaaggaggaaccaaatcaaaatctacgaaaagtataataagtagtatgaaaagctcaattattgggatcaacagccaaatagagggaacaaagaaaataatctaagaactgaagacagaaaataaattactcaatctgaacaacaggaagaaagtaggccaaaaaaatggataatgcatcaagaacctgtaggactaaaataaagaatgtaaaatttgtgtcattggaattataaaaggagaagggaaagagagcaggaytaaagacatacttaaaaaatgactaaaaattttctaaatttggcaagagtcaaacctacagattgcaaaaactgagtataccccaaaatggataaaccaaaataaatccatgcatacacatcttaaatagaaaactaacgaaaaaaagtattacaagcagccaga

SEQ ID NO: 169050 - DNA, 498 bp, Homo sapiens
aaggagtcatcagaataatattttcaagcacttttaacttgatgaagtgctttcacatgcagtttccatttcacctatcatttatccacttatccaacaaacactcagttttctggttttcctgacaccaaggtgagtgctgtgataaagaactaaaagcyattgcctggtacttaggaagcacactaatggagtgtggtgaaggctacagtgagtgtgtgtatgccagtgctatggtaatttaaaggcaggatgcattcagacttgagttcagggcattgtgaacctaaagggcatgggaatcagttttttttttaatgtacatggaaattagatctaaagaacataaggggtatctagggagaagtaccagcagttgtaaaggcatagagactgaataactggagtctgtgtttaaaggagaaaagtggcatgcactgagggtgagaaacaaatcagaagtcaaatcacagagaactggaacatcatgctgtccga

SEQ ID NO: 169051 - DNA, 434 bp, Homo sapiens
ggaaacatggacattaggtaaagccaattttttcaagcggatggcagatcccaagctcttaaggaacagcaggcatgtcctcaatgcatgtggggccagaagagaaatagagctttgatcatctactagttagggcctgccaaatagatgcatagatccatactgaaaatgaaatycttttgatttttttgcctgaagccattcctgtcacattaataaaatgactgcctgacgtgagtcataaccacagaatagaagagataaaggtcccacctagctcactgaaccagagaggtctaatgaccttctgaaggtcatccagcatggtagtggcagaagtgggggcagtcagttcacctgtttcctaatctgccatactccaggctcctgaccactgccaagaatttatttcctcaccattcgctggctataca

SEQ ID NO: 169052 - DNA, 609 bp, Homo sapiens
tgattggcatgacattgatcaatgttctttttactgtccaaagtcattttgaggagattggtttctctmaaaacaaatctattccgtactccatcatcactagagtatttcagtagtttttttgctagctattaatcttaccatttgttctctgccccttaactagaggagaaatctcatttaatacaatgaggtaaaaaataactttcaaatcagacttggtttttgaatcacaactctatcatctaaattttattatgtcttagtttccccatatataaaataagaaaatgcctacattatagttttaaggattaaataagaaactgaatttataatagtagctaacacttattgcatgcaaagtaccttatatatgttaattaatcctccaacaatcaatcccatatggtatacactattatcaacttcattttgcagatgagactacagaggcacaaaacagttaagtaacttgctcaaggtcactcactgcaacagtcagggagtacaatggactgaaagtttatgttcctccaaaatttatatatcaaaatcctaacttccaaggcaatggtattaggaagtgggtcccttgggaggtgatta

SEQ ID NO: 169053 - DNA, 609 bp, Homo sapiens
tgattggcatgacattgatcaatgttctttttactgtccaaagtcattttgaggagattggtttctctaaaaacaaatctattccgtactccatcatcactagagtatttcagtagtttttttgctagctattaatcttaccatttgttctctgccccttaactagaggagaaatctcatttaatacaatgaggtaaaaaataactttcaaatcagacttggtttttgaatcacaactctatcatctaaattttattatgtcttagtttccccatatataaaataagaaaatgcctacattatagttttaaggattaaataagaaactgaatttataatagtagctaacacttattgcatgcaaagtaccttatatatgttaattaatcctccaacaatcaatcccatatggtatacactattatcaacttcrttttgcagatgagactacagaggcacaaaacagttaagtaacttgctcaaggtcactcactgcaacagtcagggagtacaatggactgaaagtttatgttcctccaaaatttatatatcaaaatcctaacttccaaggcaatggtattaggaagtgggtcccttgggaggtgatta

SEQ ID NO: 169054 - DNA, 522 bp, Homo sapiens
accatttgttctctgccccttaactagaggagaaatctcatttaatacaatgaggtaaaaaataactttcaaatcagacttggtttttgaatcacaactctatcatctaaattttattatgtcttagtttccccatatataaaataagaaaatgcctacattatagttttaaggattaaataagaaactgaatttataatagtagctaacacttattgcatgcaaagtaccttatatatgttaattaatcctccaacaatcaatcccatatggtatacactattatcaacttcattttgcagatgagactacagaggcacaaaacagttaagtaacttgctcaaggtcactcactgcaacagtcagggagtacaatggactgaaagtttatgttcctccaaaatttatatatcaaamtcctaacttccaaggcaatggtattaggaagtgggtcccttgggaggtgattaggtcatgtggatgaagccctcatgaatggaactagtacccttataaaagaaa

SEQ ID NO: 169055 - DNA, 503 bp, Homo sapiens
gtggggcaggagctgagcacatcagagctgtatcccyacccgacctcttaaaggatctctagtggctcagagccctacagagtttatcagcatcttccaccccaccagattgactttgcgtcctttcttgtctaacacttccctttccgccacttctattccttcaataacttcctaaaataaatggctacacacaagctcttgtctcaagcttggttttgtagagcaactcaagctacaatagcctcctaatttttcccagctatcccttttaatcttctagagtctgttctacagcagccagagtaggttttctagaatataaatcatactatgccattctcctgatcaaaaacttctaattgtttccatcacacacagaataaaatccaaagtactttcaatgactcctgaggctcaccatgatctggctactggccattctctgatcctatcatggtttgctccataccacttaccatcaggtgacatgatattgtatg

SEQ ID NO: 169056 - DNA, 560 bp, Homo sapiens
caccattcatgagaaatctgtccccatgattcaatcacctcccaccaggcctcacctttaacactggggattacaatttaacatgagatttgctggggacatagagccaaaccatatcaattagctcatttaatcatcacagaaatcctataaggaaggtactagcaccccattttacagatgagaacactaagkctcagtgagattaggcaactttccagggtccctcaagaaattagaggcaaaggcagaattcaaatctgtgtacttattcatccagccactagaaatttactgaatgctttctatgtctcagactctggatctttattttatattttcacccattaaatgttcaacagtatcatctcaatcacatacccagaggagttccaaagagaacagatgactggatgctgggaaggggaaagaaaaattatagtaaaatgtgtttttacctctagtcaaaagttgagtctctgggaaccagcatcacaaacaaccaccctttgccctatgaaaaattgtacaggactgacactccttcagggaaacttaat

SEQ ID NO: 169057 - DNA, 560 bp, Homo sapiens
gtgactttctccacagcccttgaaagacaacaggaagaaaaaggataaatatactgggggatcctggtaagcctgtgccttgagggctttccaccttcccactcttgaccatctggtgtcaaatccagtttccatttctgaatgtcagtccaaaaataaacaatggtctaaaaatgttttgcctccttgctagcacttgtaaattagccctctacttccaacctagagtgcagacatttcagctatttggagcaccatctcctctgtcctaaatatgaatcaggagatacaaagaacaaagaagccattaagtgtcacagaaatgcactcttcactgtgtcacagtggcaacagaagttcaaggacattgcaaacacagtctggtccaggatgcaggcagcataaccagaaagacaaccaagactggaggagtcagaagttaaaccaagatgatagagcatgatttaggactggcaccaatctgggaattgctcaaaacatgctaggtgaacaaaatkcccccaaatatgtagtacccggacaattgattgaaaggggat

SEQ ID NO: 169058 - DNA, 624 bp, Homo sapiens
gcctggcatcaaggaggtggtcaatacctgtcatccaaatgcaggtcggacatctccagagcctgtctgtctccacgtaccttaacagtaaacagaataatctaatggtagcttcactggcattccaccaagtcacatgaattgcattttctaactcccgcagccctggacagctgctgtgggytttgtttttcttttccaaaaggtttagtttaagctttaatggactcatttagtggaaatatacagtaagctggagcagagacaaatccagagcttgactacttatttacttgtgaagtgaggcctcatttcaataaactggtttgagaggagagtttgggatgggcagagatgttggtgcatttcactgcaatattgctgtccctactgggaaccatggctgtgaaacataatactttgcctcaaaagtgctttgaatgacacctcatgaactgctcatgaggacaattttcctttactcctaggctttcagaggcagatagagcagctcggatagccaggatttgattggtttactgcatgggctttctctctatatattcaggaaggtggtgaaaatgaactgagacctaagatgcaactggtgaacgggagaaaaat

SEQ ID NO: 169059 - DNA, 609 bp, Homo sapiens
tgtctggtgcatgataaatacttgtttcatgaattaattaatatactattttgtttgcttgtgtatctgtttaatgctgtccagcagacaccttttagggcatctggtcacgtcactctctaattctccttaaaaattttgwgcttcttggtggcagggattatgtgtcatgaattcatatctcaagcacctagcatggagctcacacatcgtaggatttccacaatgtttgaattaaatcaaatcattacacaagaaataaaattattattattatgccaggaccttgagatagacagatatctaaaagattaaaaagaagtccctaagcacatagaaaacacaaatgtttaagccaaaaggcaacaagtagtgcagaattaatgacctactgaattataaaggaatcccaaagacttaagttcatcacttacaatcccaagggtgtttttttctttctctgtttaacacaagaaatacaaaatgaagaataaagagctgtaaaatatttttcaatctgactccatttgccaattctcaactagcttcaccatttaattaaacaaagctgtacattctctgaccaggatgaatgacagtaatttctag

SEQ ID NO: 169060 - DNA, 623 bp, Homo sapiens
gttggatacactttggtacagccggtctctttctgaatctcagtttcttccttctaaaattctctaatctcacgcatacattcactgctatattatgtaaccactattaccaagactctggaacgaaatccaagagtttccttgcaattactgatgagtattacatttcttcctaaattcccttttattttcaatraatagcattttctccaagcgcaatggtgtgtcatgtattcatccaagctagcggcgagctggcactgcactcactcggtttctctctatgccacgctggtgcagaataaattcctagtcacaaaaatggggcctgcataggccagctctgcctgcatgcatagctctgactaaattaatactcagcaaccaacggcaggcatcgtttagtgccttaaaagtaccatagcatgagaatactagcttttattctttgaatgaaaacttgagagatgttttagtgtatataggtaactttgtaccatatatccttgtatgcaacattttttcactatatctctgagtgtttcctcaaaaaataatccttgatgaggctataaagtacaatcactttcacttaaaaaaaatcccttgtacttgcaaagcaa

SEQ ID NO: 169061 - DNA, 623 bp, Homo sapiens
gttggatacactttggtacagccggtctctttctgaatctcagtttcttccttctaaaattctctaatctcacgcatacattcactgctatattatgtaaccactattaccaagactctggaacgaaatccaagagtttccttgcaattactgatgagtattacatttcttcctaaattcccttttattttcaatgaatagcattttctccaagcgcaatggtgtgtcatgtattcatccaagctagcggcgagctggcactgcactcactcggtttctctctatgccacgctggtgcagaataaattcctagtcacaaaaatggggcctgcataggccagctctgcctgcatgcatagctctgactaaattaatactcagcaaccaacggcaggcatcgtttagtgccttaaaagtaccatagcatgagaatactagcttttattctttgaatgaaaacttgagagatgttttagtgtatataggtaactttgtaccatatatccttgtatgcaacattttttcactatatctctgagtrtttcctcaaaaaataatccttgatgaggctataaagtacaatcactttcacttaaaaaaaatcccttgtacttgcaaagcaa

SEQ ID NO: 169062 - DNA, 550 bp, Homo sapiens
ttacaaatttaagaaacaatgacaggagtaaactgaatatggattctattttattgtctctccttgtctcttcattttcacttttatatccatgagacagtagcaaccactattttcacacatcartgtagctgaggctcattttcctaaagcaagatgagctcttaaacagagatatcaaccacatttagactatctttatttacagactagaaggcaagagcagaacctctgcattaaaaaagaagaagaagaaaagaatggaaaacccctccaacctcacagtgttaatgctagcttgctaattcatatctccttaaacagcctgcatccagctgttccaatttaaagtctctgccattttttttttgaatgcagaaaaaaaatctgaattaaagatgtaaacagaatacttgagcacaggaaaggaaggtagtgcccatttttcaatgtgataaatgcagttaataaagccatgtagccctaaaatgcattggtctgagagaagaaaatagaaattgagggatgctgcttttaagtcaagattaat

SEQ ID NO: 169063 - DNA, 484 bp, Homo sapiens
agaaaatatctacagatgagatagctaccagtacttaatcacactaggggtctcccagagggaactagacgcctaagtcacgtgggaagggaaaactccattgcactctctttggtactatttaaattttgaaccctatatatgtgtgctctatccaatcaaatgtgccatctatcaattcaaaacataaattcatttaaaaagcaaraacagtgaccataaaagtaacaacaaacaaagcactggttcgtgatgttagagatggggctattggagccatacttgggactaaactaaatgaaccattatgttaatatcaagccactccctgcatttatgtaacagagaggggaagactccattcttgaacctaaaccacactcctgtcgacaatggactcataaatgggaaataatccctcaaaatgcaaacaggtccttcattacctactgcgtccttaacttgccaagcaagtgtcatttgc

SEQ ID NO: 169064 - DNA, 484 bp, Homo sapiens
agaaaatatctacagatgagatagctaccagtacttaatcacactaggggtctcccagagggaactagacgcctaagtcacgtgggaagggaaaactccattgcactctctttggtactatttaaattttgaaccctatatatgtgtgctctatccaatcaaatgtgccatctatcaattcaaaacataaattcatttaaaaagcaagaacagtgaccataaaagtaacaacaaacaaagcactggttcgtgatgttagagatggggctattggagccmtacttgggactaaactaaatgaaccattatgttaatatcaagccactccctgcatttatgtaacagagaggggaagactccattcttgaacctaaaccacactcctgtcgacaatggactcataaatgggaaataatccctcaaaatgcaaacaggtccttcattacctactgcgtccttaacttgccaagcaagtgtcatttgc

SEQ ID NO: 169065 - DNA, 490 bp, Homo sapiens
cgatggcctagtaccagtccatggtctgttagaaaccaggccacacagcaggaggtaagcagcaggtgagcaagcaaagcttcatctatatttacagcyattccccatagctcacattaccacctcctgtcagatcggcagcagcattacattctcataggagcagaaatcctcttgtgaactgtgcatgcgaaggagctaggttgcatgtggcttatgagaatctaatgcctgatgatctgtcacttcctaccatcaccccaagatgggactgtctagttgcaggaaaacaaggtcaggcttcccactgattctacattatggtgagttgtgtaattatttcattatatattacaatgtaataataatagaaataaagtgcacaataaatgtaaaggacttaaatcatcctgaaatcattccctccattttcccatccctggaaaaaattgtcttccatgaaaccagtccctaatgccaaaaaggttgg

SEQ ID NO: 169066 - DNA, 490 bp, Homo sapiens
cgatggcctagtaccagtccatggtctgttagaaaccaggccacacagcaggaggtaagcagcaggtgagcaagcaaagcttcatctatatttacagccattccccatagctcacattaccacctcctgtcagatcggcagcagcattacattctcataggagcagaaatcctcttgtgaactgygcatgcgaaggagctaggttgcatgtggcttatgagaatctaatgcctgatgatctgtcacttcctaccatcaccccaagatgggactgtctagttgcaggaaaacaaggtcaggcttcccactgattctacattatggtgagttgtgtaattatttcattatatattacaatgtaataataatagaaataaagtgcacaataaatgtaaaggacttaaatcatcctgaaatcattccctccattttcccatccctggaaaaaattgtcttccatgaaaccagtccctaatgccaaaaaggttgg

SEQ ID NO: 169067 - DNA, 490 bp, Homo sapiens
cgatggcctagtaccagtccatggtctgttagaaaccaggccacacagcaggaggtaagcagcaggtgagcaagcaaagcttcatctatatttacagccattccccatagctcacattaccacctcctgtcagatcggcagcagcattacattctcataggagcagaaatcctcttgtgaactgtgcatgcgaaggagctaggttgcatgtggcttatgagaatctaatgcctgatgatctgtcacttcctaccatcaccccaagatgggactrtctagttgcaggaaaacaaggtcaggcttcccactgattctacattatggtgagttgtgtaattatttcattatatattacaatgtaataataatagaaataaagtgcacaataaatgtaaaggacttaaatcatcctgaaatcattccctccattttcccatccctggaaaaaattgtcttccatgaaaccagtccctaatgccaaaaaggttgg

SEQ ID NO: 169068 - DNA, 490 bp, Homo sapiens
cgatggcctagtaccagtccatggtctgttagaaaccaggccacacagcaggaggtaagcagcaggtgagcaagcaaagcttcatctatatttacagccattccccatagctcacattaccacctcctgtcagatcggcagcagcattacattctcataggagcagaaatcctcttgtgaactgtgcatgcgaaggagctaggttgcatgtggcttatgagaatctaatgcctgatgatctgtcacttcctaccatcaccccaagatgggactgtctagttgcaggaaaacaaggtcaggcttcccactgattctacattatggtgagttgtgtaattatttcattatatattacaatgtaataataatagaaataaagtgcacaataaatgtaaaggacttaaatcatcctgaaatcattccctccattttcccatccctggaaaaaaytgtcttccatgaaaccagtccctaatgccaaaaaggttgg

SEQ ID NO: 169069 - DNA, 579 bp, Homo sapiens
agccacctctttgagctcgccaatgaggttcacgaattcacatgcaatgagaattggtggacaatgtggctgttgaggtttgaggtacactctttcccatttcctacctggctctgcaccctagcacatatcagacaaggtttcacttcctttatgtctcagctgcaaaacagaccttggtccatttcatgctgagaagaagaaaacccactcagactctccaaaaattctagatcaaaccaaagcttgctaggggaaccacattcccattagccattttaatacaaagctgctgctcatagaaaagccrtcattgataagtgaactttaatgctgactgattcaacagacggaaaaccattttgcttccttgaatcttttaaatgtagctaatgctgtcaactattctggaacatttcatgtttttcctctaaggaggaaaaaacctgcttcataaaaattgaaatgtaagtttaaaaaaaatccttaccttgtgtggttctgcgctgttaaagacagactctcactacaaacatcccctaccccgcagcatccccagacaagcacataaattaaaca

SEQ ID NO: 169070 - DNA, 579 bp, Homo sapiens
agccacctctttgagctcgccaatgaggttcacgaattcacatgcaatgagaattggtggacaatgtggctgttgaggtttgaggtacactctttcccatttcctacctggctctgcaccctagcacatatcagacaaggtttcacttcctttatgtctcagctgcaaaacagaccttggtccatttcatgctgagaagaagaaaacccactcagactctccaaaaattctagatcaaaccaaagcttgctaggggaaccacattcccattagccattttaatacaaagctgctgctcatagaaaagccatcattgataagtgaactttaatgctgactgattcaacagayggaaaaccattttgcttccttgaatcttttaaatgtagctaatgctgtcaactattctggaacatttcatgtttttcctctaaggaggaaaaaacctgcttcataaaaattgaaatgtaagtttaaaaaaaatccttaccttgtgtggttctgcgctgttaaagacagactctcactacaaacatcccctaccccgcagcatccccagacaagcacataaattaaaca

SEQ ID NO: 169071 - DNA, 598 bp, Homo sapiens
ccatgttgatacttcctaatgctgaggtgtccactaggtgggctacagaaacgcacaggagcgtgcaggcttcaatggcagcagccttaccccatcctcacagtttctaaggacctgcatgtagggaaatgagatgattttcatgggagtttaccctgtatagtcaagaaattagcagcaaaagtacatgcaaaatcatgttaaagagaagagcttccaaacaagaaagagtagaaacgtacatttacattgaaagaatgactaaaacagtcaaagatggctggaggatgggagggtgtttaacaatgtrcagtaggcaaatttatgccccacttccccaagatacccatgtcctaatccccagaacctgtcaatacgatgcgtgacatgacaaataggattttctagatgttatcaaaagtatgcacctaaaaatacggagatgactctggattattggggaaaatcccatctaatcacaaaagcactttaaaacacaagactttctccagctgcaatgaggtacatatggcagaagaagtcaatgagatttcaaggatgagatgcattcgtaccattgctgactatgagttggaag

SEQ ID NO: 169072 - DNA, 598 bp, Homo sapiens
ccatgttgatacttcctaatgctgaggtgtccactaggtgggctacagaaacgcacaggagcgtgcaggcttcaatggcagcagccttaccccatcctcacagtttctaaggacctgcatgtagggaaatgagatgattttcatgggagtttaccctgtatagtcaagaaattagcagcaaaagtacatgcaaaatcatgttaaagagaagagcttccaaacaagaaagagtagaaacgtacatttacattgaaagaatgactaaaacagtcaaagatggctggaggatgggagggtgtttaacaatgtacagtaggcaaatttatgccccacttccccaagatacccatgtcctaatccccagaacctgtcaatacgatgcgtgacatgacaaataggattttctagatgttatcaaaagtatgcacctaaaaatacggagatgactctggattattggggaaaatcccatctaatcacaaaagcactttaaaacacaagactttctccagctgcaatgaggtasatatggcagaagaagtcaatgagatttcaaggatgagatgcattcgtaccattgctgactatgagttggaag

SEQ ID NO: 169073 - DNA, 548 bp, Homo sapiens
ttgtagaaaaccaccattctgtcttccaaagtgactataccattttgcattcccattggcaataaatgaaggtttcagttgctttttattcttttcaacatttggtgttatcagtattttgaaatttggtcattctaatatgtgtgtagtgacatttcattgttgttttaatttgcgtatcccttattacatacaattttgagtatcttttcatatgcttttttaccatctgtatatcttctttggtgagaagtctgttcaggcctttagctcattgtgtaattgggttgctgatttctctaatttttgtttttaagtgttctttgcatattttggataacwgtcttttattggaaatatattttggaaatattttctcccagtctgaaacttctctttcactctcttgaccgtgtctctcacagagaaggacctttaattttaataaagtacagcttatcacttctttctttctttcatgaatgtgtctttgatgtcatatctaaaaagtcattgccatacccaaggtcatctagattttctcctat

SEQ ID NO: 169074 - DNA, 641 bp, Homo sapiens
taagtggaaatgtcagttgataagccatataaaggagttcaagtaaaagctagaaaaatattggagagttgaggacaaagttaattttcagaaatagacagattaaggcaagacagaaggtaagtggaaatctcagttgataagccatataaaggagttcaagtaaaagctagaaaaatattggaaagtcgaggacaaagttaattttcagagatagacagattaaggcaagatttcactaaggcaagcacccaaaatttcagttagaaaggagacataagttcaagaaatctattgcacaacacgatgactgctgttaataaaaatgtattgaaaattgctaagagagtagatattgtgttctcacraaaaagtatgtgaggtaatgtatatgttaattagcttagtcattgcacattgtatacatatctcaaaacaccataaatatatgcaatgtttgtcaatttaaaaaaatcttaaaaagaaaaaattgttctgtgctttgagaggctggtgaaaaatgcacaggactgaaaacttagagataccgcaaattttaacacttttattctttgaactcttcaggaggaatcacttctctgaacctgatgacccttgaaatagtttctttaactgttaaa

SEQ ID NO: 169075 - DNA, 598 bp, Homo sapiens
tgaaatgtctggcatccacatagaattgtggcaccagagagcttatgtatttytaatggaaaagaaaatttaaaatacttcactttaaatttaaatggaaataatttgaactgaattgatagtaaatttgaaccaataaatacgcaagatattattcatttcatgcaggaaaaaaaaaaaaaaagaaaggcaagtaccagatccagatctgttatggcttctctgcaccagacttcatagtgggaacaatttcagttattgagtcaaggatgagtctgacagatgtgattcttaacttattatttggagtgcatcttttaccacttagccatttctatgtaacaaatctccactaaacatagtgtattcaagcaataattatttgtaattgttcttgagttgtaagttggctaggcagatatgctggattctgaactaggttcctccacatttttgggaatcagctagctgtaagctgatctagaatggactcttttgggataattcaacactgcttcaaaacatctctctttttccagcatgctggccttggcttgttctcatgagaatcacgtgtgtgccagagagagagagagaa

SEQ ID NO: 169076 - DNA, 624 bp, Homo sapiens
tcagaatagctactgaaatgtctggcatccacatagaattgtggcaccagagagcttatgtatttctaatggaaaagaaaatttaaaatacttcactttaaatttaaatggaaataatttgaactgaattgatagtaaatttgaaccaataaataygcaagatattattcatttcatgcaggaaaaaaaaaaaaaaagaaaggcaagtaccagatccagatctgttatggcttctctgcaccagacttcatagtgggaacaatttcagttattgagtcaaggatgagtctgacagatgtgattcttaacttattatttggagtgcatcttttaccacttagccatttctatgtaacaaatctccactaaacatagtgtattcaagcaataattatttgtaattgttcttgagttgtaagttggctaggcagatatgctggattctgaactaggttcctccacatttttgggaatcagctagctgtaagctgatctagaatggactcttttgggataattcaacactgcttcaaaacatctctctttttccagcatgctggccttggcttgttctcatgagaatcacgtgtgtgccagagagagagagagaatatgcatgcatgg

SEQ ID NO: 169077 - DNA, 624 bp, Homo sapiens
tcagaatagctactgaaatgtctggcatccacatagaattgtggcaccagagagcttatgtatttctaatggaaaagaaaatttaaaatacttcactttaaatttaaatggaaataatttgaactgaattgatagtaaatttgaaccaataaatacgcaagatattattcatttcatgcaggaaaaaaaaaaaaaaagaaaggcaagtaccagatccagatctgttatggcttctctgcaccagacttcatagtgggaacaatttcagttattgagtcaaggatgagtctgacagatgtgattcttaacttattatttggagtgcatcttttaccacttagccatttctatgtaacaaatctccactaaacatagtgtattcaagcaataattatttgtaattgttcttgagttgtaagttggctaggcagatatgctggattctgaactaggttcctccacatttttgggaatcagctagctgtaagctgatctagaatggactcttttgggataattcaacactgcttcaaaacatctctctttttccagcatgctggcyttggcttgttctcatgagaatcacgtgtgtgccagagagagagagagaatatgcatgcatgg

SEQ ID NO: 169078 - DNA, 624 bp, Homo sapiens
tcagaatagctactgaaatgtctggcatccacatagaattgtggcaccagagagcttatgtatttctaatggaaaagaaaatttaaaatacttcactttaaatttaaatggaaataatttgaactgaattgatagtaaatttgaaccaataaatacgcaagatattattcatttcatgcaggaaaaaaaaaaaaaaagaaaggcaagtaccagatccagatctgttatggcttctctgcaccagacttcatagtgggaacaatttcagttattgagtcaaggatgagtctgacagatgtgattcttaacttattatttggagtgcatcttttaccacttagccatttctatgtaacaaatctccactaaacatagtgtattcaagcaataattatttgtaattgttcttgagttgtaagttggctaggcagatatgctggattctgaactaggttcctccacatttttgggaatcagctagctgtaagctgatctagaatggactcttttgggataattcaacactgcttcaaaacatctctctttttccagcatgctggccttggcttgttctcatgagaatcacgtgtgtgccagagagaragagagaatatgcatgcatgg

SEQ ID NO: 169079 - DNA, 482 bp, Homo sapiens
atggatatgcaagtagaggtcctgagctctttggcatctctgaatactgccaaaatatcaacagcagttatccacgagggcttcggttttgctacagctttttcatataattacagtattgagatttcctctatgttctgggagacagtacctctgggagagaagaacacaagtcaattaattartaagacttctaggatctaaaagcaagatccatgaagacctcagagattctatatttttttaaaaagcctaagagtacttaaagtacatatgagacattctttaggaaaaatcacaaggatcttttaattttaatttcttcactgaaaaagcagcattttcaatttatcattatagcacagtttttgataagcaagtagaaatagatacgaaaggaaatgttgtggttcataatgccatttgtaggaaaattttgagtcctaatcataaagttaatttcatatttactttcagaattc

SEQ ID NO: 169080 - DNA, 482 bp, Homo sapiens
atggatatgcaagtagaggtcctgagctctttggcatctctgaatactgccaaaatatcaacagcagttatccacgagggcttcggttttgctacagctttttcatataattacagtattgagatttcctctatgttctgggagacagtacctctgggagagaagaacacaagtcaattaattagtaagacttctaggatctaaaagcaagatccatgaagacctcagagattctatatttttttaaaaagcctaagagtacttaaagtacatatgagacattctttaggaaaaatcacaaggatcttttaattttaatttcttcactgaaaaagcagcattttcaatttatcattayagcacagtttttgataagcaagtagaaatagatacgaaaggaaatgttgtggttcataatgccatttgtaggaaaattttgagtcctaatcataaagttaatttcatatttactttcagaattc

SEQ ID NO: 169081 - DNA, 482 bp, Homo sapiens
atggatatgcaagtagaggtcctgagctctttggcatctctgaatactgccaaaatatcaacagcagttatccacgagggcttcggttttgctacagctttttcatataattacagtattgagatttcctctatgttctgggagacagtacctctgggagagaagaacacaagtcaattaattagtaagacttctaggatctaaaagcaagatccatgaagacctcagagattctatatttttttaaaaagcctaagagtacttaaagtacatatgagacattctttaggaaaaatcacaaggatcttttaattttaatttcttcactgaaaaagcagcattttcaatttatcattatagcacagtttttgataagcaagtagaaatagataygaaaggaaatgttgtggttcataatgccatttgtaggaaaattttgagtcctaatcataaagttaatttcatatttactttcagaattc

SEQ ID NO: 169082 - DNA, 409 bp, Homo sapiens
ttttgcttgcttgtgcctttcaccttccaccrtgactgtgatgccgccccagccatgtggaactgtgagactgagaatgtgagtccatcaaacctctttttctttataaattaccccatctcaagtacgtttttatgagcagcatgaaaatggactaatacagccgtcttggttccaactgacttcagcaaattttttctttatcttacagcggagagagtttcagcatttcatcaagttgtttattttcttgtctgctatcctgaaaactcaataatttctattaattactagtttcttactttcggggcacagttttagtaagttgtttctcttcttatctgccatgcagtaagcccaagaatttattaatttttttaaccccttgaagcatggttcacaactatat

SEQ ID NO: 169083 - DNA, 442 bp, Homo sapiens
aaccagtgccaggtaatagatcgtagatatttatgaccttggaggatatgaagaaagatgaattaacaagtcaacccaaagctgcctttcrtcattcatccacgtggaaaaacatttctcaaatagtcataatgtgattatgaaacacaatggtaacttttattgggtgctgttaaaatgtataaataagtgttctcatttggtagtgttcttttagaaaataaagcaattcattcatgtcacatttaaagaaagtcataaatggaaactcaataaattagttaaaaaatgcaaattttcatgcagttcttcagttctgttctctccaaaaatagcaacggtgcttcttccccctggagaagtctgaattagtcagcagcactgaacatcatcattgttattattattaattattgttcattattacatagccactgtgtgc

SEQ ID NO: 169084 - DNA, 388 bp, Homo sapiens
aacaaattaggaagggcaaattctacacccgtacctagactgtccggcaacatctttctcaacagaacctgggctgtggtatggcagccttgaggctaaagggtccaggtgggagggcttcaaaacttgacattctgctagataaatcattcattgctttaacaaccargtttaatcacttaccataggacaaattctgtgtgacacatgaggtacagagacagttaatgagaattgtttactggttttcagcactggatcaattttcctgcagagaattatatcaaattatttactgcactgtgtagaacacatttgagactttggggaaatcacaaaaatatataatttacagctctggccttcaagaagctcacaatctcttgaa

SEQ ID NO: 169085 - DNA, 433 bp, Homo sapiens
tacagggtgatacatgattaaagaagagaataaatagatcagggaacagggattcacttgtaaatgatgctctttgaaaattgactgagactgagagacagacattatcttgtgaaagtctgtcctggagtggttacactcttggtcctgttttctgtaatagataatgagctaacagagagaggaaggaaagacarttgttctccttggatactccctctggtctctatgtagacagagaaaattctcctccagcctctgttgatctctgaaggtctttaattaaaaatgcacattacatcagggaccactattttggggtgaagttctctgcactccttcagtttcacatcttctgccagttaagccaccctctgtctctctcttacagtagcacttgtgattccatttaaggtacacctcgataatcaga

SEQ ID NO: 169086 - DNA, 409 bp, Homo sapiens
ctgccaaaggtacatctaacagcttcttccgtcctccctcctccaccttcctccctctttgcttcctttcttccttccttccttccttccttccttccttccttccttccacaaacacatcctgagccctgcagtctgctggcccagcaatccacatttatgatgctggggacagggtagagaaaggagaggcagtgcctgcccccaaggactttgcacctggggcggagggtggggagggacgtgaaacaaacatataattagaaatgatagtccttgccttgaagagggtcaccagggctgtgagggagactcacaggcaattctcatctaggctgtggggcaggcgataagaaacaacctctctgtgtgagtagcackccattctttcatcaatcaacgctcttcc

SEQ ID NO: 169087 - DNA, 463 bp, Homo sapiens
tcagaataactgaggcttcacatctgcaaggatgctatttttcagagaacagacacagacggtaagcaagacagggccaggctgggagccagcagccctgggctgagattcacggkaggctagctggaaaatcatgacgggaaggcattcagaggacatgttttctcctctttgcaccctttccaccaccagtcctgggctccaggctggcagaagagaactaggaccccgctgggtccccattatgggactgaaggactgcagaacccaagctgtgctggtagtagaccaactgaggaccctaagtccatgacctgggaacataccggtcatgagcctcctgtcactgtgcaaagagcttactccctacagcggggacctcccatgacataaggtgaatacatcattgtgcttgcctctttcagcactttggtcatgaggagtgtaaaggaaaatgaaaaga

SEQ ID NO: 169088 - DNA, 612 bp, Homo sapiens
cttaatattttcataccacagtaactgaagctgtggaaagtgaaaccattgatgcgggcagactcctgtatctcaaaatctcaatcatttcccgtatttatattcactctcaacagtttgcaagccgattatgattcaactcatctaggctgagctagcctggactccaggcttaccttgggggtcagttctgcccccaggccgaaggggcagttgcarcaatggttgtgcttcccgggggggaccaccagagaacactggctaaaccaagccaggcaagcagattgaaggccctcgcccacaatacatctgctaccactccatagttcaaacccagcatcaactgggtggggacgtgtgttgtgcctcctctagagggagagatcacaaggttgtgtaacaaaggtcgggatgtataatcctaatacaagaagtgagccaagcagaagcaagcatctcagccatccagcactgttaggagcatgtgctgctggtggaaatgtaaattaataggaccattttagggaaccattggcattaattacccagtgatgacaaagacgtttagcctataaccaacccactgcagtctgaagtatatgacttaaagaa

SEQ ID NO: 169089 - DNA, 612 bp, Homo sapiens
cttaatattttcataccacagtaactgaagctgtggaaagtgaaaccattgatgcgggcagactcctgtatctcaaaatctcaatcatttcccgtatttatattcactctcaacagtttgcaagccgattatgattcaactcatctaggctgagctagcctggactccaggcttaccttgggggtcagttctgcccccaggccgaaggggcagttgcagcaatggttgtgcttcccgggggggaccaccagagaacactggctaaaccaagccaggcaagcagattgaaggccctcgcccacaatacatctgctaccactccatagttcaaacccagcatcaactgggtggggacgtgtgttgtgcctsctctagagggagagatcacaaggttgtgtaacaaaggtcgggatgtataatcctaatacaagaagtgagccaagcagaagcaagcatctcagccatccagcactgttaggagcatgtgctgctggtggaaatgtaaattaataggaccattttagggaaccattggcattaattacccagtgatgacaaagacgtttagcctataaccaacccactgcagtctgaagtatatgacttaaagaa

SEQ ID NO: 169090 - DNA, 612 bp, Homo sapiens
cttaatattttcataccacagtaactgaagctgtggaaagtgaaaccattgatgcgggcagactcctgtatctcaaaatctcaatcatttcccgtatttatattcactctcaacagtttgcaagccgattatgattcaactcatctaggctgagctagcctggactccaggcttaccttgggggtcagttctgcccccaggccgaaggggcagttgcagcaatggttgtgcttcccgggggggaccaccagagaacactggctaaaccaagccaggcaagcagattgaaggccctcgcccacaatacatctgctaccactccatagttcaaacccagcatcaactgggtggggacgtgtgttgtgcctcctctagagggagagatcacaaggttgtgtaacaaaggtcgggatgtataatcctaatacaagaagtgagccaagcagaagcaagcatctcagccatccrgcactgttaggagcatgtgctgctggtggaaatgtaaattaataggaccattttagggaaccattggcattaattacccagtgatgacaaagacgtttagcctataaccaacccactgcagtctgaagtatatgacttaaagaa

SEQ ID NO: 169091 - DNA, 651 bp, Homo sapiens
gcatgtgctgctggtggaaatgtaaattaataggaccattttagggaaccattggcattaattacccagtgatgacaaagacgtttagcctataaccaacccactgcagtctgaagtatatgacttaaagaaactctcacatttacattaacattttataatataaaagtgcaaatatattcattatttcaagtaggtctctgaaaaacaccttatgggtgaatatttacattcccaatttcgtagataggaacattactcccatgctaaggagtaatgggcaatggcctcacataaagatttttgactcgaaggctaaacatctccctgataccacactgcccaccaccccaaaagaccctctgtgtgtgcccttgaccctgctcgcctaagagggctgtgagcaaaagataaatcaggtgacttctcctcatccctgtggcctctttaaaaataaatgccgaatgctgacaagcaaagctgagagcaacatccagatactttgactgctgaaggcaaagtatgagggtgtttggaaatgcacaggtagttgttggaagtcttacttcttcartcagacttttgaccctctatctggtcttaggtgagcttccctagaggctgagatgggattcttgggcaagcatctta

SEQ ID NO: 169092 - DNA, 441 bp, Homo sapiens
gtcggccgcttgtcagttctgcaccatagcagggtcctgacacccaaagtccatattgcacccacccctgcagttctcacagcctccacatgcttccctggcttccacaccactgccagttcctgctctaaaagacatttgaggttggaygcggtggctcatgactgtaatcccagcactttgtaaggccgaggccggtggatggcttgaggtcaggagttcgagaccagcctgggaaatatggtgaaaccctgtctctacaaaaaatacaaaaattagccgggtgtggaagattgcaccactgcactccagccggggcaacagagaaagaccctatctcaagataaataaataaatcaaatttatgttcctaactcgcacacgggtgcttcctttggggtctgtgttttccaaatgcttaaatagaaataaatgccaagt

SEQ ID NO: 169093 - DNA, 531 bp, Homo sapiens
ggtaaatgtccttttgtgggggtgagctctcactcttgctttctcaggaatagattgattttcactggagtgagttgttaagagtctgcctcccttggtttctcctgtttcttctcttgccttgtagtctctttgcacacttactcatcttttgcattccagtagcagttgaagccgtgtgaggtcctcaccagatggagctgtcaaatcttgaaccttccagccaccagaattgtgagccaaataagcctcttctttttataaattaccgagcctcaagaacgctgttatagcaacacaaaactgattaagacagtaggttagcacagaaaataaatcaatagcaaagaggaattttctgggtaaaggcctgctcctccccacctccattcgatgcaagacacacctgcaggacatcctcccaccctgcccttatccctgtctcccagtgtarcggacagtcctgacctgtgattggaaggacttgttagttaactcctacagaggtttccatggccagctggtgtcccc

SEQ ID NO: 169094 - DNA, 470 bp, Homo sapiens
gcctttatacttaaatccagattctaagctggtttaatcccagcaatcccaagaaaaggcatctcccttttcctttcgcagccttcctggtttggacgccctttctgatgcaaagcctcaggccttgttgtggtagtgcaggccagacgtagagacaatgcctccttgggagccgttgaacacagygcattggggaggtttgaaacactggctcacttagagctccgtggggctccacactccacttgggaaataagatgctcctctgccctcacaaatatgcgtcctgtccctcatcgtatttggtaacttcccttagtagtcagggctctgcagagaacctggagagtaagtgtctctatctctcaacatatttaagatagatcgatgatagatagaggactgacagatagatagataagagatagataggtaatagatagattagatgataggtagatatgtagata

SEQ ID NO: 169095 - DNA, 731 bp, Homo sapiens
acaatatctggataatagtagacacatatttgtccttaatgttctagcaatttctgatacatttattttgatcctctgttattaggtgcataaaagtttataattacaatatacttttgatgaattaaacccttcgtgtttacaaaatgacactctttatcttggtaatattctttgcttagaaattggctttgtctgatattattatttctctcccaggtctctctgattagtttgaaatggcatatttttcatctgtttgtgtttaagcaatatgtgtctattttaaatgcttttttaggctccatatagttgagttttccttttttatgtactctagtaatctctaagttttaattggagtgttaagagcatttacattggatgtgattattaatagttttttgttttaaaatcccatattactatttgttttctagtttgcttttgttatttttctgctttcctttgaatttgagtatattttatgattcaattttgtctatttcrttaaattattacctatatctctttacaatattttctagcggttactttatgtattattgtgtataactttaaattttctcagtctactttcaagaaatattaagccactttacctataaatataaaatcatgatattatacttgcatgttttactttttgattttcattctgttgtttacattttacattgacatataaagctcacattattggttatttt

SEQ ID NO: 169096 - DNA, 467 bp, Homo sapiens
ccaacctttgcccattacccagttccatagctgcttctacattttcaggtgtctttatagcagtattccactcatggtaccaatttactgtattagtccattctcacaatgctaaaatgaaataactgasaaatggtaatttatgaagaagaggtttaattggctcttgtttccacaggctgcacaggaagcatggctggagaagcctcaaaaaaattacaatcttggtggaagacaaaggggaaacaggtatgtcccacacggctggagcaagaggaagaccatgctatacacttttaaacaaccgtatctcattagaactcattcactatcatgagaacagcaaggtgaaagtccatccccatgatccaaatcacctcccaccaggcccctcctccaacattggatattacaattctaacatgagatttggtcagggacacaaatgcaaacaatatcggtccatt

SEQ ID NO: 169097 - DNA, 497 bp, Homo sapiens
ctttctgtcaactttttgtcttcttctgagccctccaaatcttccaacctttgcccattacccagttccatagctgcttctacattttcaggtgtctttatagcagtattccactcatggtaccaatttactgtattagtccattctcacaatgctaaaatgaaataactgagaaatggtaatttatgaagaagaggtttaattggctcttgwttccacaggctgcacaggaagcatggctggagaagcctcaaaaaaattacaatcttggtggaagacaaaggggaaacaggtatgtcccacacggctggagcaagaggaagaccatgctatacacttttaaacaaccgtatctcattagaactcattcactatcatgagaacagcaaggtgaaagtccatccccatgatccaaatcacctcccaccaggcccctcctccaacattggatattacaattctaacatgagatttggtcagggacacaaatgcaaaca

SEQ ID NO: 169098 - DNA, 539 bp, Homo sapiens
caacattcttagaataggtctaattggactaatttaggccaatcaattgttataggcagaataatggcttcccaaagatgtccatatccttatttctaaaacctgtgaatatgttccattacatagtaaagaggaattaaaatagtggatggaattaaagtagctaagcagctgaccttaaaataggaagagtaccctggattatttagctgttcccaatgtaatcacaagggtcyttaaatgtgaatggaggtgtcagaagattcattattagagtaatgcaatgaagaaaactccattgctcactttgaagatagccagggccaggaggcaaggaatatgggcagcctttagaagctaaaaatggaagaagacagattcttcacaagagccttcagaaagtaatgcaacctcaactactaaaccttggttttagatctacatttctgaccttgagaactgtaatataataaatatatattgtggtaaaccactaagtttgtgatatgcattagagcagcaatagaaaactaatataa

SEQ ID NO: 169099 - DNA, 587 bp, Homo sapiens
tttaagagagattctattataaaagcaataataatgaagccatgaaatgccagcaattaaaaaattccaagtaaatgattgtcattaagcaaaacaaaacaaattgaataaaccaaaaaccaaccacatattaatttctaaatgactcaaataaattatggagtatgaattcagaaagcagccaatgattatgttctactctggtgaatatttacatttttcattgtttttgttttgtttttgtttttgttattaacattgacttaaaaacaaaattttaaatacacttgtgtatactgcttgggtaatgggtgcaccaaaacctcackaatcatcactaaagaacgtactcatataatcaaacaccacacgttccccaaaaacctatggaaataaaattttttcaaaaaaatcaaatgtgacttgaaatttaaacctgtaaatttctaaacaaacaatggtttgcagaaattgaagcttagataattagtggtatgtaattgtattggactgcttggatccatttttcccaaaaagtgtgatccccaggccataaacattagcatcaccagagacttgttagaaat

SEQ ID NO: 169100 - DNA, 585 bp, Homo sapiens
ttctcttttcacctatgaaaatgacaaatatcttaattaaatcaaagactcattgttggtgaggatgcagtgaaatgggcactcataagcttttagtggcagtgcagcttgatagactttctctagaaatgagtttggctgcaggtataatagattttaaatagagcttcagccattttattttattttattttattttattttactttaagttccaggatacaagtacagaatgtgtagacttgttacataggtctacgtatgccatagttgtttttgctgcatctatcaacacatcatctaggttttaagccccayatgcattaactatttgtcctagtgctctccctcccctccacccctccgagcccaggaatggccctggtgtgtgttgtccacctccttgtgtccatgtgttctcattgttcaactcacacttatatgtaagaacatgtggtgcttggttttctgttcatgtgttagtttgctgaggatgatggcttccagtttcatccatgtcccttcaaaggatatgttctcattcatttttatggctgcatagtattgcatggtatatatgtacca

SEQ ID NO: 169101 - DNA, 580 bp, Homo sapiens
ttggcccctgtcagatgtactattcagacgactgaaaggaaaatggctatttcaacaaatgcaatttattagataattgatgtttttgtgttgagaaactgtattgccttttgtgtctgagtttaacttttaaatgcagcaggatattattataggtgtcagaggtttagaattatttcatgcctttatattttttagacattccactggttggattattttaatagaattgatcagataaatcagtcaacatggtaattcagtccaagaagttaggactttttgtctgatttacttccataggcaatacagataaaatggccccaatgtattgacaagtaaatgaagaataactaactacactttgggatttgatgtgtcttcaggcaagtcaggtagctctactgtatgaaaacaaatctgtttgcgaatgaaagttaaaaaacaaataagtaaaactgaaaaaaaagaaactaaattgaaaaattaagctgcctgggtmtcttttctctgggcaatgccataaatttatttcttttagcagctactacaacaacaaaaaatacttgatttctaactt

SEQ ID NO: 169102 - DNA, 503 bp, Homo sapiens
tgctgaggtttggggtacatgtggtcccatcaaacaaggagggagcacagtacccaatagataggttattggcctacacccacttccctccttcctcactctagcactcctcagtgtctattgttcccatttttaagtccatgtatgctcaatgtttagcccccagttatgggtgggaacatgtggtatttggttttatgttcccatgttaatttgttacaataattttgtcatgtatttatagagtattagaatagcaacaggtttccagtgataagaaaataatttagtagttattacctttgaaggaaagttagcaacttgtccctacctcaaaaaaaaagtttaaaataagaagatacccattcatgacaaatagatcaacaaaacaggccttgctctataaacccaatgaaaatggctctattttcccatctgttttaacatattcacatyattaaaaattctacacaccttgttatagttgtgaaacttataatatg

SEQ ID NO: 169103 - DNA, 399 bp, Homo sapiens
aagagaaatccgtgctgagaataggaaaatacacattttaaatgtctggcttataatccactaggttctgatacggccctatttttcttggtctccgggattcccaggctttagttattttcccatagaaacccatttccaaatccctgacctgcagtcaaagggcaccctgtgagatatctagaagtggttccaaatctgrtctagcagtttgtacatcatcaactcgatggatgcatgtaaacctcacaataatgctaaggaataggaactattattttaaatcattgtagtttacatataagaaaactaaagccaggcccactgtttgcatatagtggagctggcattagaatttagatagtatattttcagtgtctgtgctcaaaaccattatgc

SEQ ID NO: 169104 - DNA, 451 bp, Homo sapiens
agtgcttcatgtcagtgttgctaaaatgcaatactgcacaacctctttttgaaaaacctttcaaggaaaaatataagatgcgtccgatggagtggcaactacataaatgatacctcctgagaaatatactgaaccactctytccttgtcagaaaggtcaaataaggtattttgtttgaaagttacagaaattgttccttccaaataaaaattttaacctgtgcttttattccatgctaggtgtaaagtaggttggtaaattcacattgtttaagaattaaataaaaggacatgtacatgaaatatctagtatcatacctggaatacagtaagtgctaagtaaatgttagccatagttattattagcatacagctttcctttcatctcttatttattccaaaactcctctgaacaggttgcttttttttttcttgtttgctatcactacttc

SEQ ID NO: 169105 - DNA, 521 bp, Homo sapiens
ttcacattcggaaagatagatctttttggaggtagtactcatgcatttatttgtttaaaaaatcagcacatatttgccaatttagtagaatggaatggagaggagcatggactttggaattagacgatcttgtatttcatttacagctctaccacayttgaaatatttaagttttatcaaatcattggataaatgacttcatttctctgtgccttaattttccatctataaaatgatgaagttattttctggttggtttgaatttagtacatgttaattgcttggcataatggcttgcccatatagaaaaacttgttgatagcagtagtaataatggtggtgatagtgacagtagggatagtggcaatgcaactctgtaaggctctgtattataaataaaaagatagcttttcattcatcaaggactgttattactttgatgacagccatattattatctttatttattcccttcgcatccataatcttactgttcgtgtgtgtgtaatccatcagtgtta

SEQ ID NO: 169106 - DNA, 605 bp, Homo sapiens
tcctgcttgtccctgggcaatggaatgtcttggtgtaaaacccgattgtatattccatctactgagacaggagaaaaccgccttagggctggaggcaggacacactggcggcaatactgctctttaatgcattgagatgtttatgtawgtgcacatccaagcacagtacctttttcttaaccttgtttatgacacagagtcatttgttcacatgttttcctgctgaccctctccccactattaccctattgtcctgccacatccccctctccaagatagtagaaaaaatgatcaataaatactgaagaaactcagagaccggtgccggcgcgggtcctccatattctgagcatgggtcccctgggcccacttttctttctctatactttgtctttgtgtctctttcttttctcagtctctcatcccacccgacgagaaacacccacaggtgtggaggggcaggccaccccttcattccctccatttaattaagttaaagaatgaacagtttattagggaaacacagatattgaggcagttctattttctctgagacattggcaatagaaatatggaacagccttttcccccatttttctatccac

SEQ ID NO: 169107 - DNA, 605 bp, Homo sapiens
tcctgcttgtccctgggcaatggaatgtcttggtgtaaaacccgattgtatattccatctactgagacaggagaaaaccgccttagggctggaggcaggacacactggcggcaatactgctctttaatgcattgagatgtttatgtaagtgcacatccaagcacagtacctttttcttaaccttgtttatgacacagagtcatttgttcacatgttttcctgctgaccctctccccactattaccctattgtcctgccacatccccctctccaagatagtagaraaaatgatcaataaatactgaagaaactcagagaccggtgccggcgcgggtcctccatattctgagcatgggtcccctgggcccacttttctttctctatactttgtctttgtgtctctttcttttctcagtctctcatcccacccgacgagaaacacccacaggtgtggaggggcaggccaccccttcattccctccatttaattaagttaaagaatgaacagtttattagggaaacacagatattgaggcagttctattttctctgagacattggcaatagaaatatggaacagccttttcccccatttttctatccac

SEQ ID NO: 169108 - DNA, 611 bp, Homo sapiens
ctttttcttgttttctgatttgtgtgtgtgtatgtgtgtgtgttgttattttacagatgaaatatcctgctgagtatctagtataccttccaatttattagaattttttaaaaaatcattctagtttctgaatattttaaatattttcattgtgacaagttactagatatttttatcttgggactttcatgacatcagctttccttagatatctttgatatcttctggcagttcatatccatgaggataggattaactgttattattttaggatgttagcgtgagaacaatctaattatacaaccaaaaatacttttacactgatttacatttttaaaatttatttttattttaaactgctgcatagtatttgtacatatgtgtgatgcgcwtataacattttgatacattcatagaatgtataaagatcaaatcagagtatttagtatatccatcacctcaaacacacattattttgttattattggaaagtttcataccttgaataatttttttcttcatactcttctacaccaagcacaccctaccccagagcctttggatattctccttccctcattgggatgtctgtaactgatccaataggtttc

SEQ ID NO: 169109 - DNA, 562 bp, Homo sapiens
ctcaaaaaaaaaaaaaaaaaaagaatatgatagtcctagctacttgggaagctgagatgggaggatagcttgagcccaagagttcaaggccagcctgggcaacataacctggaacccatctcccatagatatgaggggcgactgtatatagatatatgagaggggatttattaggggaattggctcatgagattagggaggtgaaaagtcccacgacagactgtctgtaagctggagaccgtggaataccacagtggggctcagttcaagtcctaaagtctcagaaccagggcagctgatagtgtaattctcagtccaaggccaaaggccaagaacctgggggctgctaatgtaagacccagagtccaaaggccagggagcctgcagttctgatgtccaaggkcagaagaagaaggatggcccagcttcaggagagagaaaaaaagaatttgccttttctctgccttttggttctatctgggcccacagccaattggatgttgtccgcccacactgagggcagatcttcctcagtcagcccacccactcacatgccaatctc

SEQ ID NO: 169110 - DNA, 472 bp, Homo sapiens
gggcactgagttcttaaaaaaaagcgtgttgaattaagcggaacaggaacacagcttctgaatttctcagaaatcagcaacccaatatccaaaatcttttagctggctgagacctatagttgtcatctgggtaatataggcttcctaccaatagcttcaattgtaggttaactgtacttccccttatttcagtaggatttcatcctgaactgggctcagggagggaaatgaaagtatttgccttccctgaacttccacaagttcaccatgcttgggccctgtcaatgtgtacatagaatagaatagaaccaacaagacagtgggggaggagggctggtagcagcttggctttagcatagccaagttggagcaggcgaggccakatgatacttcagttacaattcagtgagcacttatgagtgtctactaagtgctgactactgtgagagtcaccaatatcaattaataagaa

SEQ ID NO: 169111 - DNA, 522 bp, Homo sapiens
cctcagacctgctatcttagtccatctcacgctgatattacagaatacctgagaccagataatttataaagaaaaagattattttctcaccgttctggaggctaggaagtccaggatcagggcactggcaatgttgctggtgagggctgctctctgcttccaacatggcaccttgaacactgtgttctcatgtggtggaagggcaagaaggacaaactcccttcatcaagtcgctttataagggcacccaatcacattcatgagggaggatgtggcctaatcacctcctggcctaatcacctcttagaggccctacctcttaatactatcacattggcaaaactggggttttagaggggatcccttcaaaccatagcatctgctcccctgcttgacttgccacaggtagataatggcttttctctgggtgagcttagggacttcctggaggcttgagggctaccatatacataactgtttccatttcagggatgttyatttaaaataacatcgcgggaaact

SEQ ID NO: 169112 - DNA, 542 bp, Homo sapiens
gctggacaaagaaatgaatgcaaaatagcaaattattttattttttcgttgaggcagagtctcactctgttgcccaggctggaatgcagtggcacaatcttggctcactgcagcctctgcctcccaggttcaagtgattctcctgcctcagcctcctgagtagctgggattacaggcacacaacaccacgcctggctaattttttgtatttttagtagagatgcagtttcgccatgttggccaggctggtcttgaactcctgacctcaggtgatccacctgcttcagcctcccaatgtgctgggattacaggcatggacaaccatgcccagctcaaaatagcaaataaaytaatttcattctttctactgtaattgggttaagactgaacagatgacaggcctagaaatcagaagctggacagcgctccttcctgcccaggaagaacggctgcctgtggctccaaaggatccagcaatggctccagaacctcttcccagaggcatctctgacccttcatcccatcccacctgatcccccttg

SEQ ID NO: 169113 - DNA, 569 bp, Homo sapiens
agatctgaaggtcagtgtgacagcatgaggccagaaaggctttcaggtcaatatgattctgaaatttgtactaagagtttcagttcwcccactggaattttacattgaggtagttaggaaagggactgggccatattgataatggaagattgatagtaaaatcatagaagtgtgttaacatggtctcagtctgtttctgtatctcttttaccattaggatttgttttatctcccctattgatttttggaacttgtggatctttctcacttcctgtgtgtctcatatatagaagcatttctgagttcagaactgctttgcgttgaactccaggagactagtgctggcattaccattggttgtgtctgcagttgaatactgccaccaagccccccagggggtgtgctgcgaagtggaaagaccccgcccgactaagcactaaagccctcagagcacagtgaggcatcacctgtctgagtggggagagaactggagaagggctttggaactgataggggtccttccataactattatctagtttccccttatcggggaaaggagagagaaat

SEQ ID NO: 169114 - DNA, 515 bp, Homo sapiens
gggcaacataattcaaacatggtatatggggcaggggtagggggttgggggtatgaagggtcagggtccaaagaagcaattggaaaatagttatttctaccagttgcttttagaaagtctattttccacttacacctacttgctttgccactgctgtacctttgttatgctaccaattacgggtacaaaacctatctaggcttcaagaactrgtttattgctttcttaaaaaagtatttcatgctttttacgttatgttatgtctaattgtgttctttttattctcttacattaaactatgagtttcctgaggacaggttatccctctggttcacatttgcatccataaaaacatgtaacagagtaagtaacatggtagatgctcaaatgactttggccaaactaatgaatatataaatgtgtgctaggctgcattgtagattgttctgatttatttaataaaaggattaaagtattatttaaatcagataatgacttaaaaattccatttaatc

SEQ ID NO: 169115 - DNA, 590 bp, Homo sapiens
taggtagttttcaacccttgccctcccttttggagttccagtgtctattgtttgcatatgtatgctcctgtgtacccattgttaagtgcctacttaaaaataagaacatgtagtaattggttttctattcctgcattaattcacttggataatgccctccaggtgtatccatgttgctgcaaataacatgatttccttcttttttgtggctgtgtagtactccatggtcaatatgtactacattttttttatccaatcttctgtygatgagcacttaggttgattctatgactttgctattgcaaacagtgctgcaataaaatacgatgcatgtgtcttttagtagaagatttcatttcctctgggtagatatccagtagtgggattgctgggctaaatggaagttctattttctaaattctttgttgtcatttcaatgatgttcatggtgtcttcactgggagtagatcccatctcaagaaaccaccttctttgcttttccataaaacgcaacttctcatttgttcaggtttaatcataaggttgcagtaattcagtcacatctataggctccacttctaattctagtt

SEQ ID NO: 169116 - DNA, 602 bp, Homo sapiens
tgcacatgtacccctgaacttaaaataaaagttaaacttaaaaacattgcatttttatgtattttataatttgatataagtagccttatattattatttgaacaaaacaaggtatttttaaaaacataatttcttccttttcattgttttcattgtcatatgawtatatcatctcctcttccaggggagaagggaaagatagcgaaactctttatatcaaggttataagcatgaatattacattcaaatatttctattaaaactttacttgtgtaactgcagtgttctagtacagtagcaagagtaattatttatacatccttggatttaagacagtatgttaaaaattatacagcaagaatgttgcaagggctattagttccaacttatgtaggaaattgtaaatagcataaccctagaaaaaattatgacatattttattacaaatcaatttccatgtgccaatatgtgcagtagaaactacatgttgggaatataaggagtctagagaagggaagatgcatcgtcttggatctgttgcagctacttaaataattgccctcatgtgagtgtttgggttatacattggcataaaaccaata

SEQ ID NO: 169117 - DNA, 413 bp, Homo sapiens
aaaaagaaattgcattcacgacacaaagatagaatcatatacatatatgtgtgtgcttagagaacaagaaacctattaaaaatgtaaaatatgatawtaaaaaaaatctcagtgcaacagttgaaagataagataaaaaaataaggtggggccaagatggccaactagaagcagtggcgatcagaggctcccatcagaaaaacccttaatatgcatgtgaatccttcaccagcaaccaaggcattcaggttctctcatcaaaattgactagaaggctggtgtgacctatgaagaaaaagaagagcagtgtggtgtgacagcccacctgagagccacatagggaaggggaaccccctccccccagccaagggaggcggtgagtgagtgcactacccagccggggaaactgtgct

SEQ ID NO: 169118 - DNA, 531 bp, Homo sapiens
acactaaatgccagtaaattggacaaagtgacttcagtggttaagtagttttccttccttatttacttttatctatgactgtctcctgagttcctttagcttttttatagtgcaaatacttttcatttaagatcgtgctcactaaaaacgcacatacataattctgaaagtttataaaactggaccttcaatacaaaacgcaaaataatcagaagagcagacaggaaggacaaaatagaggccttaaaacaatactaaaagggagggcttaaaaccatagcaataatgcaggaattgatcaaactcaaagttaatccatgagaagtcagagaggagwattaatgcggctgtgcaatggcaaagctggtgctgctcccatgtacgtgagactccaagtgagcccttgtatatatgaataatgctttaaaagttgaaatcaagtcaaatttctcacaatatacaactgaacatcttcccattgtgctcttaatcctctcccttaaaattaaatggaaaaagagaaaaacaccc

SEQ ID NO: 169119 - DNA, 536 bp, Homo sapiens
tggcggctttgtggaatagaaaggcgggaaaggtggggaaaagattgagaaatcggatggttgccgtgtctgtgtagaaagaagtagacatgggagacttttcattttgttctgcactaagaaaaattcctctgccttgggatcctgttgatctgtgaccttacccccaaccctgtgctctctgaaacatgtgctgtgtccactcagggttaaatggattaagggcrgtgcaagatgtgctttgttaaacagatgcttgaaggcagcatgctcgttaagagtcatcaccaatccctaatctcaagtaatcagggacacaaacactgcggaaggccgcagggtcctctgcctaggaaaaccagagacctttgttcacttgtttatctgctgaccttccctccactattgtcctatgaccctgccaaatccccctctgtgagaaacacccaagaattatcaataaaaaaataaattaaaaaaaaaaaaagaatggactttcccaggccagctgtggtggctcacgactgtaatcccag

SEQ ID NO: 169120 - DNA, 536 bp, Homo sapiens
tggcggctttgtggaatagaaaggcgggaaaggtggggaaaagattgagaaatcggatggttgccgtgtctgtgtagaaagaagtagacatgggagacttttcattttgttctgcactaagaaaaattcctctgccttgggatcctgttgatctgtgaccttacccccaaccctgtgctctctgaaacatgtgctgtgtccactcagggttaaatggattaagggcagtgcaagatgtgctttgttaaacagatgcttgaaggcagcatgctcgttaagagtcatcaccaatccctaatctcaagtaatcagggacacaaacactgcggaaggccgcagggtcctctgcctaggaaaaccagagacctttgttcacttgtttatctgctgaccttccctccactattgtccyatgaccctgccaaatccccctctgtgagaaacacccaagaattatcaataaaaaaataaattaaaaaaaaaaaaagaatggactttcccaggccagctgtggtggctcacgactgtaatcccag

SEQ ID NO: 169121 - DNA, 526 bp, Homo sapiens
acctaatacaaagtagatgctatgcaaacagtggttataatatattgtttcaggaataatgacatgagaaaaagtctgtacatgttcagtactgatgcacctatcccttttttcccccaaatatctttgatttgtggttggttgaacccacagaggtggaactcaggccgcttgtgtgtgtgtgtgtrtgtatgtatgtatgtatgtatgtatgcatgcacacgtgtacttgtgtattgaggcaatagatatatacagtttcagagtatcactccagagactacttcagtcaattaaacgggaaaagattacctctacaacaaagaactctggccaacgccaccctaaccaaacttatccccaccacagagcaggcaagtgcagagaacaacatggcggcgcctgtggcgtgctcagaccaacacgacccatctggaacctgctcctgagaagtagggaggtatgtccaaattgaaggacttctgcaaaatgactgacctgagctcttcaaaaacattaatgtaat

SEQ ID NO: 169122 - DNA, 501 bp, Homo sapiens
ataattccacttgtgttaaaacaagaactatgtaatataacaagaacacattttattgatatgtcttcacttatgcataaaaaatgaaatctaggaggatatatgccaaatgttaattgctgctagcagtgaaaagaacatggagagaagaggggactttctttgtctttggaccgctgatcccaaaacaattctcatataattgcgttatacaattttgcactattttttaattggcatttttaaatattacaacaaaactttcagtatgctatactgctattttccccttaaaaagttttcagacttagttcctcactcttacacatcatggataaggagcaacagcccatcaataccactagggtcccagcttygccttctctcattctttagggaagcaattaaaaacaataacacacttttcacagctttcagaggtttctcatcagtctttgattcttagagagattctgactgtatactcttggcatatgttcc

SEQ ID NO: 169123 - DNA, 441 bp, Homo sapiens
ttgtcctttgcactagtgatgcttgaaatccttttacttttttctatctgacatccttacataaggactgcattaaatttgctctgagaattcattgctaataaaatgttcgtcttgaaagtttgaaagctttcttctttgtcagacactagctaatttaacattttcttttttggccctaattgtctgaaaattctgcattaaattacaagttgaattgcaataactaactcatcccagatgagcagctagtatgcatttttcttttattttattttgttcagtgaaattttaattttttgttgtcattttaaagttgtgttttgtcatgtatgccaccttgacacttttctcaaagacaagcataaaaaagtacacttctttaacatgcagtggtaataaattcatttatttttrtcatctcttcattcagttgctcat

SEQ ID NO: 169124 - DNA, 377 bp, Homo sapiens
tgagttgcacctggattcctgtgtgataacaaatgtttgttgctttagcccctaggtttagggtaattggttatgcagtagcagataacaaatacattggcctaagacagagcttgctgtgaggatggagtaacatgtatagtgcccacacatagtaggtgctaattcattgcttgtctaatgagtcagtcaataaacaaatgaatgttctataacaccgaatgttytctgaatccaaatgttcactcccttccacccactcccgtccaaaacatcaccaaaagttgttttaagcagagaatggctgggtcagatttgtttttctgtaatgggagatgggtttgtgtcccatgggtgcggccggttcagctgtggtc

SEQ ID NO: 169125 - DNA, 377 bp, Homo sapiens
tgagttgcacctggattcctgtgtgataacaaatgtttgttgctttagcccctaggtttagggtaattggttatgcagtagcagataacaaatacattggcctaagacagagcttgctgtgaggatggagtaacatgtatagtgcccacacatagtaggtgctaattcattgcttgtctaatgagtcagtcaataaacaaatgaatgttctataacaccgaatgttctctgaatccaaatgttcactcccttccacccactcccgtccaaaacrtcaccaaaagttgttttaagcagagaatggctgggtcagatttgtttttctgtaatgggagatgggtttgtgtcccatgggtgcggccggttcagctgtggtc

SEQ ID NO: 169126 - DNA, 395 bp, Homo sapiens
agatctcctagtctttgttgcagagcactgagtgcattctggagtacatctttaacactgtgttaagttacacggttgaaaacttttttaggtttcactttctgcatgaagaaagcctcaagttcagccagagatacagacttagggttttctcacattttkctgtgtctgtctagattcccaggagtatgtcaacattttcaaagcctccataaaaatctcattcctcagttttcattttaagctctttgtgttgctttttgtttgccccaactcttatctgcaacttcaggcagtcacagagtgaaaaaattggctccagttgtttttgacaagatccccaagggcaaaaggggcttaagacagctctgcaaatggagtctttcagggaacta

SEQ ID NO: 169127 - DNA, 403 bp, Homo sapiens
tgcattctggagtacatctttaacactgtgttaagttacacggttgaaaacttttttaggtttcactttctgcatgaagaaagcctcaagttcagccagagatacagacttagggttttctcacattttgctgtgtctgtctagattcccaggagtatgtcaacattttcaaagcctccataaaaatctcattcctcagttttcattttaagctctttgtgttgctttttgtttgccccaactcttatctgcmacttcaggcagtcacagagtgaaaaaattggctccagttgtttttgacaagatccccaagggcaaaaggggcttaagacagctctgcaaatggagtctttcagggaactacctgataggtcaaataattatattttgggggaatgagatc

SEQ ID NO: 169128 - DNA, 597 bp, Homo sapiens
attgtcagctttgctcgttacactaactactgttgacttcaattatcttactcaattttaagtgataaagagtagagatggaaagagtttyactttttgttttaggctggacttttgttctgttttcacatgtataggcagccaattttatatctcaggacattcctttgaaaactgcagtttatgtgattataagttgcttaataggtacacaaaataataacaagaaaaacaatactagtgttgttcttgttattgttattttaaggtttttaagatgtttccacaggctagagtggagattgccactgagaatataagggatatcagaatgaagtctaatggtttgtctctgtatctaattacccattccttccccttaaacagctaatctaatttgattggggagagtatattttctgagatgcagttttcattctttataacagtaaagtctttcactaactgtatcattcttgtactctctgtgttgctagtgactgggtttctaaggcatataagatgcacatgcaaacctaaaatccactttgtaggctcagctctctttataggttaattccaaagcctagattagag

SEQ ID NO: 169129 - DNA, 535 bp, Homo sapiens
taatataaatttctatatttatttttatatatagttcctatgaataaatacttgatgccaaatgaatattttacttggtaggttaaagtttgttttttaattcatataaataatacataccaataaaacacamaaaataaataggtaaaaaaatacaaaacaaaataatatgtaatatatcaataatctgtaggatgtaaaaaaacagcagattatgagattgagcagcaaagggctgcaatttagtgaagagaaagctggtgtagtgaactgtgaagatagaagatactgcactttagaaaaatagatataaaggcaatgacagaaaattttactaacatttgagtctgaaatatccagaggcttattaaagtagacgtgctgaaatcactctaacaaatccaaacatgcattaggaaaagtagaagtttctttcttgctcccctatccacggtctagtgtggttgtgtatgctgtatggatcgtttacatatagtgatttaaggatgtagcctccttccttccacccactatc

SEQ ID NO: 169130 - DNA, 404 bp, Homo sapiens
gagcagggatagaaacccaacatrctaataagattaaaagaagagaaaaaaagacattgatgaacatctgtcagcctttaccacaagaaaatgtgagtaaagaatcatatgtagaatgcattaagtttttgaaattctcacaattacataaggtaagttggggaagctttattatatccattttgcagctgagaaaatgttgagacctttataaaattcttccaatttttccaatttcctctcacatagtcctgtttcattaagggactatgtttatcaaaagggatcatgtttaacataaggcataattgataactgccattactataaagtcaccttgtcaggtaattaattcagctttggctttagattactgttttatttccttgtgtataaatttctgt

SEQ ID NO: 169131 - DNA, 428 bp, Homo sapiens
gagcagggatagaaacccaacatgctaataagattaaaagaagagaaaaaaagacattgatgaacatctgtcagcctttaccacaagaaaatgtgagtaaagaatcatatgtagaatgcattaagtttttgaaattctcacaattacataaggtaagttggggaagctttattatatccattttgcagctgagaaaatgttgagacctttataaaattcttccaatttttccaatttcctctcacatagtcctgtttcattaagggactatgtttatcaaaagggatcatgtttaacataaggcataattgataactgccattacyataaagtcaccttgtcaggtaattaattcagctttggctttagattactgttttatttccttgtgtataaatttctgtcttggataaaaggcatgaagatct

SEQ ID NO: 169132 - DNA, 555 bp, Homo sapiens
taccatgtgttatattttaacaagtgtagagaaccagcttctttcaagttggcaagagacatctgtaaggcatttctgggttggtaccaacatagggaatgacacaagtgacatcacctcatcttcaatattccctctctttccaaacatacttatcaagaatttagtaagggtgtttccagaatcaatgccagatatttttaatagcttatttcccataaatttgatccttttggcctaagtctggtcgacaatgagagagcagtctgtggttagggaatatttctctgtttatcccttcaatatcagaaagtgtctaagcctcttttgatgcagatgtagctgctctgtgagacaactcacattgtttttgctgtcagctttcctgctaaagacatgcgtttyctttgtgcttcattcagttgtcctattagttgctacttctggttactgcttaggaaacagtgataacagatgcaaatgtgaaaattttgccattgtgctaagtcgcaagttaaaattttggacataatgtttttagaaggattgtaaaat

SEQ ID NO: 169133 - DNA, 599 bp, Homo sapiens
caaacaatgatttaatattctgctaggaaaaaatgtatataactttccctctctgtaaataattatgttcatttctggacatttaaacgagaaacagatttagatttccttaagggttatgtctgttctttccagtctaaccttgttaaaactagaaatcgtagcataaagcttgccttgggaattaaatgcaagctctctgaattttcccagcaacttggttagagagtaacctgcagaaaatcatctatagaaaaactgttttccaatcaacattataaagaaatataaagcaaaataaaaatactacaaatttttcacaatttcagaaaaaaagcctcttttataattattaaaaattctgcaaaagcatatgtcaatagatttaaattttaaaatcccaggtttttattgaacatatatgtgacctcctgarttttgatttttacagtagagctctgggtgacattggacagccttaaattcataatataaaagaagaaaatgaaattaattttcttatcttccaggtttcggtttagcaaagattcaccactttacagttcattaaacaaggaatatttttaaaaatatacaaa

SEQ ID NO: 169134 - DNA, 618 bp, Homo sapiens
aggccattatgcttagcaaactaatgcaggaacagaaaaccaaatgctgcatgttctcacttataagtgggagctaaatgatgagaactcatgggtgcaaagtggggaacaatagatactggggactagttgagggtagagggttgagggaggaagaggagtagaaagaataattattgggtactaggcttagcacctgagtgacgaaataatctgtataccaaatccccgtgacacgagtttgcctgtataacaaacttgcacatgtacccctgaacctaatacaaaagtgaaaagaaagcaagagttcatgtctcatgttttcagtacagatacacacacacacggtaacatgtcagactactcatagttcatttttttaatgacaagaaaaattgtatatatttttggcatacaaaatgtgtgtgtatatatgtgtrtatatatatatggatgtttgtatatatatatacacataaatatggtagaataataaaatcaagctcacatacttatttttttggggggcgagaacatttaaaatttactctctcagaaatttttaagtatacaatatattattaagtatagtcaccatgctgtaaaatagatcttcag

SEQ ID NO: 169135 - DNA, 651 bp, Homo sapiens
tagctatattgcagtgagtctcttataggcaacacacaattgagtcttatgttgtcattttatatgtcttcataatgttaattatctccttttgtgtcagcttgaagactcacctcaacatttcttgtaaggtaggtctagtggtgatgagctcctttagcatttgcttctctatgaaagtttctttttgccttcacttctgaaggaaagctttgatgagtaaattatttttggctagaagcttttctttttctttctgcacattgaatatatcattccactccttcttggcctagtttctgttgagaaatccattgtcttatgaacattctctggtatgttaggatcttagttgttttttgtttctgttgttgttgttgttgttgttgttgttgttgctgctgctgctgctgctttcaataatctcttgttttgatttttgacagtttggctacaatatgtcttgatgtcattttccctggattgagtatytttggagacttttcagcttcttgtatttggttgtttatattttcttcagatttagaaatttttgagccattattttttaaatcagatttttgttcctttctttctcttctccttgtaattctataataagtaaattagctatcttgatgttttactgta

SEQ ID NO: 169136 - DNA, 463 bp, Homo sapiens
tttgctctgccacaagctctgtaagtatatcagtgattaagtgaaacagccaatgataaaagtatagcattgactgctggaggccattgctatttccctccgcctcccccttggactacaacattgagctattgattcattattaatagctttttagcctcaaagcaaacttttactgttacattgctgtattctgaagatggcaaaaacaaaagaagtcatccttcagatcagcatgttttccttcttgtaaaagtttccaaaatgtrttcatagcagtgtcttgctcagagttccagcactttgtattctccaggaagatttattcaggctaaattatgagatgatattcagccagtgcattttctaccatttcctgcaaatgtccatcatggcattctcaaatgaatttgcttggtacaaaagtgacaattgattgtgaataagttttactttttctagc

SEQ ID NO: 169137 - DNA, 463 bp, Homo sapiens
tttgctctgccacaagctctgtaagtatatcagtgattaagtgaaacagccaatgataaaagtatagcattgactgctggaggccattgctatttccctccgcctcccccttggactacaacattgagctattgattcattattaatagctttttagcctcaaagcaaacttttactgttacattgctgtattctgaagatggcaaaaacaaaagaagtcatccttcagatcagcatgttttccttcttgtaaaagtttccaaaatgtgttcatagcagtgtcttgctcagagttccagcactttgtattctccaggaagatttattcaggctaaattatgagatgatattcagccagtgcrttttctaccatttcctgcaaatgtccatcatggcattctcaaatgaatttgcttggtacaaaagtgacaattgattgtgaataagttttactttttctagc

SEQ ID NO: 169138 - DNA, 511 bp, Homo sapiens
atgattcaaaaaaggggagtgaaataatctttaagactctggattattattttttaagcccttaacacattttataccaatttactgcatctaacataaatctatcaagattggatacttctattcactggtatggcatcctctccccatgccaccagagtcaagatacaataactaattattaactgatttcttagtttctttaaaaaatatgtttttttttactaatctagtgtctattcaggtaatatgcaaaacaattgattacatttagcttacttatttaaaagcacattataattttccagtagatatatttaatcaatgtattgggagtttgagaagaaggaacaactactcagtataacatatrtctctctctatatatatagatatatatttctgaatatgaattttattcggtaagttagaatttaacttaaatctgagctgaaataataatattttaaaatttttttgagagttgcaacttttatttttatgtataatt

SEQ ID NO: 169139 - DNA, 511 bp, Homo sapiens
atgattcaaaaaaggggagtgaaataatctttaagactctggattattattttttaagcccttaacacattttataccaatttactgcatctaacataaatctatcaagattggatacttctattcactggtatggcatcctctccccatgccaccagagtcaagatacaataactaattattaactgatttcttagtttctttaaaaaatatgtttttttttactaatctagtgtctattcaggtaatatgcaaaacaattgattacatttagcttacttatttaaaagcacattataattttccagtagatatatttaatcaatgtattgggagtttgagaagaaggaacaactactcagtataacatatgtctctctctmtatatatagatatatatttctgaatatgaattttattcggtaagttagaatttaacttaaatctgagctgaaataataatattttaaaatttttttgagagttgcaacttttatttttatgtataatt

SEQ ID NO: 169140 - DNA, 506 bp, Homo sapiens
atatgatggaatatgactctcatgaataggtaactaatctcttaactttgagttaatcaaaatgaagctgaatgtgggtggtcctgacctaatcagatgagcctttaataaaagaagcatcgttgaggcattctgctggcctggaatatgcagccttcataatgtctacagctgaaaggaaattgaatttggtaataatcttttgagcttggaagaaaagcccaaactccagatgagattacagcctagctgatgtcttgatttcagcctgtgacaccctgagmagagagttcaattatgctgttcccattcttctaattctactcccacaaaatctctgagattataaatgaatgctgtttaattttaatttttatttttcaatctggggtacatgtgcaggatgtgcaggtttgttacataggtaaatgtgtgcaatggtggtttgctgcacctattaacccatcacctaggtacaaaaacagacacatagaccgatgaaacag

SEQ ID NO: 169141 - DNA, 550 bp, Homo sapiens
ttcttatacatttaatttagtatttttcaggttgtgacaccttaagtatcttcacaatcaaacatggttatcatagtttaggatcctccaagagcaacttttgagacaaaagttctagtgcaaataagttgttaggaaagattccagataaatctggtaggcaaatggtgaaggatagcagacactatctgtatcctactaagcatcctcaaatcttctcatttcaatttgygtgttcgatttacagagagcagtatctgcatctccatgcataaggattttccccaatatgtagcccactctgtgcagttggcaggctagaagtaccagggaattaaatgtaccaccccaaaagccctcaattaataatttatggttgttggtatataatctcagattatctcttctcttggttgacacaactctgaggcatgcttttgccctttgccctttcccctagagtgaagcaatcctgtggtttctagattagtaacgcacacttcgagcttggtttcttctctgtagcacctacccatttcccttctaatgt

SEQ ID NO: 169142 - DNA, 551 bp, Homo sapiens
tgagtcttcaaaccaaaatatcactgaaagattttttccccagactaaagtccactaaccatcacaagtctaaatactgtaaaaaaaaaaaaaaaatcagtgccttaccttatagttttactttattgagccagcaaagctaagcattttttttttaattttactgagaattttgtcttcccttttgaatgcaaatgaaagtaaatcacaatctccatagaaatacaataaaattattagctggtgattctctttgatttatgagagaaaatgagtgtgtgtgagcatgtgtgtgcgtgcatgcaagtaaaaatgctcactttttttaaaaargtgagagatataggaatatcctacaagcaaagaaattagaaagtgatgaccttaaagataaatggattcagtggccttcccaataaacaatgtaagtgaaatgaatttatgagtctcagcagattcctgaggtcctgtagcaactgaaacaaaagtcatctctgatttgacaaatatgggtccccttgactggggagattatttaacataccacctag

SEQ ID NO: 169143 - DNA, 316 bp, Homo sapiens
tataattttggaggctaataaggtagatggaaataatatgtgaggaaagctataatgatttctgatgaattagacttaagaagaattctaaagtacactttagactctgaagagagctaatcttcttacaaaggaagatggacagwtcacgtatggtttaaaagggtatgatgctattaaaattaataagagaatttagcaatctctcagaatacaaaggaaatatataaaaatcaggtgtattctctattttagaaacaagcaatcagaaaataaattttaaaccattatttcaaaaatatctatgaaaacaagg

SEQ ID NO: 169144 - DNA, 444 bp, Homo sapiens
taaccttttcaacaaatggtatatgaactccatatacatgtaaaagataatgactatatcacaccatacataaaaattaaaattaactataaacgtggcatatacataaacwgtatccttttttttttttttttgacatggagtctcactttgttgtccaggctggagtgcaatggcatgatctcggctcactgcaacctctgcctcccagattcaagcaattctcctgcctcagcctcccgagtagttggcactataggtgtgcgccaccatgcctggctaattttttaatttttagtagagacagggtttcaccatgttggtcagactggtctcaaactctgacctcaggtgattctcccaccttggccttctgaagttctgggattacaggcatgagcctccacaccaggccataaactgtatctttaataaagcataggc

SEQ ID NO: 169145 - DNA, 443 bp, Homo sapiens
tttgtctcaccaattttacagaaatcacccaggccacacccactgccaggggatagcagacctgcctaaccatctggcccaccactatcactgccagcaatcaaacaagctatagyctggaagcccaagaatcagtatatttagatctgctaatagtggtgtaaaccaccttgggccccaaaagcaggcatatgtggccctctgctgccaccactggtccctgaggactggctcacctggtatccctattcccagcaaaacttcaccatagcctccactaacagcagcaccttacatcattgaggaaatcacagacaccactgacataatactgtttacagtcaaataaatcatatagagaccacactctatacacatccagaatcaaagccaaagtgccctactcaattaacaccatagatacatcttcaggaaaaagctct

SEQ ID NO: 169146 - DNA, 584 bp, Homo sapiens
tccaggcctgtttgaagtgtccataccccagcagtgccacaaaacaccactctctctggtggcacaaactctgtgcttggctttgaaaacagaggggaaaaccccctctgagtggagaagcaaactgtgtgctcaggcttccatatagagtgtgatctctcctacccatctgcatgcccactactgctgtcactataggctagggcaagcgagctggrgggctgcctttttgaggttgtgagtggagattgagacttactggtcattggccttattatccaggctcaggtgcaaaagagcagggttcttcccacacttttctctgtgctgtgacactgctgctgcagagcacagaagatctgagagtagtgcatctgcatctgtgtggggcaactctgttctacagccaccaacaacaccaattcaccctgcttgggacccagagggttgtcccaccactgctactgccaccatgcccataatgccagcttccaagaaaccgaagaaccttctgagccacctagcacactgtgaaaaccaccagcccaagaactgacctactggtaactgtcaacccaggtgcc

SEQ ID NO: 169147 - DNA, 584 bp, Homo sapiens
tccaggcctgtttgaagtgtccataccccagcagtgccacaaaacaccactctctctggtggcacaaactctgtgcttggctttgaaaacagaggggaaaaccccctctgagtggagaagcaaactgtgtgctcaggcttccatatagagtgtgatctctcctacccatctgcatgcccactactgctgtcactataggctagggcaagcgagctgggrggctgcctttttgaggttgtgagtggagattgagacttactggtcattggccttattatccaggctcaggtgcaaaagagcagggttcttcccacacttttctctgtgctgtgacactgctgctgcagagcacagaagatctgagagtagtgcatctgcatctgtgtggggcaactctgttctacagccaccaacaacaccaattcaccctgcttgggacccagagggttgtcccaccactgctactgccaccatgcccataatgccagcttccaagaaaccgaagaaccttctgagccacctagcacactgtgaaaaccaccagcccaagaactgacctactggtaactgtcaacccaggtgcc

SEQ ID NO: 169148 - DNA, 572 bp, Homo sapiens
ttcttaccttcacataattagctctcaaaattccccttgtctggccatttctagctattgcttgcccttaactctattcacagttattttgtatgttcattgttttgacccaattattyttcttcctgaaattctatcaatggcaaattgttgtcacttaaattaagtgcaatcttctgtcagtaaatgtaaagaaacttctgcactctaatactttatatcctatgccatatttaacttttaaaaaataaatcctacttcatacacaactcaccatgaggcttcttttgaaggcaaacactcatgagctgtctcctcatccatctgggtctcctcctttgggaagtcattcctcattagggctaattcctcataacatagacacagtaaatggacagtgctgatttggtctgttcagactttggctttccttggcagccctgacagaaattcaaactttaagcagcctgagaaaagcataagcagcaatttgcagttcaatctggaagtagattagagattgctgggaaaaaaaaaaaaaaactccttctttaagacttgctcatattaag

SEQ ID NO: 169149 - DNA, 572 bp, Homo sapiens
ttcttaccttcacataattagctctcaaaattccccttgtctggccatttctagctattgcttgcccttaactctattcacagttattttgtatgttcattgttttgacccaattatttttcttcctgaaattctatcaatggcaaattgttgtcayttaaattaagtgcaatcttctgtcagtaaatgtaaagaaacttctgcactctaatactttatatcctatgccatatttaacttttaaaaaataaatcctacttcatacacaactcaccatgaggcttcttttgaaggcaaacactcatgagctgtctcctcatccatctgggtctcctcctttgggaagtcattcctcattagggctaattcctcataacatagacacagtaaatggacagtgctgatttggtctgttcagactttggctttccttggcagccctgacagaaattcaaactttaagcagcctgagaaaagcataagcagcaatttgcagttcaatctggaagtagattagagattgctgggaaaaaaaaaaaaaaactccttctttaagacttgctcatattaag

SEQ ID NO: 169150 - DNA, 572 bp, Homo sapiens
ttcttaccttcacataattagctctcaaaattccccttgtctggccatttctagctattgcttgcccttaactctattcacagttattttgtatgttcattgttttgacccaattatttttcttcctgaaattctatcaatggcaaattgttgtcacttaaattaagtgcaatcttctgtcagtaaatgtaaagaaacttctgcactctaatactttatatcctatgccatatttaacttttaaaaaataaatcctacttcatacacaactcaccatgaggcttcttttgaaggcaarcactcatgagctgtctcctcatccatctgggtctcctcctttgggaagtcattcctcattagggctaattcctcataacatagacacagtaaatggacagtgctgatttggtctgttcagactttggctttccttggcagccctgacagaaattcaaactttaagcagcctgagaaaagcataagcagcaatttgcagttcaatctggaagtagattagagattgctgggaaaaaaaaaaaaaaactccttctttaagacttgctcatattaag

SEQ ID NO: 169151 - DNA, 580 bp, Homo sapiens
aagggccctatcctttttgaatctcaacaccaatactatagataaccaagtaaatattttatttttatttttatattttttgagacagaccctccctctgtcgcccagctgaagtgcagtggcgcgatttgatttgggctcactgcaacctccacctcccaggtaaaagcaatcttcctgcctcagccttccaagtagctgggattacaggcatgagccaccatgcccagctaatttttgtatttttagtagagatgggggtttcaccatgttggccaggctggtctcaaactcctggcctcgagtgatctgcctgcctcggcctcccaaagtgctgtaattataggcatgagccactccccctggcccaaataaatattttaaataaagcaatgtgcatatgagccttacctcctcctttttacttaataaaatatagtactgttgaattmtagtgcatttctctccatttctatgaattaaaaaaaatgaatatcagtgctgagtataagtgattacttgaggaactgcagtgaacaacaacacagatggacaaagagctatcatgatgaacaagctt

SEQ ID NO: 169152 - DNA, 320 bp, Homo sapiens
cttggagtcagagaaaaaacakaagagtttttattgacaggtgagaaatttgtgctttgtttttaaataatagctttactgaggtacaattcacatagcataaaattcaccattttaaagtgtgcaattcactgttattagtgtattcacagagttgcacaatgatcgccactatctcatctaatttcacaacattgttatcaccccaccaaaaaaccttctatccattagcagtcacttcccatttcccattccctccagcccttggcaaccactaatctactttctgtctgtatggattttgcctattctggaagttt

SEQ ID NO: 169153 - DNA, 489 bp, Homo sapiens
tgctgcagaaggtgggcaataggaaagctgggagctcagcaggagcttgtggagtgagcgcacagaaaacaggaagtaaaaccccttcttcctgcaatgtctctccaccactgcctactgataaaacttkgtatcatgccagctggcaaagtcagaaatatttcaaggtcccaggtccatttcacagaataggcataaaggggaaatgagaggtaataaattgattacaggttgagaagttcaaggaactgagaggtcttgatgttggattgttgttcttgtggatattgaaatgacccaagtgttggcagaaattagagtggtgtagaaggttagagaccaataaactcatttctctaagtgtgaccttggtctatctgcatcagaatcaagtgggatactttgataacacaaattcctttttcccactgcagatcttctgaactggagtatctgggaagagagctcccaaatattcttttttagtaa

SEQ ID NO: 169154 - DNA, 489 bp, Homo sapiens
tgctgcagaaggtgggcaataggaaagctgggagctcagcaggagcttgtggagtgagcgcacagaaaacaggaagtaaaaccccttcttcctgcaatgtctctccaccactgcctactgataaaactttgtatcatgccagctggcaaagtcagaaatatttcaaggtcccaggtccatttcacagaataggcataaaggggaaatgagagrtaataaattgattacaggttgagaagttcaaggaactgagaggtcttgatgttggattgttgttcttgtggatattgaaatgacccaagtgttggcagaaattagagtggtgtagaaggttagagaccaataaactcatttctctaagtgtgaccttggtctatctgcatcagaatcaagtgggatactttgataacacaaattcctttttcccactgcagatcttctgaactggagtatctgggaagagagctcccaaatattcttttttagtaa

SEQ ID NO: 169155 - DNA, 529 bp, Homo sapiens
ttcaagatggagttgctctggttcaaacgcctctgacatggtgagggcttgatctctgcttccaagatggcacctagttactttatcctctgtcttaattttagcccagaaagacccatgttggacttctacagaactgtaagataatacatgtgtttttttttaagtcactaagattgtagcaatttgttactgcatcaatagaaaactaatagaacaaggtatttcccaacagctgagtgcaagtttatggagaaggtwgcatttataagctgttagcagcagcactcccagaaattggaggatgggtgcactcgtcattaaagggttggcagtgttcactttagtaaatctgcctaattctgggatgcaatttaaggaagcctactgtttgtgattttggttgcttttttgtttgtttgttttggttctttttagagagctattccttacctcaaggtaaaaaacatattctcttacatgttctttaaatacaattttaattgggttttatacatataaatattta

SEQ ID NO: 169156 - DNA, 298 bp, Homo sapiens
acttgtaataccatataccaagatgatttcctgtgctccatagatggatctgtccaacattttgcttcttattgtcyggcctcctgtatcccaaactagagagtaacattcaagtttcctggcaatgttatccttctcaaaagaaatccagtcctatagtttgtactggttcctgaaagttttttgagcaaaatctgtagctaaggaggtcttccgggaggtgctgttccctagcacgatgattttcagtgctggtcctggctctcttccttagagtcctacatgatgtcccaggaac

SEQ ID NO: 169157 - DNA, 621 bp, Homo sapiens
  misc_feature (1)...(621): n = A,T,C or G
nnnnnnnnnnnnnnnnnnctcaaaggattttccctggttgacagcattgcttgccttaaaatagtggggtcagacttttcattccagttccagaaagtgwtgcgtgtatcatgattgttttgctatgaaacagttcctgtccctattaccctcgtagtcaacacaataggctatgttccttcccaggagtcattaggtttccctaatgggatgatggaaaggagggaaatagagctctggccctcttccttcattagtgctgaaatctggtgctgtatctgcttcacatcaagctcagtggattgtttttcccttgtctgagcctgctctttcctccttgagtgaggaaaaggatttaaatcctggctttcctgacatggaactttcctgcagtggctgttgcagctgaacgcattaaaaggagtacctgcaagctgtgagaagaaatattgtttgaagattagcatataatataatgtggacaagtgctcttaggtttgcttttaaatcgaaagactgtgttctgtaggatttgaaaaagaatagaatttgtcattggcacatcccacccgtcatagccccacaggtttctttgtagccactggagggtcttaagtgatt

SEQ ID NO: 169158 - DNA, 622 bp, Homo sapiens
  misc_feature (1)...(622): n = A,T,C or G
nnnnnnnnnnnnnnnnnnnctcaaaggattttccctggttgacagcattgcttgccttaaaatagtggggtcagacttttcattccagttccagaaagtgatgcgtgtatcatgattgttttgctatgaaacagttcctgtccctattaccctcgtagtcaacacaataggctatgttccttcccaggagtcattaggtttccctaatgggatgatggaaaggagggaaatagagctctggccctcttccttcattagtgctgaaatctggtgctgtatctgcttcacatcaagctcagtggattgtttttcccttgtctgagcctgctctttcctccttgagtgaggaaaaggatttaaatcctggctttcctgacatggaactttcctgcagtggctgttgcagctgaacgcattaaaaggagtacctgcaagctgtgagaagaaatattgtttgaagattagcatataatayaatgtggacaagtgctcttaggtttgcttttaaatcgaaagactgtgttctgtaggatttgaaaaagaatagaatttgtcattggcacatcccacccgtcatagccccacaggtttctttgtagccactggagggtcttaagtgatt

SEQ ID NO: 169159 - DNA, 313 bp, Homo sapiens
ggggctgcaggtacatgccatcacgcctggctgatttttgtattttttatagaaatggggtttcactatgttcccaggctagtcttgaactctgggctcgagtgatccacccgcctcagcctcccagagtgctgggattacaggtatgagccgctgagcctggtcaagtgttttcrtcttattcctctatttttcacgtgtcctattttctgataataggtaccccggattccatcagtcttaaattatgacttccaaagaggtcttcactggattcagcacctgtcgtaactgactgtatacccagttctca

SEQ ID NO: 169160 - DNA, 623 bp, Homo sapiens
cctttaatttacagatgaggaaaatttaacacttgtttaacacctgtaactacagatgacccytgaacaacatgggtttgaactacatagatccccttatatgtggaatttcttctgcctctgccacccttgagacagcaagaccaacccttcttttcttcctcttccttcttggtctactcaatgtgaaaacgacaaggatgaagacctttatgatgatctacttccacttaacaaacagtaaatatattttctcttccttatgatttttaaaataacattttttcctttggcttaatttattgtaagaatacagtatataatacacataacaaacaaaatgcattaattgactgtttatgttattggtaaggcttctggtcaacagtaggctattagtaggtaagttctgggggagtcaaaaagttttatgtggatttttgactgcatgggggtggggctggcacacctatcatccgagttattcaagggtcaattctaaattgttctcatagtgcatatttctcattaacatgactaaagaggaaactggagatctaatttgctaaagtggtcacgctggcacttgggaacatttttccctggtaatggacttgctgtcc

SEQ ID NO: 169161 - DNA, 474 bp, Homo sapiens
ttctctttgcttgctagtttggcaactaccgttctattttctgtctctatgaatttgactgctctaggtactaagtggagtcatacaacatttgtccttttgtgactgtcttatttcacttagcataatatcttcaaggttcatccatattatagcatgtgtcagaatttcctttytaaggcaaactaatattcaattgtaagtatataccatattttgtttacccattcatccatcaattgacattgggctgttgcccccatttggctgttgcaaataatgctgttatgagcattggtatacaaatatctgtttgagttcctgcttgcagttctttgcatgtatacccagaagtggaattgctggatcataaggtaattgtatgtttaatttttttttttttgagaaactgtcatactgttttccgcagtgcctgcaccattttacattcccaccagcaatgaacaagaattc

SEQ ID NO: 169162 - DNA, 557 bp, Homo sapiens
gaattctaagacaaatataagaataagaagagatggcacagtggctcgcggctgcaatcctaatgctttgggaagccgaggtgggaggattgcttgaggcttggagttcaagaccagcctaagcaacattgtgagacccctgcctctccaaaaaaatttttaaaaaacaactgggcatggtggcacatgcctgtagtcctagctacccaggaggctgagrcaggaagattgcttgagcccaggagtttgaggctgcagtgaggtatgattgcaccactgtactccagcctggggtgacagcttcttcttctgaaaaggaaggaagtgagggaaggagggaaaatgaaaggagaaagaagaaaaagggaaaagaacaagaagagactcttgagggggaaatttgtggtggactggaagtgaggaaaccttgggtcctctgttttgaaatatttattactttcatcaaattactttgcctcctttggcctcaggttttttatgggtctagtaaagggaagcagggctgtaatcctcagggagtctctccacttttttct

SEQ ID NO: 169163 - DNA, 439 bp, Homo sapiens
aacatggactttgaaaacagtccaacctgggactgcactctattatcaattacatatgagatgtgagacactgggaaagttattaactacaccaatctgttttcctgyacgtaaaatgagacaaagagtaggaatgtaaacactatatgcctgtgtctcatatccattcacttcttcccacttcagaccacaaaatcctcttatcctgcctgtgctatcataacggcaggctaaccgattactaccagaataatcttttcaacacgtacactgagaggtaaggcatcctccccatagctgttaaggccctgctcttccaggtcccacctctggctccggccttctcatcctgctaccccactttccactcaaggtgctcccatccaccacaatggccctgtccattccttccttcctcagggccctgtattcactgttc

SEQ ID NO: 169164 - DNA, 439 bp, Homo sapiens
aacatggactttgaaaacagtccaacctgggactgcactctattatcaattacatatgagatgtgagacactgggaaagttattaactacaccaatctgttttcctgtamgtaaaatgagacaaagagtaggaatgtaaacactatatgcctgtgtctcatatccattcacttcttcccacttcagaccacaaaatcctcttatcctgcctgtgctatcataacggcaggctaaccgattactaccagaataatcttttcaacacgtacactgagaggtaaggcatcctccccatagctgttaaggccctgctcttccaggtcccacctctggctccggccttctcatcctgctaccccactttccactcaaggtgctcccatccaccacaatggccctgtccattccttccttcctcagggccctgtattcactgttc

SEQ ID NO: 169165 - DNA, 414 bp, Homo sapiens
atggactttgaaaacagtccaacctgggactgcactctattatcaattacatatgagatgtgagacactgggaaagttattaactacaccaatctgttttcctgtacgtaaaatgagacaaagagtaggaatgtaaacastatatgcctgtgtctcatatccattcacttcttcccacttcagaccacaaaatcctcttatcctgcctgtgctatcataacggcaggctaaccgattactaccagaataatcttttcaacacgtacactgagaggtaaggcatcctccccatagctgttaaggccctgctcttccaggtcccacctctggctccggccttctcatcctgctaccccactttccactcaaggtgctcccatccaccacaatggccctgtccattccttccttcct

SEQ ID NO: 169166 - DNA, 333 bp, Homo sapiens
gcttgtttgaagacaagattcagtagttttaaagcaaaataaaaaacaatgaaaacattttgaattcatccaaactagatcataaagtttttcaaggtcaggactatgagctttagttctcttaggtgcctgttaacacctagtggaatgctaagactatacaargcatttaataatacttggctaatttatattgctctgtccaaggggattttcttttgttgataccaactagtatccaagccggcagtggtaagtaaaaaaggtaaggctctattttaagcctggctgccaatatgtaaatacgtagaatactggtaaagcagtattctt

SEQ ID NO: 169167 - DNA, 333 bp, Homo sapiens
gcttgtttgaagacaagattcagtagttttaaagcaaaataaaaaacaatgaaaacattttgaattcatccaaactagatcataaagtttttcaaggtcaggactatgagctttagttctcttaggtgcctgttaacacctagtggaatgctaagactatacaaagcatttaataatacttggctaatttayattgctctgtccaaggggattttcttttgttgataccaactagtatccaagccggcagtggtaagtaaaaaaggtaaggctctattttaagcctggctgccaatatgtaaatacgtagaatactggtaaagcagtattctt

SEQ ID NO: 169168 - DNA, 566 bp, Homo sapiens
catctataggggtattaaaaattgagtggaagaaaatgaagaatgaagcctcagtgagagaatcacaaggaaacagtaggtgacaatgagaggaggtagagccaggtggtaatagcctcggacgacttcacacaggggcagagtagccatgggagcaaacaagcgacaaccacaacagtctagctttcctctcctggccccttgctacctggaacatcaatttgttcatttaagcaaatatttatttatttaaaccaataatgaacctccatgtcttagttggctcaggctgccagaacgaaataccatggcttaaacaataggaatttatttttcatagttcttgtawgagtccattctcgcactgctttaaaggaatacctgagactgggtaatttataaaggaaagaggtttaattggctcacagttctgcaggctgtacaggaagcatagcggcttctgcttctggggaggctttaggaagcttccaaccatgctggaaggcaaagcaggagccgacaggtcccacatggagggagcaggagcaagagagagagggaggagg

SEQ ID NO: 169169 - DNA, 537 bp, Homo sapiens
tccatttcttctagattttcggatttattggcatatggttgctcatagtaaccactaatgatcctttgaattcctgtagtatcagtagtaatgtcttctttctcatctctaattttgtttatttggggtttctctcttttttcacagtctgggaaagtcttaccaattttatcttttcaaaaaactaacttttggtttgttgatcttttgtattttctttgtttcagtttcatttatttctgctctgatttttatttttattttatattaattttgggtttggtttgctcttgcttttctagttyttcaaggtttatcatttggttatttatttgaaatttttcctcttttttgatgtaggtgcttttagctataaacttccctcttagtacagccgtcactgtatcacataggttttggtatgtgttttcattatcatttgtttcaagaaatttttaaatttccttgttgatctcttcattgacccactggccattcaggagcatattgtttaatttccatgtgtttgtatagttt

SEQ ID NO: 169170 - DNA, 537 bp, Homo sapiens
tccatttcttctagattttcggatttattggcatatggttgctcatagtaaccactaatgatcctttgaattcctgtagtatcagtagtaatgtcttctttctcatctctaattttgtttatttggggtttctctcttttttcacagtctgggaaagtcttaccaattttatcttttcaaaaaactaacttttggtttgttgatcttttgtattttctttgtttcagtttcatttatttctgctctgatttttatttttattttatattaattttgggtttggtttgctcttgcttttctagtttttcaaggtttatcatttggttatttatttgaaatttttcctcttttttsatgtaggtgcttttagctataaacttccctcttagtacagccgtcactgtatcacataggttttggtatgtgttttcattatcatttgtttcaagaaatttttaaatttccttgttgatctcttcattgacccactggccattcaggagcatattgtttaatttccatgtgtttgtatagttt

SEQ ID NO: 169171 - DNA, 569 bp, Homo sapiens
gggtaaaagaagataagatcaattttggccacactgagtttgaggagccagagtaaattctaagtatctctgttcaataaaaatttggatgcaggagcctggagctcgagagaggtgcagcctggacccagagctcaggatgtcatcagcccaaaagtggttgctgaagtaaaggacagccccaaagaaaatgcttgaagggcaaacrgctgttttcatttttccgagtcccagttcgcacacatggttaactctggcggtaagccagatggtatttctaaatgcactaagtaggaattatatactatcaactctgttctttagaaggagttttaggtaaatataaaatagcacattacatatgttaaagcttaaaagtaaataactttactatttgtatataggtccaaatgcctgtagctagataaaacgtgcttctcaaggataaaaatatcatttagagctgtctaacaccaacaggaatgctaactctctgaaagaagggcttattggttaagcaaatgtcaagttaacacagagttatgcagtcaaaataaggtattaaaagg

SEQ ID NO: 169172 - DNA, 610 bp, Homo sapiens
tactgttcttttattacctatcttttcccctctgtgcctttgctacataactgtttatttcttagaggtattttatttagcatatgtaagtagggtgattcaagttttataattagagaaagctgaaggctcattgaatcaagaccggtagcagccttggtttcaattaattctaaacacggcttgagttgctgaggctcctgactatcagactctaccttgtcttttatggtgttaaaaacagttcacccatagggttttccagagctaaaagtagaggattctttgaagagtggatggcaaggaaccttgtcattcagttgtaargtttaaattggttcacatacgtcaggccttctcagagtagagataacacatcattttctaaccttcccgatataggctacagaaattgacagaagaaagaagagaccattggaaaatgatgggcctgttaaaaagaaagtaaagaaagtccaacaaaaggaaggaggaagtgatctgggaatgtctggcaactctggtgagttgtgggggattcttttttctcctcagtcatggccctggtattctggaattctccagagggcagaagagcctattagaattg

SEQ ID NO: 169173 - DNA, 610 bp, Homo sapiens
tactgttcttttattacctatcttttcccctctgtgcctttgctacataactgtttatttcttagaggtattttatttagcatatgtaagtagggtgattcaagttttataattagagaaagctgaaggctcattgaatcaagaccggtagcagccttggtttcaattaattctaaacacggcttgagttgctgaggctcctgactatcagactctaccttgtcttttatggtgttaaaaacagttcacccatagggttttccagagctaaaagtagaggattctttgaagagtggatggcaaggaaccttgtcattcagttgtaaagtttaaattgsttcacatacgtcaggccttctcagagtagagataacacatcattttctaaccttcccgatataggctacagaaattgacagaagaaagaagagaccattggaaaatgatgggcctgttaaaaagaaagtaaagaaagtccaacaaaaggaaggaggaagtgatctgggaatgtctggcaactctggtgagttgtgggggattcttttttctcctcagtcatggccctggtattctggaattctccagagggcagaagagcctattagaattg

SEQ ID NO: 169174 - DNA, 425 bp, Homo sapiens
catatagacagttgagcagatttttctctagttttatggtatcagagaatttgtgataagggaagacaggaaatccatctttattcattatcctcaggaaattaggtaaagagaatgagaaaaaaaaaagtyccaattcagatagaggtatctgtccaatggagatatatgtaaaatattaatccttccataaaaggtaaaatttgaattttagggtcaacatgaaagcgttagtatgaaataactacaggaatggagatgtgtggctaaggagaaaagtaaatctaaaacttcacctttctggaggggtcatgcaaggaggcgtgacttgagagaatttgccacggttaatgttacaattctggggcagcctacctttcattgcttgattattctgcatagacccattttttaggtctacaagc

SEQ ID NO: 169175 - DNA, 418 bp, Homo sapiens
agacagttgagcagatttttctctagttttatggtatcagagaatttgtgataagggaagacaggaaatccatctttattcattatcctcaggaaattaggtaaagagaatgagaaaaaaaaaagtcccaattcagatagaggtatctgtccaatggagatatatgtaaaatattaatccttccataaaaggtaaaatttgaattttagggtcaacatgaaagygttagtatgaaataactacaggaatggagatgtgtggctaaggagaaaagtaaatctaaaacttcacctttctggaggggtcatgcaaggaggcgtgacttgagagaatttgccacggttaatgttacaattctggggcagcctacctttcattgcttgattattctgcatagacccattttttaggtctacaa

SEQ ID NO: 169176 - DNA, 553 bp, Homo sapiens
gttcattgctttattgggaatctacctctttaaaaaattctatgctggttatgaattgacataatgagaccaaaattactattgttctgttttcttcttatttgctrcctaagagccaaagaaatgtctgaggaccaggaatgtttcaaagtctctggaaaaattgaaagaattctgctgcgattctgcccttcctcaaagtagagtccagacagaatctctgcaggagagatttgcagttctgccaaaatgtactgattttgatgatatcagtcttctacacgcaaagaatgcagtttcttctgaagattcgaaacgtcaaattaatcaaaaggtatgtaactgctatagatgagtatccagttacctagaatagtgggttctgaagtactatcaggttctctgaggtcattcatggcaatggttcctaaacttggatcatcttctgaatcatctgagggagattttgtgttttagtttagtttttttacatccctggagattcgatttactatgttttgggagggattaattggtttgtatgggaacaaaa

SEQ ID NO: 169177 - DNA, 553 bp, Homo sapiens
gttcattgctttattgggaatctacctctttaaaaaattctatgctggttatgaattgacataatgagaccaaaattactattgttctgttttcttcttatttgctacctaagagccaaagaaatgtctgaggaccaggaatgtttcaaagtctctggaaaaattgaaagaattctgctgcgattctgcccttcctcaaagtagagtccagacagaatctctgcaggagagatttgcagttctgccaaaatgtactgattttgatgatatcagtcttctacacgcaaagaatgcagtttcttctgaagattcgaaacgtcaaattaatcaaaaggtatgtaactgctatagatgagtatccagttacctagaatagtgggttctgaagtactrtcaggttctctgaggtcattcatggcaatggttcctaaacttggatcatcttctgaatcatctgagggagattttgtgttttagtttagtttttttacatccctggagattcgatttactatgttttgggagggattaattggtttgtatgggaacaaaa

SEQ ID NO: 169178 - DNA, 553 bp, Homo sapiens
gttcattgctttattgggaatctacctctttaaaaaattctatgctggttatgaattgacataatgagaccaaaattactattgttctgttttcttcttatttgctacctaagagccaaagaaatgtctgaggaccaggaatgtttcaaagtctctggaaaaattgaaagaattctgctgcgattctgcccttcctcaaagtagagtccagacagaatctctgcaggagagatttgcagttctgccaaaatgtactgattttgatgatatcagtcttctacacgcaaagaatgcagtttcttctgaagattcgaaacgtcaaattaatcaaaaggtatgtaactgctatagatgagtatccagttacctagaatagtgggttctgaagtactatcaggttctctgaggtcattcatggcaatggttcctaaacttggatcatcttctgaatcatctgagggagmttttgtgttttagtttagtttttttacatccctggagattcgatttactatgttttgggagggattaattggtttgtatgggaacaaaa

SEQ ID NO: 169179 - DNA, 553 bp, Homo sapiens
gttcattgctttattgggaatctacctctttaaaaaattctatgctggttatgaattgacataatgagaccaaaattactattgttctgttttcttcttatttgctacctaagagccaaagaaatgtctgaggaccaggaatgtttcaaagtctctggaaaaattgaaagaattctgctgcgattctgcccttcctcaaagtagagtccagacagaatctctgcaggagagatttgcagttctgccaaaatgtactgattttgatgatatcagtcttctacacgcaaagaatgcagtttcttctgaagattcgaaacgtcaaattaatcaaaaggtatgtaactgctatagatgagtatccagttacctagaatagtgggttctgaagtactatcaggttctctgaggtcattcatggcaatggttcctaaacttggatcatcttctgaatcatctgagggagattttgtgttttagtttagtttttttacatccctggagattcgatttactrtgttttgggagggattaattggtttgtatgggaacaaaa

SEQ ID NO: 169180 - DNA, 518 bp, Homo sapiens
caaatctggcaataagttattatttttaagagaagggatctcactaaggtggccaggctggtctggaactcttgggctcaagtcgtcctgctgctgagcctcctgagtagctgggactacaggcatgggccattccacccagctaaccgattaatatttttactgttcctttttaaagctagctccatagctggaatattgcctgtgttggatcctatttgctggattcatgtcattctctggtttgtgtactccttcattttgctggagtattttctccaacagcttccctaaaaagggcacatggaggtaacccctgagtctttgcttgtctaaaaatgtattattttaccttcacccttgattatttgggtgaatatagatttatcagttgaaaataactttcyagaattatgaaggcatggttccattgttttcagattccttttcgagacaaggtctcttctgtcaccccggctggagtgcagtggcacaatcacgactcactgcagccttga

SEQ ID NO: 169181 - DNA, 618 bp, Homo sapiens
attcccttagacccacactcaagtcacccaaccaaagtccaaatattacacaattccccatggtgcatagtctctctctctctctgcagagagtgattaactcaatttattcaactgttggtatgctcttgatggtctttggttagaaggcattgacatgagtaacatgtcaagtaaatgcacatatctgatggcttgacaataaaatatatatcaagttataatctgtgatttacaaatagcacactgtagtctgcttaagaaaatgtaacaagagtgatgagataaggctagtgaaaatrataggtctaatatttcatgcctaagcatgtatattttatccaaggaaaaagggagcaataaaaaatgttaagaaacacaatagaagtttagaaagatcacactggaaacactaggacatataatgttagttactttccatttgtattatgttggtcacttcaggactagttaccatatatcaaacatggaggacattacttcagtttttatagtaagtagctgagcccagacagaaaactagtgccaagttcagtccatatgcctaaaattgagaccgagaggaagtagataaggcaatgtaagttgattgtatag

SEQ ID NO: 169182 - DNA, 618 bp, Homo sapiens
attcccttagacccacactcaagtcacccaaccaaagtccaaatattacacaattccccatggtgcatagtctctctctctctctgcagagagtgattaactcaatttattcaactgttggtatgctcttgatggtctttggttagaaggcattgacatgagtaacatgtcaagtaaatgcacatatctgatggcttgacaataaaatatatatcaagttataatctgtgatttacaaatagcacactgtagtctgcttaagaaaatgtaacaagagtgatgagataaggctagtgaaaatgataggtctaatatttcatgcctaagcatgtatattttatccaaggaaaargggagcaataaaaaatgttaagaaacacaatagaagtttagaaagatcacactggaaacactaggacatataatgttagttactttccatttgtattatgttggtcacttcaggactagttaccatatatcaaacatggaggacattacttcagtttttatagtaagtagctgagcccagacagaaaactagtgccaagttcagtccatatgcctaaaattgagaccgagaggaagtagataaggcaatgtaagttgattgtatag

SEQ ID NO: 169183 - DNA, 618 bp, Homo sapiens
attcccttagacccacactcaagtcacccaaccaaagtccaaatattacacaattccccatggtgcatagtctctctctctctctgcagagagtgattaactcaatttattcaactgttggtatgctcttgatggtctttggttagaaggcattgacatgagtaacatgtcaagtaaatgcacatatctgatggcttgacaataaaatatatatcaagttataatctgtgatttacaaatagcacactgtagtctgcttaagaaaatgtaacaagagtgatgagataaggctagtgaaaatgataggtctaatatttcatgcctaagcatgtatattttatccaaggaaaaagggagcaataaaaaatgttaagaaacacaatagaaktttagaaagatcacactggaaacactaggacatataatgttagttactttccatttgtattatgttggtcacttcaggactagttaccatatatcaaacatggaggacattacttcagtttttatagtaagtagctgagcccagacagaaaactagtgccaagttcagtccatatgcctaaaattgagaccgagaggaagtagataaggcaatgtaagttgattgtatag

SEQ ID NO: 169184 - DNA, 609 bp, Homo sapiens
aactgagtgctttgggtttttttcatctgtaactagggataagatcaactgacatttaagattttctaaggttagagggcaaaatgttaagatgttattactcttataagaccctcagaatcttatgctgggtgcacagcaatacaccaaaacaatgacacagcagagtttgtcacagaaagtataatggttgcagggcaactgagtgaagatatgggaggagaccctcaactctatctccctgaggagttctgagttgggacttttaaggggattgtggagggtaagggattggaaaattggagttattgattggtgggagtaagaaggatgaaatcatcagaatgtggaaactgcattctttggtgggtctacttcttgtggggtccttcagatcagttgacrtcagtagttttattagtatgtaggacctagagaaaatatcgcaaacatctttcacactgtctatgtttttatctatagagcaattaaggggaactgtaatctgtgagaagatttgcataattctggggcaataggcaccaaacaactatgagtaagcaggtcagagaataagctgaactaatgattattgctaatgatgctgca

SEQ ID NO: 169185 - DNA, 593 bp, Homo sapiens
cctccgagaagtctgggattatgttaaatgagcagacctaagaatgattggtatttctaaggaagaagaaaaatctaaaggtttggaaaatatatttgggggaataatcaaggaaaacttccccagtcttgcttgagacctaggcatccaaatgcaagaaactcaaagaacacctgagaaattcatcacaaaaatattattgcctaggcatattgtcatcaggttatctaaagttaagatgaagcaaagaatcttaagagctatgaggcaaaaacaccaggtaacctataaaggaaaacctataagattaatagcatatttctcactggaaaccctacaagctagaaggcactagggccctatcttcagcctcctcaaacaaaacaattgtcagccaagaattttgtatccagcaaaactaagcttcataaatgaaggaaagatactgtcttttagagacaaacaaatgcagagagaattcaccactacccaagccagcactatgagaactgctaawaggagctctaaatcttgaaacaaatcctggaaatgcatcaaaagaggacctctttaaagcataaagctcacaggaa

SEQ ID NO: 169186 - DNA, 510 bp, Homo sapiens
aatccaccatgatcaagtgggtttcatgccagtgatgcagggatggtttaacatatgcaagtcaataaaatgtgatacaccacataaacaaaattgaaaaaaacasatgatcatatcaatagatgcagaaaaagcattagacaaaatccaccatcactttatgcttaaaactctcagcaaaattggcatacaagggacatacttcaatgtaataaaatccatctatgacaaacccacagccaacataatatgaaatagggaaagttaaaagcattccctctgaaaactggaacaaggcaaggatgcccactctcaccactcctcttcaacaaagtactggaagtcctagccagaacaatcaaataagagaaagaaatgaagggcatccaaatttgtaaagaggaagtcaaactgtggctgtttgctgatgatatgattgtttacctagaaaaccctaaagactccttcagaaagctcctagaactggtaaaagaattaagcaaaatttct

SEQ ID NO: 169187 - DNA, 592 bp, Homo sapiens
agtctgatgctggagagtaaataagcccactaccactcttaccctaggcaagcaacaattaacatataagggaatgaagagagaaataaatcttcactgagaactgggagttgtcagtatccccaatttaacctagagcatcctgacttacacttggaggaattcaaactatgctgcctgtgaactagagaggagattgcttttgctgaaaatattgttaaccctctatccccaccactagtttcttgtccttatgttttcaatgacagaaatgagggcaagatttcaaatttttttattgtaatccaaggggaaatagtaaaatcagaacttgtttgctgactcaaaacccagggtacaactaatggaaattgcacctggtttttatcayagcaaaaaatttcccccactgcatcatatttatatgaatactgagcagaaataggtgcaaaaatgacataatttttcataaggcaagaacttctaaaatatatttaagaacatatttcttatatattgctttattccatttggaaatttaattcttccataaattaatcttttcttttgcttatgaagcattgatgtgaag

SEQ ID NO: 169188 - DNA, 420 bp, Homo sapiens
gccttaaataagagaagaagttgtgctcgcatgctgtggatgattctcaaaaaagcattgaacttgtcaaaatattttaatttttatctgtttgactgttccctggtattttagccatgaggaagttatctacccttgaaaattcctcacatggaaaattggaatagttatatcttattgtgagaaatcaatatggtaatatctatcacagtattttcaaatctgcaaaggaccycaagataaaaggaaacaaacatgcagaatatcctttgcagtaagtcagcagtccagctcctgccgtgagacatgcctgctgttttcaccttccgttatgagtaaaagcttcctgaggcctcaccagaagccaagctgatgctgttgccatgctggtacagactgcaaaactgtgagccaaataaa

SEQ ID NO: 169189 - DNA, 542 bp, Homo sapiens
ttgtgtcttatattaactttgtcagaaaatgagggattattaacatttcctatcagtagaatgagaaccagggtggctcatatgacttgcaaatattaacacatccagcagatactaaaaatgtgtcagaaccccaagactttagaacccctatcttgccctgcagatacaggtataggaatactgtggttctactttctcttgatataactctgaggatagagacagacaacatggagacagagacctagtttcttctttacttgctttatctgtgactttctatctcacttatcttgaggaccaagagtagtgatggggttcgagaaattcagtggarccaggagacacagaaataatctaacagcaaagtatcagaaggcaagtttaagaaacagatgggttgaatgaagtatatgtctgaacatgttgtgcagggaaggaataagcagatagaagttaaagcctgaaaaagaaatctcaaagggaatgggatatgtatgaagtcttccttcagtttgaggcaaagcagtacatacagc

SEQ ID NO: 169190 - DNA, 594 bp, Homo sapiens
gttagcttggttctagttgctgaatactccagaaaactgcatttgaaaagtaaattatatagttatgacttaattaattagaaagcatttattttttctctcctacctgtaatgcagtattttccaagttgtgtttcttttccatggagactaacatactgagagattttttataactttgtaatggaataaaagaaaaaaattccattatcaaataaaaattggaacacttttataatatattttaatagattcacaatgcactttacgattgcaggagctcttawaattttctcttataaagacaaattaattttctttaaccttacaagtgtatctcatctccctccactattctctgtgagcatatttatcagttatcatccctcacctggatgatgacagcagcaccagcattcatctcttcacttttattcatatctgcaattatatacaccaaagccaacatttacagacataaatcaggcctttttttttgcttaaaaattatttaatggttcaaccagtttttattatatttcagataaaatgatattttcaccaggtcttcaagaatctatgaccatggacctc

SEQ ID NO: 169191 - DNA, 594 bp, Homo sapiens
gttagcttggttctagttgctgaatactccagaaaactgcatttgaaaagtaaattatatagttatgacttaattaattagaaagcatttattttttctctcctacctgtaatgcagtattttccaagttgtgtttcttttccatggagactaacatactgagagattttttataactttgtaatggaataaaagaaaaaaattccattatcaaataaaaattggaacacttttataatatattttaatagattcacaatgcactttacgattgcaggagctcttataattttctcttataaagacaaattaattttctttaaccytacaagtgtatctcatctccctccactattctctgtgagcatatttatcagttatcatccctcacctggatgatgacagcagcaccagcattcatctcttcacttttattcatatctgcaattatatacaccaaagccaacatttacagacataaatcaggcctttttttttgcttaaaaattatttaatggttcaaccagtttttattatatttcagataaaatgatattttcaccaggtcttcaagaatctatgaccatggacctc

SEQ ID NO: 169192 - DNA, 419 bp, Homo sapiens
ccatgattgtcagggattggcagggtgctggggtcaggatcagaagctgaggagagggatgagtaggtcaagaataggggatttttaggagagcgagagtattctgtattctgatgtaattaatgctggatatatgacattatgcatttgttaaaacccatagamtatacaacatgatagtgagccttaatgtaggctgtagacattagttaatgtgtcaatattagttcaccaactgcaacaaatgtatcgaatcaatgcaatatattaataatagatgaaactaagaaagtgggagaaggaatatataggaactcttcattttctgtaaacttataactgctctaaaataaagtatcaattttaataaaaaggtatgtgtatatgtgtgtttacagttatatagtcatatatgcatg

SEQ ID NO: 169193 - DNA, 419 bp, Homo sapiens
ccatgattgtcagggattggcagggtgctggggtcaggatcagaagctgaggagagggatgagtaggtcaagaataggggatttttaggagagcgagagtattctgtattctgatgtaattaatgctggatatatgacattatgcatttgttaaaacccatagactatacaacatgatagtgagccttaatgtaggctgtagacattagttaatgtgtcaatattwgttcaccaactgcaacaaatgtatcgaatcaatgcaatatattaataatagatgaaactaagaaagtgggagaaggaatatataggaactcttcattttctgtaaacttataactgctctaaaataaagtatcaattttaataaaaaggtatgtgtatatgtgtgtttacagttatatagtcatatatgcatg

SEQ ID NO: 169194 - DNA, 591 bp, Homo sapiens
tcttcttcttagtttgtaccaaacttacttagtaaaagtagtataaaatcatctttyaagaggtggctggcaatatggctgaataggaacagctctggtctgcagctcccagtgagatcaacccagaaggcaggtaatttctgcatttccaactgaggtacccagctcatctcactgagactggttgtacaatgggtgcagcccaaggagggcgagccaaagcagggtagggtgtcacctcacctgggaagcacaagggttcggggaactccttcccctagccaagggaagcggtgagggactgagccatggggagcaatgcattccagcccagatactacacttttcccacggtcttcacaacctgcagaccaggagatttccttgggtgcctacaccaccagggccctaggtttcaggcccaaaactgggcagctgtttgggcaaacaccgagatagctgcaggagtttttttttcatatcccagtggcacctggaatgccagcgagacagaaccattcactccccgggaaagggggctgaagccaggaagccaagtggtctagctcagcagatcccacccctacagag

SEQ ID NO: 169195 - DNA, 598 bp, Homo sapiens
tgttttctcatcatatgtccagtaaatagagttgactgaaatatacaattatcaacaatatatccgacatatgtagcaagtaaggatggagacaatcacatggaaaattcatctgaagacttttcattggtgacttttacttataattcasatagaagttctgtcttgggaacgtaattttaaatactgcaacattcagggccaatatgaagataaggaaatgttttctttaaactgtctcatcagcttaggtaccttgtctatgttagttacccacttaggaattatttgcttaaaattttagcacccacatcatagttaaaatatctatttatttgatcccatatttcacaaataatccgcaggtgatttgtacatagctttaacttcttactaccttgacactttggtcatatctatgtgtgttttccattgttttgctgctgagtgatcatcaaaagtgaaagaatataattttcaatgtattgtttcttaaattgtaatgtagacatattcttcagaatctatgagattatatgtctaataaatgttacctaaaggttgttagacataggataaatttatgggaattatttta

SEQ ID NO: 169196 - DNA, 424 bp, Homo sapiens
ttaaacctaaactttatgtctatctgcagttaggctactctctgggacacatgtttttctttcttagtctacaytgtagcttttacacagacaggctctactgcagaaagaggtaaaggtctagtacagccctgatcaagaggataagtctatccaattatagagtgcggtatcaaagccctgttgccaaacacccaagctaatattttctaatattaaccacagcaacaatagttatttctctatctgcttttgttttttccttcatttggttcagaactttcaggggggctggtattaatttgggagggggggcatctgaaaatgatctaaatatgtaaccctagtatacatcataatactgttagttaagcattgcagtagctagcacttactcagcagattagcttaggtaaaaacacgt

SEQ ID NO: 169197 - DNA, 554 bp, Homo sapiens
gccgtatgtttcaatggacaatactaaactagagtattccttaaaatcattatttrtgaattgaaaaatatacaaatatttggctttctattagtaactaatgcctacatatatactgatgtattatctgtatgtttttgtcttttttgctatgttttgattaagagctaaaattatggtaaagaaagaaaaaggataaaccatcttgtgtatgtgtgtatttgtgtgtgacttgtgtattttctggtgtgtttatttctgttgatgtaatatatattaaaaggtttggggttttattaggatacattgctttatatttgaattactgaaactgaatgagtcagaaataaatacaatttatctcctgttgatgattactttatcatagactaacagatccaaagaaaaagattagaaatacctaagaaagaagaatacagtttatatttgaagtcactgcaaagctgtcaagtcaaccaggtttagtgggcaaaatctcagacagaaggccagttccacgaggtgagctaaagcatatgcaacaatgatttgtg

SEQ ID NO: 169198 - DNA, 598 bp, Homo sapiens
atttcaatgattctgtattatgcagaaactgcatcttggaagcatttatcatattggtagaaaataagcaaactctttcctctacacatatcagaaaggtgttgtaaattcttatttttataggtaaaaygctttttgttagggccaaaagttcaaattctcagattattataagtgggtgagtgagctagacttatctctgaaatgtatattatgtgaaattggtataattctatttgcctgacataaacatgttaaagttcattttgaatatcaaagaaaaatggattataaatatcttcttacattattatatagccaatgttcactcagtgtctattacgtgccatccactatgcaaagcattttttatatattatctcattcaatttttaaaccaaccttagaaagtgagtgccataattattttcctttttcagtggaagaaactgaagctcagagaggttaaatacatttcccaaagccataaacaaagtagagcctggagtcagtgccagaaaatttactaaaattccagcacctactataattgtcatatttctttaagtctttttattttcaagcaatagtaataacc

SEQ ID NO: 169199 - DNA, 422 bp, Homo sapiens
cctgggggaacaacaattgtggtgatttggtaagtgcatgctagatcagcttgtgagtttcattttgttcccttttgaatggtcctgtgtcacaggcaccaacatgagtgataaatagttttgtttttgttttgtcttgtttgtaagctgctgtcactgtccctgtccctacacaggggggcccttaatgtttaatcatttatttgcaagtcagtggaccatacagttagcctgtttgtaatagcccatgagtttgtaaatakgtagcagagttgctgttggagtggcctgcaaggccctcgttactactgggagttccatccatttcatatagtgtccttgtctggtttcaattcaaaggtggccatcctttggacagatggcagcagtgccctatgggactccatgagctttgaatttgc

SEQ ID NO: 169200 - DNA, 515 bp, Homo sapiens
ctagacttcctaaaacaaccaaggtgactattctaatgattctcctaccacaagcaaacaaatgtgaactgtactgtacaagcaaatctcatagcaacatgttcagtatttggcaggcattcaaaaagtgccataccttattgtaaataatgtgtgctggtaataatgtggcagacactgagtatttgtttgttcttcttcctgggaacactagtactttacatttcaattatatgtggtcaattggctaagcaaygacagatatcaaaagactttttcagatttaaactttaaaaatttgctctggctgaaatgtggagagtgaataaatggtagggaaaatctatatttgggaagagaatattataattttaggcacgctgatttgtattgcaagtttaagaaactggtgactatttttaggaggcaattagatactggagagtgagcctcaaatataggatttgaggctgggcatggtggctcaggcctgtaatcccagcactttgggaggc

SEQ ID NO: 169201 - DNA, 601 bp, Homo sapiens
ttacaagtactattttgcaaatggctttgatttagttttgcactctgtgttttactagtttctactcaatgaaaaataaatttgatatattggcaataaacataatattgtacaagctatgtattaaatttatcataattattactatacttaaatgtactggattgaaataatgaagaaaatagacaaaaaatgttcataaacatttgcatgtcaatttttactaactgcttttctcttcatatcccagatacacactattccactcacctcttactgctcaactcaggtgtcatttcctcctgcattcattcctataaactccttccggttttcaagaagcaaaataaatattttataaattatacgctttttaggtaatcaacttatgagctttatagagacattaatttttgcctgttcttttgtatttcaccagtgcctatcttgaggrttggaacatacgtagtggatattctattgtatttgctgagagattgatggaatcaatgataaatgagtaagtgagggtaaaatttggcattcaatattattttaaattatcctccatagctctataaactctagtggttttatccat

SEQ ID NO: 169202 - DNA, 457 bp, Homo sapiens
caaggagggaagttgtgaaatggacatcgtttttatttccaggtgcacagcgatatcaggtatctcagataacagaatttccaacttcagatatctcttacctattgaattctttttttcacatttttatcaagctttatttacacactgttgacaatatagttgtaatttggttgttagacatrttgttttttaaaagtgaggtgtgtactgtaatcatcatattctgacctttgttgacttgataaatatttgctatatgagtcacttttgtggttcattgactaaattaatctggatttacattacctgaaatttgttactttcaaaaatcacatctgttcaaagttgccagatgaatcatcttcatagaaataactgatcaactcatataaacagccacattttcaaatattcataagccacaacaaatctcattgttcatgtgaactgtcaa

SEQ ID NO: 169203 - DNA, 543 bp, Homo sapiens
ctgcttctccagagtgtcaagagaagaagggaggtagaggcaaggtatacgactatataccagatgagacctctccatgtggagtgcccaggagcacgaaacggtaggggttacactgagcacttggctgaaaagcgaagtgttctcctatctaccacaaaaaggagtttctatgcacaggcagtaataaatcaccacattttaacagcagttgaataatgagtttgtgcaagacaactttggtagcatgggaggaaacaattgcttcaaccaaaggaaaacacttagaaaagagaaatmaacttagaatgctacttagaatgcaatttagaatgctatccaaatgctaacatttgggtaacagttgtatcaatgcagaatgtccttccttcaaagaaaaggtggatgcatggtaatgctattggtcaggatctttagtagagtttagtcaaacttggaagtgaagcaaccatgaagaatgggtagggaatgaggcagcaaaagcaatgctatatatgtgtaataaattttagattcaaagtg

SEQ ID NO: 169204 - DNA, 588 bp, Homo sapiens
gtaggctccctatcacaggcttagaggcctagtaggaaaaaatgtttcctgggccaggtccaggcccaccctgctgtgtgcaatctcaggatttggtgctctgcatcccaaccatggccaaaaggggataatgtgtagctcaggccatggcttcagagggtgcaagcccaaagccttggaggcttacacatggtgttgagtctgcaaatgcacagaagtcaagtactgaggtttgggatgtcagaagatgtatggaaatgcctggatgtccaggcagaagtttgcttcagggggggaacccgcaagtagaacctcttctagggcaatgcagaagggaaatatggggttggagcccccacaaaatatccctactggggcactgcctagtggagctgtgagaagggggctaccatcctccagacaccaaaatggtagatccrctgacagcttgtactgtgcacctggaaaagctacagccactcaataccagccagtgaaagcagctgggaggggggctataccctacaaaaccacaggggtggagcttcccaaggccatgagagtccacctcttgcatcggcataacct

SEQ ID NO: 169205 - DNA, 606 bp, Homo sapiens
ttgttttaccttttttgcaagcaatgtattaaattattcattggctcaatttatattgataaatttataaattatatttcaaaataaaatttatgccatgctatgcccttgcaattcttttactgggtataaataccaaagccatgatcaatatgaccattaaggagcatatwcaagggtaggcagtgtatagttgtttatttgctagggagttgaggcaacctgtgtgtctgtccttgagtgagcttatagaaagtggtggatggatatcatagaatactatgcagaagatacagaaatgctgatggttttggaaaatgtagttgaaatgacaatgtaatctataaaatagcattatgtattcaaacttaaaataagcatgcacaataatacattttctacagaaatatgtaaatataaggatttgcacaaaatggtgaaaatggagataaaaggaaaaaatcaaacaagcatataaacaaattgataaataataaaaagccttaggctgatggaaataatgtgtatgtttgaggagtatgattaacttaagctttttcacctgaggcttaactaggaaaagaagaaagactagaattttagcct

SEQ ID NO: 169206 - DNA, 490 bp, Homo sapiens
tagaaataatccaaatttaaatttaagctctcttccattatcaaattcccaatgagacattatggtccatagatttaatttctttgcaatcaaagtctcagtatattaaaactcaaagagtttaagtcctaaatcaattatctcacctttcaaaattaaaagtcccgagaawttaaagtcttctttaattagtcttattctatttactgcttagacagaaggtatttatccctagtaaggaccttgtctgttcgcagttacagactgggctatcttttattggaatggtataatttgtcagttcctcaaaactttcattggcataataacatagatctcaagagcttacttataaatatgtaacaattacaaacacacagaatagtacacaagtcatgtgtgtgcaatttgaagtaattgggtaaagtgaacatccatatgcccaccctttttgttaaaaatcaggatacccatggcacccagtacctcc

SEQ ID NO: 169207 - DNA, 531 bp, Homo sapiens
cggttgttaaattctcaggaattttgtgagctgaattattcaaatcattatgcaagattaaggtataaaaactatacgggccgggcgtggtggctcatgtctgtaatcccagcagtttgggaggccgaastgggcagatcacttgaggtcaggagttcaagaccagcctggctaactctacttaaaatacaaaaattagccaggcatggtggcgggtgcctgtaatcccagctaattgggaggatgaggcaggagaatcccttaaacccaggaggtggaagttgcagtgaccagagatcgtgccactgcactgcagcctgggcaacagagtaagactccttctcaaagaaaaataaaaaagaaagaaaaagaaaaaaaaactatataaaattaaaatgataaaaaattaaagttgaattatacaagatacaactaaatggattctattaaaacaaaggttataaatacttaaacctcatcacttcctgattatttttactgcatcttaataatagctatgctttgaggttc

SEQ ID NO: 169208 - DNA, 572 bp, Homo sapiens
gagtggctgaaaacttaaaagttgattgcctcacagttctggaggctggaagcctcagattaagctgcgtgcagggtcggtttctcctgaggtctctctcctgggctcatagatggccaccttctccctgtgtcctcatgtggtcgtccctctgtgtgtgtctatgtcctcgttgcctcttcaagaataccagttatattggactagggcccacccatacgacctcactttactcatcgatttttaaaaagcctatctccaaataccatcacattctgaggcagttgggttagggtttcaatataggaatgtggagaagaggagatacagttcagcccttgaaccataacacataarcatatgtgttatttctgcttttgtttctttcactctacctgccatgtggtaggtatccatgtattcttgtgactcattgattagtttcaaaatcaagaatatttggtgtgaataaatgtgccatctacaaataagaaagacccaaaggtaagctggaacaccagtagagcagtcttaagcaaattcacgtatgaaaatccggatttcctccaaag

SEQ ID NO: 169209 - DNA, 572 bp, Homo sapiens
gagtggctgaaaacttaaaagttgattgcctcacagttctggaggctggaagcctcagattaagctgcgtgcagggtcggtttctcctgaggtctctctcctgggctcatagatggccaccttctccctgtgtcctcatgtggtcgtccctctgtgtgtgtctatgtcctcgttgcctcttcaagaataccagttatattggactagggcccacccatacgacctcactttactcatcgatttttaaaaagcctatctccaaataccatcacattctgaggcagttgggttagggtttcaatataggaatgtggagaagaggagatacagttcagcccttgaaccataacacataaacatatgtgttatttctgcttttgtttctttcactctacctgccatgtggtaggtatccatgtattcttgtgactcattgattagtttcaaaatcaagaatatttggtgtgaataaatgtgccatctacaaataagaaagacccaaaggtaagctggaacaccagtagagcastcttaagcaaattcacgtatgaaaatccggatttcctccaaag

SEQ ID NO: 169210 - DNA, 622 bp, Homo sapiens
tgtgtgtctatgtgtgcacgtgtatatgcatgtgtgagagagcatgcatgtgcaccgtgtgcatgtgtgtctagtcgggggagtcagcaagaggaggggaagtgggaaaggggagttgtttgtttmtttgaaaccagctaggccctctaatgcagactttcaccagagcagggcagtcaatgtttgctttgggagatgctcaaagcctgaaacacagcttcagtcaaacaaggggtgtggtggaggcatcaactaaaaatagagaaactagaaaccccttatttgcacttggctagcatgacatggttgaaaagcacttgacggataacgagtttttctttttttctaatacatgttagccttgataaattggttacagttatcctcattttaccactgaagaaggcgaggcgaggtggcttggtaaggtcatgctgaaggtggcagagctggcagctggagggtgttactgtctccagggctgcttgagccctctgcacaaaacaggtgcacctgtggccctgcctgaggctctgtgtcccttggaggggacagttcagattccctatcatctcccctgtggcaaaatagttttgctattttgtatctggaagccttgcca

SEQ ID NO: 169211 - DNA, 521 bp, Homo sapiens
ggagcatctcaccaacatccagaattccaaattctcccagtacaaaccaccaatgctatactcatcttgtaaatgaagaaagtacrgtgattggcctatggctctgaattaaagaaggggccaaagaatttgagttaaaattcatgtttcatgtctcaactcaggacaacaccactgaaatgaggcttcctcacctttgccctaatactgacctctccacatgtgaacctgaaacagccccgataacagttcctagcaacgaggttcttctattcattcagccacagacattcagttgctgtcaaccatgaactatgtcaggcatagcggaaggtacaggcatgaaacaaggatggagcccactctcacaggaaaataaggaggaaaggcatgcacccgattccatcagttcagagtgggcatgattctgtaccaaagagaggcctgggtaaagtgttttgtgagctcagcaaaaagaaattacttccacctgggagaaaacgctagccagacctgagaag

SEQ ID NO: 169212 - DNA, 270 bp, Homo sapiens
ggttggaggtagcataaggggtatgaacagaaagggctaaaggaaacttattggggtggtgaaaatgttgtccattttgattgtggtggastttatacaagagtatatatttgcaaaaatgcataattgtgccccaaatgggtgaattttgtggaatgttatttacacccccttagaggtgacttttaaaaagagcattgcaagccattgaagggtattgagttttgtatagtctttggtgtgttgagttttgtaagctggtagaaaaag

SEQ ID NO: 169213 - DNA, 595 bp, Homo sapiens
ctgcgttgctgcgtctattgacatgaacacctgtcaaacctgcaactcatagctcagyattgtctcagtccaatccaaggaaatgaactccttgagaaagctgacattctggaccatggggtagaagctaccctgtctgcctcccacacccactctcaaggatccaagactatgaagggagaagagagagcccaccgagtgacttcctcttataagccaatatcaagacactagtggaaaggaaccagctgaccagtggctcactgtgtctggctggaccagcaagactctgacgtcatcacagaagccttcttggtcccattggtcctttgactgctgtgtacaggatgccacccaccactccagacaccactcaccactctagatgttgggatccttctcccgttacctccattattcttgttctctactcctctgagttttcatagccaagcaaatttccaccattgaagaggctctgagatccaagtcaactaactactggctagggtactgtaaaacacatgggaaattagcttttaccaaacaccaattctatgcccaccattcatacccattctaccatttaatgctg

SEQ ID NO: 169214 - DNA, 595 bp, Homo sapiens
ctgcgttgctgcgtctattgacatgaacacctgtcaaacctgcaactcatagctcagtattgtctcagtccaatccaaggaaatgaactccttgagaaagctgacattctggaccatggggtagaagctaccctgtctgcctcccacacccactctcaaggatccaagactatgaagggagaagagagagcccaccgagtgacttcctcttataagccaatatcaagacactagtggaaaggaaccagctgaccagtggctcactgtgtctggctggaccagcaagactctgacgtcatcacagaagccttcttggtcccattggtcctttgactgctgtgtacaggatgccacccaccactccagacaccactcaccrctctagatgttgggatccttctcccgttacctccattattcttgttctctactcctctgagttttcatagccaagcaaatttccaccattgaagaggctctgagatccaagtcaactaactactggctagggtactgtaaaacacatgggaaattagcttttaccaaacaccaattctatgcccaccattcatacccattctaccatttaatgctg

SEQ ID NO: 169215 - DNA, 530 bp, Homo sapiens
tcaaagggtcccagtgggatcaagctccagttgtcaattcaatagattcttcaaatggccatctctccttctctcctcttccctggagttttcagaataaaccaattgcgtataagcccttgtcataagctctgctttcggtgggaacacaggctaggacatccatgttgactctggtagatgtaagggtgactaaagattatgatgaagtaggtaatgacttaataaaaaaggtgctgttgaattatacttaaacaacagcaataataaatgggttctgattaatcattcagcaattaatgatcacaggagaataattaacaagcagtatatatgttggctcactattttcaatgcataaaaaaagaggcactaccaaaaaaaattgcaaaaaacttttgataagaaaagtaaaaatgttttrgcattgaatgatcacaaacttgggacttgtagtgctaggaaaaaatgatcaactctaacataaactagaaagaaaaaggcacaaaagagcttttataagaagctgc

SEQ ID NO: 169216 - DNA, 506 bp, Homo sapiens
gggaaaatatacaaacagcataaccacaagctcactaatgggcattctctgcttaaaagtgggaattgagggaactttacatgcttgatttattttttcaaaaacatttatttttcaaaagtaaagcagggaaactggaatatttattacaattcttgtttttgtttttgttttcttgccttgagatatgaggctgtaccgttcacagcaaagtgtaattaaagctatgtgctttgtaatctgttctggtgtagttttgtatattcatcttgctcaggtagrctttctcaattatttgtggttgcgagggttactgatagtacatttattaagtattgtattcgtttcctcttgctgctatgaaagattaccacaaattcagtggcttaaaacaactcgtttgttatcttacagttctaaaggtaagaaatccacagtgcatctcactgggctaaaatcaaggtgttagcagaattgcattccttctggaggttctaagagagaat

SEQ ID NO: 169217 - DNA, 506 bp, Homo sapiens
gggaaaatatacaaacagcataaccacaagctcactaatgggcattctctgcttaaaagtgggaattgagggaactttacatgcttgatttattttttcaaaaacatttatttttcaaaagtaaagcagggaaactggaatatttattacaattcttgtttttgtttttgttttcttgccttgagatatgaggctgtaccgttcacagcaaagtgtaattaaagctatgtgctttgtaatctgttctggtgtagttttgtatattcatcttgctcaggtaggctttctcaattatttgtggttgygagggttactgatagtacatttattaagtattgtattcgtttcctcttgctgctatgaaagattaccacaaattcagtggcttaaaacaactcgtttgttatcttacagttctaaaggtaagaaatccacagtgcatctcactgggctaaaatcaaggtgttagcagaattgcattccttctggaggttctaagagagaat

SEQ ID NO: 169218 - DNA, 416 bp, Homo sapiens
aatcttttgacctcgtgaaccgcccacctcggcctyccaaagtgctgcgattacaggcgcgagccaccgcacccggcctgggaagagatttctttggggaagtatgattatttttctaatagtttcctcatggaaatgatcctgagttgttgagtttgcaagagtcaactgcatgcaaagacgtgggataatgggcattgcaaggatcccctgccctcaaacttcttccttgctcccagcctaggttttgattcccctaattaaatattgctgctttggagttacccagaaagtttgtggctaaaacaaattatgtctggtcctgataaaaccttcatgcctcagcttctattcatattctagcttagctatcttccagctttgtttttttaaattaactgtaactagcagagagc

SEQ ID NO: 169219 - DNA, 406 bp, Homo sapiens
acttatttactattatgagaacagcatgggaaaatcctgcccccatgattcaattacctcccaccaggtccctcccatgacacgtgggggttatgggagctacaattcaagatgagatttagatgggaatgcagccaaaccatatcrccctctaatacatataatctaatagagacctggaaaaatatttagctggtcatacacactgacacacacatttctattttagtctgatagaagccaatactcaagttaggaactctgggttttaatttgtaaacctgtgtgatcttgggttttggaagcacttagaccttctgctgctacatcacttgatcctgggaccagaggcagtagaaataggctgtggacacaagccacaaagagctccatgaagagagtaaaa

SEQ ID NO: 169220 - DNA, 521 bp, Homo sapiens
tgaatggtctaaatctatgcaaactgccaaactcatgtaaaaatcatttatcaggttttatgagatttatgaagtatctcmtaaatcatttgggctgtagatagttctttatgtgcatctcacattgtgtgtgtatgagagagagtttgagtgattatctgtcaatggagagaagtaagctaatgacagatgagcaagtaaccacttagatgacctctccacaatcatttccacctcctgctttttatgcccttgagtgtgggccagactgaatggctagctactaatgaattaaatacagcacacctggtggaaattgccatggttaggttacaaaaagactgcagcttctgtctcgggcattctcttgttctctccaggagtgctctctctgtccctttggatggttcactgtggaggaagccaattgccatttcctgaagcctccctgtggacaggtcaatgtgaggaagtttggaagaagacctactctcaatgtaactttgagatgactatgggtc

SEQ ID NO: 169221 - DNA, 521 bp, Homo sapiens
tgaatggtctaaatctatgcaaactgccaaactcatgtaaaaatcatttatcaggttttatgagatttatgaagtatctcataaatcatttgggctgtagatagttctttatgtgcatctcacattgtgtgtgtatgagagagagtttgagtgattatctgtcaatggagagaagtaagctaatgacagatgagcaagtaaccacttagatgacctctccacaatcatttccacctyctgctttttatgcccttgagtgtgggccagactgaatggctagctactaatgaattaaatacagcacacctggtggaaattgccatggttaggttacaaaaagactgcagcttctgtctcgggcattctcttgttctctccaggagtgctctctctgtccctttggatggttcactgtggaggaagccaattgccatttcctgaagcctccctgtggacaggtcaatgtgaggaagtttggaagaagacctactctcaatgtaactttgagatgactatgggtc

SEQ ID NO: 169222 - DNA, 404 bp, Homo sapiens
acatctacaagatgcctggtcagattaggcattcatcttaggactttagaatggaaattctctggcaagctattgaaatggtgtaaatctcatacacataccaatgtctttatttgcagttagtcttgtcaattttggttctttagtccacatcaacaggtattaaataaagaccacaaaagtgtgaaggaaaatcacagcaaaataaaattctattataaggagtcttaattattttgcttcattttacattttgaggatgctgatattgaaggctaatctgtctttacccttaytgtgatcctttgattattttttgacccatttgttattatctcattatttagaaactcattttacataatacccatggagtattagttaccccacactcttcagaattc

SEQ ID NO: 169223 - DNA, 411 bp, Homo sapiens
acgctcaaggtagcaaaaataatcagcaaaatggaccactttgcattcaataaatattgattcattcccttctgtctgaagttgtatatattatttttacccaaaactccccagctcagatctatttttctttcactctaacccaaattaataaaggaaaaaataataaaaattttcctaaagaactgtgtttatagctatggcaggtgattttctttttcttgactcaaggtatctgtctttaaaaatcaaatctraatgtgtgggtctaagtttggattgtgcaagtattttttattggtccagtaagactctgggaagtctaactttagataggtagatacatttttaaaaatttcttctgttacgtgtagtttcaatattaagagaatttaaaacttacgaattcta

SEQ ID NO: 169224 - DNA, 411 bp, Homo sapiens
acgctcaaggtagcaaaaataatcagcaaaatggaccactttgcattcaataaatattgattcattcccttctgtctgaagttgtatatattatttttacccaaaactccccagctcagatctatttttctttcactctaacccaaattaataaaggaaaaaataataaaaattttcctaaagaactgtgtttatagctatggcaggtgattttctttttcttgactcaaggtatctgtctttaaaaatcaaatctgaatgtgtgggtctaagtttggattgtgcaagtattttttattggtccagtaagactctgggaagtctaactttagataggtagatacatttttaaaaatttcttctgttaygtgtagtttcaatattaagagaatttaaaacttacgaattcta

SEQ ID NO: 169225 - DNA, 480 bp, Homo sapiens
aggcctcctggcactgttctctttaatccttgatgtggattaagaggagttttgacccccgaagtttctcacctacattgggcyttcatcttttatctattaaagtataaggttattcatgtataagactggctgcaaattccttcacaaataaaatatgccctataagttcaaataatagacaccctttttatagaggcataaacaaagaaaaaatattcaaagataagagtctgatgataatagaagtcttgatctgtgatctcgggaaaagttgttgacatcaaggatgccatctttttctggggagaaacattcctggttagttttaccttaaggtttccaatgggtgcacagttccaggagtgtggtgggacccttctcagttgtgagattatgaacccaaagttcaagtctccaaagatttgctgtagtgtggatggcaaggacagtctttctccgatgttttcagaaaatcca

SEQ ID NO: 169226 - DNA, 575 bp, Homo sapiens
aaatgttcaaaaaataactgagttaatgattgaggcattgcaggaagtctggggtgaggcatttggcaggaactgccacacaggactattttcttcactatgacaatgctctagctgagagtgaatgtttttaatataaayggttttactcagcttaacaacctactggattcactattacagtcatgagtcatttaagcacagggacatattctgagaaatgtgttgttaggctattttgtcatgtgaacatcgcagagtgtacctacataaacctagattgtgtagcctactatgctcctagggtattgctcataggctgcaaatctgtacagcatgcgattgaactgaattttgtaggtagttgtaacaaaatggtatttgtgtgtatctacacatagctcaatatagaaaaagtacagtaaatataggttataaaatattaaaaatgatatacctgaatagagcacttaccatgaatggaggttacagaactagtattggcttgggtgaatttgtgagtgagtaatgaatgaaggcttaggacaatactgtacactacagtagtgtcagta

SEQ ID NO: 169227 - DNA, 577 bp, Homo sapiens
ttctttaagaaaagagaaaatgggccgggcacagtggctcatgcctataatcccagcacttcgggaggccgaggcgggttgatcacttgaggtcaagagttcgagaccagcttagccaacatggcgaaaccccgtctctaccaaaaatacaaaaattagccaggcatggtggcaggcatctgtaatctcagctacttgggaggctgaggcaggagaagtggttgaacctgggaggcagaggttgcagtgagcmaagagaaaatggatttaactttgagaagtggtagatgtcaaggttctctaaggagaaaagcgataaaattgctctgtgacctaaaaaaagaagccatatatacagaagaacagtaggatatttaacaaattggtgctttaattaataaaaccaatgcatatttacattttatcaggtatgagtgtatttgattctattcctcttttaccaatttatgaaacctaattgagttgttccagtgttagagagtaaagactgagtgaactacaactagaatttatttgcatacaaaaacatttttatggtcaaaaggatcagaaagag

SEQ ID NO: 169228 - DNA, 498 bp, Homo sapiens
ttattccaagtttttgtttgactcattggctacctcacttcaacacattgactctaagcagacacaacggggcagtgaaactaagagttcaatcctgaaaccactgtctttgagaaccatcattacatatgcactggactttcataggctgcctgatgccagtttaggtgctgtgatgttrtataatttaaattgggaattattacttcttttgggaagtttacactcagaacagactgagatgtctgttctaagatggtatttagtcacacaaatcaaatacaagtagagaataataaaatgtacagctggaaggaatttaaaccactactctaatttcaaagatcagaaattagagacccagaaagattaaataattttctgaaggacagttgatgtaagatttaagtctagagtgtggaatttttttgtactggtgattagaaggtgaaaacagcattcacagctatcagaatttattgaaggctggggagttcc

SEQ ID NO: 169229 - DNA, 626 bp, Homo sapiens
tacatatttaatctgatgaagtaggacaattttaaatgggaaaaaatatgaactctattcaaatcacgttgctgctcatgaggcacccctgaggatagctatacttacaagagattgataagaattccattagtacatattaatatttcagtctatttagaaaaaatacatattcacttaaaaatggttctttgcttttgttaggtatagcagtaaaatataaaacttccaatgagatttaatatgtggataaataatctatttaatatgatatgtgtattttagcacctaatgagggagggaccacatagtttgaattgcataatctatgcagtasagtggcttttgattcaattgctcagttgaatcaattaaataacatgcttaattgattgcttttctctcgaataaaaataaccttattggactgaatatgccaaaattccagtcagatattttgaagttacttgtagtcagaaatcaggatattcaatattctttgtcaaaaaaatctcataggtttttacaagcatccataaagtctctcggattagaattttttaggtttaaccacagacctaaccatttctgaagacaaaattgatcaaatattgcaattttatatg

SEQ ID NO: 169230 - DNA, 564 bp, Homo sapiens
tataacaatgactgagtaaagagcaaaacagaaaattgtcatctacttaagaagacaggattcgaaaaccttgcactgaactctaacatttgtgtgggcgtaatcaaggaataggaaaagcaaagcaaagcaaagcaaaaatagtgtctttggagatcaagtttcctaaaggaactaacattcatttataagacatcaacgagaaaaccattcttcttttctgatatttagagattcttccattgtttctggctaaatctttttttacttttctgttttcttctatcaaaactatgataaagcagcacagcaagaagaaatcattatgacatacacacatttcaaactattatacagattacagttggtcttggtaataaagatagtctccgtytttttttttttgttttagtttaacctaaagaacaggatcccttctttgttatctactatattaatgtagtaaagtcagagaataacaaaataaaccaacagattaggacagtaagatggaattggcagaagacttccacatgctgatctgacaaaaatgagcctaacagt

SEQ ID NO: 169231 - DNA, 550 bp, Homo sapiens
acaggcacatgcaactatgcctggctaatttttttttttttttgagatggagttttgctctgtcgcccaagctggagtgcagtggcgcgatctcagctcactgcaagctctgcctcccgggtcacaccattctcctgcctcagcctcccgagtagctggggctacaggcgcccaccaccacgcccagctaattattttttgtatttttagtagagacggggtttcaccatgttagccaggatggtctcgatctcctgacctcgtgatccgcccgcctcggcctcccaaagtgctgggatttataggcgtgagccaccgcgcctggccgtgcctggctaatttytaattttttttttgtagagacaggtcttactatgttgcccaggttggtcacaaatccctggcctcaggtgatcctcccaccttgcaccaggattacaggcatgaaccatacctggtcttgactggctctttgactttgctggtcattgagagaactgtgacctcctggcttctattgttgccacctggcctttattgcttggcattg

SEQ ID NO: 169232 - DNA, 550 bp, Homo sapiens
acaggcacatgcaactatgcctggctaatttttttttttttttgagatggagttttgctctgtcgcccaagctggagtgcagtggcgcgatctcagctcactgcaagctctgcctcccgggtcacaccattctcctgcctcagcctcccgagtagctggggctacaggcgcccaccaccacgcccagctaattattttttgtatttttagtagagacggggtttcaccatgttagccaggatggtctcgatctcctgacctcgtgatccgcccgcctcggcctcccaaagtgctgggatttataggcgtgagccaccgcgcctggccgtgcctggctaatttttaattttttttttgtagagacaggtcttactatgttgcccaggttggtcacaaatccctggcctcaggtgatcctcccaccttgcaccaggattacaggcatgaaccrtacctggtcttgactggctctttgactttgctggtcattgagagaactgtgacctcctggcttctattgttgccacctggcctttattgcttggcattg

SEQ ID NO: 169233 - DNA, 574 bp, Homo sapiens
ggaacttggacagatgtttggttttccccttcatcctacccagcttgcatcacacaccagtttcattcttagttcagttcttctgtggggtctgtctctagttcccctgtgctagggccctgaatcaaataatgaaactagtctcatccactcaaggttggatttttttttttttttttttgagacggagtttcgctcttgttgcccaggctggagtgcratggcacaatcttggcttgctgcaacctctgcctcccaggttcaagtgattctcctgcctcagcctcccgcatagctgggattacaggcgcccaccaccatgcctggctaattttttgtattttcggtagagactgggtttcatcatgtcggtcaggctggtctcaaacttctgacctcaggtgatccacccgccttggcctcccaaagtgctgggattacaggcgtgagccactgcgcccgacaagggtggatctttgagtcaaggttgggaagggtgtggaagatgaagggaagaaacacctcatgtaagaaaatccaggcagctcgatctcaatgagagactgctaggaat

SEQ ID NO: 169234 - DNA, 574 bp, Homo sapiens
ggaacttggacagatgtttggttttccccttcatcctacccagcttgcatcacacaccagtttcattcttagttcagttcttctgtggggtctgtctctagttcccctgtgctagggccctgaatcaaataatgaaactagtctcatccactcaaggttggatttttttttttttttttttgagacggagtttcgctcttgttgcccaggctggagtgcaatggcacaatcttggcttgctgcaacctctgcctcccaggttcaagtgattctcctgcctcagcctcccgcatagctgggattacaggcgcccaccaccatgcctggctaattttttgtattttcggtagagactgggtttcatcatgtcggtcaggctggtctcaaacttctgacctcaggtgatccacccgcctyggcctcccaaagtgctgggattacaggcgtgagccactgcgcccgacaagggtggatctttgagtcaaggttgggaagggtgtggaagatgaagggaagaaacacctcatgtaagaaaatccaggcagctcgatctcaatgagagactgctaggaat

SEQ ID NO: 169235 - DNA, 574 bp, Homo sapiens
ggaacttggacagatgtttggttttccccttcatcctacccagcttgcatcacacaccagtttcattcttagttcagttcttctgtggggtctgtctctagttcccctgtgctagggccctgaatcaaataatgaaactagtctcatccactcaaggttggatttttttttttttttttttgagacggagtttcgctcttgttgcccaggctggagtgcaatggcacaatcttggcttgctgcaacctctgcctcccaggttcaagtgattctcctgcctcagcctcccgcatagctgggattacaggcgcccaccaccatgcctggctaattttttgtattttcggtagagactgggtttcatcatgtcggtcaggctggtctcaaacttctgacctcaggtgatccacccgccttggcctcccaaagtgctgggattacaggcgtgagccactgcgcccgacaagggtggatctttgagtcaaggttgggaagggtgtggaagatgaagggaagaaacacytcatgtaagaaaatccaggcagctcgatctcaatgagagactgctaggaat

SEQ ID NO: 169236 - DNA, 435 bp, Homo sapiens
gttgcttttgaacatcttataacatacctgataggcctccccctccctcacaaagtgccaaggttgagaaactctgatttagagaatccatgtgtacttatgagacttgccccataggattataataaagcctaaatataaacatttagcttataaaacgctaactatactccttgtcacaaactatgtgctcaatatgcrctagttattactattatcagaattactattgttatccatatagtcaatgctttttggcttcagtgaaagctggaacagatgcaatcctatgtcatctgccccactgtaaatacatcaagaataacttttaagacactgaaaaaaaaagattttttaaaagactatggcaaaaagctttttgaatgtctatacagacaccaggtttgtataaacaacacatgtggatgtacacaa

SEQ ID NO: 169237 - DNA, 485 bp, Homo sapiens
gaagtttcagactttagggattttgatggtataccttctactacttgtaataattttgttaagtataaagagtcagtaaataaaagggaattttatataagatataaaaagtttggttaccctaacaagagactaccttttcctagaactctcccttttagagagccactgtgctcactaatatttgcccttttttaaggccctgttttttactttcctttaaaaattctgttacctcttggtttctataagtctgtctttcacacaaggagagtagggcttggcttctcagagcagkgcttggcttctcagagcagtgcttggcaagcacagaggcaggaaacgcagaagggaatgagtctgtcagactcattttcttctagttcaaatgtttatttcagattcgagaggaagtggagtggttcctttccatttcctcgtctctggaatctgcgagttgtataagtaagtttagagaatgacgc

SEQ ID NO: 169238 - DNA, 462 bp, Homo sapiens
gtggtttctcttttgagatagtcccaacagaagcatatgggcttccccagcaggaaagtaaaggtattcaaggtatccccagtccttgttaacattcacaaaaaggataacacatagcatttagccacaaggagacagcaagaagggttaggaaacagaggcatcaattaaagtagtgacaatacattgatctgagccaaactggggctgaacatactaaaaggagaatgtcccattggaaattccaraaacctgggactgtgtgaaggtagagaatcacagggaattggggcatggcactcaaggggcataatcatagaatctcaactcaatgagtgaggcttagatgtaatctagttcagaaaattagaaaggtgatattattatatcacaattttaccactcatatttgaacctccacctccgggttcaagctaggaatctccaatggaagtaattaac

SEQ ID NO: 169239 - DNA, 462 bp, Homo sapiens
gtggtttctcttttgagatagtcccaacagaagcatatgggcttccccagcaggaaagtaaaggtattcaaggtatccccagtccttgttaacattcacaaaaaggataacacatagcatttagccacaaggagacagcaagaagggttaggaaacagaggcatcaattaaagtagtgacaatacattgatctgagccaaactggggctgaacatactaaaaggagaatgtcccattggaaattccagaaacctgggactgtgtgaaggtagagaatcacagggaattggggcatggcactcaaggggcataatcatagaatctcaactcaatgagtgaggcttaratgtaatctagttcagaaaattagaaaggtgatattattatatcacaattttaccactcatatttgaacctccacctccgggttcaagctaggaatctccaatggaagtaattaac

SEQ ID NO: 169240 - DNA, 601 bp, Homo sapiens
ttgccatggagaagcttgatcatgatactgtatctaagtcttttatgtattatttctggatgaataattttacttttctctatttttcttacaactactaatttccactcttttagtcatcttttgacccacctttgaagttttcctatatgcttcctgtgacttatcggaggatcctaaaagagcatacattgctaaaaacctgagaaatctctaaatttcattttaggattttttttctattgttgtgtctgagacagcacaacttattgtcttgtggaagtctgttagtttttgctcgtggtaagttatctactgatatttcattcatctgatgagaaagtagaatttgttgaagtggaaggcttccttttttgtaaatttaaaaaattcctgttgatgagcttcttagcatttgtaatacagaagtttcccccttatctgcattctcactttccacaatttcacttccscgtggtcaaccatggtctaaaaatattaaatgcaaaattccagaaataagcaattcataagtttaaagtgctcactattctgagtagcatgatgaagtcttgctccgtctcgtctgggatgtgaattc

SEQ ID NO: 169241 - DNA, 638 bp, Homo sapiens
aaccagtttttagatatttttcctaagattctatctgtccattgctttccccttcatcccaataagatgagacctttagaatgtttttgttttgtatctagttacgtagctgctagattttgctaagatagtttaatattttgaattttagattatttggttttcccttgaagtgtatctgttctgtttaaagtgtctttgtatttgacactcccccatctcccacttggagtcatttctctgcttactaccgtccttttctcatggttccatcttcaagtctctgtcttgattactttcttaagtgttttgcccaaacagggtagataggtgatatattctgatatattctctgaatctttgcataactgttagtgcagtttttattttactccaacagatgattgatattcatttgcatgtaacatatcaccgtgcctctttatcttccgcctgagccatattctccaggctagcttttatcagtagtaagatgatattttaatctctgtctatctactgcatggtctcttattctgaatttggactgaagagaaaaaggaacatggtkgcctttattatgcagcaataaataataaatagaaaaatttgcaatgtttataattgctcaaattgaa

SEQ ID NO: 169242 - DNA, 414 bp, Homo sapiens
ttcattcaaatgcccaagccccacaataaaagagcacttacagaaaggatgctaagaacatcactgaggaaaaattcaaacacaaatagcgtctatggctcactaaaaatattgtgcgatttcatgtctgtgtctttgcacttgtggtccctttgtcccaaacacccwtccctatccctctggcacttgtggctggagaacactagctcattcttcactctctgcttacctgtcccttcctctgcaaagtcatctgtgaccatcacggccctccttgttaatcactccctctgctgtgctatgtctgtacctggtacttacctcttagaggtaatatttgagtcttatttatatttccggtgctgagaagatcaatgtattttaattgactcgaatcaactcaaggtgagtgag

SEQ ID NO: 169243 - DNA, 440 bp, Homo sapiens
ccagccagtttctcaacaaaggtaatgatccaagaagtggagtgtgtttgctaaattggtcaatttctgagtycagaacaaggatcatcccgccacagccccacagctacaggacgctagtatatgtgcccctaaactctggctgaactccaggttgacaaaactagccaagagaatgttcttcttttaaagaaatattatttaagaagtttttcacaattaagggagacaaccaattaattgtaggcttatgcttaaaatgaaggttttaaaattaacataattaaagtaaagcctagccacagggaaaaaaatgtgtttgcatctatagcaaaataagaaaaatgccccccgcaaaatgctaggaaatatgtgaaaccgaattgattacatcatattgatgcaccttagcaggtttcattttgagactttcagaattc

SEQ ID NO: 169244 - DNA, 440 bp, Homo sapiens
ccagccagtttctcaacaaaggtaatgatccaagaagtggagtgtgtttgctaaattggtcaatttctgagtccagaacaaggatcatcccgccacagccccacagctacaggacgctagtatatgtgcccctaaactctggctgaactccaggttgacaaaactagccaagagaatgttcttcttttaaagaaatattatttaagaagtttttcacaattaagggagacaaccaattaattgtagkcttatgcttaaaatgaaggttttaaaattaacataattaaagtaaagcctagccacagggaaaaaaatgtgtttgcatctatagcaaaataagaaaaatgccccccgcaaaatgctaggaaatatgtgaaaccgaattgattacatcatattgatgcaccttagcaggtttcattttgagactttcagaattc

SEQ ID NO: 169245 - DNA, 435 bp, Homo sapiens
gaattcctgactcttgttccagccagtttctcaacaaaggtaatgatccaagaagtggagtgtgtttgctaaattggtcaatttctgagtccagaacaaggatcatcccgccacagccccacagctacaggacgctagtatatgtgcccctaaactctggctgaactccaggttgacaaaactagccaagagaatgttcttcttttaaagaaatattatttaagaagtttttcacaattaagggagacaaccaattaattgtaggcttatgcttaaaatgaaggttttaaaattaacataattaaagtaaagcctagccacagggaaaaaaatgtgtttgcatctatagcaaaataagaaaaatgccccccscaaaatgctaggaaatatgtgaaaccgaattgattacatcatattgatgcaccttagcaggtt

SEQ ID NO: 169246 - DNA, 435 bp, Homo sapiens
gaattcctgactcttgttccagccagtttctcaacaaaggtaatgatccaagaagtggagtgtgtttgctaaattggtcaatttctgagtccagaacaaggatcatcccgccacagccccacagctacaggacgctagtatatgtgcccctaaactctggctgaactccaggttgacaaaactagccaagagaatgttcttcttttaaagaaatattatttaagaagtttttcacaattaagggagacaaccaattaattgtaggcttatgcttaaaatgaaggttttaaaattaacataattaaagtaaagcctagccacagggaaaaaaatgtgtttgcatctatagcaaaataagaaaaatgccccccgmaaaatgctaggaaatatgtgaaaccgaattgattacatcatattgatgcaccttagcaggtt

SEQ ID NO: 169247 - DNA, 417 bp, Homo sapiens
gatattaatcacatattaatgttaattatgtacacatgattaatattattcaatatatattatatattaatataataatatgacatatatgattccaagcaagtaataggtctgatttaaggagtaagtgcactttctaaaatttattcttttgagacagtctcactctgtcacccaggctggagtgcagtggcgcaatctcagctcactgcaacctccacctcccragttcaagcgattctcctgcctcagcctcccaagtaggtgggattacaggcacctgccactattcctggctactttttgtatttttagtagagacggggtttcaccattttggccaggctagtcttgaactcctgacctcaagtgatccacctaccttggtaaacgcacatttaaatttatcttttgcaa

SEQ ID NO: 169248 - DNA, 421 bp, Homo sapiens
atacaatgcaaaagataactgtaataatagagaaaacaaattgaggaggggtgtttatgggaactctacttcccatttttcttttcttttttcttttttttttttttcttgagacagggtcttgctctgtcactcaggctggggtgcagtggtgtgatcatggctctctgcagtctcgacctcctcggctcaagcgattctctcacctcagtcttctgagtagctgggactataggcaaccaccaacatgcctagctaatttttttttttttcgaatttttttgtagagatggggtctcactatgtttcccaggctggtctcaaactcctgggctcaagtgatcctcctgcctcascctcccaaagtgctggaattacaggctccacaagacactgtgcctggcctcatttttctataaac

SEQ ID NO: 169249 - DNA, 613 bp, Homo sapiens
tgatatcacatacatgtgcattaagaaaacagcaaccccaggcagtaagcatatgaaaaaatgcaaaatgagtgccaaagatgctatgagagaaggtcaccagtagagcataaggcatcaggggaagcttagggargaaagtgaggcttgatctgaatttggacttgaacctgtagacaaaagattagtagggcaatgtagtatgatatagctgataaccaccatacttctttacaaatattcctttggggttgccagaaaagaaagttggccttgatgacttatgaggcccatctattgtgacctttttaatgtaattataaataatatacatatataataagcttttatatatctgtataaaacatgtgaatatctatatttatacatattatagggatactggctagggtaagttcacatatccttgtatgaatcgtctctattttacagatgagagattccataaagactgttaagaattgatgaagctattgggagataatgctccatgggtctccctcgttctgcacatcttcctgattgacttttgttccagactatcttttcaagggtgttggtgaatagccttggcaaataatatagtgtctct

SEQ ID NO: 169250 - DNA, 613 bp, Homo sapiens
tgatatcacatacatgtgcattaagaaaacagcaaccccaggcagtaagcatatgaaaaaatgcaaaatgagtgccaaagatgctatgagagaaggtcaccagtagagcataaggcatcaggggaagcttagggaggaaagtgaggcttgatctgaatttggacttgaacctgtagacaaaagattagtagggcaatgtagtatgatatagctgataaccaccatacttctttacaaatattcctttggggttgccagaaaagaaarttggccttgatgacttatgaggcccatctattgtgacctttttaatgtaattataaataatatacatatataataagcttttatatatctgtataaaacatgtgaatatctatatttatacatattatagggatactggctagggtaagttcacatatccttgtatgaatcgtctctattttacagatgagagattccataaagactgttaagaattgatgaagctattgggagataatgctccatgggtctccctcgttctgcacatcttcctgattgacttttgttccagactatcttttcaagggtgttggtgaatagccttggcaaataatatagtgtctct

SEQ ID NO: 169251 - DNA, 503 bp, Homo sapiens
ttgcaactacgttttaaagaagcaacagttcaacattatacctcttgctaaaatactaatacaaagtraaatctgggtttgtaggagttttttaaaaagatccaagcaatccgtaacaaacttattttgcataccttgtagtatcaagcacctgagccacaaagtaagtgctccatatatacctgccaaactgtatctagaaacgaagactcttccgggctccggatatagcagcccagacaaatagctaatgggtagcatcctgtcaaaggcacagaactctcccccgaacatccttatgctttgctcgattttaaacacgatatatttatgtgtttgataggcaattataactcatgtaagtatgttatataagtgatttttatactgttataatgaatataataataatggacatttaaaaatgaatagttgggagacatattcctgtcatacattatcaagtctgttggtattcaaagcagaaacaattcaggaattat

SEQ ID NO: 169252 - DNA, 524 bp, Homo sapiens
gggctccggatatagcagcccagacaaatagctaatgggtagcatcctgtcaaaggcacagaactctcccccgaacatccttatgctttgctcgattttaaacacgatatatttatgtgtttgataggcaattataactcatgtaagtatgttatataagtgatttttatactgttataatgaatataataataatggacatttaaaaatgaatagttgggagacatattcctgtcatacattatcaagtctgttggtattcaaagcagaaacaattcaggaattatattattaatgaactacctcaagattaaggccaaggactgagcaaagactgtgctccccgtacctcccaggcatgacacaccaccaatcacctaactagggcctaaaaaggcctaaagtaaccatacactctgctctccaaacaatatagctaagaaaatataygccactagagggcagtcaagatctaactatacattaaaatcttaagttacaagaagctataaggaaaagctaaa

SEQ ID NO: 169253 - DNA, 421 bp, Homo sapiens
gttgccaaaattctaatgactgcatttctttgcaaatgcagaagttatagcactaaatttcataatatagcagagactaaagtgtggtgatgtttttaacactacatcctaccttcttcacttggtataagatgaatttcttggataaactcgatgcttaagtaaagagttgcatcacctagcctggacagcakaggaaaaccctgtctctaaataataataaaaactggctggatgcattggctcatgtgtgtagtcccagctgcgtggggggctgaactggtaggattgcttgaggctggaagtttgaggccagcctgggcaaccacctctaaattttaaaaaagaagaatttcatgtatgaatgtttgagggtagaaagtgttacgtgcagaaagaacattgttttttaggtaaatct

SEQ ID NO: 169254 - DNA, 421 bp, Homo sapiens
gttgccaaaattctaatgactgcatttctttgcaaatgcagaagttatagcactaaatttcataatatagcagagactaaagtgtggtgatgtttttaacactacatcctaccttcttcacttggtataagatgaatttcttggataaactcgatgcttaagtaaagagttgcatcacctagcctggacagcagaggaaaaccctgtctctaaataataataaaaactggctggatgcattggctcatgtgtgtagtcccagctrcgtggggggctgaactggtaggattgcttgaggctggaagtttgaggccagcctgggcaaccacctctaaattttaaaaaagaagaatttcatgtatgaatgtttgagggtagaaagtgttacgtgcagaaagaacattgttttttaggtaaatct

SEQ ID NO: 169255 - DNA, 596 bp, Homo sapiens
tgcacagatcggtgttattctagtgtttgtgcatctagatagttcgatcttgttcttcaggaagtctcagaaacgtatcgtataaacaagacacatcctttaaaatttcagcttggtgatagtctcattgtcccttactcttgcaagttcccaggtaggagtcctcagactccagtttacaagatccccaaacacagggacagctctccaagctctccaagaagtttcaatgcattatcttcttagattcttcagtacattctgaagtgttttgttttgtttgctcgtttgtttgtttaatgggttttrtttttttcaggcttaggagcatctacttgttaatctcaatattttgaaaaatgtttctagattttagtccaattagcccctcatttttctgtgctgcgtagggcctgttcacttagtgtttccaggctttgaatgtaaattccaagagggatgttgtttcatttcctctgtacctccagcacctagaacaatgcttgacacaaagcagggaatcagtatttgttgcataaatttttaaagtgaaggtaatttcttggaatttcttttaatctaaatttttctgtaag

SEQ ID NO: 169256 - DNA, 493 bp, Homo sapiens
acgatgttcaggaggtactctattttactgagttaatttttttcattagaaatgtatatattttcgtagtatattgagattgtttgatcttttactcattaacagatttcctgatatatttttgtctctttggaggaatgaatctccacttggatgaaatgttgctaatgtattgctaaatttgatttataaatactaaatttatattgctaaatttgatttattaatttcattaatatataaacttatataatatttttggatttataagagttcytcttgttttgtgatgtgtgctttgatatcaatgtcactgatactgcttttgtaaaatcagggaagtttccttagttttttggctttggaatacggtcatgtgtcacttactcatgggaacagttctaaggaatacatcttgcaaacatcatggaacttacacaaacctccgtgttatagcctattgcacagctacgctataggggatagcctactg

SEQ ID NO: 169257 - DNA, 433 bp, Homo sapiens
ctcttttctttttttattatactttaagttttagggtacatgtgtacaacgtgcaggttaaatatgtatacatgtgccatgttggtgtgctgcacccattaactcgtcatttaacattagctatatctcctaatgctatccctccccgctcccccyaccccacaacaggccccggggtgtgatgtggaatgctgttttctatgcctggctctcatcctttggatcaggactgtccaatcttctggcttccctgggccatagcagaaaaagaattgtcttgggccacacataaaatacactataatactaacaatagctgatgagctaaattttaaaaatcacacaaagaaatctcataatattttaagaaagtttatgaatttgtgttgggccacattcaaagagctgtcctaggccgcatgtagcccgcagg

SEQ ID NO: 169258 - DNA, 433 bp, Homo sapiens
ctcttttctttttttattatactttaagttttagggtacatgtgtacaacgtgcaggttaaatatgtatacatgtgccatgttggtgtgctgcacccattaactcgtcatttaacattagctatatctcctaatgctatccctccccgctccccctaccccacaacaggccccggggtgtgatgtggaatgctgttttctatgcctggctctcatcctttggatcaggrctgtccaatcttctggcttccctgggccatagcagaaaaagaattgtcttgggccacacataaaatacactataatactaacaatagctgatgagctaaattttaaaaatcacacaaagaaatctcataatattttaagaaagtttatgaatttgtgttgggccacattcaaagagctgtcctaggccgcatgtagcccgcagg

SEQ ID NO: 169259 - DNA, 528 bp, Homo sapiens
taaccttcttgggggtcgttctcctgttttcttcttaatggttgatgtacaatttgaagtatcaaatatcagtgatttccaggatagagcaccttctctgccacttaacattttgtaattggagagtggcagtatttctcggaacaaggattgggctcataagcaaaagtttttagctatgtcttcatttcttctcttcaatttaaactttgcggtgttgctacacttyctctctgtcaatgcagaactggattttgggaatccaggtcccaggtgtttgagaggaccaaaagtataaaaaaatcttggtgctttgagagaatttaaatatagaagtagtgtggaggaatgtgcaggaaagatgggtacaggtttctaatagagggtctataaagctatcgtatccctccaagtgaaaaatatatttgattataatagatatcgtgtaaataacatcgctattagctacagatcatggtacaaacaagaaactagacctttttctgcattgcttttatatgacttttt

SEQ ID NO: 169260 - DNA, 552 bp, Homo sapiens
cttgggggtcgttctcctgttttcttcttaatggttgatgtacaatttgaagtatcaaatatcagtgatttccaggatagagcaccttctctgccacttaacattttgtaattggagagtggcagtatttctcggaacaaggattgggctcataagcaaaagtttttagctatgtcttcatttcttctcttcaatttaaactttgcggtgttgctacacttcctctctgtcaatgcagaactggattttgggaatccaggtcccaggtgtttgagaggaccaaaagtataaaaaaatcttggtgctttgagagaatttaaatatagaagtagtgtggaggaatgtrcaggaaagatgggtacaggtttctaatagagggtctataaagctatcgtatccctccaagtgaaaaatatatttgattataatagatatcgtgtaaataacatcgctattagctacagatcatggtacaaacaagaaactagacctttttctgcattgcttttatatgacttttttaaaaagctgcctttattatattcagggaat

SEQ ID NO: 169261 - DNA, 484 bp, Homo sapiens
tgtagagtgatcccatatttgagtttgatgttcacatgttctgaactatttcaaaatgagtttaggccrggtgcagtggcttaaacctgtaatcccagtactttgggagttagaggtggatggatcatctgaggtcaagagttcaagaccagcctggccaacatggtgaaacgctgtctctattaaaaatataaacattagtggagtgtggtggtgggcacctgtaatcccagctactagggaggctgaggcaggagaattgcttgaacccaggagacagaggttgcagtgagccgacacggtgtcactgcactccagcctgggtgacagagtaagactctgtctcaaaaaaaaaaaaatgtgagcttaaagttcaaaatgttatgtgtcagagaaaggaaaggccaagaacatgcaaaaaaggtgggtgacaagtataaaaacccaaacattggccaggtgcagtgactcgcgcctgtaatcc

SEQ ID NO: 169262 - DNA, 484 bp, Homo sapiens
tgtagagtgatcccatatttgagtttgatgttcacatgttctgaactatttcaaaatgagtttaggccgggtgcagtggcttaaacctgtaatcccagtactttgggagttagaggtggatggatcatctgaggtcaagagttcaagaccagcctggccaacatggtgaaacgctgtctctattaaaaatataaacattagtggagtgtggwggtgggcacctgtaatcccagctactagggaggctgaggcaggagaattgcttgaacccaggagacagaggttgcagtgagccgacacggtgtcactgcactccagcctgggtgacagagtaagactctgtctcaaaaaaaaaaaaatgtgagcttaaagttcaaaatgttatgtgtcagagaaaggaaaggccaagaacatgcaaaaaaggtgggtgacaagtataaaaacccaaacattggccaggtgcagtgactcgcgcctgtaatcc

SEQ ID NO: 169263 - DNA, 541 bp, Homo sapiens
taaaatatacaactgagggtttcaacaacagactagatcaagcataagaaagactttatgaacttgaagacaggtcttttgaaataacccatccagagggagaaaaagaaataaaaataagaaagaaggaaaaaagcctatagaacttatgggatgccactgagcaatggagaaaggcacagaaaacgtttaacaaaataatgactaatcactttccatccagatccaggaagctcaaaggatctcaagagaatcaacccagaaaagtcctttccaaggcacattataatcaaactgtcaaatatcaaagaaaaagaatcctaagagtaatgagagaatagmaccaagtcatatatacttggatttccatttgactatcagcaagtttctcagcagaaaccttgaaggctagggaaatgagatatattcaatgtgctgaaagaacaactgtcagccaagaatactatgtctagcaaagctatccttcagaaatgaaggaaaaatagagtactccacagataagcaaaagcagaatgaattc

SEQ ID NO: 169264 - DNA, 608 bp, Homo sapiens
aatgaaaaccgtttgtgattataaacaacactacattaagcattgtagctattaaatgttyatacaaacataccactaattatagcttaaagataaactcctgatacggaatcgctgcgtcaatgtatatgcatttttcctctacatatgtatctttaacattttgatagacaaagatgatttatctttttgataaccatggaaaagcaatgtcttacttggtgaatttcactgcattcatgggttgtagggaagggttttgagactacgaggacaaaagctttcctgtgaaatatttttccacgtttgtgctgtggaaaacactggtactgtgaagctaccaagaggaacagcagaggagacgagcctccagcacgtacagatgactggcacaggacaaagtccactcaccttgaagccatcaaaggcaaaggcacgttcatctgagccaagctcctgatccggttgacaaccaggacgactccaaccaaccctcatgtctccagcagtgaccgtctcaaattcaaaataccaccgtccggccttcactgcataggtcttctcggcacggaagattcggaacctttccccggtgccgctgcacactt

SEQ ID NO: 169265 - DNA, 608 bp, Homo sapiens
aatgaaaaccgtttgtgattataaacaacactacattaagcattgtagctattaaatgtttatacaaacataccactaattatagcttaaagataaactcctgatacggaatcgctgcgtcaatgtatatgcatttttcctctacatatgtatctttaacattttgatagacaaagatgatttatctttttgataaccatggaaaagcaatgtcttacttggtgaatttcactgcattcatgggttgtagggaagggttttgagactacraggacaaaagctttcctgtgaaatatttttccacgtttgtgctgtggaaaacactggtactgtgaagctaccaagaggaacagcagaggagacgagcctccagcacgtacagatgactggcacaggacaaagtccactcaccttgaagccatcaaaggcaaaggcacgttcatctgagccaagctcctgatccggttgacaaccaggacgactccaaccaaccctcatgtctccagcagtgaccgtctcaaattcaaaataccaccgtccggccttcactgcataggtcttctcggcacggaagattcggaacctttccccggtgccgctgcacactt

SEQ ID NO: 169266 - DNA, 523 bp, Homo sapiens
tgtttcttttcttcaagttgtcttttatttcccctgccctttctttgcagtagagatctatttggattggtcttttgttctctctgttggaatagcaggcttcagtgtgattttggttttgctttcctgcttgttagggagccttagggacamcagtggaagctgctatggcccttaatacctcaaactagtggcatggccttagccaatttcctggtcccatttctaggtactgagaataagtcattttcccccgtccttcatatttactggtagtcttagggatggagaaaacttagttaaagccttagcaactttttattttctggtggcaaggattactgcgcattcccaccctgactgatgagtccaaggatcttcacagacgaaggaagcgccacattcaaatctttgtccagaggctttttatatttaaagtctaatctaaaaataagaatgtgcaacactgggcctctgttctgtctccttcaggatctgtctcagcagggaaatggattaggta

SEQ ID NO: 169267 - DNA, 523 bp, Homo sapiens
tgtttcttttcttcaagttgtcttttatttcccctgccctttctttgcagtagagatctatttggattggtcttttgttctctctgttggaatagcaggcttcagtgtgattttggttttgctttcctgcttgttagggagccttagggacaacagtggaagctgctatggcccttartacctcaaactagtggcatggccttagccaatttcctggtcccatttctaggtactgagaataagtcattttcccccgtccttcatatttactggtagtcttagggatggagaaaacttagttaaagccttagcaactttttattttctggtggcaaggattactgcgcattcccaccctgactgatgagtccaaggatcttcacagacgaaggaagcgccacattcaaatctttgtccagaggctttttatatttaaagtctaatctaaaaataagaatgtgcaacactgggcctctgttctgtctccttcaggatctgtctcagcagggaaatggattaggta

SEQ ID NO: 169268 - DNA, 617 bp, Homo sapiens
tgtttacatgacacatgaagccttcaaaacttgagtatcccagtatttcagctgaaaagacaaaatctgcatcatttttcatgatccatgactgaaagttatagagcatgccttctgatacattctgttggtcacgaattattattaaaacccattcaaatttaaggggatgaggattatacartatttcatgatgaagagtaacaggatactagaaataaaaacatgttcgaggagagataatgttgcagtcatcttgggaaaatgcagtctgccaaagtattatattgaaaattaaagaaatgtatgttcaaagatacgctaaatgttggcaagaatagtgttattttgtgaagcaattcaaagcacacaaattgttgaatgtgagaaagataatttgaaatatagcattatatgtatacatgctataaaaatcacagaagtttgatattggtattgaaatgaatagatagagggaataaacagaaattataaaaatttgaagaaatagatagtagtatgtagtgtcagtaactactgacgtgaatttagcattatataataaatatgattttgtaattcatattatacacagccacatacaaacacacaaatag

SEQ ID NO: 169269 - DNA, 566 bp, Homo sapiens
tttatgctcaaaaatatagagtaaaaacaaaataaccaaacaaggataataattttattttaaaaagttttaaaaagtctaaatgttttgtattttaaaataattccaaatcaacttttaaaaaccagaaatcccaaataatttgagcaattctatcaagtagtattatatccacagaagttagtcattattttccctattatttgcccaaaatatctggtctttctcacaaacattcaacttttcagtattctcaattttgttttattttaaatgatatatcactgcacccttgcccagctttgtaagtgttgggtgaagaaacatctttctaaagtcaaaatttcaggctataacaattcatacaatattttggaacatttagaccatttacatttgatgtgattattgacatcacagattaaatagctattactagtagcttctctgacttgacaaataagttgcttcaaaaagaagattaaaatrttattatatttctatacaatgtttaaaatcaggtattcaaaaaagataagaactatttactttcaaaaaatataaat

SEQ ID NO: 169270 - DNA, 610 bp, Homo sapiens
tatgtaccatcttacataattgtgatatgcttgtgattgttatactgaacattttattcattgaaatatattcaaatgagtgatgatattattaagcagctgtcttctggtttttgttataaaaaaaaactatatgtggaggacacattttgttctttcccagccttcaccttaaaattccatactcttcatatcttcaaattggtataatagtggaaaaatatacatatttacactttataaaattgttgtgtcaattaatgtatttattttctgagcaaatatttggcatttatttttctctcaatgtatctcagaatagatgatgtaaatttgtagagcctcaactcataagaaaacagttatttttacatacaaaacaaactgttttatgctccccacaggtatgttggattttctttgtaattaattttgccaattttgatgaaaaatccttaaaattttattttcatatttatttattttatctattttaaaatcataataakgattagattatattgttacttctcatgctgctctctaaggatttttccatatgaaaaattgaatagtttgacaataacatcattcctaatttgcaacacta

SEQ ID NO: 169271 - DNA, 605 bp, Homo sapiens
tcttgttgcccaggctggagtgcaatggcatgatttcggctcactgcaacgtccacttcctgggttttcaagcgattctcctgactcggcctcccaagtagctgagattacaggcatgcgccaccatacccagctaattttgtatttttagtagacacrgggtttctacatgttggtcagcctgggagatcacattttaacatgagttttggaggggacgaatatccaaactgtagcagatatattttaaagtcatcatttttgtgaccctcaaaaaattttgttttcattttttggtgtgacagaatgataatttttgttttcctctggtgttaatggtcatctaaccctgttaaggtaagaactttaatatagtaatccttgcaaggtatatatgaacaaaataattgtgtacttgccttacgggaaattcattctgaagaaatgggaatatccaagcttttctatatggaggaatgccatgatccaccatcacgatcatgcttccctgagaaagggaaagaaaatgatatcttagactctgaccacaagaggtaagaagatgaggcagttagctctggaagattgaggaaagattcaggtga

SEQ ID NO: 169272 - DNA, 622 bp, Homo sapiens
tttccctgtctctttacttttcgcctagtgtatgtgtttatattcgatcactgcacaatacttgatgagaatcctttgtctttccctagaattccctctcttgtagaattttcctctacagcattctgttctgaatgcccttgtcaccttggtctccctactttctcacctctgtctgtttctcagttacactattgggctaagctgaggctcctgcttgctgtaccacattctggaaagtctctcatgttaataagatgggaaaatcattcggttaacattgtttgtttcctgtctctgagagatgactgtatttttttgcttgatgtccagtgtcctgaaaagctgtgtttagtctgttttctctaaattttagttttttttccrgttgaaatgtaaatacagttcatgtttctacattggttagcaagcaaaagaggcttgagacccaatacaatagaagcaatatcatgacattgggttttctagaaaagaaattgttttaatttcaagtcaactcacaaggagacaagagtcaagcttaaatctgtctccttgtgctggtatcaaggcagaatttttatttgaaaaaaaaattcagggactggattctgaaactcgt

SEQ ID NO: 169273 - DNA, 424 bp, Homo sapiens
ccttgtgacacttcccaactgaattcttaggatcaagaggtatttatctccccatgccctccaagagaaagtgtgggtcttaaaacgcatgagttgagagagccagaggtgtcacacatgggtggcagagcagcgacccaggacctgtgactcctgacagttgtcacagatgcaacatcctctcaaaacatgtctaaccttgaaatggctaggagcacatgttcatccatagcatgaataatatgcaagacgcacatgggtgaacaaagcaagaccatcacatgccccatggtcacytgttagctgggagagactttattatggcccaacaagacctttataattgtaaatccctggcgccccctcatggcccttacagtcctgtggcttctgctgaggggcagtgggggaaaggtgcctggag

SEQ ID NO: 169274 - DNA, 424 bp, Homo sapiens
ccttgtgacacttcccaactgaattcttaggatcaagaggtatttatctccccatgccctccaagagaaagtgtgggtcttaaaacgcatgagttgagagagccagaggtgtcacacatgggtggcagagcagcgacccaggacctgtgactcctgacagttgtcacagatgcaacatcctctcaaaacatgtctaaccttgaaatggctaggagcacatgttcatccatagcatgaataatatgcaagacgcacatgggtgaacaaagcaagaccatcacatgccccatggtcacttgttagctgrgagagactttattatggcccaacaagacctttataattgtaaatccctggcgccccctcatggcccttacagtcctgtggcttctgctgaggggcagtgggggaaaggtgcctggag

SEQ ID NO: 169275 - DNA, 424 bp, Homo sapiens
ccttgtgacacttcccaactgaattcttaggatcaagaggtatttatctccccatgccctccaagagaaagtgtgggtcttaaaacgcatgagttgagagagccagaggtgtcacacatgggtggcagagcagcgacccaggacctgtgactcctgacagttgtcacagatgcaacatcctctcaaaacatgtctaaccttgaaatggctaggagcacatgttcatccatagcatgaataatatgcaagacgcacatgggtgaacaaagcaagaccatcacatgccccatggtcacttgttagctgggagrgactttattatggcccaacaagacctttataattgtaaatccctggcgccccctcatggcccttacagtcctgtggcttctgctgaggggcagtgggggaaaggtgcctggag

SEQ ID NO: 169276 - DNA, 562 bp, Homo sapiens
agatcttaacaatcggagagatttctgtgaatgtgcagtagtctaatccagggtttctcaacctcaacactatcaacattttgggtgggataattcttcactgtgggaggctgtcctgtacatataggatgtttagcagcgtccctgacctctacccactgaatgccagtagcacctcccaatgtgacaaccaaaatytctccagatattgccaaatgtcccctagggggaaaatcacctctagttgagaacgactggtctaattcttagccatattggagttcctaatgaaagtcagaaatactttttctagaatcacatacataggaagctaaccttctgccgttttcattcatttcaggggattagcaggccaaaaaagcctatccctggacctccatgacctgaagtcctccatctttgtcgtgccatgccctccttggagcctcgtgacaccacctcaaatggtgtcttaaaatatgtaaaacaaaatacatagaattgcaaaggaaatcagctagattgaaatatagtttttaaaatatactgaaaatcgatcata

SEQ ID NO: 169277 - DNA, 448 bp, Homo sapiens
tgaaatcagaaagcatgagggccagcatcaaggagggcatgacatgtggtcacsagctgttggatgcatcctcttgtttctccatagcagcccaaccccctcattcctctgacagcttcagactggacatctactgggaatccagaaggttcactcatgaagacagtggcagcagatccagggcaagatcaatccagatcattctttaaattaaggcattcaaaggtcatctgcaatttcactttgctttcccaatcttcagcagacgtgttgctcattttacatataaaggaaagggttttgtgttttgatgcccccaactacacgtttgaattgtatgagcactgatggtgatttgaaagttgttcctatcaaaagggagagctcaaatcagctccctctgctcaagcaaattagtgatggggtcagtatggccctggctcagctc

SEQ ID NO: 169278 - DNA, 452 bp, Homo sapiens
gtaagacttgaaatcagaaagcatgagggccagcatcaaggagggcatgacatgtggtcaccagctgttggatgcatcctcttgtttctccatagcagcccaaccccctcattcctctgacagcttcagactggacatctaytgggaatccagaaggttcactcatgaagacagtggcagcagatccagggcaagatcaatccagatcattctttaaattaaggcattcaaaggtcatctgcaatttcactttgctttcccaatcttcagcagacgtgttgctcattttacatataaaggaaagggttttgtgttttgatgcccccaactacacgtttgaattgtatgagcactgatggtgatttgaaagttgttcctatcaaaagggagagctcaaatcagctccctctgctcaagcaaattagtgatggggtcagtatggccctggctca

SEQ ID NO: 169279 - DNA, 450 bp, Homo sapiens
aagacttgaaatcagaaagcatgagggccagcatcaaggagggcatgacatgtggtcaccagctgttggatgcatcctcttgtttctccatagcagcccaaccccctcattcctctgacagcttcagactggacatctactgggaatccagaaggttcactcatgaagacagtggcagcagatccagggcaagatcaatccagatcattctttaaattaaggcattcaaaggtcatctgcaatttcactttgctttcccaatcttcagcagacgtgttgctcattttacrtataaaggaaagggttttgtgttttgatgcccccaactacacgtttgaattgtatgagcactgatggtgatttgaaagttgttcctatcaaaagggagagctcaaatcagctccctctgctcaagcaaattagtgatggggtcagtatggccctggctca

SEQ ID NO: 169280 - DNA, 580 bp, Homo sapiens
ttggcaaacactgggagctgcctcttctgagcagggagctcagggagcttgtcaggacgtgcaggaggaggtcggggaggcagcagcagaaatgggctcagccctgtgggctccttgggtccagggccactgaacaggttgtcctgtaggaagtccttggtgacccttgtcttgtccagcacattcttgttgtcagggaccttggatgtctcagtggacttcagtgggaactgggacagaagcttgctgacttscaagttggagtcacctaggatgcggcccctgtcctctgtccccttgctgctcttgacctcagcggcacacagaatgtctgtgacagtagaagtggcagaatcacagtcctgcctgctgctgataacgggcatggccaccttctgcttcagaagcttgtctccgacaatgatggaggctctggggcgctcattactgcctgccactagaggaggggcaagaatgcagggagccagctctctggtcccctcgggagagctgccgggtacctccagctccccagaactctcttcgaccaggatcgagtgctctttggtgaggcttagga

SEQ ID NO: 169281 - DNA, 472 bp, Homo sapiens
caaacactgggagctgcctcttctgagcagggagctcagggagcttgtcaggacgtgcaggaggaggtcggggaggcagcagcagaaatgggctcagccctgtgggctccttgggtccagggccactgaacaggttgtcctgtaggaagtccttggtgacccttgtcttgtccagcacattcttgttgtcagggaccttggatgtctcagtggacttcagtgggaactgggacagaagcttgctgacttccaagttggagtcacctaggatgcggcccctgtcctctgtccccttgctgctcttgacctcrgcggcacacagaatgtctgtgacagtagaagtggcagaatcacagtcctgcctgctgctgataacgggcatggccaccttctgcttcagaagcttgtctccgacaatgatggaggctctggggcgctcattactgcctgccactagaggaggggcaagaat

SEQ ID NO: 169282 - DNA, 320 bp, Homo sapiens
cacacttaataacttttaccagmagtggaacagcttctgaacataaagaacgataatcatctccaccaaactgtgccatgacacccaggccataagcagcagcttgcctgacttcagggttgttatctcgcatatttagtagcattggccaccgaaaatattctacatatttaaatgaagttggactgcagtgctctatgatgtcatcaaatatgcacaatccccactgtctgtctggccatggcctacttgaacaaattagatttacaattaatggaagtagttgttcaaaccatggtaaaatcttttccttataagta

SEQ ID NO: 169283 - DNA, 548 bp, Homo sapiens
agatcttcatagtcaaagaatttcccaaagagggatgacagctgaggtcttacagcaggttggggaacctgttcctggtagttgaacaggatggcacggcacagcccccagtcttaaaataagaaccacttgttcttattttaagatgatgtatttttgagttactgatggcttgaaagtggtactcaatcagttttaatgctttcagttgcaagtaacagaacatccaacttaaaggaaaggggcaagcttgcaggaaaggatctttaagtcatctacatttgggtataaatgacagccacagagtatttaccctttttgggacgtaattttatcaggagaccaaagcttttwgctaaaaacataaatttcaaacattaggacagtcattttacagaaacaaaataaataatttcaaagaaactattaccttcttaaagactagactgcgattgtgaacccctgaagtatccacagatcctgaagagtgcccagctgtcttgacaaggaaacggagagtcaagaagtttagtgaggtcaacaagaat

SEQ ID NO: 169284 - DNA, 484 bp, Homo sapiens
tttcacaataatgtgactatacttaacattactgaactagacacctaaaaatggctaattttttcaaaaaatggtactggaacaactggacatccacatgcagaaaatgaatctagaaacagactttacactcttccccaaaattaattcaaaatagatcatagactgaaatgtaaaatgtraaatgtaaaactacactactcctagaagataacataggagaaaacctaggtggcctgggctatggtcatgactttttagatacaacaccaaaggcacaatccatgaaataaataattgatttgctggatttcattaaagtttagaactgctcagcaaaagacaatgtcaaaagaatgagaatacaaccatagacagggagaaaatatatgcaaaagatataactgataaaggactgttacccaaaatatacaaagaactcttagaactcaacaaggaaacaaacaacttgattaaaaaatag

SEQ ID NO: 169285 - DNA, 313 bp, Homo sapiens
actcctagaagataacataggagaaaacctaggtggcctgggctatggtcatgactttttagatacaacaccaaaggcacaatccatgaaataaataattgatttgctggatttcattaaagtttagaactgctcagcaaaagacaatgtcaaaagaatgagaatacaaccatagacwgggagaaaatatatgcaaaagatataactgataaaggactgttacccaaaatatacaaagaactcttagaactcaacaaggaaacaaacaacttgattaaaaaatagacaaagacctgaaagatatctcaccaaa

SEQ ID NO: 169286 - DNA, 552 bp, Homo sapiens
aagatacttgcacatccatgtttatagcagcacaatctgcaattgcaaaaatatggaaccagcctaaatgyccatcaatcaatgagtggataaagaaaatggatatgtatatatatatatatatacacacacacacacacacacacacacaccatggaacactacccaaccataaaaagaaatgaaataatggcatttgcagcaacctggatggagttggagaccattattctaagtgaaataactcaggaatgaaaaatcaaacatcgtatgttctcacttgcatgtgggagctaagctataaggacgcaaaggtataagaatgacataatggactctggggattcagggggaaggatgggagggggataaaagattacacattgggtacagtgtacactgctcaggtgatggatgcaccaaaatctcagaaatcactactaaagaacttatccatgtaaccgaacaccacctgctccccaaaaactactgaaataaaaagtaaaactcaaactgaaaaaaaggaaaggggaaactttgacactggcatgc

SEQ ID NO: 169287 - DNA, 524 bp, Homo sapiens
tggactaacatgaaaatcaaaaatcccaaaataaaatccaaatctaaatgaaagtggtaagtaaaaacagggaaaaaaaatctctgtaggtttaatagcaagcatggatttacttcaaacatgcaatgctgcatggttccccagatctgaaaaatctccccagcatcatttcctaagtacaccccgatctgtcagctatggtatcaagcagcgcttctcaggctctgctatgtgtgtaaatcacccagggatctggataaagcgcagatccgcattcagtaggtggggtggcgggcagcctgagcctctgcattgctaacgagctccctggtgacactgctgctggtcaggcacaatgccctgagtgccaggggatagagcttaaaaggcccaagcagcgtgttccaggcctgattggaaacatgagctccactccaatccttgagctgggtttgtcggaataacaatctggatattacmtgagagtcttggatcccactaatttgtacccactcctggaattc

SEQ ID NO: 169288 - DNA, 544 bp, Homo sapiens
attgggtaaacaaggcacggcataaagaccctgggtgacagagaagaagccaaaaaaaaaaaaaaaagaaagaaaggttaaaaagaattgggaataaatctcacccacttcctggttctgctcagttccagcacagtggtggatctgaagcggaataataattggataaactaatcatcctttcactgtgtcatctgctaatgtgttacctcccactgtcttgcgtgtctcatcagcttctccttctgccctacgcagaaaacttctgcctagaaccaatcagaatgtgcactttactttaaaaatgacatmaatacaggaataaggtactgcgacaaaacagcaagggacacaatttggtgggaggtaaggacttttcaacaggcctctcaaatcactacatttttgtgacagtttgtttcattatacataaaacggggttggatagttttattccatttgtgtcctatagagcctagttacagtctcttcattcattcattcattcatcaaatacgtactgagtacccaccatatgccagga

SEQ ID NO: 169289 - DNA, 544 bp, Homo sapiens
attgggtaaacaaggcacggcataaagaccctgggtgacagagaagaagccaaaaaaaaaaaaaaaagaaagaaaggttaaaaagaattgggaataaatctcacccacttcctggttctgctcagttccagcacagtggtggatctgaagcggaataataattggataaactaatcatcctttcactgtgtcatctgctaatgtgttacctcccactgtcttgcgtgtctcatcagcttctccttctgccctacgcagaaaacttctgcctagaaccaatcagaatgtgcactttactttaaaaatgacatcaatacaggaataaggtactgcgacaaaacagcaagggacacaatttggtgggaggtaaggacttttcaacaggcctctyaaatcactacatttttgtgacagtttgtttcattatacataaaacggggttggatagttttattccatttgtgtcctatagagcctagttacagtctcttcattcattcattcattcatcaaatacgtactgagtacccaccatatgccagga

SEQ ID NO: 169290 - DNA, 655 bp, Homo sapiens
ttttttcctaaactgcacttacggaaaccaagacccaccatttgaagggctaatgctttgctgctgtcagtgattttttttttctttttaccctgcctgccgacttggtaagctgaaacaaaaaccaattactctctaagatcaaaatcttcagrtgcctcaagagctgttttaatttggttttagaattatgggctggctttctccctcgcctgttcatgtcagatgtggccaaattaaaaacactgccaagtaatggaaagttatttaaacctttctcttgtaactgttccatatttacattttaaatgaccattttctggctagccacaaacacatttcttttaaaatggaatgccctatggctcattttgagctatttttctcaccctctttattgacctctgtccctttatctctttctattggaagcctgaacctcaatttcgtaaacatgttaaaaataaaaactgaccccatttgcaatgaggtcatgttggtgaatttattctcagattacatcatgattgaaacagttcttgttcactctatgatatgattagaattcaagtgtggccaagcttaaaactcttggtttccatagtggtcaaagtagagctcttaagctatgctactccttcccccatcccagctg

SEQ ID NO: 169291 - DNA, 513 bp, Homo sapiens
atccccacagacacacccaggaacagtactttgcatccttcaatccaatcaggttgacactcaatattacacaatgggcaatttctattgttctctatttagaacaatattatttctattgttctatattttttccactttttttcctgtctcctccgttttgctgttaagctcatctattgtgtgtatgttcatgtgtgtgttttattgtggttatacttttcagttctaaaatttccatttggttcctttttatatcttctawtttttttgctcagactttctatttgatgaggcttctttattttgtttcaattgtgttcacaatttttcattttttagaatggctatttaaaatctttataatgtaattccaattatctgtcatctcagtgttggtatctattcatttttaaacattctattgagaactccctggttcttggtatgatgaatgagttttttcattgaaatttgtacgctttggaagttatgttatatagcgtagtctta

SEQ ID NO: 169292 - DNA, 513 bp, Homo sapiens
atccccacagacacacccaggaacagtactttgcatccttcaatccaatcaggttgacactcaatattacacaatgggcaatttctattgttctctatttagaacaatattatttctattgttctatattttttccactttttttcctgtctcctccgttttgctgttaagctcatctattgtgtgtatgttcatgtgtgtgttttattgtggttatacttttcagttctaaaatttccatttggttcctttttatatcttctaatwtttttgctcagactttctatttgatgaggcttctttattttgtttcaattgtgttcacaatttttcattttttagaatggctatttaaaatctttataatgtaattccaattatctgtcatctcagtgttggtatctattcatttttaaacattctattgagaactccctggttcttggtatgatgaatgagttttttcattgaaatttgtacgctttggaagttatgttatatagcgtagtctta

SEQ ID NO: 169293 - DNA, 513 bp, Homo sapiens
atccccacagacacacccaggaacagtactttgcatccttcaatccaatcaggttgacactcaatattacacaatgggcaatttctattgttctctatttagaacaatattatttctattgttctatattttttccactttttttcctgtctcctccgttttgctgttaagctcatctattgtgtgtatgttcatgtgtgtgttttattgtggttatacttttcagttctaaaatttccatttggttcctttttatatcttctaatttttttgctcagactttctatttgatgaggcttctttattttgtttcaattgtgttcacaatttttcrttttttagaatggctatttaaaatctttataatgtaattccaattatctgtcatctcagtgttggtatctattcatttttaaacattctattgagaactccctggttcttggtatgatgaatgagttttttcattgaaatttgtacgctttggaagttatgttatatagcgtagtctta

SEQ ID NO: 169294 - DNA, 570 bp, Homo sapiens
tttttgtcagcagactcacaggcagyagcatgcagccagcctatggttctgacctgggctgtgcacccaggacccatccaagggagccccccacagaggggatggtcatcttgttcctggtcaccgtgtagcttcttgcttgtgggatgtgaattgttcagcctttctggtggcatgaatccaaacacagcaggaagtgttgttgacaacacagcccattccctgttcagccagcggcaccgtcttctgcagccaaccgtccagtctaccatgactgtccgagggagagtggagtggcctctgctgacccggggcttgtgctgtcttctggacttcctcagctctcgcctctggggaatgggctttgacttctgggaacaggactcactgtggtgtgtagcccagcgttgctgagaggcatgattccgtgccatctggagtccctgtattggcctgaagcatggggtccggagtgaggcagactgggggctgccatgtaccctctaagcgcataactttctccttttctcatcccgcagattcatcagtctcccatttggtagagccgag

SEQ ID NO: 169295 - DNA, 570 bp, Homo sapiens
tttttgtcagcagactcacaggcagtagcatgcagccagcctatggttctgacctgggctgtgcacccaggacccatccaagggagccccccacagaggggatggtcatcttgttcctggtcaccgtgtagcttcttgcttgtgggatgtgaattgttcagcctttctggtggcatgaatccaaacacagcaggaagtgttgttgacaacacagcccattccctgttcagccagcggcaccgtcttctgcagccaaccgtccagtctaccatgactgtccgagggagagtggagtggcctctgctgacccggggcttgtgctgtcttctggacttcctcagctctcgcctctggggaatgggctttgacttctgggaayaggactcactgtggtgtgtagcccagcgttgctgagaggcatgattccgtgccatctggagtccctgtattggcctgaagcatggggtccggagtgaggcagactgggggctgccatgtaccctctaagcgcataactttctccttttctcatcccgcagattcatcagtctcccatttggtagagccgag
